United States Patent Application Publication US 2026/0103690 A1 - sequence listing, part 96

SEQ ID NO: 476298 - protein, 429 aa, unidentified
MNVEDRSRLEAFRQLKKGIRRSETHLIVGIDIAKIKHHAFFGTATGKTLLRRLIFTNDADGFNKLLTYVDAVKTKHMLEKVVFGLEPTANYYKPLGEYLINCGFDVVLVSGKAVTNNREMMDNRWDKNDTKDSANIADLVSQGKFMYYDYPVLPLRDLRNLLSLKRRLKKQEHGLKVRIRNNLLAQYFPELDGHYGQSESVGLPVVRWCLSPTAIAGMRYEQFEDMLFPGGRIKMTQQERLKRIWKTAGHSIGCQVGEALGFEAHMMVDWLKRMRDAIRVTDEKIKEVCLYFPEYNYLLTIPGFGPDVASRVLAAIGNPYRFENHRQVLKMAGWDLSASRSGKNSNAITPVISKKGKAELRYALYQAALIASTRNQVFVMYYTNKLRGRERERGIKTKMRVKLAAKLLVIAWTLMKKKEPFNPDFLNMD

SEQ ID NO: 476299 - protein, 314 aa, unidentified
MNTQGMVAGIDVSKDWLDVALGAESLRVANEAVGVSSLIERLQAMNVELVVMEATGGYETQAASAIAGAGLRLAVVNPRQVRDFAKATGRFAKSDRIDAQVIAAFGQAIEPQIVRLPDEQTRELQGLLLRRSQLLGMRVQETNRLALMQGPMRKQIKSHIGWLDRAIDEVNTDLTARLRQSPAWREKDELLRSLKGIGPITSGTLMTSLPELGELDRRSIAALVGVAPFNRDSGAFRGRRAIWGGRAHVRHVLYMAAIAAIRSNPVIKAFYERLIARGKPHKVAVVACMRKMLTILNAMMRSKTPWTPTFHGAN

SEQ ID NO: 476300 - protein, 351 aa, unidentified
MIIIGCDFHTRYQQIATAEETTGELLLERRLDHQSGEAHAFYRSLQGPVRVGIEATGPIHWFESLLGELGHQLWIGDSAKIRASEVRKQKTDERDARLILDLLLAKRFPKIWVPTPAERDIRQLLWHRHKLVGLRTMLGNQLHALALSQGLCRKKKLFSKKGRTELGNLMLGPWAGRRRAKLLELLDQVDPPIAELDRAVLEEAQRREDAVLLMTHPGIGPVTALAFVLAIGPVTRFPRSKKVASYLGLNPSEESSGGRRRLGAISKQGNTMVRWLLIETVHHAVRQDPELRQDYQRLKFRRGHAVAKVAIARKLAVRMYWMLRSGADYAQLVRRQGSPGGTLMNASSSLA

SEQ ID NO: 476301 - protein, 317 aa, unidentified
MRKTLLADPVFIGADVSKGWIDIADTQGRKARVANDYGAIDAAFAGVWSHCANLVCEATGGYERALMRVAIDRGLPLRRVHPNRARAFGQATSRLAKTDILDAQMLARFAAFTVNEPPAPLPGQAAQALADMVSRLTQLTDLRQSESCRAQLAAGAAIKKSVDAVLSVLTRQIEAMQQAIDAFIAAALTLSRNRAILRSCKGVGPKSAQAILAMLPEIGHLNRRKIAALVGVAPITKASGSSINHASITGGRKALRDILFMAALTASKHNPVFKSFYERLRANGKPHKLALLAVLRKLVTTLNAMISSRQTFKLALT

SEQ ID NO: 476302 - protein, 421 aa, unidentified
MNAWNEVTHFAGFDWAKDHHDVLVLDNAGKIVAELRFEHTAAGWSLCQQKLAAFPHLAIAVESGHGAAIERLMVLGYRVYPVHPRSSKSYRTRKLPSGTKTDHIDCWALADALRLEGESWHVLNTPEPLVQRLRLLCRDEVALIEQRTALINQLQQALYEYYPAALAAFDDWTSLSAWAFVARFPTPQALVKAGKRQWEKFLHTQKLYHPEWYQKRLAIFAKADEFCGPEAVTAAKSVLATALVKLLQTLELQLASYRLLITECFKQHPDYHVFASLPGAGPKLAPRLLAELVALQPLADQPQVLQCLAGMAPVSYQSGKVSVVYLRRQCNRFLRATLHLWVDLSRHYCDWARIYYEAHKKKGQSHACALRCLGMRWLKILAAMIRSHTPYDAALHARSQLQHGSWVLQLQPKLSITKDAS

SEQ ID NO: 476303 - protein, 294 aa, unidentified
MDHFAGLDVSVKETSVCIVDDTGRIVREVKVASEPKALLVVLTNPTHHFKRIGLEAGPLSQWLYSALVEAGLPVICVETRHMRAVLKAQINKTDRNDARGIAQMMRVGLYRPVHVKTLRSQKLRMLLTHRKLLQAKAIAIENDLRSTLRNFGLKVGMVGKVKFEGRIKELVENLPDLAILVEPLLIVRRVLHEQLGILHRRLLEIVRNDDVCRRLMTVPGVGPVVALTYRATVDVPARFKNSKAVGASFGLTPSRHQSGEIDRPGAISRCGDEMMRVMLYEAAQVMLTRTNKWS

SEQ ID NO: 476304 - protein, 414 aa, unidentified
MDVLYPRCAGLDVHKDTVVAAVRSAANGPANTEVRTFDTTTPGLLALSGWLAECGCTHVAMEATGVYWKPVWHILSDGDVTLILANAAHVKNVPGRKTDVADAAWLADLLAHGLVRASFVPEAPTQAMRALLRTRKQLVREQASHAQRIQKTLEDANLKLASVLTQVMGKSGRAIIGALIAGERDPDALLRLVQRGVKAPPERLRAALTGRVTEHHRFLLRLHLRQIDALEAAIAEIDQEVDRDLDPFRQAVRLLRTIPGLSDLTAQVIVSEIGLDMSRFPTAGHLISWAGLCPRNDESAGKRRSTRLRKGAPWLKTTLVQCAWAGTRKKGSYLQAQFQRLRHRRGPKKAVCAVAASILTAAYHMLRDGTFYQDLGPDHLRRATPEAQACRLARQITKLGFTCTIAPADTRVSV

SEQ ID NO: 476305 - protein, 445 aa, unidentified
MLLNLLKFKAMKKIREHAAGIDIGANNFFVSIDGEEVKVFFTYTDDIKLLRNYLLENKIETVAMEATGVYWVVLYEMLEEAGFDVWLIDGRETKQVPGRKTDVKDCQWIQQLHSYGLLNRCYVSDSDTKELKSYVRLREDHIRSASMHINHMQKALTQMNIRLKEVLSQIHGKSGLAIIKAILEGERDRDKLVDLCHVSILKKKRDLVYKALEGNYTKSGLFALKQAFQGYMFYQQQIDECDIMINSIINKLGNNGENPKVKEKPQKEVKRKRIRHNSPKVDNLGQNLLNIFGGKDATKISGITDYTWLQLYSETGSDLSRWPSEKHFTSWLGLSPGQNHSGKKRRNAKKKGHPPVGQIFRTIAQSLINSKYTALGSFGRRLRARKGSSIAIKATARKLAELYWRVMVKGLDYAEMGVKKYEEQLQVQKMKIFKKMAKDLNVLIT

SEQ ID NO: 476306 - protein, 405 aa, unidentified
MFYAGIDWSDTHHDALVIDDAGRQVNAPIRVAHSPQGLDKLHAFLESIAGPEGYENMACIVETSHGLLIAFLLEQGWPVYPVHPTTVDRRRAASGAKTDSIDAYLLAKTGRADFTELRRLTPDSDQVAELKALTRDQDALIQMQTRLVNQLTACLKAYYPVALTLFAKLQQRSTLLFLQAYPTPQQARAATPEQIAQLLKQARHPRAEQTASEIVETVHQPQLEAHEITTRTKSRLALALIAQLLPLVEQIAAYDKDITQLFLSHADSTIFESLPRAGKRLAPRLLAEIGDDRQRYADATKLQALAGTAPVIFQSGTYTRVHRRYACVKPLRNALHQFAWQTTQTEAWALEYYQRKRKEGKSHTVAVRALANVWVRVIYAMWQKSEPYQSAVFEAAQQQHARRAA

SEQ ID NO: 476307 - protein, 422 aa, unidentified
MLTQTQDDEQIIARVAALDIGKAELVCCVRVPDEDRPGRRLQEVETYPAMTRPLLAMADRLRCLGVTRVVMEATSDYWKPVFYLLEAHGFETWLVNARDVKHLPGRPKTDKLDAVWLAKVAERQMIRPSFVPPPQIRQLRDVTRYRADLVAARTAEKQRAEKLLEDACIKLSVVVSDIFGVSGRQMLAALIGGQRDPKALAALARGVMRAKITALQEAFTGFFTEHHAFLLARMLARVDAIDADIAALDERIGQMIAPHEGAAQRLAEIPGINLTAACAILAEIGTSMDRFPTAGHLVSWAKFAPGVKESAGKKKGKGTTGHGNRYLARVLGNAAASAGRTDTFLGERYRRIARRRGGKKAIVATGRSMLVIIWHLLADPDARYADLGSSFYDTRINPERRKRNHIRQLEALGYKVILEPAA

SEQ ID NO: 476308 - protein, 409 aa, unidentified
MPTTFECLTGPVAGIDTHTDTHTVAIISDTGRHIATDTFPATNLGYKAISEFIATSGVTTVGVEGTSSYGAGLTRYLRTQKYTIVEVLRPTRTVRRRDGKSDPVDAVAAARQVLTGEALSIPKDTSGPVESLRGLQITRRQIVMTAAKLMTTIKSLLVTAPDEIRCRYSAMSTLVMVESLSRCRPSADLADPRNGVLFALKTLASTYRDLQEQATQIEEHISILVEIINPHVTSIFGCGSVVAADLIVSVGDNPSRIHSEAALAHLCGVAPIPASSGRTHRHRLNRGGDRRANAALHRIALVRMHHEQRTRDYVTKRTKEGLSKKEILRCLKRAIAREVYRVLCQNQTATSSGQIGVAELKARRVERQLSQAQIAEKLGCKPARISDIETGKRPLPQLRTAYEQLLNPA

SEQ ID NO: 476309 - protein, 321 aa, unidentified
MDIWVGIDVSMETLDFGWTTTTGKKHFKVANSDDGFREALSKTPQDAKFVMEATGTYYLNLAFFLDERGHFLSVVNPLCTKSHMRTELRRAKSDKTDALALSRFGHEKQPERWVAMSPEVLQMRQLLGVCDSLKETIIAFGNKIHAMEQCVHSSSYAIGVLEGVRDQLETQLKEAQASLNELATKTMSRTIEIIDSLPGIGRETAVRMAILVGDFNRFSNCRKLVSFCGLSPTIAQSGTSVHSKGTISRMGGHKIRSMLYVCTWSTLRHNEQSKAVWKRMKENGKPGKVIIMALMNKMLRQMHSMVIHDTMYNPNFLAQAA

SEQ ID NO: 476310 - protein, 412 aa, unidentified
MKQIRDKVGGLDVHRDNVVACTRVAMPDGSVEVAKERFSTTQSGLAELTAFLMDAGVDTVAMEATGVYWRTVYYALEGLFEELWLCNAQHVKNVPGRKSDLSDAEWLADVAAHGMVRPSFVPPPDIRELRELTRYRKTQVDARAKEIQRLEKCLQDAGVKLTSVASTVWSKSSRAMIEAMIAGERDSVVLANLAKGPMRKKTDRLTEALESNFGPHHAVLCRQIIDHLDFLDGSIATLSEEICARLVPFEPQVALLTSIPGVSATTAQVIVAETGADMSRFPTAGHLCAWAGVAPASHESAGKKRPAGTRHGSPWLRRTLIEAARAAVRTKGSYYSALYSRIARRRGPNKAAVAVAHSMLETAWHLLSTGALYEDPGADYFERRHDPSVEAKRLQRRIEALGFAVTISEKAA

SEQ ID NO: 476311 - protein, 353 aa, unidentified
MRYAGIDVASQTHVVAVVDDAEQVLVRPTPFAEDAAGYASLFERLGPAQDVIVAMEATGHYWRNLAVDLLARGFPVALINPLRTHRFAGEDLRRTKTDAIDALGVARFARQKRPAPTRLPDSATEELKELVRLRDRLVQDFGDRVRQLHRLVDLGFPEFTRFVKTLDSELATALLHEHPTAQAFVGVSVKRLSKLCYDGRHKVGRELAHDLVRAAESSVGRHHAEVYRTQVRFACEDLDVLRRRLRRLSDEIEATLETHEVGKLLTSIEGVGPQTAARLVAELGDIAQFKDAGAIASYVGIVPGLKLSGLKTGTRAAIVGVGNVRLRTALWMPVLTAVRKNPWLRAFYERLRA

SEQ ID NO: 476312 - protein, 339 aa, unidentified
MQITTIGLDLAKHWFQVHGVDAGGKVVVKRRLRRSEVVAFFKALGPCLVGMEACATAHHWARELIALGHEVKLMPPAYVKAYVKRNKNDAADAEAICEAVTRPSMRFVPVKDADQQAVLMMHRARNLLVRQRTMLVNALRAHLAEFGIIAPQGLRHVEQLIAAIEAESAALPELARSILRLIVAQLNDTQAKIRQVEAKLARWHRNSRLSRLLATIPGVGIMGASAIAATVCDPNLFRSGREFSAKLLGRKRTAGANQQTRRQIYPLSARGWSGRHSAACAHARDEGRRMGARHAGAKAGESRRRRARQSNRPHRLGGDETGRRLQSQRDRRAGGLNRP

SEQ ID NO: 476313 - protein, 322 aa, unidentified
MDTLGIDISKRDFHAALLNNERTAKKSFPNSTKGFEQLSAWLRNRKVDKVTACMEATGSYWYALAKYLFNDGHAVAVINPRRIKAFAESELLRTKTDAVDAGLIARFAATQQFQLWKPLAPEIEELQGLYRHLEFLKESRTQHVTREQTPGLPERVRQSTQALIVQLDIQIDDLERAIRDHIDRHPGLKIKHDLLTSIPGIGDTSATAILSEMPAIEEFRSAQAVAAYAGLSPLIRQSGSSVRGKPRLCKTGNARLRKALYFPAIVGERYNPTLQAFGRRLRAAGKATMVVIGAMMRKLLVIAYGVLKSGKPFNPIFVAQKT

SEQ ID NO: 476314 - protein, 419 aa, unidentified
MTDLSIAHSEPILAAIDISKARHEVLIAVPGKKRRRRLTVLNQLDEFNRLTATLTGYDRPVRVAFEATGNYHRALAFHLGAAGFEIKLVSSVALARTREALHNSWDKNDPKDAQVILHMMQIGNEQFYHDPLMQGTNDIQELSKTHDIISKSKTELWHRVLTHYLPLYFPEADRFHRSSRSDWFLAFLERYPSPHFIASMGKEAFIADAWETVGRRVSKERLLADVYETASVSVGLPVEPDSDAIRMFRMILGEGRSLIAQRNKIEDRAVELLKGNPDYQLLTTIPGIGPINALTILAEAGNLRRFNHHRQFLKFCGMDLATIQSGTFRGQTKLSKYGNARLRRTLWLAGQVAILQRANSFRDKFERYISKDRQNTHLRRKAYTAIAAKMARTAHAVVKSGEPYRPFFEGASNGRRTFL

SEQ ID NO: 476315 - protein, 334 aa, unidentified
MKYNYYVGCDVSKNELDFAVYKKDAFVFHREIENNGKSIDAFFKELKQLPDYKASSTVICMEHTGIYNNPLLEYLHKKKANICLESAMQIKNSQGNLRGKNDKIDAIRIAEYAYTFRDKIKLWQPKREVIQQLARFSSDRTRLLTAQKMLQTPLNESKIFASSKLHKVSNECFANTLKSIKKDLEKIDIAINEVIKSDEELSRLFGIITSVAGIGTVTAIGIIVTTNEFKDINDSKKYACYAGVAPFVRESGIFRGKGRVSTLANKAMKSLLHMASLSAIKCNESIKAYYERKVAEGKNKMSVLNAVRNKLIHCIFTCVNQNRKYEKTYTSSLV

SEQ ID NO: 476316 - protein, 345 aa, unidentified
MGQVIRIGMDTSKYIFQLHGVDASEQVVLRKRLSRKAMLEFFAKLPPTVVVIEACGAAHYMARELGKLGHTVKLIAPQLVKPYVSRNKNDGRDAEGLCEAASRPRMRYVPVKTAEQQAALMLLGVRDQLVARRTQLSNTIRGYAAEFGLIEAKGLDKLISFMAAIERNERVPVLARELFAMLARQYDQVQVELKAIEAKLLTWHRGDALSRRLAQIPGIGPVTAAALVMKAPDPHAFRSGRLFAAWLGLTPKDHSTAGKTRLGKITRAGDERLRQLLVVGATSVVKQAKAKGRGPGWLIELLKRKPPKLAAVALANKMARIAWKLMTTGESYDSARIDVQMAVAA

SEQ ID NO: 476317 - protein, 450 aa, unidentified
MGNASGISRGDRNRNARLARLRALVPLENAIVGVDLADKKQMVVVCDHDSKVLARRTFRCRAWDLGKALDWAADRAKAKGFAGVTVSCEPTGHRWRVLGQLGADRGMPFVCVQTLQTAWARRSEDLTFDKTDDKDAVLIARLTAQLRCYVPEPVDEIWGRLRHLGARRERLIVEQVAQVQQIRALLECVWPAALDTARQPFRSKTWAAAMTVICDRDGADFERTRRLGLARFDRAVRREILKRGGQKPTLRIVRALFAALSDPVGVLAHRHGALERVQLLLEDWHDTRRKLADTEQRMTTVLDELALTELVTTIPGLSPVGAAAILAETGNPARFATSRALVKHAGLAPRENSSGKFTGRTKLTGQGRPLLRLAAWRAVWGIQRANPVYAARYRHLTGRESNKLTATQAQAVIAAAILRQLHAVITTGRAWDPDVATHGTRHRGARLAAA

SEQ ID NO: 476318 - protein, 403 aa, unidentified
MYAVGIDVSKGRSTVAVLEPLGKTVAKPFEVRHTKSGMNDLVNYLNTLDGECRIVLEHTGRYYEPMVRWLSGAGLFVSAVNPKLIKDFDNNSLRRVKTDKADAKKIGRFALDKWYMLRQYTAMDNIRTQLKTMNRQMSFYQKQQTAYKNNLIALMDETYPGANKFFTSPKRPDGSEKWVDFIEKFWHVDCVCNISLKSFTEKYQKWCKKHGYIFQPDKPAEIYNASKELIPILAKDDMTKLFVQQAVTQLNAISKAVEELRQQMDSLASQLPEYPAVMSMFGVGTTLGPQLIAEIGDVHKFTKRSQLTAFAGVDPGVNESGDYAQKSVHTTKHGSPYLRKTLFLIMNVLIQNQPEDDPVYRFMAKKRDEGKPYYVYMTAGANKFLRIYFGKVKEYLSNLHLEE

SEQ ID NO: 476319 - protein, 396 aa, unidentified
MNKIVHYIGLDVHKETIAVSIAPQNSTEVRRYGIIGGTLDAVDKLLKKLAQENTELRFAYEAGPCGFVLCRHLRNKGIHCEVIAPSLIPKRASDRVKTDRRDADQLARLYRAGELTAVHVPDQEDEAIRDLVRARTSAMTDQRQARNRLKGFLLRLGFRYTGKSSWNDAHKRYLSGLVMPQPPQQIAFQEYIHAINDATARLERLAQAVEAALPGWKWEPVVRALMSLRGVQILTAMTLVAEVGDLSRFADPRSLMHFFGLTPSEHSSSDKRVQGGITRCGNAHCRRVLTEAAWHYRLTPKVSEAIQKRQEGQSKEVQLIAWKAQQRLHKRFKQLSARKKSVVAATAVARELAAFVWAIACQVKPAQRPPAPEIIRTCRGKVYRLDPEKRFQKKNK

SEQ ID NO: 476320 - protein, 343 aa, unidentified
MYYLGIDCHKYFSYVTALDETGQVKFKGKMGNRKDDFERLLNGLGERCKATVETGYDWGIIYDMLTEMGVEVILAHAKKIKLITMNPQKTDKRDSLILAQLLRTNMIPRVYAPTREMRRNKAVLRERQFYTKIRTMTKNKVHKLLHHNGIKMNGYSDAFGKSGRRYMEEAELPKTEKFLLDNELDMLDVITSKIKAVEKSAVEITKENRYVELIRTIPGLGVVLSRTIALEIADIARFSKAKKLASYSGLVPREHSSSDHIYRGSLIKDCNKHLKEALIEGAWVAIRCSAYFESIYTNVKSRRGGNKAIVAVARQMAEIIYYMLKENRSYVERYTADNKMAAL

SEQ ID NO: 476321 - protein, 409 aa, unidentified
MQVMHPRCAGLDVHKKSVVACVLISLPEGVVQKHTQTFGTMTPELLALSDWLQGHGVTHVAMESTGVYWRPIYQVLEGRFTLLVGNAQHIHRMPGRKTDLTDAEWLADLLRHGLIAPSFVPAQPQRELRELTRHRSNVAGRRAQCVNEMHRTLEGTNIKLSSVATDLTGVSATAMLEHLVAGETNPDLLAELARGLLRKKIPQLRQALQGVVRPHQQLILSQLLADLAACDEQIGTLDAEIDLRLTAEREVLERLDEIPGVNRKVAEVIIAELGTDMKRFGSASRAAAWSGMCPANRQSGGRRYRAPSRFGNTHLKSALTEAGRAAGRSKDTYLGAQYRRLATRRGSKRAALAVGHSILTISYHMMDRGTRFHDLGADYFDRRNPERVRDRLVQRLEKLGYKVSLEKTT

SEQ ID NO: 476322 - protein, 354 aa, unidentified
MKRTTKYVGLDVHQATTVASVREENGRVIARTILATEEPALVEFFGGMRGSIQVAFEEGTQAQWLHDLLSPQLDHVVVCDRRGQRRQGNHGDQVDADRLSDELRRGGLRAVYHGSAERLALKEFARTYQNLVEDSTRVMQRLKALFRARGIKTSGKHVYHPQERVEWLAKLPDRAVRFRAAALYAELDVLRELRPKAKAAMVAEARRDPAWPVLLGIPFFGPVRVSLLLAIMRTPWRFRTKRNLWAYCGLAVVTYSSSEYTLVDGRPRRRRRAPMTRGLNRNHNRVLKDIFKGAATAAATRPGPLQDFYLEMTARGMREELARVTLTRKLAALTLRLWKTGEHYDPAKLTMQAR

SEQ ID NO: 476323 - protein, 314 aa, unidentified
MPGPCFVGIDVAKATLEVAWTTEPAGTWRTTNDDGGWAEVVTKLQPLTPSLVVLEATGGYETGVAAALALAGLRVAVVNPRQVRDFARASGILAKTDQLDAHVLAEFAARMQPPPRPIADDLQADLTAFVTRRRQLVDMLVAERNRAHQARPAVQESIQAHIRWLEARVRETERDLTTRIQQSPLWRVRDRLLQSAPGIGPRTSARLIASLPELGQLTGRQIAKLVGIAPLNCDSGTRENPRRIWGGRAAVRHGLYMATVVALRHNPVIRTFYCRLRTAGKAPKVALVAAMRKLLLILNAMIKHQTAWRDGCDA

SEQ ID NO: 476324 - protein, 430 aa, unidentified
MKSNTQNAKIEAITEKTLVLGIDVGSETHYARAFDYRGIEYSKKPFKFSNTEAGFVTFKEWILDLKERHEKDKVVPGMEPTGHYWFNLGKFLQDNEMKPVLVNPHHVKKSKELDDNNPTKNDRKDPKVIAGLVREGRYMIPYLPDGVYADLRTASNIRFQLQAELTRIQNRISRWFNIYFPEYKTVYGKPDAKSGILILKAAPLPEDILTLGIDGVNQIWRDAKLRAVGKARAKTLIEAAEHSVGSKEGAVAARMEIRMLLEDYESRNIRLQEVMTLIEGVVKQIPMAEKLLEIKGVGIRTVSGFLAEVGDISRFNNPKELQKLAGLALVENSSGKHKGETTISRRGRKRLRYLLFEVAMSLVSKNQEFRELHNYYTTRRLNPLKKMQSLMAIAAKLIRVFYAMLTKGVDYDPKKMVSDIKRPAVYLQAA

SEQ ID NO: 476325 - protein, 348 aa, unidentified
MVHFVGLDVSVKETSVCVVDDAGKVIFEQKVLTEPADIIALLTSLGVSFGRIGIEAGPLSQWLVNALTAADLPVICVETRHMKALLTAQQINKTDRNDARGIAQMMRVGLFKPVHVKTLVAQEQRMLLTSRKLLQRKLLDVESDLRGTLRNFGLRVGVVSSFRYEGRVRELVAGFPRLAAIVEPLLSVRRVMRQQLAVLHKMLLDTVRGDPVCRRLMTAPGVGAVVALTYRATVDQPQRFVHSRAVGAHVGLTPKRYQSGETDYEGGVSKCGDALLRTMLYEAAHVLLTRSGKWSWLKAWGVRVAQRRGMRRAIVAVARRLAVVLHRMWVDGSEFRWSKDSTAVPAVA

SEQ ID NO: 476326 - protein, 342 aa, unidentified
MQISTIGLDIAKNVFQVHAIDAAEKVVARKPLRRSQVIAYFKALPPCLVGMEACASAHHWARELTKLGHEVRLMPAKDVKAYVKRNKNDAADAEAICEAVRRPTMRFVRVKSAEQQGHLMQHRTRDLLIRQRTQLINAMRSHLAELGIVAAQGREGLKELLEFIAAPDDDQLPINARASLMVLAAQLQALQTFIGSIEKRIMAQHRANEASRRLETIPGIGHLGASTIAAVVTDPKAFRTGRDFAAWIGLVPRQNSTGGKQKLGPISKQGDRYLRRILVVGAHSVLRRARQQPEKYPWLTQLLARRPFKVVAVALANKMARIAWALLAKGGTYQAPRLAVAA

SEQ ID NO: 476327 - protein, 400 aa, unidentified
MQVVHPVCCGIDVHAKMLVACLILANGEKQKRTFSTMTAELLQLRDWLVAVQCTHVAIESTGVYWKPVFNILEDALTVILINPEHAQALRGRKTDVKDAEWLADLLRHGLLQPSFIPPPVIRELRELTRYRESVIREQSSVANRIQKLLESGNLKLGQVASDALGVSGRMILKAVAKGESDPRKLAALARGKLKEKSLSLEQALQGRLTVNQRFVLGELLSRWEQLEAADARVTSEIDKYVQANPKLARARELLDSIPGIGPRVAEVIMAEIGIEMAAVFADAAHLASWAGICPGNKATGGKRLSGRTRKGNTYLRSALVQAAWGASLKKHCYLSSQFHRLVKRLGRKKALVAVGHSLLVIIFHVLQNDQTYTELGGDYFDRRHVEQQRDYYVRRYKCSA

SEQ ID NO: 476328 - protein, 411 aa, unidentified
MEAIYKRCCGLDVHKEIVVACLVIREGGKVVKEIRTFLTMTSDLVVLHDWLQAHQVTHVAMESTGIYWRPVFNLLEGSFTVLLVNAAHIKTVPGRKTDVKDCEWIADLLSHGLLRGSFIPPEPIRDLRDLTRYRKSLTDERVREVNRLQKFLEGANIKLSSVATDVMGASGRAMLEALVSGSTDPQVLSELAKGRLRKKLPELKKALEGRFRPHHRFMVAEILTHLDFLDEAIERVSQEVTYRIAPFSSKVELLDLVPGIDQRVAEGILSEIGGDMSCFPTAGHLASWAGLCPGNNESAGKRKSGKTRKGNQWLRRYLTEAAWAATRKKGSYLSALYHRLVVRRGKKKAVVAVAHRLLVIVYHMLKDQASYRELGSDHFDKLNAAYVQRHHVKRLESLGFKVTLEPLSLAA

SEQ ID NO: 476329 - protein, 420 aa, unidentified
MKHLIGRELPAKTLVVAIDCGKATHRVMLATGEQGVIGEPVSLPTLREGVEELARLILAVDSGGLPVIAVEATGSLHHAWVAELERRFPGSLRLFAPSETQAARTGLGSRRTKTDDRDCAALITLARQGLGRPPEGATVAAMLGAVRHRRALVGVRKVTQQRLHDQLNVLCPGLSAPVGHGRALALEDTSGQAVLACAVEFAGRAAAPRSLIARAPGRLTKANASYWSARWAALLPPPPDAELRARRLGGDLERWRSLARDIAAVEGQIAALLAATPGQVLTSLPGVAQTRAAAFAAHALPIERFPSPAHLYSATGLAPATYESATLRRRGRISRAGLAEFRDALMGIAWGLSQNSPAFASRDRALRDRGMAPIQARVALARHACRLCFALLKRQEPFDEERYVRMRHDAGGDGVFRYAA

SEQ ID NO: 476330 - protein, 352 aa, unidentified
MTSIIYVGMDVHTTNYTLCCYSMEDDRFFVEVQVEPDAKNILKYLARIEKQQSRDCRIVCGYEAGCLGYSLYHQLHAHGIDCVILAPTTMMTKPGKRIKTERRDARLISKCLAFHTYSPVYIPTEVDDAVKEYIRMRDDANSALARVKQQIIAFCIRHGKIHDGKSYWTNKHLEWLSSLDLGNKILSEVLQEYLIRYYQLREQVDMYDMRINELAQAEPYRQKVEKLGCFRGIAAHTALSFCVEVGDFRRFATAQQFASYLGLVPGECSSGDKQQYTGITKAGNSHLRKLLVETAQVFGRSATKSGKSVALKERQAKCDSLTVAYADKANARLKKKYFKVTPHKYKIYFSRQ

SEQ ID NO: 476331 - protein, 356 aa, unidentified
MSEKLNSKIAVIGIDIGKNSFHIVGQDRRGALVLRQKWSRGQVEARLANLPPCLIGMEACTGAHHLSRKLQALGHDVRLMPAKYVRPYCKGDKNDYRDAEAIAEAVQRPTMKFVATKTADQLDLQALHRVRERLVSQRTGIINQIRAFLLERGIAVRQGLRFLRAELPDILAKRTDVLSPRMLRIIEDLSGDWRRLDERIEGLSSEIEALARQDQGCARLMSVPGIGPLISTAIVAAIGTGDPFSKGRDFGAWLGLVPKQMSTGDRTILGNISRRGNRYLRTLFVQAAWVVLVKVGPKQWERYGLKSWIEAAKKRLHHNVLAIALANKLARIAWAVLHNGRPFEHVMTNATASRSA

SEQ ID NO: 476332 - protein, 363 aa, unidentified
MRFYKNLHQFYIGIDLHARTMYICVINNIGETVFHKNMECSRDNLELVTNTFGKDIVVGVECIFTWYWVADFCAEQGIDFALGHAYYMKSIHGGKTKSDKIDSEKIANLLRGGMFPIAYAYPKAKRAVRDLLRRRLFFVRQRAELSVHLQNTNHQYNINEPLTSSRMRSEVYRNTIPQKFTDPATLKMVNADLAMFQAYHDIITKLEFQIEDCMEVQDPVSYSIINSVPGLGFILSLTILYEIDDIHRFSDVGKFISYCRLVKCSHESAGKKEKGGHNKIGNVHLKWAFSEGAVLFLRNNERGQRWHDKLVQRYGKAKAMSIIAQKLGRTVYYMLKRKEAFNPDKFYGDKKIENKDSGGEHLA

SEQ ID NO: 476333 - protein, 441 aa, unidentified
MWLSLALKSKYIGGFLMMNTSNTYPLHPKMTRTYAGVDSHRDSHTIVILNCFHERLGEITIGSAPSEFSKFLKRAKKYLQPDTTWAFGFEDTSAYGRSFVKYLVEKGYHVKHVEASKVATERGQTLHKSDSYDAECACRVLINQFDSLPDATPQDKYWILTNLVTRRNALVKINVMVKNSLHGAIAEAYPHYKKFFSCVTRDSALAFYEAYPSPHHLDNVTIETLANFLHAASKGRLSQAKAQIILNHVKRDNVPKLQHQQAQDFTVKSLVRQVKNNLAELSGIDLEIEKMIAHFNYPLTSIKGIDNITCAKLIAEIGDIRRFKSAKQLAKYSGVAPVTYASGMTNLQRANARGNRKLNEIFFKIALTSVTPIGKNNVLVNPICYEYFQKKLSEGKTKNQALKAVQRRLVNIVFSVMKHQRPYNCPDIAYLHDYKNVASAA

SEQ ID NO: 476334 - protein, 525 aa, unidentified
MLRGTVAADISFAVIHKRAERPAQARRRELVNNCAAGENFAGGRPAPARSQSQSPHPKRVIGRLLAEPAALAPTSHRKRPQEGHYISAMDGRAKRRKSQQQQQKTMNDSKQWQQHRAFGALDWASEKHSVIVVDQVGKVSEDFEIEHSALGWKKFRQKLQPYGSIPFAIETSQGVAVEQLLEAGMLVYPLNPKSAQAYRERKAPSGVKDDRLDAWSFADALRVDGQDWKALRPEEPLIKELRLLCRDEVTLIEQRTAFINQLRHALAEYYPAALEAFEDWTSVSAWMFLQRFPTPELLAQAGKRQWQKFLHSRRLWGSDQGPRRMEIFAHASEFAGSAPTVKAKSLLALSLVQMLFSIEKQLALYRQRIEELFARHPDHDLFGSLPGAGPKIAPRLLSEIGDDRERFGGDPQNLQCLAGSAPVTKRSGKQRKYWHVHQRWACDKHLRHAIHLFAEQSLSRCVWAEIYYQHHRQKNQSHANALRRLAHRWLKIIYKMWIDRTPYNAELHHRNQLQHGSWIFQLQKS

SEQ ID NO: 476335 - protein, 456 aa, unidentified
MEMLFERVAGLDVGKASVTVCVRVPGLRQGSRSSVTRTFKTTMGPLRVMRDWLVECGATVAAMESTSTYWKPPFYCLEEVMEVWLLNAAHMKAVPGRKTDVRDAEWIAQLLEHGLLSPSFVPSPPIRRLRMLTRYRVQLMGDRTREAVRLELMLEDASIKLPTVAWSVTPVSARVMLRAMIDGERDARVLAGMAKGKMRSKIPDLAQALEGHFDDHHARMAGAISDRLELVEHALADLDVAIRAQCLPWAHQIESLQTIPGVEEKVAQVIVAETGADMTWFGSAAKLAAWAGVAPGFYESAGKRTPTGKRQRNKWLTAMLVEAAGSVGRMHGKNYPAAQHARLSKRRGPGRAQLAVAHSMLVAVYHMLSKNESYRDLGADWLARRHDEAHTRRLVAQLERLGHTVQLDSVASLQSPKNVSGKARRADVPAHQQMIHGSVTAAILLPRERGVECIST

SEQ ID NO: 476336 - protein, 419 aa, unidentified
MHIQCWGGTLFMMYNAVGIDASKGKSTVSIIRPAGVVVKRPYDVMHTASGLNDLISYIQSLEGETKAVVECTGRYHEPVLKVFSEANIFISAVNPKLIKGQNDNTLRHVKSDPADSRKIARYALDNWAELRQYSSMDTTREQLKTLNAQFDFFMKQKVAAKANLISLLDNTYPGVNKLFKSPAREDGSEKWVDFAYSFWHVDCVRKIGLKAFTERYKSFCKKHKYNFRTGKAQELFELSQELVAVFPKDKTYKMIIQQSILQLNLASEHLEKLRKEMDDLASTLPEYETVMSMYGVGKTYGPQLIAELGDISRFTHREAITAYAGVDPGVDESGQRKRKSNAASKCGPSRLRKTLFQLMSTILQNKPANDPVYQFLDRKRSEGKNYYVYMTAGANKFLRIYYGKVKAHYRELEAQSQEQ

SEQ ID NO: 476337 - protein, 452 aa, unidentified
MAKKGKRRCDTLPVLHPDAAGIDVGASELFVAVSADRDPHPVRSFPTFTRDLHGLADWLEQCGIHSVAMESTSVYWIPIYQILEARGLEVYLVNAQHVKNVPGRKTDVSDCQWLQYLHSVGLLRASFRPPGFICAIRSLWRHRSSLIQMAAEHVLHMQKALDQMNLQIHRVLNDITGVSGLKILDAILAGERDPLTLARLCHGGVKNSEDTIAKSLEGDYRPEHLFALRQSLAAYHYYQKLVLEVDQEIKLQLGELQTAATAEKSTPARTKASAYQRRRYEPKTFDLRGELYRIFGVDLTNVPGISAITAQTILCEIGTDVSRFRNASAFASWLGLCPEKKVSGGKVLFTKSRRVRSRVATALRMGAQSLHHAKDYLGEFFRRITRKLGRPQAITATAHKLARIIYHLLGTKEAYNESVFHKSEADTIRRAEYRLRRQAAQLGFQVIPAENG

SEQ ID NO: 476338 - protein, 334 aa, unidentified
MLYAAIDIHKHALQAAVLDPEGGEVVEARFSADRESLARWAEEWHGRVAAVAIEATTGWRWVWRELSARGFDVRLAEPVQARALLGRRRSAKTDRLDARWLGRLLAKEMLPQSWIPPEEIQRLRDRTRLRKTLAEDQRRWGQRLHAFLLHEGWPCAKSRLLTPEGMRWVVALRLDAHARLQVDSLLAVIAALEVQLDTVDGELRRFARTDARCQALQSIYGIGPILACHLLAEIGEACRFRRAKQITRLAGLDPVVDESGETRRRGHLAKAGSPQLRWALVEAAVHANRPNAPDLELYQAVRDRRDTTVARLSVARKIGKRAYHVLRELELDAA

SEQ ID NO: 476339 - protein, 366 aa, unidentified
MKKTSTVRINGNVIFKGHKLTTGLDLGDRWSNYCVLDEAGEVLVEQKLATTPEAMKQTFEKIPRSLIALETGTHSPWLSRLLKELGHEVLVAHAQKVELITKSNRKDDRHDARTLARLARIDPELLGPVRHRSAKAQIHLTVIRARAELVRARTALVNATRGLAKSYGERLPKCGTEQVSREVAAKLSAELREVLEPLLNEIESLNERIKEYDARMEKIARESYPQVALLKQVKGVGTQIALTYVLTLDDPHRFAKSREVGCFLGLKPGRRDSGQSQPQMHISKEGDRYLRTMLVQGAHYILGPFGEDSDLRRWGLRLAERGGKNAKKRAVVAVARKLAVLLHRLWVSGEVYEPLRNSHKAMRAVA

SEQ ID NO: 476340 - protein, 347 aa, unidentified
MRFYTKQHPFYCGIDLHARTMYVCILDQAGETRLHRNMPATPEALLKAIAPYREQIVLAAECMFTWYWLADLCAEHGIPFVLGHALYMKAIHGGKAKNDKIDSQKIAALLRGGMLPQAYVYPAEMRATRDLLRRRMHLARKRGELLAHVQNTNSQYNLPAIGKKIAYKANRDGVAERFADPAVQKSIAVDLALITYYDELLRDVELTIVQTAKHHDAQTLYLLHTVPGIGKILSLVLLYEIHDIARFPRVQDFASYCRLVKCARESAGKRSGTSGTKIGNAHLKWAFSEAAVLFLRDNPAAQKLLARLEKKHSKGKALTILAHKLARAVYYMLKRQTAFDLDTFLQG

SEQ ID NO: 476341 - protein, 346 aa, unidentified
MEHYVGLDVSLKLTAICIVDQTGKIQREGVVHSDPEAIAAFIKSNAPHVTRIGLETGATSTWLWTELNKLGLPVICIDARHAKAALKMQINKSDRNDAAGIARIMQCGWYKEVRVKDLDSHAVKALLVSRALLVKIKRDIENQIRGLLKNLGLVIGRAKMNMFAVRAAQLAEDRSELLAAVDPLLKAREAVEQQILNLDRKVLRLARNSAQVRRFMTAPGIGPVTALCFLATIDDPVRFKRSRSVGAYAGLTTRRYASGEIDWTGRISKCGDKMLRSYLYEAANVLLTRVAKWSALKAWGVRLAKRSGLRKAKVAVARKLAVILHRMWIEGTEFKSSSKEAADQPA

SEQ ID NO: 476342 - protein, 432 aa, unidentified
MSNNHLHVGIDFGQNTTHFCLLLPDGQPLELHQAFANSLTGYAAAKQLMLEALTTHPLDGLDISGEATGYYWLPFFLQLAADPELEPYAPELFLLNPRWVHWFKKCFAQDDKSDQKDPYYIAERLRTRRPAVAWTPQLDTLPLRFYTRLRFHLIEALVREKCYVSAFLFLQASAYQRLKPFADVFAVTSRWTIGHLPSLDDLAALPVETLAAQLDAISRHRLPDPVHNAHLLQQVAAERFPLPAALTQPIQRILDLGLEHIAYLERQVQSVEQWIATEVEARPAIAKLRTIPGVGPVFAAGLGAEIGDIQHFLQGTKWDAPRKAFRPKNLRDAEDAVAKTAGLWWPRTNSGDFEAEDRRLAKTGNRYLRYYFVQAADKMRQHIPEYATFYARKYREVAKHQHKRALVLTARKSVGLIVGLLHRNEAYRPQET

SEQ ID NO: 476343 - protein, 339 aa, unidentified
MEVKRISIDTSKHTFTIHGVDLQERPILQRDIKRTQLEPFFAKLEPTEVALEACAGSHHWGRLLSRLGHRVKLIPPQYVKPFVKRSKNDRTDAEAIGEAASRPTMRTVPLKTVAEQAATIVVKHREMLVAQRTQAINALRGHAAEFGTIAAKGCTNVTALLAVLAADEVIPHSARAMFEQMGQHVADLDSKIEALDRQLLDQHKINPVSRRLATIPGVGPITAITLALTVDSGNFESGRHLAAWLGLIPREHSTAGKHRLGQISKAGNERLRQLLVVGAMAVIRVAKPGRPSASGWLLQLLERKPRKLAAVALANKMARIVWAIMAHGEAYRRQPATAA

SEQ ID NO: 476344 - protein, 338 aa, unidentified
MRKFIGIDLHSNNSVVVITDEEDRVVYQKRLPNDPEVIEAALAPHREEAVGVVVESTYNWYWLIDGLMDRGYQVHLAHTTAIKKYEGLKYSGDFADAAYLAQLLRLGLLPEGYIYPREQRAARDLARKRMQLVRQCTAQVLAIEGILMRQTGARKSSNAIKRLSAEQVEELALVPDAALAVQANRAVSEVLQQQIEVLEQRLKERVSLSPEHRLLRTVPGIGEVLATVIMLEAGPVARFAEVGNFASYCRCVDTQRESNGKKKGEGNGKNGNKYLAWAFVEAANFALRYCPQAKSFYERKKRKTNDVVAIKALAHKLAQACYHMLREQKPFEVNRCFT

SEQ ID NO: 476345 - protein, 455 aa, unidentified
MKNNKRSKRISKHLEHVNLFAAGIDIGSQSHYVSVPDDLSRAPVREFSCFTADLNRMADWLVEIGIQTVAMESTGVYWIPIYEILEERGLIVLLVNSRHIKNVPGRKTDVLDCQWIQQLHTYGLLEGAFRPDDEIVTLRSYMRQRETLGQQVSDQIRRMQKALRQMNLLLDNVVSDIDGLTGMKIIRAILEGERDPIVLAKYRHGRCQKDEKTIAASLQGHYREEHLFALRQSVELYDIFQSKIVDCDKAIQAQLDKMDTKGNKKDLPPSKKTNNKNTPKFDVRGELYRITGVDLTRINGLNENSILKILSETGIDISSWPTEKHFCSWLTLCPGNKVTGGKILSGKTTPSANRAAAAFRLAAFGLLNSKSALGAYCRRQRTRLGAPKAITATAHKLARTFYSMLKNGTEYVDQGQDYYEKQYQQRVLHNLKRRASEMGFELIVKDPLVLEKSIT

SEQ ID NO: 476346 - protein, 413 aa, unidentified
MDPLHKNCAGLDVHKRNIVACVRTQRGAKVSNEVKTFGTNTDDLVDLFDWLASLEVEEVVMESTGVYWKPVWKVLECGFKLHLANAHEVKNVPGRKTDVKDAQWLAELMAHGLLRPSYVPDLDQQELRELTRTARMLARERARYKQRIQKHLEACNIKLGNVISNVMGKSGRRIIEALADGKIIDPAELADLSEGSIYANKWLALAKSLKGTLRPHDRFMLASELRMYDAMQKELDQIRARIEEVLPRPFDEAVEWLVAIPGFSRETATEVLAQIGTDMSHFPSADHLVSWACLCPKADSTAGKARSTRTRKGSSWLKPILIQTAWSAVRTKNSRLCRYFNGIKRRRGPKKAIVATAAKLLRIIYALLRDGVIYEERVASEDIKEQERRQRRQLLRLHRQAKALGYSLSPAVI

SEQ ID NO: 476347 - protein, 370 aa, unidentified
MKKNSKNSKSPTRSTKTKLRKTDPVTIGMDLGDKTSRYCVLNAAGEVLLEGSCATTKAGMAQMFGAMPHCRMAIEVGAHSPWVSRTLKRLGHEVIVANARQVKLISQSSRKNDKLDAQMLARLARVDPALLRPIRHRSEEAQKDLMTIRIRAALVESRTGLVNAARGLAKSTGERLAACDADQMEVEKLEQLPADLRETLKLLVEEVESLTEKIKECDRKIEQIARDRYPETKLLRQVSGVGPLIALTYILTIEDKQRFPKSRDVGCYVGLRPKQNESGERQPELRITKEGDVYLRKLLVQGAHCIMAKRAPDTDLKRWGTKLAGRGGKNARKRAIVAVARKLAILLHRLWATGEVYEPLRNSQARAKAA

SEQ ID NO: 476348 - protein, 306 aa, unidentified
MAVLYVAFELSNTKWKLAFSDGSKVRHSTVEAGDFELLQVGLSSVKKHFGMFEDVRVVSCYEAGRDGFWLHRYLQSCGIENVVVDSASIEVDRRKRRMKTDGLDAGRLVRMLMRYYGGERKLWSVVRVPSFEDEDGRHLHRELEGLKKERTRHRNRIRGILIQQGLRVNNPSYRKFVEQLDSLRTWDGRELPVDMKRRLAREYRRMRLVEEQIKASEKEKKQRLKEPNTVKLRQVAQLRSLYGIGTVSSWAFVMEFFGWREFRNRREIAALAGLAPTPYESGGTVREQGISKAGSRRIQTLAVEIA

SEQ ID NO: 476349 - protein, 396 aa, unidentified
MTVVVAIDVGKNEFAVSVTDAARRRLLKPRLGCPMTAPSVREVVGRISRLLPTGAVVKVGIEAAGHYHLPLLAAAVWPTGWELLELNPAHVTEQRKVLGKRTIKTDVIDLEAMTELLLAGRGLPVTATEAVLVELTAWSAHRTRRIQIRSGLKNQLLGQLDRSFPGLTLALPDVLGTKVGRLVAAEFADPTRLVALGSSRLIRFGATRGVQIRKPIADKLLDAARDALPMPDAAIARQVLAADLALASDLDRQVAQAEVELARLLPLSPFRTLTSVPGWAVVRAGNYAGALGDPARFSNPRQVYRSAGLNPIQYESAGKRHDTRISREGSVELRRALIDLGMGLWLNEPAATARAVELRARGKKGGVIACAMAHRANRIAFAMVRDQAIYDPSRWT

SEQ ID NO: 476350 - protein, 364 aa, unidentified
MKETKRKPSARYVGIDLGKRTYEAAFVSSGAVTRSNGRTCSAGRRTLYSRLKPTDKVALEAGNMAFIIAKEIQAAVGCTVYVLNPSNLALIYGSMKKTDKEDSLKLAHIIEDFQEERLPVVPVPGEQEMNRRKILGSYRRVQQERGREINKLHALFLAQGITTVVKKDLGTGEQRKETIKILTGLEREEAEYVVSCLALHEQRIERLKRQIKEESAGDELIQRLQEVPGVGPLVAFAFTAHVAAERFEDASQVSNYLGLVPRVYISGESVRHGRITKRGNGYLRALLVQAAWATVNMRQGGKLKERYEYMTIEKSKSKKQAIVAVARRIAELLYTLMRDGSRYESKPFKREKKVEELVQLAMSA

SEQ ID NO: 476351 - protein, 348 aa, unidentified
MRFYTNSHKYSCGIDLHTKMMYVCILDSDANILIHKNIPTNGKRFLKLIAPYRDDLVVGAECMFAWYWLADLCAEEGIEFILGHALYMRCIHGGKAKNDKIDSEKIARIIHGRNFPLAYAYPAKLRPIRDLMRRRSHLVHIKSEMLSHITITNYQYNLTPFEKNIVHKSNRDGLADHFQNPSVRLNVETDIAIVDALHMQITQLENYIMKHTRNYDARMLYRLRTVPGVGKVLALIIMYEVLSIDRFPTVQKFCTYSRLVKCASESAGKKSGHSGSKIGNAHLKWAFSEVAILFIRGNEPAKHYIEKLTKKFGKGKALSILAHKLGRAIYFMMKRNDVFDMNYFFRTN

SEQ ID NO: 476352 - protein, 339 aa, unidentified
MTLVGVDLHTREQSVAVLDTETGEIQELRLRHEGDATERFYVALPPPVTVAIESTGYALWFHALMQRLGHTVVVGDAAKIRATVVRKTKTDRRDARHILRLLSEDRFPTIWVPDPRVRDLRALVAHRMRLVRVRTMLRNGVHAIALNYRLTLGRSLFTRYGLAQRHQLSLPAHTAHRRDESLELLAWLDARITALEATMTEVAAADPEARRRMTHPGVGPVTALTTLLVLGPVDRFPTSKHVVSYIGLAPAIASSAGKHRLGGITKHGNRMLRHVLGQAGQTALRMDPDLKRLDGRIQHRRGTARAKVAVARTLLVRLHIMRRDHDYAEFRRRGQATAA

SEQ ID NO: 476353 - protein, 329 aa, unidentified
MTYGLVAFDVGARSHAFAAWVGGKETTGTLDNTSEAIARFLARHRARCGQLRVVMEATGIYYLDPALQLVEAGVEVMVVNPKASHHFAQAMSQRSKTDAQDARMLLAYLQRMDFVPWQPPAPLLLELRQLGRHLCRLAEQKVRLKNQLHALDSTRTSPSVVVEDMRDELARLERRIERMQAEALRRVRSDAALAERFDALNSIIGVGTTSALALMAELLVLPREMNSRACVCHAGLDVRVHQSGTSVALAPRISKHGNKYLRRALFMPAMTAIAHDPHARAFRDRLLARGKKKMQAVAAVMRKLLTAAWALIRNPGRYDGSRLYAAQGG

SEQ ID NO: 476354 - protein, 365 aa, unidentified
MYKKLNSTGTLIQRTTTEAPHGHMYYIGLDVHKKTISYCVKDVSGRVHQEGKLGATRCELDIWMRTLPQPWTVAMEATIFTGWIYDHLHPHAAQVKVAHPLMLRAIAAAKKKNDRVDASKIADCLRCDFLPECHMASTEIRDRRRTLRYRYLLVRQMVQTKNRISGLLMETGVTYNKQRLHKVGYFRELLASNEEVNESIRPLLRLSRDTIARLQKTERALVSSLQRDPLLTERIKRLRTVPGVGPITALTWALEMGEISRFRSIRQAISYCGLCGDERSSAEKSIRTPISKQRNKNIQFVLIEAAKLAPRQDHDLALLYEREKQKGNANRATLAVARKMVAYLLAVDRGQRDFVPAEDGRCDAA

SEQ ID NO: 476355 - protein, 314 aa, unidentified
MSDAIFAGIDVAKAHLDRAERPGGTHARYQNDEAGIARIGGQLQAQAPTLVVLEATGGREVPLAAALAAAGLAVAVVNPRQVRDCARAVGQLAKTDALDAHLLARFAEVVRPEPRPLPDADAQNLSALLARRQQVIAMLVAERQRLPTTTAALRPRVEAHIAWLRQERDDLDRELRRQIRASPAWREDDDLLQRVPGIGPVLATTLIAALPERGRLSRKQIAALVGVAPLNCESGILRGRRIIWGGRARVRAALWLGTLVAVQRNPAIRTFYQRLVATGRPKKVALTAAMHKLLLVLNALLRQRTPWHDAIQPV

SEQ ID NO: 476356 - protein, 412 aa, unidentified
MPVPEALFYVGIDWATETHAICVLTAAGRIKTQFTIDHTAAGFADLLRRLGRLTGNPGDVPVGIARPDGRLVDALLEAGFPVVPVSPNAIKTWRDGEVLSGAKSDAGDATVIAEYLRLRAHHLRPATPYSAQTRALRTVVRTRDDVVDMRVAATNQLSALLDMHWPGAKVIFADVESQISLAFLTRYPTYASAESLGEKRLHTFIVKHGYSGGRTAAELLARLRSAPAGTLDPTVTVAARDAVLAMVAVLTAINTARKALDVSVVAHLGEHQDAAIFTSLPRSGQINAAQVLAEWGDSRAAYDHPDAIAALAGVSPVTKASGKYRAVHFRWACNKRLRKAVTCFADNSRHASPWAAKVYADAIARGHDHPHAVRVLARAWIRVIYRCWNDGVPYDPNKHGNASKLREIAAAA

SEQ ID NO: 476357 - protein, 430 aa, unidentified
MKQKNVNRLEQFCQFRKSIRGSKEYLIVGIDVAKDRHHAFFGMATGKTLLKRLVFANNIDGFEKLLTYVDAIKVREGLAEVVFGLEPTANYHKPLGEFLIKTNHLVVLVSTNAAKKNRETLDGRWDKNDTKDSANVADMISQGKCLYYEYASEQLRDLRSLLSLRRKLKKMEHALQMRIRNHLLAQYFPEMDEYFPGGGKDCLSIVRSFLNPSLIAATDYEKFCRISSSRGKTIAGQRRLSSIWQKAHKSIGCDIGEAGEFEASTLVDSLKAIRHDISKVNDKIQATCSGFSEYEYLMSIPGYGPTISAMVLAAIGDPFRFSNGSQLLKLVGLDLTAQRSGKKSTNVTTSISKRGKSEVRYALYHAALVASSRNKHFVRYFTDKIRNRAKEKGIKTKMRVKLSAKMLQIAWALMKKKEYFDPKYLNPDAS

SEQ ID NO: 476358 - protein, 350 aa, unidentified
MIIIGVDYHPEFQQLASVDTETGEFSEARLQNPEQAEQFYRELAGRGARVRIGMEASGHARWLERLLGELHFELWIGDAAEICSKRVRKQKTDRQDAQLILQLLVEDRFPRIWVPSAENRDLRQLLWHRHRMVQTRTRVMNQLQAVALNEGLRCKKKLWRERGRQQLESFQLGRWASRRRHDLLQLLDQLNPTIAELTQAIEREAEKCPEAQRLRTHPGVGALTALAFVLLIGDAERFRCGKQVASYLGLVPLEKSSGNRRRLGHITKQGSSILRFLLVEAAQATVRSVPQWRNKYFHLMQRRGRNTAKVAMARKLAVRLYWMWRCGWDYEQLHRFGSHAGEPGNRHGVQ

SEQ ID NO: 476359 - protein, 347 aa, unidentified
MLHAGLDLSRKKLDVCLLSDQGEHLDQFAVPPDVDSLRRLAGRIEEVHRQPVCAVIESMTGARIVHDTLEQQGWSVEIADAQKVKGLAPLACKTDKIDSKVLAVLSHRDLVPAIWLPDPSVREERELARFRLHLVKHKSALKCRIHSTLINFGKPCPVTDLFGLEGRRLLQRLQVPEPWRGNITASIELIDDLERQIVEINRRLKEGHAEHPYVPLLLTVPGIGWVLAFTIAAEIGEIERFPSPEKLAGYTGLCPRVNQSGEKDRRGPLTKHGPTYLRWALLEATMHALRHPAYAERYQRTKRRLGKQRGAKVAQVDLARRLAHAIWHMLSRKEKFAPRGAAFRLAA

SEQ ID NO: 476360 - protein, 340 aa, unidentified
MAEVSMFAIDVAKRVLQVAGCDATGKLVLSKAFRRGQVLAFFAKQAPSVIGMEACGSAHYWARELRKLGHEVKLIPAQYVKAYLKRGKTDARDAEAILEAMQRPTMRFVAVKSVAQQCQRALQAGRDLLVRQATQLGNAIRGLLYEMGIVSPQGQGGFDQLLKLIDARDERVPADLLGVLTPLVNQWRSLHEAIEGMDGRLIRQAKADPVTRRLMQIEGVGPVTAHAVVAAVGDGRQFRSARDFAAWVGLTPALFGTGGKTRCGRISKKGDDALRRLFVLGAASLVRQARAKPQKTSRWLAGVLARRPAKVAIVAQAAKTARILWAVLTSGEDYRAAAKS

SEQ ID NO: 476361 - protein, 372 aa, unidentified
MRDPIMVGCDLHDETMLLKVAVGQEEPRKDCYANDEAGRRAMIRRLARLSQEQDGAQVVFAYEACGLGFGLHDELVEAGMRCHVLAPTRMTHSIKHRRSKTDERDAQGILEMVRGHVLAGNELPDVWVPDRQTRDDREVVRARLDLSEKLTALKTQVRALLKRNQVSKRQELGAGWTKPYRAWLRGLACSGALLLYGARVALASLLRQIDALEEEIGLLDEQVEVVAVQERNAQRAEALTELKGVGLLTAMVFLVEMGQLGRFSNRREVGSYLGLVPTSDETGEARERKGHITHQGPHRLRKALCQAVWSRVRMDPHEKAVYERIAAKNPNHKKTAVVAAMRRLGIRMWHVGLRVESKGRAAGQCVKGATTA

SEQ ID NO: 476362 - protein, 347 aa, unidentified
MTIVEDRPVITGGVDTHAGMHVAAALDSIGGLLGVQEFPATAAGYASLLSWLRSFGALAVAGVEGTGSYGAGLARHLAAAGVRVVEVDRPDRQDRARQGKSDPLDAVSAARAALSGRASGAPRGRDGAVEAIRALMVAKRSARQERTQAINQARALIMTGPEELRARFVRRSPAQLIEAIAALRPRPGDVPGYATRVALREPVRRDWFLDAQLDRLDELIGPLVTARAPGLLALHGVGPDTAAMLLVAAGDHPERLRSESSWAHLCGVAPIPASSGKTAGRYRLNRGGDRQANSALWRIVIVRMSSHPATRAYADRRSKEGLSKKEIIRCLKRYVARQVYRQLRDSA

SEQ ID NO: 476363 - protein, 277 aa, unidentified
MARRREATPVWIGIDVAKQAIDVARGSAGPLERVERALGPLQQWAQTLPRQARVVLEATRGLERVVTTVLRARGIAVCVVNPRQVRDFAKATGQLAKTDRLDARVLAHFGAALLPRVTLARARDVDALRALLDRRRQLVETRTAEKNRRHTASEAVIGSIDDHIAWLDQQIEQLDQAVAAAATACTALAEPPGRLQAIPGVGRIVGLTVLTHLPELGMLDRKRITALAGLAPFACESGLQRGRRAIWVAAARPGPCSFLPRSPPRAGIGRCGASTSG

SEQ ID NO: 476364 - protein, 411 aa, unidentified
MRLFVGDDWAEDHHDVEVMNEAGKVLAKKRLPEGAAGMTQLHGLIGRHVPEDADDAEVVIGIETDRGPWVTALIAAGYTVYPVNPLLASRYRERHAVSGAKSDGGDAHMLAGAVRTDAHQLRPAAGDSPQAEAVKVLARTHKRLIWERAAMALRLRAQLLEYFPAAVAAFEDLDAPDTLELLGKAPDPARAARLTRAQVSAALRRAGRYKITARTDAILAALRSPQLGQPPALTAAYAATIRSLIAVITTLNEQVKVLQGQVGAHFGQHPDAEIYLSQPGLGAITGAGVLGEFGDDRHRYACAKARRNYAATSPITRASGKKKIVAARFVHNGRLIDALMIQAFAALRTSPGARRFYDDLRARGIEHNDALRRLANRLVGILHGCLKTRTCYDEATAWGHRENTGQPPVAA

SEQ ID NO: 476365 - protein, 361 aa, unidentified
MEQFIGCDAHKKYSVFVAINERGEASGAVRVDHERVPYRQFLERLPAGSQIALEAGGHYYWMVDEMEYAGHNPRLVHPLEAKKRMGKTGKKTDKVDAKGLGILLRNGTLPEVWIPPAELRDQRELLRLRMFLVQQRTRFKNRIQGALARYNIQLGVRDVFSVEGRRRLGVQLTELPQHTRASAELELVTLDFVDMQIEEAEKRLETVLQVSAEADLLKTLPYVGPILSMVMALEIGKVERFPSAAHLASYAGLVPRVHSSGGHTRLGQICGDVNQYLKWAFVEAGNLVVIHQKHLAGRHVVRLYQRVKRKRNYQKAVVAVARHLAEAAYWILKKQEVYREPQSKLKSSKAEIANALSSTHG

SEQ ID NO: 476366 - protein, 449 aa, unidentified
MISAIVERGAGIDLGKRFLKTCVMVGPLSEEPRWEIRRIENTMSELEVMREWFKAEGVTHVVMESTGPYWVPVFNMLEKEFMVVLANPVEVKNRKGHKTDAKDCWWLAHLLRHGMVRPSFIPPQPTRELRELRRRRKKLVEAAAQERNRVQKQLEYGNVKLGNELSDVFGLSGQRMLKALVDGGHTPEQIAALAQGTLQRKTAAIAEAVRGARLSEIQKEIIRSSMRHLIFLEMEIAQIDEQTNQQMQASGQDTARQRLQTIPGIGPEAAANLLAETGVDMSQFPDPGHLSSWGGVCPGNNESAGKHKSRHTTHGNPWFRRTLTECAWAASRSKGTIFQAKYQRLQGRIGHQGALVAVAHELVEAIYWVLARNQDYRSPVPPPLDEVQRQRLIRHHTRRLRRLGGWLPAEKLEPLKEWYVSHCVPMVESPPARRRGRKKSGVESHGRQP

SEQ ID NO: 476367 - protein, 343 aa, unidentified
MQQQLSVVGIDLAKRVLHVAGMDERGQIVLRKRLTREALLPFLAQLAPVLIGMEACGGAHYWARRWREHGHTVKLIAPQFVKPYVKSNKNDPADAEAICEAVTRPTMRFVPIKEIEQQDLQALHRARERVVKARTALVNEIRGLLAEYGIVLPQSVTQFRNGFLATLEAEHAKLTSLSQELFGQLYEEFGALEKRLADYTAKLEAISAAHPVCQRLETIPGIGPLTSTAMVAAVSDVTHFQNGRQFAAWIGLVPRQHSTGGKPRLLGISKRGDVYLRTLLIHGARATLRWIGLKTDRRSQWVRGLIDRRGKNKAAVALANKNARIAWVLLKTDAVYMAEDAAA

SEQ ID NO: 476368 - protein, 350 aa, unidentified
MEIIAFDSHKRYTQSLVEDARGRVIAEDRITHEQGAIWQYLKRFKPGCSVAVETIGNWYWIVEEIEQAGMKALLVHARKAKVMVGNVNKTDRLDVRGLNRLQRTGTLPTVWIPPGELRDKRDIARTRMFLVSQRTQLKNRIHATLDKYALEVKEVADIFGVRGRQLLEERCKSLPPHTRFTVEQQLTQVDGLEGAIDALEKRMSEVFAETEEVRLLRTIPGIGFLLAVVISLEVGDVSRFGRAEQLASYAGTTPRVHASGGKLRYGRLRTDVNHYLKWAYVEAANAICLNRSRWPNRHVCCLYERLRSKKGHAVAIGAVARHLAEATYWVLTKKEQYQDPQSSRRSSTEA

SEQ ID NO: 476369 - protein, 331 aa, unidentified
MLDNNGEIVHEGRVKLTRQALTARFDGLQCARVALEAGTHSLWVSALSTEFGHEVIVANVRELAAITGSTKKSDKNDAVKLARYARLDPSILCPIRHRSAESQRDLSFIRARAALLQAWTLLLNTARGIAKPLGYRLPKCTADAFARNCRGHIPDQLTLVLSPLMDQIQQLTDGIKAYDDQIEAMSADRGAELSLILSVPGIGVLTALTFVLTIGDQSRFKRSRDVACYLGLQPKRSQSGDCDPRLGITKAGNGYARMLLVECAQHILGPFGRDSHLRRWGMNLSQRGGKGSKRKAVVALARKLAILLHRLWVSQQQYRPFYPMERQAAVA

SEQ ID NO: 476370 - protein, 417 aa, unidentified
MPESPFAFHVGVDWGTESHQVCVLDAGGQPVSEFCVAHSAAAIREFCARLAQLAPTGGLVVAIESPTSPVTEPLLEAGFAVFSINPKQLDRFRDRYFPAGSKDDRRDSFILATSVRTDPGCFRRLDIEDPKMRDLRALSRLDQTLKTELGGFCARLRDLLLPSFPALLALCPGADEAWLWELLSKAPTAPRAARLSCSAVAALLKRHRIRRIEPEQLVALLRQPPLPLPQASFQRSGGQIMLLLPVIAALAAQRRAADAQIQTLLEELSAAEPDTPNECQHRDLNIIRSLPGVGTMVAATMLAEAHQALARRDYHALRAHAGVAPITRQSGKSCAAFMRHACNPALRQAVYHWSRIGVMHDPRCKAHYKHLRERGHSHGRALRGVADRLLKMLCSMLKSQTPYDPQRRQLASAAAAA

SEQ ID NO: 476371 - protein, 332 aa, unidentified
MMISAGIDVSAKDLSVVILNKDKTSKALSFVNDAKGHKLLLNMLKKKKVSRVCLEATGVYHLDVSVLLYDSQCFEFMVINPRAAKHYSEARMSRSKTDPVDAALLAGFAQHMPFTQWQRPDDLKLTIRACARRLATLTQHRTQAKNQLHAARATETTPDIIMQDIQLTIAQVDQQIKALREHAITLINGDKTTQRIRILLLSVKGIADASAIQLMGELLVLPYDMTARQWVAMAGLDPRLHQSGSSINKKARISKVGNRYLRMALYMPALSASRHDEYVHGYYMHLIEQRGLKKMQAVCAVMRKLLHAIHGMLRSDSVFDNTRFYQVKEQVS

SEQ ID NO: 476372 - protein, 354 aa, unidentified
MHQPEQAAEVIIGVDTHKDTHTAVALDTLGTRLGTTTILVSREGYRQIEAWARSFGSVRAFGIECTGSYGAGLSRALQASGHRVLDVNRADRRARRRHGKNDPLDAEAAARAVLSGQATTLAKSGSSSVEMVRHLKLARDSAVKARAQAMQILKALIVSAPAELREQLEGIRGKVTLVRHLAALRPGPMTSTTASAKVGLRAISRRWLSLSEEIEAHDRDLDVLAATHTPELITAPGIATGTAAEMLILVGDNPERIRSEAAFAKMCGACPLPASSGKTSRHRLNRGGNRQANAALHRVIVTRMRCHQPTIDYVRRRTAEGKTKAEIMRCLKRYVAREVFTHLCKPRQPASETA

SEQ ID NO: 476373 - protein, 341 aa, unidentified
MGWTVAIGIDTHRDGHVAVALDRFGGGRGSLVFSADAKGYLALWRWAQELGEPVFAIEGTGSYGAGVARFLVAAGAEVYECERPRRAERRRGKSDLIDATLAAGRLLSEASLPRLRGGGVREDLRLLLLERRGAVRARTAALNQLQAVVVTAPEALRSRLRGLRGQQLACAAARVRGAEGESAVIAGVLRRLARRVRALGQELDELDSELEAIVTRLVPELLAESGVGPVCAAQLLVSSGDPTRMASEASFAALAGTSPVQASSGLHQRHRLNRGGDRQLNRALHVIALNRVRWHPETTAYHQKLLASGKSPREARRCVKRMLARYFHRRLQTIPALDLTP

SEQ ID NO: 476374 - protein, 343 aa, unidentified
MKIVRIGLDLAKYVFEVHGVDAQDEVILRKTLRREGVAQFFADLPPCVVGMEACCGAHYWAKVLSDLGHQVRLISPQFVKPYVKSNKNDRNDAEAICEAIGRPSMRFVPPKSAEQLEIQAIHRIRQRLVANRTRLVNQARGLLSEHGVVVPRAISQLRHALARIAGEEDSDLSDMFRDLLREVFDELIELDRRISSCNRKIRNLFRTNEMCQRIGKIEGIGPITATALVAATGDRTCFRNGRQFAAWLGLVPKQRSSGGKARLFGISKRGDRYLRTLMIHGARAVLGKAGGKEDPRSLWITRMRERRHPNVVAVALANKNARIVWSVLSKGQDYQLDHAMQAG

SEQ ID NO: 476375 - protein, 317 aa, unidentified
MTAPLVFVGIDVSKATLDVAVRPAGTTFRVANDPDGIAALIGRLRPLAPTLVVLEATGGYEAPAVAALQVAGLPVAAVNPRQARDFAKAAGRLAKTDRIDAQVLAHFAEAIRPEPRPAVPAAQQALDALLTRRRQLVGMRVMEANRLPTAADPAVRAGIERHLAWLAGEVAAADRLLSEAVAASPAWRAKDDLLRGLPGVGPVVSRTLLAALPELGAGDGGTLAALAGLAPYAHDSGTLRGGRHIRGGRAEVRRALYLAALSAARRPGPLKDFADRLRARGKKAKVVLIAVARKLLVIANAVLRTGRPWQPALAASR

SEQ ID NO: 476376 - protein, 340 aa, unidentified
MEKRYIGIDLHRNRFTCCIRLENERTYVTEWALENLARFVKKLRASDEVAVEITSNTRLFHEAVAPHVARVVVVDTNQFRVISRSVKKTDSNDARLLSLYLSKNLLPEVRMKDKDLAQLASLTQTRDTLVKQRSALKNKVNNILSARGLNLAKEALSSEKKLTEVLELPFDEIVRIELRVIVEQIRSLNKSIGELDKTIGEEGSKLEGHQGLSSIKGIGKITGAILLSVIGDVNDFPDEGRLASYFGIVPRVSNSNETERSGRIHKRGTKLGRTALVQSALIAANYSPYLKRFYEQVKARRGAGKAIIALARKFLGIIYRTLKNKWVFEDFPNFVLAEEA

SEQ ID NO: 476377 - protein, 426 aa, unidentified
MIPAVVERCAGIDVHKKFVTVCVLIGAAHMEPEPQRRRFGTCNAELGQLRDWLLAAKCQKVAMESTGPYWRPVFNVLEEAGFAVVLANPQQVKNLRGHKTDMKDCWWLAHLLRHGMIRPSYIPPRTIRELRDLTRRRKQLIRNGATERNRVQKVLEEANVKIGSVLSDVFGASGQDMLLALVEGQATAKEIAQLAKRQARKKIPELEAAIEGHRMTETQQQLIRQCMSHMAFLEQQIEEVDKQIQDKIGAFQFNEAYGLLQTVTGIKAEAAATVLAEVGDTVAAFPSAAKLSSWAGVCPGNNESGGKRKSTRTTKGNPYLRDALLECAWAASRRNNSQMQHLYRRLQHRLGHKRAIVAVAHALAQAIYQVLSTRRSYIDTAEPPRSTPKVKRLIRHHTRRLRKLGCWLQYTTQQAQRSTEQYQRIT

SEQ ID NO: 476378 - protein, 370 aa, unidentified
MAKRNTFVGLDVHKESIDISVAEDGRDGEVRHYGKIAGDLEALAKVVAALRAPGRRLRFVYEAGPCGFGIHRYLTSHEEDCGVVNPSSMPKRSGDRIKTDRRDADALARLHRAGELTAIYIPTAEDEALRDLVRAREDAVGLSTQAKHRLKAFLLRQGRRYPGRAEWTVAYRRWLADLSFPLPPQHIALQEYRDTIDETERRVERIADQLRQITPTSRWAPVVDALHALRGVSFVTAVGLVAEIGDIRRFDHPRRLMAFLGLVPSEHSSGPSVRRGGITKAGNPHARRRLAEAAWAYQGTARISRHLLMRQESLPKPICDIAWKAQLRLTSRFRTLVARGKAKPKVATAVARELTGFIWAIAREVPAPRA

SEQ ID NO: 476379 - protein, 426 aa, unidentified
MSESLISAASEPEWAAFAAIDWADQKNFWRLVPAGSQRYEQGELENTPEAVEAWAVALQQRFGGRPIALCLEQSRGALVYMLTKYPHLVLFPVHPTTAARYRETFAPSGAKSDPSDTASLLDLLLRHRERLTPLQPDTVETRLLHFLVEQRRQTVDEKTCQSNRLTACLKLYFPQILGWFDDVTTPLVGDLLERWPTLEQLQRAHPGTLRRFFHEHNCRTEKLIEERIAAIYQAIPATRDQAVLEAGRMMTGGLVAFLAALRSHIAVFDERIAELVLAHPDGALFASLPGAGPVLVPRLIAAFGTRRDRYQNADEMERYSGIAPVKKASGKTERICFRLACPKFLRQTFHEFASHSIGQSEWAKAYYEHLRNDEKKDHHAAVRSLAFKWIRIIFRCWKDGKPYDEQVYLNSLRRRGSLLGGALTLA

SEQ ID NO: 476380 - protein, 341 aa, unidentified
MGEVSTIGLDIAKSVFQVHGVDEAGSVVIRKRVSRAKMLEYFGGLPRCLVGIEACPSAHHWGRELQTLGHQVRLIPPSYVKAYLKRSKNDANDAAAICEAVTRPSMRFVPIKTKEQQSVLMLHRTRQLLVRQRTMISNALRGHLAELGIVSAKGHNGTAELLRIIADRRVSPAVCGILEVLARQYGAIGIEIASIDKNIMVLHRACEASRRLAEIPGIGPISATALVAEIGDWNAFGSGRSLAAWIGLVPKQHSTGGKERLGRISKQGNRYLRWLLVVGAMAVIRYARKHGTGKRPWLGRLMERRPTKVAAVALANKIARMAWAIMVRNERYKEPKLLLAV

SEQ ID NO: 476381 - protein, 438 aa, unidentified
MSNKVFFNLDDLFISVGIDVGADFSWMSIALPNQQFVGKPYKILHNSIDSLTTAVSKIKEAEELYSLESRIFLESTGIYHYPLFCYLRDKGFNCSVINPIITKNSTNINIRKVHNDRFDSKKAALVGLKPDLKASLMPSDLALNCRNLCREYYDLMDNRSAYVNKLQGELRMAFPQYLGIFSKVTINTSLTLLETYTSPSAFLKADKQGIIDIIRSTARFGLTYAQNKYNAIIQAATDANQFGYIIDSNIKRIRLYISFIRKYDEEINSILESLHELVDANEDTDFVKQIHLIKTFKGAGFLSAVSIMGEIGDFSAFSKPKQLFAYFGLDPAVKQSGKFEGTKVQMSKRGSAIARRVIHTLTLQSISISRNGEAKNPVLREYYLKKCDSKPKLVAMGAVSHKVCNMIFAILRDNKPFKIIVPQEHIKQYNAAKCDIAA

SEQ ID NO: 476382 - protein, 332 aa, unidentified
MASVPVFVGLDYHDQCIEVNVMAGDGEVLVSRKCPNNWQAVVGMVPKDCRVAGAAIEACCGAADFAEELIQRGGWSVDLAHPGFVARMKQNPDKTDFADARMLADLERVGYLPRVWLAPHEVRQLRHLVRYRQQLAGERRNLKLRIRALLREDRVPQPDGNAWTQAWFRWLKQVDLGEQTRWVMDRHLRRLEQVNRELLATDRHLAKLTANDRVVQKLLEHKGVGLVTAVTMRAEIGHFGRFRTGKQLARFCGVTPRNASSGKRQADAGLIKAGNPQLRAVLIETAHRLMRYDPHWMLLGASVRGRTRSGSMAAAAVANRWVRWLFHQMQAV

SEQ ID NO: 476383 - protein, 365 aa, unidentified
MNFIGADLHKKSITLCVMDEKLKVTARKTVPCDQPDQIVESFRQFRPFKVVVEATASYLWFVELLEPLAEEIVLANPKKLRVIAESTKKTDRLDAQVLAEFLARDMIPRAYMPTPRQRQHRALVRHRQYLRGRMTSVRCKIHHVLADYNADRKDLFSARCGKGYFKQVPLSDADSFVIKQLWSEWEDHQARLLAMTKKIKAFIAKAPAREKEARAILKSAPGVGFVTAEVVLSEIGDVSRFGNAKKICAYAGLVPAVRQTGGKRSKDLHITKQGSGLLRWALVESAWRLVKSSPKWSALYSRLKKRCGSKRAIVAVARKLLCVLYAMLKTSTPYKIIPAATPAEPPEPTRKRLVRVSTAAQAVTP

SEQ ID NO: 476384 - protein, 344 aa, unidentified
MEYSAIDLHLRRSQFRIVGEDGAVVREGKIDTSRADLSRVFGDRPRMRILVESSIESEWVARHLEALGHEVIVADPNYAPLYGSRSRKVKTDGRDTAALTEACRTGIYRRAHRVSAARRAQRQELRVRRHLVQMRSRSIGLLRALLRQDGWRLPRGSAEAVDARLERLRLPTGLATILTPLRTWLKELNALLDAADRAVEAQAAADPVAAHLMTAPGVGPVVALTFEAVLDDPARFGGEAARASAFLGLVPSEDSSAERRHKGHITKTGPSELRALLVQASWVIWRGRSAAGAALRAWAQALAARRGRRIAIVGLARRLSRILFALWRDRSNFHVEGGRPLVVA

SEQ ID NO: 476385 - protein, 379 aa, unidentified
MKETQATPNHDNAKAAVLHMAAELGAKDWKFAFRGPTKHRSVNIPAWSQKKLIHELVKAKTKLGLSPDTPVLAIQEAGRDGFAVHRFFESLGIESLVVDSSSIEVPRRKRRVKTDRLDALKLLNLLRRWHGGEKTALHVLHVPTPSEEDARHLHRERNRLTSEKTRLTNRLRSLLVTQGPPPKKISSRLASQLKTLRDWNGSPLPSQLRNTLRRECQRLAIVEAQLSEIEAEQVAMVKSPNETRQAQTAHRLVKLKGIGPQTAYTLGHEFFWRNFNNRREVGSAAGLTGTPYHSGKSERDQGISKAGNARVRSLMIQAAWRWLQWQPNSKLSQWFQDRHSVGRRQRKVGIVALARKLLVALWKYLEFGEMPDGAVLAMS

SEQ ID NO: 476386 - protein, 304 aa, unidentified
MNGIGIDVSKRQLDVGTTDGEILQVSNSASGFAELDLWLRKHPASRIVLEATGGYEQTVLNFLHNAGHPVVRANALRARRLAQGMGQLAKTDRLDAYALAQMAALVKLPSYQPLEPWQQKMREFVRARRQTMDALTVARQQQEMVTDRELRRLLQANISRLQRIVGRLGKQIAEQVAQQPQLAVLKSMKGVGPGLQAVLASYLPELGKISGKAIASLVGVAPMSHDSGTMRGKRSIHGGRAEIRQVLYMASMSAMRHEPRLRDFYQSLRARGKEGKVAIVAVMRKMLVILNARVRDAQGGSIPA

SEQ ID NO: 476387 - protein, 370 aa, unidentified
MARLHAMIGEQLGQDAEDVEVMVGIETDRGPWVQALIAAGYTVFAVNPLSVARYRERHGVSGAKSDAADAHTLADMVRTDSHQLRPVAGDTDQAEAVKAVARAHKTLIWERTRHTQRLRHALREYFPAAVEAFTDLDAGDTLELLGKAPDPAAAARLSLSQIRAALKRARRRDVDTKAAAIPAVLRADHLGQPPVVTAAYAATTRAAVAVLTTLREQVKELERQVEAHFGRHPDAEIIGSQPGLGPILGARVLAEFGDDPDRYATAKCRKNYAATSPITRASGKKKAVLARFVHNDRLIDALMTQAFAALNASPGARAYYDQLRARGAAHNPALRQLANRLVGILHGCLKTRTLYDEATAWSHRTEKTAA

SEQ ID NO: 476388 - protein, 412 aa, unidentified
MDVYCGIDWAEDHHDVALADRDGKLLARRRISDDAAGLAQLPDLIAGHGDTPEDPVPVAIETPRGLLVACLRATGRPVYPVNPMAVARYRDRHSVSGKKSDHGDSVVLAGVLRTDMHAHRPLPADSELAQAIAVLARAQQDAVWDRTTAHNRLRSCLREYYPGFLAAFAEAKGGIMRPEARAVLAAAPTPAGAAALTLAQLRGLLRKAGRSRGIDTEAARLREAFRAPQMRQLPLVEQAMGRQALALLGQLDAACTAAADLERAVTESFNLHPDAGIITSFPGLGALTGARVLAETGDDRSRFQDAKGLKAYAGAAPVTRASGKTRSVTHRKIKNNRLSAAGYNWAFSALTASPGARAHYDRRKTAGDRHAAAQRNLFGRLLGCLWHCLATGQHYDEATAFPTTTEKISQAA

SEQ ID NO: 476389 - protein, 346 aa, unidentified
MCHSTTVGVDLAKNVIQVSVVSARGKELLNRSLTRRKFAEFLGKQQPALVAFEACATSHYWARTAQRHGHVARIIPAKAVAPLRQGHKTDSNDALAVAEAARRPNIKEAPMKTIDQQGMQAIQRSRDLLVQESTALSNHLRGLLMEFGVVIPQGIASVRRRLPEILEDGDNEVPDMYRPTLHRLYGRFLELREDIKTMNVEVKELVKQHPDCKRLTALEGVGPISAVLLYASLGTGEAFSGSREFAAYLGLTPRQLSSGGKTNIVGLSKKIGNCRLRSVLIQGARAYVHKLKEPKTSKDRWLMELIERAGHGKAAVALANKNARTAWAMLTQGTEYQRRPQLKVAA

SEQ ID NO: 476390 - protein, 359 aa, unidentified
MRIIGCDLHARQQTLAMLDTSTGEIEETTLKHEENMVREFYCNLPRPVRVGIEATGSMQWFVNLMEELGIECLVGHPAEIRAAEPRKQKHDQRDANLLLSLLVEERFPTIWLPTRELLDMRALLRHRHQWVGLRVKIQNALQAIALANGLRRGPSLWTQAGQHAIASLPLSPHAAYRRDELQAMYVKFEAQIEKLNQRVEQQAGERSGARLLMTHPGVGPITALATDVFLGDPARFANSKDLASYVGMIPGEYSSGKRQRLGGLTKQGNPLLRFLWSEAAIHAVRRDPQLRHFYHRKLIQKGLGKARAAVARKLGIRMWIMLRDRIEYHEFCRRGQMQQTSGDACAGMPGPRYGAKVTG

SEQ ID NO: 476391 - protein, 405 aa, unidentified
MKVYIGIDWSSQKHDIVYLNEEGGIIAYQTIPHTPLGFEAFDDQRMKLGVGVEDCLVGIETEHNLLIDFLSSRQYRQIYVIPPTTIKGSRGRFGASKANTDRSDAHLIADMLRTDRARLHVWHADSLLTQQIAALASLEQFLTHMIIQTNNRLRNVLWRYYPNAAIVFSGLDLQISLEFICAFPTPQAAAQLTFEQFKDFARFHHYPQPSKLPACFARLQKLQPEARQQTVLAFQSEAVRLARLALQAVQDKAATIRETQELFVEHPDYPVFSSLPGVGKILAPALLAKFGDDRLRYPTPQVLQSVAGTCPVTRASGKHKVVFFRYACDHEFRSVVQQWAKCSIDASVWAYTYFQSVRPHCDSLSHAYRRLANRWLEIAWRLWQDRVPYDEERHLRQHALRVKPN

SEQ ID NO: 476392 - protein, 341 aa, unidentified
MNKASTIGLDLAKQVFQVHGADATGAVVFRRRLRRTAVLQFFASQAPCRVAMEACASSHYWGRELSRIGHEVRLIPPAYVKPFVKRQKNDAADAEAICEASQRPTTRFVQIKSETAQAAAVVFRARDLLVRQRTQIINALRGHLAEFGLVVPTGPAHVGRLLAEAEDYAHSLPQAVRPILGVLIEALHSLDEKIAVLDVEISRRAEEDEDARRLKTIPGIGPVTAAAISALAPPAQTFARGRDFAARLGLTPLQRSTGGKQKLGGTSKRGERTIRRLLIIGASAVVRWAARKGAPAGSWLERMLARKPRMLVAVALANKMARIIWALLAKGGIYRASIVAT

SEQ ID NO: 476393 - protein, 340 aa, unidentified
MDATTYGLDVAKRVFQMYWVEAETGEIVNRRFGRDELIRFLAQRPPGQVALEACGSAHWWARKIKALGHEVVLLHAKFIRPFVQTNKTDAADARAIWTAVQQPGMRTVATKTEDQQAMLSLHRIRALLVKFRTMQVNQLRGLLYEFGATFRAGRAAGLAEIRARTAELEDALPGTMMCCLQDQLRRIEELQRDIDLLETRIGVWQKQDAACHAITAVPGIGRLTATALVATMGDAKAFRSGREFAAFLGLVPRQSGTGGKVRLGPMSKRGDPYLRTLLIHGARSVMYHAKVPTPWQKDIQARRPANVAAVALASKIARTAWAILARGQEYQPNYVSMRPA

SEQ ID NO: 476394 - protein, 344 aa, unidentified
MEKHTVIAVDLAKVVFDIAVSHEEGRIALRRRLSRDAFLPFFAQTPAATVVMEACGSAHYWARKLQELGHQVVLLPPHQVRPYVTRNKTDRTDAKGILEAYRNADIRPVPVKSVAQQVLVSLHRFRSSWLANRTAQINTLRGLLRELGILIPIGAEKVLPQVRALIAEADSNIPDALRPVLFATCEEIRTLTDRIKMAERQIEGIAEQTPVVERLRSIPGIGLLTATALVAFVGDVQRFPSGRHFASYLGLTPREFSSGLKRRLGRISKRGDAYLRMLLVHGARSVLCHAKKAKEHDRLRTWALGLEKRLRHNKAAVALANKLARIAWAVWKHDRAFASQPQAA

SEQ ID NO: 476395 - protein, 419 aa, unidentified
MSFKILKNNCCGLDVHKTWIYACIGITDSLKRTEYKEARFSSFTKGLNELCEWLSKHNCTDVCMESTGKYWIPVFNVLEKNNIWVTLSHPKYTKPQKGNKTDRKDAKWICDLYMCGMVKPSFIPPADIRELRDLVRYRFKLTCMITGEKNRAHNCLTVSNLKLDDVFSDIFGKSSRSITEQILQHPGETFDVAPFVDGRCKTPVEEIQAAVDGAISKEQAVKLRQCLNHIDELEMHKAEIEREIFRLSDKYESVLNLIRTVPGFDKNPLTAIQVLSEIGGDMSVFPTAKNLVSWAGCCPRNDQSNHKIKSTRISRAGSYFKPVLVQVANALIKSKKHPEFTTRYRRIKARRGHKKAIIAICRMILTAIWHILTDLKPYTPEGFLESRPVNESKILTTSQALNLMKQRGYIIKDDVVPVT

SEQ ID NO: 476396 - protein, 385 aa, unidentified
MNAHVGIDVSKSKSSFCVMDPENGEKPVKEFQMSREGFDSLLEQTKGLDHPAFFMESTGRYHLTLLQYLLNHDQKTFIVNPVLVKNYSKAHTLRRTKTDIVDAKLIADFSLHNSDKLRKAEFGLIDEIRSMARRREQLAEEVAKAKTQLKADLSVAFPEILSIDVFTKGVLNLLTRYPSPRLILVASIEELSLALNEGTKGRASAITADKIVQMADDSIAIESYGPLVKDSAKNLMFIQEREKAVTETFLDLVKKDHKSESDILESIPGIGKITAAHFLAEIGDIANFSRYQKLIAFCGTDPGIYQSGTILKQGHITKHGNKSLRKYVYLMAFGALKFNPFFRAYYDKKKKEGFSHRKAMVALMNKILKTIFAMLTKGEKFVTPK

SEQ ID NO: 476397 - protein, 443 aa, unidentified
MGRCIGLDVHRDFAQVAIWENGRVRDAGRVATSPERLREFATTLRKTDKVALEATMNTAAIAGLLAERAGEVVVSNPFKTRVIAEAKIKTDKVDARVLAELLAADYLPSVWQADEATKALRRQVGQHISLVRQRTRVKNQVQAILARNLLPRCPFSDLFGIKGRRWLGDQELAADERRTVHSLLRQLDFAGQELKLVDAELACVALDDVNARRLMTIPGVDMAVAVAIVATVGDFSRFESPDKLVSYVGLNPSVRQSGGLPATHGRISKQGRAWARGMLVEAAHAASRTPGPLQAFFERVKARRGWQIATVAVARKLLVICWHMIHDERDYAFSRPSLVAKKTRALELRAGAPAHRGHPAGSAAAYNLRTVRDRERALGEQAEAAYNHLTRNWQPTRPAAKAQPASPKRARQTSVPTTPARPVKAAPEGGSAGLDRPPATAGT

SEQ ID NO: 476398 - protein, 429 aa, unidentified
MPESKVRQPAQEPQFAAFVGIDWADQKHAWCLQVADSSQRESGELEQKVEMVEAWVVQLAQRFGERPIAIAVEQVKGALVYMLAKYECLHLYPVPSTMAASMRKALHPSGAKDDPEDADLLLDFLLQHRDKLHRLAPDTEVTRRVQNFVEERRQLVNEKRAQLNRLASNLKIYFPQMLGWFEHLDTELVCGLLECWPTLEELQKASPAELRGFFHKHHCRKGELIERRIREIGQAKPAIRDRAVIEAKRAVVKVTVQLIRSLRVAIAEFDGKIAEAAAAHPDFFIFASLPGAGEVMAPRLLAAFGSQRDRYKSANEVQVYSGIAPVLEKSGKMKWVHFRRACPKFLRQSFQEWAGHSMVKSRWARVYYQQQRKQGQDHHAAVRALAFKWIRILFRCWKERVAYDEKKYLAALAKRGSPLSTLLVAEAAL

SEQ ID NO: 476399 - protein, 399 aa, unidentified
MFLGGVIMTCFIGLDLSKFKHDCFIMNEHGEVVRNSFSFTNDREGFNTLLNVLNDLDPSQEKRIGFESTGHYGSNLKLFLEANGYSFMEFNPLLVNRFFKSESLRKTKTDKVDAQKIALYLYSRDYKPNPNSSYHLQCLKSLTRLRESLVDERSLQLVRITNIMDKMFPEFKPLFGKQGLKAATAMYLLENYGSPSRMANLTLASYHKMASKLKRTISYAKFCKIKELAKSTVGNENEILSFELEVCLELFKELDLKVLQLDNKITFELSLLNTHIPSVKGIGNVLAAGILAEFENIDKFDNPAQLAAFAGIEPSENQSGTHEGGGRMVKHGSPHLRRYLIQAANNMLAHNPVLYEYYLKKRSEGKSHNVAISHVARRLTRIIFYLEKNNIDFDINKMR

SEQ ID NO: 476400 - protein, 360 aa, unidentified
MNNVLDVNSVIVGVDVHKFNHMAVAMDCFGQEKGSLSFSNLRLPEFNQFLYSLGSKENTLVALEDVNGYGVHLVNDLVTEGFKIRYVPGILTERDRKQSIYRDKSDVFDAKRVGKVILTKYEETLPARESIASLEERLISQEFDLLLCERRDLTSSKTILKNQLHALLHQLLGDTYGERFKNTKIFTKRTIPYYQEVVSAKKPNPLTRGVLRRLIRLKLVMDQISGIDKEIAKAAKDDKLVEVLTKEINGCGLVTAALIISQVMTVRRFANKAKFAKYAGIAPTQRSSGRKEKLHTSPFGNRILNRAIHTIALYQISKKGSLGRVYFEKKVKEGKTKLWALRCLKRQIVNKVFNTLKYAN

SEQ ID NO: 476401 - protein, 345 aa, unidentified
MKIVGCDLHTRYQQIAMLDTETGELVERRLEHESGEARAFYAALSAPVRVGIEATGHTRWFERMLGELGHELWIGDAAQIRASMVRKQKTDARDAAHLLDLLLSDRFPRIWRPTLEERDLRQLVWHRQKLVWMRNAVGNQLHALAMGEGVCRKKKLFTKRGRVELESLKLGPWASHRRQELLEILDRLDESLHELDQAVEQQAEQNAKAVLLMTHPGVGPVTSLAFVLTIGPVGRFERSKQVVSYLGLNPREHSSGGRQRLGAISKQGNPMMRSLLVEAGHTAARLDTELRQDYQRLKLRRGSGVAKVAMARKLAVRMYWMLRNQASYAQLVRMQGSPRGTLVGQ

SEQ ID NO: 476402 - protein, 316 aa, unidentified
MIKLKYSICCGLDVHKNVIVATIVTTNKDGISEYNQKSFSTINSDIQKFHNWLIENNCYHVCLESTGKYWIPIFNYLENDVDVCLTHPKYVKAIKGKKTDKKDSKWIADLYKFNLVRCSFIPPKDFRQLRELSRYRFKLVCMKSSEKNRIQNCMTVSNVGIASVLSDPFGKTATEIISYLLEHTADSMDEKAVRKLIKKGAKSKSDEIIEAIKGYTIETDQAKKLELARGHLEYLDDMIIQTEVELYVRIKPSYEFVEFVSTMPGMTELSSTIVLAETGVDMDIFDDAKHLCSWCGLSPANNESTGHKRQSLPLQE

SEQ ID NO: 476403 - protein, 415 aa, unidentified
MALKIVYQICCGIDVHKTFVVACIASTNKQGVTTYKRHRFSTFTQGLKELLQWLLDNHCKDVCMESTGKYWIPIYNVLEKDCTVVLAHPKYVKAIRGKKTDKKDAKWIADLFKHDLVAGSFMPPADIRQLRDLMRYRFKLTCFMSSEKNRLQNCLTVSNIQLASVVSDTFGKSSQRILDKILENPQDTSFAIEPLIHGSMKKKLPELELAIDGFITPQQAGKLQVIRKHFENLESRKAELEELILALASPYQQELDLILTAPSFKNTFTAIGIISEIGINMEAFPSAKHLCSWAGLTPTNNESAGKKKSVRVSKAGCYIKPLLVQCANSVVKSEKHPEIRNRYLRLRKRRGHKKAIIAIARMLLTALYNMLKNKEPYNAELYRKCDILPVNREITVEQAILMAQFQGYKIKPATE

SEQ ID NO: 476404 - protein, 350 aa, unidentified
MAKVMVARNEGIVVGVDTHRDVHVAVALSGVGANLGTTSVPTTVAGSSELLRWAQALGPIVAFGIEGTGSYGAGLTRWLAAHGQTVLEVDRPDRRARARDGRSDPLDAEVAARAVLSGKATGVPKSGVGAVEMIRALRVARRSAMKARTQAANQLVALVLTAPPEVREVLRPLAVPRLVEVAGRFRPGPLVDPSAAVKTALRHLARRHAALSAEIAELDHDLGALVALAAPGLLAINGVGVEVAGALLVTVGDNPERLGSEASFARLCGAAPLPASSGLTTRHRLNRGGDRQANNALWRIAIARMRRDGRTQEYVVRRTQEGLSKREIIRCLKRYIAREVFTALKGVDGL

SEQ ID NO: 476405 - protein, 320 aa, unidentified
MGTQSNYAGIDVSQATLDIAEHTTGRQWSFSNDDTGITAAVAALLDLKPALVVLEATGGIEVPVVTEMVAAKLPVVVVNPRQIRDFARATGRLAKTDALDAQVIAHFAAAVQPELRPLPNAQEQELSAVLARRRQLQEMLTMEKNRVRVARRPVRDRIETHVEWLNKELASTKHDLEHCVRESPVWREKDDLLRSCKGIGPATSCVLIGDLPELGGLNRKQISALVGVAPLNRDSGTLRGKRTIWGGRAHVRTALYMATLAAIRYNFPIRSFYQRLVAAGKPKKVAIVACMRKLLTTLNVMLRNHVRWTCPIPQITGPCS

SEQ ID NO: 476406 - protein, 409 aa, unidentified
MNAVGIDVSKGKSMVAIMRPFGEVVASPYEVAHTGSELRELANSLKSLHGETKVVMEYTGSYYYPIAFALHEAGLFVSAVHAKLIHDYGNNTIRKVKTDKADAIKIANYGISHWLELPQYLPVEDTRRLLKAYSRQYSKYMKLKNMLKNNFIALTDQTFPGVNELFSSPPRKSDGHEKWMDFAFKFWHCECVCGLSVKAFSERYRKWCKKAGYYFSQDKADDIYASACGHFLALPKIDATELLIKQAIEQMNALSENIAVVAREMARLAEELPEYPIVSEMYGLGDILCPQLMAEVGDVYRFRNKGSLVAFAGLDAPPFQSGKFESADRNISKKGSPHLRKTLFQVMAVYLQNSPADEPVYQFIDRKRSEGKHYYNYMTSGSAKFLRIYYARIKEYLNALDAAPEAAES

SEQ ID NO: 476407 - protein, 343 aa, unidentified
MKEAITIGVDLAKNVFQVHSVDAAGAVVVRRQLRRGQVLPFFRKHPSCLVGMEACATSHHWGREITALGHEVKLMPPRYVKPYMKRNKNDAADAEAICEAVTRPTMRFVDIKTPDQQSTLMVHRTRHLFIRQRTTLINALRAHLAEFGIVAGIGRLGVERLVKVIEDGEDDRVPPMARDCLMALRAQLDLVKRQILEADQRILAWHRASEVSQRLDDIPGVGPLIATALVASVPDPHAFKSGRDLAAWIGLVPKQNSTGGKERLGHISKAGNRYLRMLLVAGALSVIRRAKQVGYTRRPWLTKLLERRSTKIAAIALANKNARTVWAMMTQGTFYKEPEAQAV

SEQ ID NO: 476408 - protein, 383 aa, unidentified
MRAVCGLDVHKDTVYLCILCSDGEIIERVFGVLTFQLRDMRRLMQSHGVTEVTMESTAMYWIPIWRVLEPHFRLKLVNPYFIKQLPGRKSDVKDAQWIAECTMKDLVRGSFVPPERIQQLRQYDRRIFDLDAEIVRKLSKLDGIMQRCNIRLSNYVSNTDTKSYKAVVDMLCEGITDAEELIRKVHGRIVNKHGREIILASLTGVVSDAEKDTMRQLREEIALAETHKRECLDKMLQICRTYYPNELRRLMTIPGIKERAATSLIAEIGVDMTKFQTAAHLASWSGLKPRNDVSNGKFKSRRITHGNAYLRKTIIECAWAASRTKDCFFSRFSYHQTVVRKKNKMKVLVAVARKLLIAVWHVLHDATDYVDFNPDCKSPANNG

SEQ ID NO: 476409 - protein, 344 aa, unidentified
MDHFAGLDVSVKETSVCIVDDTGRIAREVKVASEPEALLPVLKNPAYRFKRIGLEAGPLSQWLFSALAEAGLPVICVETRHMRAVLKAQINKTDRNDARGMAQMMRAGLYRPVHVKTLRSQKLRMLLTHRKLLQSKAIAIDNDLRGTLRNFGLKVGVVGKVRFEARIRELVANFTDIAALVEPLLIVRRTLREQFCVLHRRLLAIVRDDEVCRRLMTTPGVGPVVSLTYRATVDVPARFHKSKSVGAVFGLTCAKYQSGEVEWSGRISRCGDEMMRVMLYEAAQAMLRSNKWSWLKAWAMQIARRRGMKKAIVALARRLAVIMHRIWVDGTEFRWTREQAAAAA

SEQ ID NO: 476410 - protein, 384 aa, unidentified
MNKHSILFIGLDTHKEFNEVAYIEEHRGAQPVHLGRIPSSKVAVQKLVRQFESKYPGATLHFVYEAGPCGYWIYRLITSLGHCCYVVAPSLIPKKSGEKIKTDKRDALKLSKLLKSEDLTPIYVPEPEDEAVRDLSRAREVAMKDLKDAKYQLKALLLRNNINYKGTANWSQKHLRWLTELVLPHPAQHIVLQEFLHTITERISRLERLDNELTHHVHQWRYYPVVKAIQAMRGVRLLVATGVVAELGDLSRFDHPRKLMSYLGLVPSEHSSGGKRHIGAITKCGNGRARRLLVEGAHTYRYAANISTDMQKRQEGLPKDIIDIAWKAQLRLCKRYKKMIAKGKHYNLVVTAIAREMIAYIWAIAKEVVLTPVNTKLRLARVPA

SEQ ID NO: 476411 - protein, 327 aa, unidentified
MGQTSLVVVPVIGIDISKDRLDVACLPEAILTSQAFTNDARGHAALIACLTGIAPRLIVLESTGGYQRTLVAALAAAGLPVVVVNPRQVRDFAKGVGRLAKTDKIDADVLAHFAQGVQPQPRPRSSPEDRALAELVTRRQQLVRTLTAERNRVGHAQTTIVRKSLHDAIKVLRKQIRHMDRGIGDLIEGDPALQQKQEIVQSFKGVGDQTSAILLSQLPELGRLNRQQISALVGVAPWDVQSGQYVGQSTIWGGRETVRCALYMTALSAIRHNAVLQPFYTRLLEAGKRKKVAIIACVRKMLIILNSLVKKNQKWDETWPQNFAKNA

SEQ ID NO: 476412 - protein, 386 aa, unidentified
MSTTTTIADPAAPILYVGLDVHKESVMIAVLPTGAATPTRVDRLPNELRALRRYLARLATTGEIRACYEASGAGYVLQRAMREWGYSCEVIAPSLIPRRPGHQRKHDRYDAKQLAHFYRSGDLTPIRIPTAAEERVRDLVRCRGTFQRELLRARHYVLKFLTRRGLRYTTGKAHWTRAHHAWLERLARDRVVGGEDAVVFEEYLGLMRYARQRRDALDSQVAALALTPALTTPVAWLSCFRGITTQAAMTLVTELVDWRRFAKPTQLMAFVGLVPREASSDATEVRGPITKAGNSYCRHVLIQAAWAYRHAPRVGAALARRQQGHPPAVITQAWKAQHRLHKLYQHLAYRKRPQVAVVAVARELVGFLWAVMQECPPSITAAASAA

SEQ ID NO: 476413 - protein, 410 aa, unidentified
METIVERPGALDVHKAQVTACVRVPAPDGGRCQHVAEFATTVQGLLTLHDWLAAHGVTQVAMEATHVYWKPVWAILEDDFELLLVNARHVKQVPGRKTDVSDAAWLAQLAEAGLLRASFVPPEPIRALRNLTRYRKTQIAERAREANRLHKALEDTGIKLDCVATDILGVSGRAMLDALISGTTDPELLAELARGRLRAKLPALREALEGRFDALHAVWIGAILAHVDFLDEQIASLTESIGEQIAPFEGAVELLCTVPGVQRRTAEVIVSEIGTDMSVFSTPKHLASWAGQCPGNDQSAGRRRSGRTRKGSKWLDWALEEAALAATRSKGTYLAAQYARLRPRRGHKKALGAVKHSMIVACWHMLSTGELYADLGGDYFERRDPDKTVKRLIGQLERLGHTVTLQEVAA

SEQ ID NO: 476414 - protein, 389 aa, unidentified
MTTTAKTTAADTILAIDLGKYKSVACVHAEASGTFHFTSLETTRSELQRLLARHRPTVVIIEACLLAGWVHDLCAELGIRCLVANTASEAWKFKHLKRKTDRDDAQRLAQLYLLEQLPTVALPPTSVRQWRSLIACRQTLVGRRVAVQNRIRALFVAQGLPAPRGARAWAAIGLAGMASWARPLGDCAADELWRGLLDLSLTEYRQLCELIDQTETKLDALGKQHADVALLETAPGLGPRTAETVAAYLHDASRFQTGKQVSAYSGLVPRQHQSGEMDRRGRITKRGPALLRKMLVECAWCMIRYNAWARGIYQRLTGGGQRRKKQAIVALARKILVRCWAMLRDRKPWHDPQTGPKPTLSPSKQRRRAEAQQRRQAKQQPALAPVATP

SEQ ID NO: 476415 - protein, 398 aa, unidentified
MDQHRFDVFVGLDVGKEHHHATALNAGGKRLHDKALPQDETALREVFAKLTAHGLVLVIVDQPATIGALPVTVARAMGIEVAYLPGLAMRRIADLHPGNAKTDARDAYIIAEAGRTMPHALRRVGGDDELIADLAVIVGFDDDLAGEVNRVSNRIRGLLTQIHPALERAIGGNISHPAVLALLAKYCGPTGLADAGRRRLTTTAKALAPRMHERLVEAIVKALTEQTVTVPGTRAAELVLPQLAAQLQGLLTQRAEAAKQVEEALDAHPLSQLLMSMPGVGIRTAARLLLDVGDGSAFPTAGHLAAYAGLAPVTRRSGSSIRGEHPSRGGNKHLKRALFLSAFAALHDPDSRAYYDRKRAAGKKHNAALVCLARRRVDVLHAMLRNGTYYQPRTPAAA

SEQ ID NO: 476416 - protein, 467 aa, unidentified
MGLKKYNNQLNNIQGKKGSQFSSQLRGINLERVLIVAIDAAKFYQKALLCNYFGDVLEKPFFFGINKDGLELLCSKIEQAQNEIEAERIFIGVESTAHYYQDIVTQLGNRGYGVTIINPATTYEERASALNWSKTDDLDLYAIAHALIQNKGMENKLPEGFYRKLMTLTRARRSEVQKRALTRIQIRTLMDHIWRDYQGLVEVNNNKPTKRLIFSDFWGQASLFFIENFPHPSKLIELGKDKIWEISKQNKLRIKETHIETLFYVAEKSIVKPMEDISAELLLLRLAVQDLKRLDENVSVLEKEIEHVLLQTDGRLLLTVPGIGVITAAEFYSEIGDISNYEHAGQLIKKAGTNPIIIQSGGTQGFYGRISKQGNKHLRFIVYTVGKCLAQHNKDLRPYYERLKDRGKHSRKAYIALGNKFIRIAFSMLKHKKTYETKQKDYGIFNEVKKKLLYTKMSTYLNIALAS

SEQ ID NO: 476417 - protein, 345 aa, unidentified
MDQISRIGMDTSKHIFQLHGVNAAEAPVLRKKLRRKEMVTFFEKLAPTEIAIEACGASHHWARLLQSFGHSVKLIPPQLVKPYVKRGKNDAADAEALCEAMSRPTMRCVPVKTTEQQAALMLVGVRDRLIRNRTQLANTTRGHAAEFGLTAAKGMAHLVPLLERIQAAESLPALARELFAFQAKEYAQLQAQIDEVDAKLMAWHRADECSRRLAKIPGVGPLGGVLLRMKTPEPELFRSGRQFAAWIGLTPKDHSTAGKVRLGVITRAGDEGLRSVLVVGATAVIQHARRGGRASPWLAELLKRKSPKLAAVALANKIARIAWKLMLTGEAYTTKSAPAAFAGAV

SEQ ID NO: 476418 - protein, 323 aa, unidentified
MWNHYMKKLSEVNQRPDNHIKGLESALEPFHKDLEAVVVESTYNWYWLVDGLMEQGYKVHLANPSAIKQYEGLKHSDDKWDSFWLAHMKRLNILPEGYIYPKEERPVRDLLRKRSFLVKQRTSHILSFQSMVDRVLGKRIRSNEIKKLKVEDVEQIFDEEHLLLSGQVGIGSMRFLDLQIREIEKVVKKRMKLNKSYQYLLTVPGIGYILALTIMLEVGDIRRFPTVGDFSSYCRCVDSKRLSNGKKKGKGNSKNGNRYLSWAFVEAVHCARQVSPKFRKYYQKKEAQRNNIVAAKALSNKLSRACYYIIRDQVPFREEGLFC

SEQ ID NO: 476419 - protein, 409 aa, unidentified
MDRLIERVCGLDVHKQTVAACVRVSEARGRREQHVRTFGTTASELLALRDWLEAHVVTHVAMESTGVYWKAIYYVLEDRFTCLLVNAAHVKQVPGRKTDVQDCVWIAQLLEHGLLRGSFVPPAPIRELRDLTRYRKALIQDRTREANRLHKLLEDAGIKLASVATDILGVSGRAMLEALVRGTTDPEVLAELARGKLRAKLPALRQALTGQFRPHHAFLVSQLLAHLDYVDETIATLSQRIEEVIAPFADELARLDTIHGVARRTAEVLIAELGVDMTHFPTDRHLASWAGLCPGNNESAGKHKSGRTRRGNRWLRAALTEAALAAIRTPNSAFTARYRRIMRHRGHKKAVLAVAHAMLVTAYHLLARHTTYQELGANYFDRRHAERVARRAVALLEQQGYRVTLERAA

SEQ ID NO: 476420 - protein, 450 aa, unidentified
MKALPILNPNAAGIDVGSEQLHLSIAGDEPVVFGTFTDEVYRLRDYLKAQGVSSVAMEATGVYWLYVYAVLEAAGLEVVVVNGRHVRNLPGRKTDMADCQWLATLHAHGLLRGGFVPPAAIRRLQDYQRLRADHIIGASSQVQKMQQALERMNIKFHDVISDLDGVSGLKVVRAILAGERDPQALLLLCDPQIQKKKGDRVVRSLKGTWAPEHLFALSQGLAAWEFYQKLLSQCDEQIEVVLRELAGPEPPPPAPPTAPAEIPAKRTGKNTPQIQQLHQLLLRLCGGRDVTAISGIGDYLLLQLLAETGTDLKAWATEKHFNAWLGLAPGSRQSGKRKGSVKVQRNRAGRLFCAGARSLVNSVDKALGGFYRRLAARKGGLVALKALARKLAELYYRVLRHGLAYAEQGLRAYEQKYADSQRRLLGKLAAKQGFKLVSLQLQAPPTGGTA

SEQ ID NO: 476421 - protein, 360 aa, unidentified
MNKNSIIFVGLDLGDKLSYIALLDRDGTLIEETRLPSTRDTFRRWFSRLAPCRIAMEVGAQSRWASHLLRELGHDVLVANARKLRAIYHNPRKGDRVDAETLARLARLDPELLSPIHHRSPKAQAHLAVIRSRDALVRVRTLLINHVRGIAKSSGDRLPSCSADCFAGKVASAVPEPLLPALLPVLDTIASLSDQIRAYDRQIASLCQENYPETRHLQSIAGVGPLTSLAFVLTLENPQRFARSRQVGPALGLVPKRDQSGDRDPQLRITKTGDSYLRRLLVGSAQYILGPFGPDCDLRRWGLKLAERGGKNAKRRAIVAVARKLAILLHHLWTNGVIYDPLYQAKEPIGVPATVAAVVG

SEQ ID NO: 476422 - protein, 372 aa, unidentified
MLTTNFQHFADFSNQDFYIGIDVHKKSWAVAIRSLRLQVAHLTQPPSPDTLVAYLKRKYPGGNYFSVYEAGFSGTTAHDRLCSLGVQNIIVNPADIPATDKQKKTKTDLHDSRSLAEYLEKKSLKGITVLPREQQELRALARLRISKSRDLTRAINKLKGFLFYFGFSLPGAWERHAYLSKRAINWLNDLELSTTAGTLALKEHVNDILYRRERLLFITQQLRNLVQARYCRQYESLISIPGIGMKTAVALLAEIGNFERFKDPDQFCSFLGLLPWEHSSGDNLHTKGLQPRCNRYLRPFLIEASWAAIRKAPELLLYYRKHAIQNSKQAIVKVARKLALIARGVVLKQSLYDPTYSSLQVTAKTGLEPHAN

SEQ ID NO: 476423 - protein, 346 aa, unidentified
MAIVETTRSITGGVDTHLDTHVVAALDPNGGVLGVAAFAATRSGYCSLLSWLGEFGTIARIGVEGTGAYGAGLARHLRRLGVEVIEVDRPNRQLRRARGKSDTIDAIEAARAVLSGRAIGVAKTADGNVEAMRALLIAKRSGREARITCLNQVRHLGFTAPDELRERFQRVSRGMLAAQAAALRPRPDSDAVLYATKLAMRSLGRRVLVIDEEIAQLEVVLGELVTATAPGLLGLYGVGVDTAAILCVAAGDNPERVRSEAAWAHLCGVAPLEATSGKVTRRHRLNRGGNRQANHALWRIVFTRLGSDPRTRSYLARRLDEGRSRPEIIRSLKRYVARETYRHLPR

SEQ ID NO: 476424 - protein, 322 aa, unidentified
MAKHTTICAGIDTGKRKLDVAIEGHRELLQVDNTAEGHKVLMAWLRQRRVKRVGIEASGGYEQPVVAELRRKRFVVVVFQPAQVRAYAKFHSQRAKNDKIDAALIAACTAAVRKIHAAPDPRLLPFAEQLTMIDQINEDTARLKNRIESCRNARINKLWQEDIARLEMREKAELKTLVASIRKHPDLAKRLELINSVDGIGLPTAVAILVRLPEIGRITREQAVALAGLAPYDDDSGEQVGVRHIEGGRKRLRRALYTASLAASFRWNRQLIQLYQRLTAAGKEHKRALVACARKMLIFANTVVARGTPWCDEPPVGSLSVS

SEQ ID NO: 476425 - protein, 418 aa, unidentified
MKKHSKSSQRSEPSLKRTKARGPVQRDAKEVLAEVLEKLRGKLDAPGVSTSAKENRGGNTVVPNRDRLTVGVDLGDRWSQYCILGLEGETLAEGQLRTTQEDVREFFQALTVARVVMEVGTHSAWVQDVITEWGHEVLVANPRLMEGSKRRKRKSDRIDANKLARLGRVDPQSLYPIRHRSREVRQDLVVLRARDALVSVRTELINTARGLVKSMGTRLPQCSSPSFAEKVKNAIPVEVGEALQPLVQLVETVNEYIERYDQKIEELGRKKYGHTTLLRQVKGVGPITSLAYVLTLEDPQRFASSREVGPYLGLVPKQEDSGDSQPQLGISKAGDRMLRRLLVGSSQYMLGAFGPDSDLRRYGLRLCERGGKNAKKRAVVAVARKLAVLLHRLWVTGDVYEPLRHTGAGSRTAPAAAA

SEQ ID NO: 476426 - protein, 387 aa, unidentified
MSEAFDPRKSTTAFDQASTLVVVVELSGKSWRVGANAPGVSRRPLRTVAARDIGAVLEAIERWKGEANKVGCEVGRVVVGYEAGLDGFWIARALTAHGVEVYVMHPASISVERRGRRAKTDRIDVDILLRTLLGWLRGEPRHCTMAPIPSEAEEDMREPGRQREALTAARLKVENQMRSLLARFGIANFRPRLKKAAELLTRLRTFDGRPLPPNTMESLERLLAQHQLLSKQLKEIETAREQVVAVADPDRLQRMIQMLAGLVGVGVETATTLVHEVFSRRFRDRRALAAFVGMTGTPYDSGGSTREQGLSKNGNPRVRRMLTQLMWRWTIFQPQSLLTRWFVARTGGAKGRMKKIMAVALARKLLVALWRYVETGVVPEGARLAAA

SEQ ID NO: 476427 - protein, 507 aa, unidentified
METRTNLNEVGKKKLVLGIDVALKNHWAAIGDNKGQEMVKPFQFSNNAEGMSLLEGIIKQTGKAENKGDVIIGMEPTGIYWKPMGHYLREAGYRVVLINPSHTHKTKELEDNSQTKNDRKDSRVIQTLTREGKYLEPIILRGIYGELRRLGQAYKSALKRGNVISNKVKMIADEYFPEMRGIIKSINGKTAKGLLAEIPFPDDIIRLGKTKFYKKLKKWSNKRFGKKKSLKLWEAAKKSIGVKVGQEAAKIELRQLVEEMELVKRHREELVKEIEEKAKVTEEGKSLIKLPGLGYLSIGKLIGETGSIKSYKGARSLEKLAGLNLIESSSGERHSGKKISKRGRKLMRTTLYQMALASIKNNRAIKYEYQYRIKTKKQKKMKALTAVACKMLRVIYALVSANKEYDERKISRHYYESEIKREENICEWVTPIIPPSGPGYNSGDTVMKNTGHPLPMTLNEVMSGAPVQYRDDTGRNDRVRHRKSGGTNPLVNIEKSWAEENQEVVCK

SEQ ID NO: 476428 - protein, 377 aa, unidentified
MAQDTMIEAAVTGGLDVSDRYTYVCVLNFSGGVVDEGRVPTTPEALRRRFSGHGPMRLVLETGTHSPWISRLLEACGHEVLVANARQLRLIAQSDSKNDRADAETLARVGRLDPALLKPIRHRGAEAQLDLALIRARDALVQARTQLVNHVRGAVKAVGGRLPACSTTSFPMKVGEAIPAGLRPALGPVLDVIAAVGKELGRYERLVEDLATTRYPETAALRQVPGVGALTALSYVLTLEDPARFPKSRAVGSYLGLRPKQRDSGAGAPQLRITKTGDAYLRRLLVGSAHYVLGPFGPDSDLRRWGSALAARGGKNAKKRAVVAVARKLAVLLHRLWVTGAVYEPLRVAEQRPAATPVLTASMLSGDGPRSSTAQSR

SEQ ID NO: 476429 - protein, 315 aa, unidentified
MAMPVAITQSIVGVDVAKDELVIYHAESDRLETIPNTKAAIKKWLKALPAPVDVAIEATNIYHQEFVNLAYAQGCVIYVIDGYELSHYRKGVKIRAKTDALDARLLARYLSNEGHLLHPWTPPSPLYCRLISLFRRRAALVQARVSLKQSWANEPLLKTAFENQIAAMQRLETLIDKTIQTQLEQAGLAHQLKRCMKVEGIGLLSGARLITSFQRGDFRNADAFIAFLGLDLRIADSGKKKGRRCLSKRGDPEARRLLHNAAMSASRTAAWRGFYEALRARGLSTTQALVALARKLARVVFALLKNQSEYLPKCI

SEQ ID NO: 476430 - protein, 423 aa, unidentified
MKPLCAQQFTAYVGIDWADTKHDICLQSAGSDRREFDCIFHQMPDIDVWAKALHQRFGGCIAIALELAKGPIVYALQKYDFFVLFPINPLTLAKYREAFQPSRAKDDPTDAELALDLLMRHPERFTPIQPQSAAMRTLVSLTEHRRELVGDKTRLTNRLINTLKQYYPQVLDWFEQRDTVLFFDFLARWPTLAHAKRARLDTLKAFFNAHNSRRSTIVEARLESIKAAIPLTEDRGVIDPCRLHALMLVKQLRAIIDAIDQFEREIADLAPTLPDYYLFERLPGSGEHLAPRLLAAFGENRQRYKGADELQKYAGIAPVTERSGKKHWVHWRWQCPKFLRQTFVEWAGQTINKSFWAGAYYRQQREKGSSHSVAVRALAFKWIRILYRCWKTRTPYNESRYLNALRKRGSPLLKNLMPNAENA

SEQ ID NO: 476431 - protein, 411 aa, unidentified
MLKIVYPICCGLDVHRDFVYACIASTNERGVTIYKSDRFSTYTRGLKKLSSWLTANNCTDVCMESTGKYWIPVYNVLEITCKVVLAHPKYVKSIRGKKTDKKDAKWIADIFKHDLVNGSFIPPPAIRQLRDLIRYRFKLTSYSTGEKNRAQNCLTVSNLKLDDAFSDVFGKSAKAIIERILENPNEPFDVSPFIRKGCKTPIEEIQAAVDGVICPEQAEKLRIIRAHLDDLDKAKVNLESAILTVAKQFAPQINLVSTVPGIKSFSAIAIIGEIGIDMSVFPSAKHLCSWSGLTPQNNESAGKKKTTRIGRAGAYIKPLLIQCANAAVKSDKHPEIKNRYLKLKKRRGHKKAIIAIARMLLTAIYNILKNNEPYNPELYIKSNEQPVPNNFSLDHAIRLLLTQGYAVTPPG

SEQ ID NO: 476432 - protein, 481 aa, unidentified
MAKRKMSTYERLQKGLRLSGKQRDDLRQRLHSADPGLTIVHPDAAGIDVGSKSHFVAVPAGRDPQPVREFGSWTADLKKLALWLKSSGIRTVAMQSTGVYWIALQEVLEAEGIEVFLVNARGTKNLPGRKSDVQECQWLMKLHTYGLLRNSFRPPEQIRQLRTIWRLRERLVGDAGRTIQQMQKALTTMNIQLSNVISDISGVTGQAIIRAIIQGERDPWKLVKLRNECIQASEEELAHSLEGHWREDMLFELERVVECYDFYQRQIAECDRQVQKYLAALPERKLEVAVDADAEQAWKKSKKRRNQSTRRKNQPSFNLRGELERIFGVDVTRIDGIDVMTGQVILSELGPDLSAFPSEDDFASWLELAPRRDITGGQVVKQKSRRSKNRVANTLRMAAETLIRSESYLGARYRRLRGRKEGRCAVKAMARHLACLIYRLLTKGQQYVDRGAAYFERQRSQRELTGLQRKAAEHGMKLVPA

SEQ ID NO: 476433 - protein, 388 aa, unidentified
MNRIIKIGMDVHSKNYTLCAMEPTIGAEDRIFGEVQVAPDYKAVICFIESLKMKLGFCDDYSIECGYEAGCLGYTLYHQLTGAGVKCVILAPTTMLTQQGKRIKTDKRDARLIAQCLCYGGYHPVYIPTGEDDAVKEYLRMRDDHKLALKKLKQQINAFVLRHGQQYSGTKWTIKHVTWLKKLELDPMYRETLDEYLASCEEQEAKIERYDKRIEEIASEARYQENAKKLGCFLGIRTHTALSLIVETGDFKRFAKGNTYAAFLGLAPGEHSSSDNVNRLGISKAGNTHLRCLLIEAAKGICKGAIGHKSKELRARQSGQPAEVIAYADKANTRLRSRYYKMIRHGKKKNVAVAAVARELACFIWGMMTGNISIRPKGDTSGPAVSQG

SEQ ID NO: 476434 - protein, 426 aa, unidentified
MASEVTTVIAGIDTHADTHHVAVINEYGKPLADKEFLAVGSGYRKIVEFITSYGRVSAVGVEGTGSYGAEIARTLRDEGLSVFEVNRPNRAARRLKGKSDPLDAYQAAQSVLDGRSKSIPKGKDGPVECLRILRAGRTSAVKARTAAINQIKGLLVSAPDNLRAKYRGLGSSALITALQRCRPSGHIADPEYVTLLTLKALATRCQSLAAEIATADAALQEIVDTYAPMLCDLPGVGTEVASQLLVTVGDNADRLGNDAQFAALAGVAPVPASSGKTTRHRLSRGGDRNANRALHQVVLVRMGSCPRTKDYVAKRTAEGKSKREIMRCLKRYAAREIYRQSPTLGLHRTTPTCASCAPSWDSPSRPQPASSVIGPPKSPAWNEALSVTMLSPRATANGWSIKLPTSRPAEQSTSSTPREHAEGPAG

SEQ ID NO: 476435 - protein, 391 aa, unidentified
MPEDAPRPAQAAIRTDLGAIFVSMELSRRVWLITSLSPGGGEKMSKHSVPASDVFGLLRRFAELRRKAAARTGRDFPIIVIQEAGLDGFWIHRVLQSEGIESHVVDAASILTSRRRRRVKTDRIDGETLVRTLMAFKRGEPRVCSMARAPTPQEEDRRRVCRERRTLVGERVKHVNRIKGLLFAQGVFGYEPLRKGRRERLEDLRTGDGRPLPVRLKAQIIRELDRLEVLLEQLKTVEAERDAMLKPATDEAASPAAMLARLKGIGPETAAVLWSEGLFRQFDNRRQIAAYAGLAPTPWKSGSIDHEQGVSKAGNPRLRTTMVELAWLWLQNQPTSALSLWFHERVRRLGGRMRKTTIVALARKLLIALWRYTTAGVVIEGAAMKAAPTTI

SEQ ID NO: 476436 - protein, 338 aa, unidentified
MSLYAACDLHSNNTVLAVIDAAGATKYKHRLPNDLSLIGSALAPYREDLVGVAVESTYNAYWLIDGLQTAGYPAQMVNTLAVPQYAGLKHGDDDSDALHLAELMRLGLLPLAYIYPREQRPLRDLLRRRMLLVQQSVRLMHSVQGYWARTTGHRFSANDVRHLTRQQLNETFVDATEQFAVFNLLQAWRTLQDRVVSIEDWLNSDMRGRTDLRVLRTVPGIGVVLSLTIVLESGDVHRFDDVGQYASYCRMVPALRFSNGKKKGTGNRKCGNRYLAWAWMEAANFAIRFDPTVKRWYQRHKAKKVRLVALKAVAHKLARAGYFLLRDGGTFDVHRAFA

SEQ ID NO: 476437 - protein, 323 aa, unidentified
MYFLGCDVCKSKLDVALINEQGVAQWYDIVSNETDIIAAYLMTVSSHYVNDEITCVVEATGCYHHPLTDACEAIRVPCRVYNPILTKQGIKGSVRGKKTDKTDALLIARMGLRGEGRLDIPEPYRSTKYTARAQQRLGQMAGAVQRYQIHLENVINDDLSVEARELLSSIQRQFAITRKQIVVDTAAGAPKDLMRQLQTIPGVGPFIAASLIGEVQTMERFHTAKSFIAYAGLDPKIRQSGHTLNSTGRLTKRGSIYLRRSLFIAGNIARRYDPYFKALYDKKRSEGKTYTVAICVVARKLATVARALWLSGKDYNVNYWNRE

SEQ ID NO: 476438 - protein, 376 aa, unidentified
MVDHSEAFVGFDTSKLRNAVAIADGGRGGEIRFYGEIENAPAATAKLVRKLAAKYERLMFCYEAGPTGYGLHRQIKGLGFECVVVAPSLIPKRPGDKVKTNRRDAVNLARLLRADELTAVWVPDGGHEAMRDLTRARETAMLDLRTKRQHVSAFLLRLERPYPEGKKTWTKAHMGWIASQKLDYPEHRIVLEEMMLSVRQAQERLERLEQAIAAAVPDWSLAPVVTALMAMRGIDLIAATTLLAEVGDLSRFQTPLELMAYLGLVPSEHSTGDEIQRGPITKAGNRRARRMLVECSWSYLHPPRVGRAKQQKVDAATPAVREIAWKAQHRLYRRYRALIRKGKRKTVAIVAIARELAGFIWAVARATTTAHAAVAS

SEQ ID NO: 476439 - protein, 345 aa, unidentified
MQSMYYIGLDVHKKTISYCVKDGSGIVHGEGAIPATRWDLDRWMKMLPQPWTAAMEATIFTGWIYDHLKPHAAALKVAHPLMLRAIAAAKKKNDRIDANKIADCLRCDFLPECYMASTEIRERRRTLRYRNLLVHQAVQLKNKISGLLMEAGVSYNKQKLHKVGYFKELLATNPDINEGLRPLLRLCRETLVRLQKTESALVRSLQRDSLLAERVQRLMTIPAVGPITALTWVLEVGDVKRFSSIKKAISYCGLCGAEKSSADIVKRTPISKQRNKHLQSVLVEAAKMAPRLSPELALIYDREKQKGNANRASLAVARKLVAYLVAIDRSQRDFLVVEKENCAAA

SEQ ID NO: 476440 - protein, 334 aa, unidentified
MKQVNDVGVDVDSKQLVCAMQCAGQRVPLAAFANTAAGHKKFIRWATKGGHPVRVCLEATGIYSLEFALALHEAKRVEVMVVNPRAIKDFARACMRRGKTDALDAGVMLDFLQRMPFTRWQPPAPEILELQAINRRIDQLHTELTREKNRRHAAEFAGASAEAIAQDIEVNIRHLERRLERMHESGLKLVRGVPALAARLAHLVSTKGIGETSAMRLLAELLVLPDDLSAPQWVAHAGLDPRPYESGTSIHRPRRISKVGNRHLRAALYMPALVAIQHEPNVKAFYSKLVAAGKRPMQAVVAVMRKLLHAIWGMLKHDQDFDGNKFFKLAEKTA

SEQ ID NO: 476441 - protein, 361 aa, unidentified
MRMKKPTQCLIAEVPRSSSRVEMTIGIDLGDVWSHYCTLNEKGEVVDRGRFRTTPTGVERWFTDLPSARIAMEAGTHSIWISQQLQEMGHEVIVANVRELRAISHSDRKSDQVDAEKLARFARLDPKILRPIAHRTIAQQEALTLIRARNLIVRLRTGAVNAVRGLEKPCGYRLPASSTLCFAMHAVLPAGLVQALGPVLEQIADMTVKIKAYDRAIKKQTETEYPETKALIKVYGVGQLTALTYVLTLGSKERFQRSRDVGCYLGLRPRRSQSGERDPQLGITKAGNVYLRSLLVECANHVLGRHGKDSSPRDWGLHLASRGGKQSRNRAIVAVARKLAVLLHRIWVTQEPYVPFYAAAA

SEQ ID NO: 476442 - protein, 334 aa, unidentified
MNEKGHAGEARRVVHDRQVYREFLARLPPHSSIAVEASGSYSWLVDEMERSGHRPKLRNPLEAKRRMGLTKKTDTLDARGLAILLRNGTLPEVWIPPSELRDQRELLRLRIFLVHLRTRVKNRIHGTLARYNVQVPGADLFGVAARQLLGARLPELPEHSREAIEQELATLDFLETQIESAEQRLEAIMQVSVEADLLKTLPCVGPILSMVLMLEIGRVDRFPSAAHLASYAGLVPRVHSSGGHTRMGQVCSNVNRNLKWAFVETGNLIVINQRGLAGTHVVRLYQRIKRAKNHQKAVVAVARHLAEAAWWVLTRQEVYREPHGSRHVLSSTHG

SEQ ID NO: 476443 - protein, 320 aa, unidentified
MMAQNEVIVVGIDVAKDKVDACIRSLSLRQTCPSTAQGHRKLIAWLRKHKVTKAVMEASGGYERAWAKVLREAGIEVRIVDPRRVRSFAQSAGRLAKNDAIDAEMIAWFAETFSEAPSQVHDAAREELQTLVKARLGLIDYRMRLVSQSEHAAPGLVQKAHAHILKSLASEIAKLAAAICAKVRSTPDFAERAEIIESVPGLAGTSAANLVAGMPELGQVSDGIAAALIGAAPYDDDSGKRRGERHIKGGRRWVRNALYMPCVGAATQNNPVLKAYYQRLLAKGKEPKVALVACMRKLIVILNTMIARRQKWDSSRDAVS

SEQ ID NO: 476444 - protein, 343 aa, unidentified
MQTITTIGLDIAKSVFQVHGVDAGGQVIVRRQLKRRYVLTFFQKLPPCLVGIEACGSAHYWSRELQALGHTVRLMPPAYVKPYVKRQKNDATDAEAICEAVTRANMRFVPTKTAEQQSGLVLHRARHLFIRQQTSVINAIRAHLAEFGIVAPVGRHGVEELLHVVTDPNDKRVPEIARACLSALGAQLRRIKEQILEFDRLIRAWHRSNEMSMRLDEAPGVGPVLATALVAAVADPKSFRSGRNFSAWIGMVPKQHSSGGKNRLGNISKQGDRYLRGLFVAGALAVIRYAKIHGTKHRPWLTALLARRPTKVAAIALANKIARMVWAMMARGERYKEPVALAR

SEQ ID NO: 476445 - protein, 382 aa, unidentified
MAGTEPHAWGTGRMDDITYVGLDVHKATVCVAVAESGRDGEVRQIGVFENRPEILCKMAARLDRGGRRLSFCYEAGPCGYGLHRLLTGRGHSCVVVAPSLIPMKPGDRVKTDRRDAVMLAKLHRAGELTAIWIPDAAHEAMRDLVRARATAGRVLAQARQHLQGFLLRHDRIYRGPRAWTLAYRRWLTTVRFDHPAQQIVLQDYIDAVEDAEARRDRLTRQIEELLPSWSMAPVVKALQAMRGVALVVAVTIVAEVGDFRRFANARQLMAYLGLVPSEHSSGSTIRRGGITKAGNALARRVLIEGAWTYRMQARVSRKLHDRLEPLSSAIRDIAWKAQVRLCTRYRRLAASGKPKVVVTTAIAREMVGFIWAIARIAQPALE

SEQ ID NO: 476446 - protein, 343 aa, unidentified
MEYYVGLDVSLKQTSICVVDQTGLVVREGAVDSDPDAIAEFVRSNAPSVVRIGLETGPTATWLWTELKRLGLPVICIDARHAKAVLKMQINKSDRNDAAGIARIMQTGWFKEVRVKDLDSHAVRALLASRALLVKIKRDLENQVRGLLKNLGLVIGRAKFNVFAVRAEELIESRPALVAAVRPLLEARKAIEQQVDDLDRKVHKLARHDAQVRRFMTTPGVGPITALCFKATIDDPTRFKRSRSVGAYVGLTSRRHASGEVDWSGRISKCGDAMLRMYLFEAAGVLLTRVPKWSALKAWGTRLIKRNGLRKAKVAVARKLAVILHRMWVDGTEFNWSTKKVAA

SEQ ID NO: 476447 - protein, 339 aa, unidentified
MKVSTLGIDLAKNVFQLHGVGCNGQTVLKKKLTRVKFLPFLMQLEPCLIGMEACASSHHFARVLRQYGHEVKLIPPQYVKPYVKTNKTDAADAEAICEAVARPNMRFVQIKTAEQQAILVLHTERNILIRERTACANSMRAILAEFGIIMPRTLSQLYKKIPEILEEYDNELSPFVRCSVARQLEHLQGVEDQITLIEQELSRWAKTQPACQRVMKVPGVGLMTATYLVASVGNGQQFHSAKQFAAWLGLVPREFSSGGKQRLGRISKRGERYFRYLLVHGARAVAAVIERHKDNMPWLYRLLNKKAYNVAVVAQANKTARILWSMLVHHTEYRTLSAV

SEQ ID NO: 476448 - protein, 401 aa, unidentified
MKEFNPERQRIETASALEIVRTAENVDVHAAYVGLDVHKETIAVAVAEPGRGEPIYRGEIANKPKAVEKLLAKLSEAYEGGLLLFCYEAGPCGYVLYRQILASGHDCQVVAPSRIPKAPGERIKNDRRDALKLARLLRGGDLTAVWVPDQEQERMRDLSRARDDMKGQERKARQQLNAFLLRHGYHWPRGKSRWTPAHENWLAGLKMEHPWQQVVLEEYIAAERAVGERVAQLNDHLMRALPEWSLAPVVDSLIALRGIDKLAAIVLLAELGDISRFESPRQLMGFLGLVPSEHSSGSRRRQGGITLTGNGHARRMLIESAWSYRFPARQTKHLKGKARNASPLAKQIAWKAQTRLCGRYRTLTRAGKNTKLVCVAIARELAGFIWDIVCREMSRLAPQQG

SEQ ID NO: 476449 - protein, 373 aa, unidentified
MFNLPVFVGLDYHTKTIQVCVMDQKGNILANQSVANDPAAVFRVVAPYGTNVHATIEASTGSAAFAEELITQYQWSVSLAHPGYASRMKQTPDKSDWTDAKLLADLIRVGYLPRVWLAPPYIRELRDLVRHRHGLVQQRTQTKLRLRALLRQHRIDCPESPWTIKGKKWLLDAANITSSHVRTLLRDHYDTIEFFDKKIVHAEARMAAATADDSVVKQLLRQPGIGLITAMTMRAIIGHFDRFRTGKQLAHFCAVCPRNNSSAGKTTTGGLIKAGDDLLRQVLVEAAHRLIRYNPEWKVMADRLRANGKKTCVIVAAVANRWIRKLFHQMRAPMPTGEADVRLLRHRQESTTALETPSDTGSCLSHGAGKLST

SEQ ID NO: 476450 - protein, 418 aa, unidentified
MKKHSKSSQRSEPSLKRTKARGPVQRDTKEVLAEVLEKLTGKLSAPAESTSTKEKRRGNTVGPNRDRLTVGVDLGDRWSQYCILGLEGETLAEGQLRTTQEDVREFFQALTVARVVMEVGTHSAWMQDVITEWGHEVLVANPRLMEGSKRRKRKSDRIDAHKLARLGRVDPQSLYPIRHRSREVRQDLVVLRARDALVSIRTELINTTRGLVKSMGTRLPRCSSPSFADKVKDAVPVEVREALLPLVQLTETVNDCIARYDQKIEELGQKKYGHTTLLRQVKGVGPITSLAYVLTLEDPQRFSSSREVGPYLGLVPKQEDSGDSQPQLGISKTGDRMLRRLLVGSSQYMLGAFGPDTDLRRYGLRLCERGGKNAKKRAVVAVARKLAVLLHHLWVSGDVYEPLHHSEAETRTAQATAA

SEQ ID NO: 476451 - protein, 388 aa, unidentified
MIQVDDLSRSLSAFEQVSTLVIVVELSHSSWLAAGVVPGIERRPLKKLDPDPAALLHLVEGWRDRATKAGRAITRTVLAFESGRDGFWLARWLRVRGVETFVMHSTSVAVSREPRRAKTDRLDTEMLIRVFLGWLRGEPRHCKMVAIPTLEEEDARRPSREREILVGERTRIINRMKAALVRLGIRGFKPGLLTAPQKLEALRTPEETPIPPNMLDEMRRDMARLAWVRGQINAIEQARLERLERAPATRRHAMVRMLARVIGVGVETADMLVQEVLSRNLRDRRAVARYAGLTGSPDESGSKRREQGLSKAGNARVRRGLIQLAWRFLRFQKDSALAQWYRARTEDAAGKRKRTMIVALARKLLIALWRLVTIGEIPVGVALRTAVA

SEQ ID NO: 476452 - protein, 368 aa, unidentified
MNGRRPGMRILALDLGKSKSVAYTVDTATGECGFKTVRTEPAVLGRLFAEGRPDRLVFEIGPLAGWVHDAAREAGVRQIEVANVAHEAWRWRHTRRKSDRVDAVRLADLSAAGQLPMVHVPQAATRQWRGLIAYRARLVARRTAVKNRIRAILASVGEPGLPRGAGGWTRQAVASLAALARPLAEVGSEDLWRGELALELEALAHLEAQVATVEAKLDTLAEADERVARLRTIPGVGPRLAELLVALFDDPHRFGSGRQVGSYLGLVPRQFQSGAMDRHGRITRHGNPLARALLVEVAWLGLRWNGRLRAIYQRVHRGSRARRKVAIVAVARRLAVFAWAMLRDGTVWRPERPEEKPTQHPAEAGVLA

SEQ ID NO: 476453 - protein, 411 aa, unidentified
MTVFMGDDWAEDHHDVHLMNEDGKKLASRRLPEGLDGIRVFHELVADHVIDPAEVVVGIETDRGLWVTALVAAGYQVYAINPLAASRYRDRHNVGGAKSDPGDAKMLADLVRTDRHNHRQVAGDTPGAEAIRIMARGHQNLIWTRNRQTNALRSALREYYPAALEAFPDLADRDTLAVLAKAPAPAAGASLTLGQIQAALKRGGRQRNIERRASEIQTALRTGQLAAPAAVADAFAATTRAAVGIIAELNRQISQLEASLTASFEQHPDSDIYHSLPGFGVVLGARALGEFGDDPNRYANTKSRRNYAGTSPLTIASGKKRAVLARHVRNRRLYDALDQAAFCALTQSPGCRLFYDQHRAKGDLHHQALRALGNRLVSILHGCLDHRTLYDEDIAWAHRQPATPKEIQQAA

SEQ ID NO: 476454 - protein, 262 aa, unidentified
MVAQTVQDIGIDVAKGWLDVAVFQTQEQARFDNDKDGWAKLVRWLRGRTVRAIGMEPSGGYERGVAKALRSADLPARNVNPHKLRHYARALGRLAKNDRIDALLIARYTAELPTRPVRCDPIAEQLADLVVARRQLSDDKVSLANQLEQLREPMVKRIFTQRLRRIELDIALLAKRMAELVASQPALAAKDRLIQSFHGAGPVLSHTILALAPEIGQASRREIAALAGLAPYDFDTGTFKGRRVIWGGRRQRARLGVGFAAG

SEQ ID NO: 476455 - protein, 344 aa, unidentified
MEHYAGIDVSLECSNVCVVDTSGKIVREAKVASEPEALIGWFGSLGFELARIGLEAGPLSQWLYAAIKEAGLAVELLETRHVSDAFKAMPVKSDRNDARKIAQLMRLGWFRPVHCKSMSAQEIRAMLTARKLIQSKLQDIENSLRGILRGFGLKVGKTTKRSFASRISELVVGHPALETIAAAMLAVHMALLREFNGLEKRVRTMSLLDAKARLLMSTPAVGPIVSLTFACAVDDPSRFTSSKQAGPHFGLTPKKYQSGETDYTGRISKHGDASVREALYEAAHIMLTKPIKGCSELKSWAMRIARRAGTNKAKVALARKLAVIMLRMLKDNAPFNPAAKAATA

SEQ ID NO: 476456 - protein, 343 aa, unidentified
MGEVSTIGLDIAKSVFQVHGVDGTGAVMMRRRIGRSKVLEFFGGLSPCLVGLEACPSAHFWSRELQALGHTVKLMPPSYVKAYLKRGKNDANDAAAICEAVARPSMRFVAIKSEQQQCVLMLHRARQLLVRQRTMLSNAIRGHMAELGIISAKGRNGTAELLQIIGGVADDRIPPVARFCLELLARQYLSLVAEVASIDKRIHAWHRSCEESRRLEEIPGVGPIVATALVAEVGDWDAFRSGRNLAAWIGLVPKQHSTGGKERLGSITKQGNRYLRWLLVAGAMAVIRYARQHGTKRPWLIRIMDRRPTKVAAVALANKIARMAWAIMVHGERYREPKLLLAV

SEQ ID NO: 476457 - protein, 363 aa, unidentified
MPTIADAGRLVTGGVDTHAEVHVAGVADQAGRVLGTGEFPATTAGYAAALAWMRGHGELVRVGVEGTGSYGAGLARYLAAEGIEVAEVIRPNRQARRRRGKSGAADAAAAALAALNGEAPGQPKSGDGAVESIRALQVARRGAVKARTQAGNQLGGLIVTAPEAMREKLAGLSTRKRVTLAARFRPGDLTSPAEAARAAMAAVARRHQALTAEITQLDTALETLTGHAAPAGFLARKGVGTQVAATLLVTAGDNPRRLRTDASFAALCGASPVDASSGKQRRHRLNRGGDRQANSALWRIVFTRMATDPRTQAYLARRTTEGKTTREIMRCLKRYVAREACKALTGPHPAARPAHHIKNFMIT

SEQ ID NO: 476458 - protein, 440 aa, unidentified
METYQRIKVGIDVGRSKVDFAILHPGGYPLEKHSSFSNSPDGIEQAKQLLIKTMEKHHFSGVDIAAEATGFYWLPLFMQLHQDADLARYAPRLTILNAAWVKWYKKGFPPDHKSDQIDPYYIADRLRTMVNPTWWYYDPHWLSLRFNTRLRFHLSQSLIREKNHYHLFLFLAHSAYSQKKTRPFTGTFSHINEVLLHSPGLLENLQDLDVDDLATQLHELSRHRLNDPMQSAKQLQQALQESFSPPKELEPAIQSALDTLITVIRHLKDQIKIVEKRIADLVENDYPEVAWLRSIPGIGPVFASGIAAEIGDLRRFSDRLRWDNKRNDYRRRSSREVEDAVAKFAGLWWPKNASGDFSAEETPLSKRGNAYLRYFILQAADRMRLFIPSYYDYYTKKFYQSTKHHHKRALVLTGRKAVGLIVGLLHHHEFYRPEEVSPRT

SEQ ID NO: 476459 - protein, 355 aa, unidentified
MSEIKFIGLDVHKATVSAAVLDESGRVVMRAVFVTQAAAILGFLEGVRGSLKVTFEEGTHAAWLYDLLRPRVAEVLVCNPRKNALLKSGNKSDRIDARKLAELLRAGMLSRVYHGQNSTLTVKELGRTYTTLTSDVTRVMARLKALYRGQAIASEGKKLYSRRRRQEWLEQLLHLGQRYRAQSLFEQFDQLQVLRRQVRRDLIAECRKHAATPLLTSVPYLGPIRSAVLLARVQTPFRFRGKRQFWAYCGLALETRTSGDHQVIAGELRRKNKPVFIRGLNLNHNPDLKNIFKGAATAASARPGPLGEFYENLLAKGMRPEMARLTLARKIAAITLILWKKGERFDPEHLKIQAA

SEQ ID NO: 476460 - protein, 338 aa, unidentified
MNIVFLGIDLAKNVFQLCGLNQAGKPVYTKRTGRKELLQTLANIPACLIGIEASTGAFYYWQREFEKLGHKVRVISPQYVKPFVRGQKNDGNDAQAIVVALMQPTMQFVPPKSPEQQDIQALHRARQRIVNHRTATVFQIRGLLLDRGIPIGSAVSRARRAIPLILEDAENGLSSRMRRTIAELYDLFNDLGRRIHFFDKEIETVFRQSEACQRIAKVKGIGPKTATAVVAIGKGTEFKNGRHFAAWLGLVPRQHSSGDRQVLMNMTKKGDKHLRTLFIHGARAVVRVATNNNDGHMNQWVNRLKERRGFNKTTVAVANKNARIIWSMLRNDTGYQVV

SEQ ID NO: 476461 - protein, 419 aa, unidentified
MNKLYVGLDLSLKDFKVSIIDQEGVVAIKPFAATNDLYGAEVLIDAIEDCCRRLSASTVFIGYESTSVYGWHIQHLLADCPSLKPYHPNIICFNPKIIERFKESLGNLPKNDYVDANTIAERLRFGRLPKSCPVDFRYLALQRLTRHRFHIVNNLVREKSYFLSNLFLKFSGLCQEKVFSNNFGAVATELFQEYLTVEDIATRSLDDLIDFIMEHGKKHFDDPKATASALKEAARKSYRLNPSVNNSLNFVLRSCLENIKALEKQKKAVEKAIENELPFFNNEYLCLTSVKGIGPVIAAGLISEIGGISRFDNDNALAKFSGLYWSEYQSADFVADDTYIKKTGNVYLRYYFVQAAEQLRKYLPEYISFYSRKFKESKTHHHKRALVLTARKAVRLIFALLHEEKLYNPSARKGEVDIT

SEQ ID NO: 476462 - protein, 331 aa, unidentified
MYFNHYLGIDISKQTLDAALIIKEGEIVGQTKVTNNQQGFKELFSWAKKLGAKITETLVCAEHTGIYGYDLQAWLDDNRISFSSIPALEIKKSLGIKRGKNDSVDALRIAEYAYIRRETIVLSHKPSNSIFTLKALLGERKQYVRTRASLLARKEALDKYESQESSVRRDNIIQMLTQNIQSLEKQMMQIIEADSAIHKNYKLVTTIKGIGLVNAANTIVYTNNFTSFQTARQYACYCGIAPFEHKSGTSIKGRTMVSSLGCHQLKAELSMAARSAIINDPWLHKYYKRKMAEKGNVSGAHGVVLNAIKFKLVARMFSVIKSGTPYKVMTY

SEQ ID NO: 476463 - protein, 413 aa, unidentified
MLFVGIDWSEGHHDLVVMSADGKVVSRGRIADDLAGVGRLHVLVADQLADADEAVAVGIETDRGLLVTSLVAAGYEVYAVNPMVASRYRDRHSVAGAKSDAGDAKMLADLVRTDRHMFRAIAGDSDEVEAIKVLARAHKRLIQDRQSQVNRLRSLLREYYPGAVALFGSDLADRDALAVLTVAPTPDGGRRLSQARIVAALRRGGRQRNLDRRASEIRAGLSLAQLDGPSSVAAASGTTATALIAVIDVFNTQIAALETELVDHFDNHPSARIYRSLPGLGDVLGARVLAEFGDDPNRYDNPRSRKNYASTSPVTRASGKSKVVHARYARNAKIADACRQWAFCSLTTSPGARAYYDLIRSRDKSHEHALRQLANRWVGILHGCLDTNTTYDETTAWAHWRSAPSNQKSRTAA

SEQ ID NO: 476464 - protein, 345 aa, unidentified
MKIVGCDLHTRYQQIAMLDTETGELIERRLEHAHGEARAFYASLQGNVRVGVEATGYTRWFERMLAELGHELWIGDAAQIRAAMVRKQKTDARDAAHLLQLLVEDRFPRIWRPSMAERDLRQLVWHRQKLVWMRNAIGNQLHALAMGEGLCRKKQLWTKQGRAELEGLRLDEWASYRRQELLEMIDQLDGSLKKLDEAVEEQSQQNEAAVLLRTHPGVGPVTSLAFVLTLGPVERFTRSKQVASYLGLNPREHSSGGKQRLGAISKQGNPMMRSLLVEAGHSAARLDAELRKDYQRLKLRRGSGVAKVAIARKLAVRMYWMLRQQASYAQLVRMQGSPWATLVEQ

SEQ ID NO: 476465 - protein, 355 aa, unidentified
MHSTTIAVDLAKSVFEVAVSQRPGKVVERHRLSRGQFSRFLAEQAPATVVMEACGTAHFWGREAGARGHRVVLLPPHAVRPYVLRNKTDGADAKGLLEALRNDDVRPVPVKSVDQHVLAGLHRLRSAWMATRTARLNTLRELGFSIPVGARQVLPHVGALVSDADSGLPGALRPVLAEAAREIRELEARVREVERALETMARGSEILVRLRTIPGVGLLTATALVAFVGDVQRFPSGRHFASYLGLTPRESSSGLRRRLGAISKRGDPYLRMLLIHGARSVLLHAKKKTAEHDRLRTWALDRERPRGHNKAAVALANKLARIVWAVWRSERAYDDSIAKGTQSSTHHAAASSTRR

SEQ ID NO: 476466 - protein, 364 aa, unidentified
MNKCHSNTELSSHEETRCQFNGGKADIKLGIDVHQDFYVVVLQEGGANPKPPQRFQKQAFLRWAAKLKSEGAEVHAVYEACGFGFALQRNLSALGINCYVVCPQKLDEQNRRVKTDGLDAKALCLKLDRFVQGNRSALALVRMPTEEEEQRRAIHRQREQLVKARKQLEAQGRSLMVNHGIEPVKNWWKPRTFAALQVPQWMKELLQNSQPILLGLQEKIAALTIQLQSAAAANQPRGLGLMTSVIIDREIGDWNRFNNRRQIASYTGLCPGEYSSGNTRLQSCVTKHGNPRLRAALVELAWRLVRFQPNYKPILKWKRLLGKGALATGAARKKAIVAVARQLAVDLWRIKTGRLRAEELGLIN

SEQ ID NO: 476467 - protein, 428 aa, unidentified
MSEKNCTRLEEFRQLQKEIRGSDEYLVVGIDVAKERHSAFFGTATGKTLFRRLVFGNDREGFERLILQAEAMKIQHGLKEVVFGLEPTANYHKPLGEYLVTGGHRVVLVSAKSVKRNRELLDGRWDKHDTKDSANVADLISQGKCLYYDYPELRLRELRSLLSLKRRFKRQEHGLRVRIRNHLLAQYFPEFDRYFGRSESEGLAIVRWCLDPTVIAGFAYDEFIRLVAPGRRALRQQERLRAIWQGASASIGCEVSEAVGFEAKLMVEGLKQIREALRATEAKITEICGGFPEYQFLLTIPGFGPDVASKVLGALGDPFRFTRGNQVLKMAGLDLIADRSGKRADGVVPVISKQGKADLRYALYQAAMIASSRDREFIMWFTNRLRGRQREKGIKTRIRVKLSAKLLIIAWTLMKKKEPFNPDYLRIE

SEQ ID NO: 476468 - protein, 340 aa, unidentified
MNINTIGLDIAKTTFHYVGLDKYGKQIHRKKLRRGQLLSYFANFPACTIVMEACSGAYYWQREFTKLGHKVKLLPAQHVKAHLRGNKNDYNDALAIAEASRVPEMREVTPKTIEQQSMQALHRLRESTVADRTTLVNQVRGLLSEFGIIFNQGIKNIREGLPSVLEDAENDLTHTFRDALALKYTQLIQLDESVKKFNQLIEQASEEHKEIKLLQSIPGFGSIVSSSFFSVIGDGKAFAKSRDVAASLGVVPRQHSTGGKTVLQGISKRGDKYLRKMLVNGARSVVNHAHKKDDALNVWVTRLVKTRGRNKATVALANKLARIAWAVTISGKPYQENHAV

SEQ ID NO: 476469 - protein, 429 aa, unidentified
MAKRRYRARDVKDVNVAQVSEQVGDHVTVAIDVAKSKFFATIQDLRANVVETVKWIHPVETEDFLSLVEELAQNASRVEAVMEPSGTYGDGLRRALQLRGLEVFRVNPKRTHDAKEVYDGVPSLHDAKSAAIIGKLHLDGCSEPWPEKSVEERRIAAALRVLAIDSKEFSRNRNRLENLLARHWPELPRILDLGSATLLELLIGFGSPERVADKPERATELMKRVGGSYLAIEKIKAVVASALRTHGVPMLEEERELVQEVAKRARQAQKQLKASKKRIEKLTKDCDATKHMAPTLGATTAAIVAAGLGNPANYKSATAYLKSSGLNVREKSSGESAGGLHITKRGPGVVRYYLFLAALRLIQRDPIVAAWYAKKVKRDGGKAKLKAVVAIMRKLVLALWHVGQGEPFDASKLFDATRLKVRVVQLEAA

SEQ ID NO: 476470 - protein, 351 aa, unidentified
METQQTARPKLFIGIDIHKRSWKVHCATDLSSGRTFSMSPEPELLLNYVEKYYPDYDVTTAYEAGCCGYHAHRCFEGYGWRSLVVNPADIFRRGKERHTKTDRIDAQLIARELKDGRLESIQVPDPKREQLRSLFRRRNDLVKDMRQVKSYIKMQLLYYGITVPEEFDNDHWSHRFRTWLDTLVFDYEPCNIVLASRMRSFRFIDKEFRDVSTSLRKYTKQYYKKDFELLKSIPGIGGIVASGILSELGDLRRFKNIKHLAGYVGMAPGVYQSGDTFRNTGITMRAHRLMRSYFIEASWQAIRTDPVMQGYYRKHRGKNVKSIIVKVARKLLSRTLAVIKTETPYQIGVIE

SEQ ID NO: 476471 - protein, 386 aa, unidentified
MADGKVATTIRTFSTATQELLALSDWLSAENATHIAMEATGVYWKPVWNILSDGEFELVLGNAAHIKNVPGRKTDVKDAAWLADLMAHGLVGGSFVPDQATQEMRDLLRTRKQLVRERTSHTQRIQKTLECANIKLDSVVSNVVGVSGRRMLEALISGQTDPRELAAMAHGRLQATPAELEAALRGRVTTHHRFMLRLHLDQIDSFDQAIARIDKEVKDNDKNFRAAVELLKSVPGVGSLAAEVIVSEIGIEMNRFATAGNLVSWAGLCPKNDESAGKRRSNRLKAGAPWLKTTLVQCAWAAARSKDTYLHAQYVRIRARRGDKKAICAVAASILTAAYHMLKDGTFYEDPGPDYFDRRNKDQQANKLVSRLQNLGFNVILQRASA

SEQ ID NO: 476472 - protein, 480 aa, unidentified
MAKRTHAHPDLKAVPMLLNESLYIGIDIGKGKHVAGFLSQTLLERHDRFEACPALVFENSREGFRLLIERIRSYSPLEHVFILMERTGHYHRALEQYLQDLDIPVYVMHVQSRPAGMLKTDKRDALTLANQLYSQLELGVQVANKLQLIRRIVPPTEAAAQLKGLVRHRYELIRESTQRKNKLTAHCDEVFPELTRVVKDPNALVALALREKFPTPQALATASLTTLQQIRGGARSLSDAKLLELQRLAAQSIGAKDLARQRGLVLEQTQLIKELRLLREHVEQLETEIVSIVEQAREGQILRSFPGIGPVMAATMIAAVGSIHNFPSASALKSYFGWAPVVVQSGSTLDHARLTRGGTRTMKQMLFLAVLQAIRLHDNEWAKLYERLVKTKCPYDERTQSYVGKTRVIGRVAGQMTEAIYALLKRDAEVLSKVLPGQEPPAPLLYDPEVHRKHRQGQYRPLKSTPLPNTITVLHPRSPQ

SEQ ID NO: 476473 - protein, 394 aa, unidentified
MKLVGIDVGKNSHHFCVMDKETGEFNVAPSSFSNNKEGFDFLINSLKPYSKKSILIGMEDTGHYHVALLKFLLSNGYTVALINPKTTDLTRKMEGSITKNDKLDTITICDVLDTPERKKQYRITKVDRFDLYEQRQLTRHHHNLKEELNVYCNRLQKSIDLVFPEFNTLFSSKYSIVYMNLLKTFGSAEAIASTDIRTIRKCFEIKGRGNRISLTPEKLKECAKNSIGISSEVETIQIKHLVSQITLIKEQIAEIDKKIEEFSITNNSPILSIPGISHFSGTSILAELGDIGNYSKPSQIIKFAGVAPYHYESSQYNAQHTGITKKGSKYLRKTLYQIILTVINNNPVFKKYYLLKISQGKGHRCAQGHCIRKLLRIIYHLLETGQSFDPALLR

SEQ ID NO: 476474 - protein, 350 aa, unidentified
MLIIGCDYHPSFQQIAFVDTETGEFQEQRLSHREEAERFYRDLAAQGRKGRVGMEASGHARWFERLLAELKVELWRGDAAKIQAKRVRKKKTDREDARHILQLMLKDDFPQIWVPSWDNRDLRQLLWHRHRMVQMRTRIMNQLQAVALNEGLRCKKRLWGERGRQQLESIGLAPWASRRRRDLLELLDRLTPTIAELTKQIEQEVEKYPAAQRLMTHPGVGALTALAYVLIIGEPERFECSKQIAAYLGLVPEEDSSGERRRLGHISKQGSGLMRFLLVEAAQVTVRSDPEWRSKFFHLALRRGRKIAKVAMARRLAVRMYWMWRQQWDYEQLKKFGPHAGQPGTAHGVK

SEQ ID NO: 476475 - protein, 340 aa, unidentified
MPNPAVIGLDIAKNVFQVHGADAEGRCVLRRRLRRAEVITFFARLPKALVGIEACPSGHHWARELRSLGHDVRLIPPQYVRPFVKINKNDAADAEGICEAVVRPNMRFVPIKSVAQQAAMMLHRTRALLLRQRTQLINAVRGHLAEFGLVARRGARNIRELADLVRDTGSDKLPDTARAMLVLLLEQIREAELRVRKTEQALEAWAKQSDACRRLLAIPGVGIMSATALVLAMDDPKRFRSGRHFAAWLGLVPRQSSSGERQVLGGISKRGDGYVRTLLIHGARSLTRWHRESWGWLAGLLRRRPTNVAAVAIANKTARTAWAILARGRQFQPTRRAEAA

SEQ ID NO: 476476 - protein, 392 aa, unidentified
MRKGKRKRGAKIINGHTDDWRQRTTFVGFDWASDHHDVVVVDQYGEIIEDFRFDDTSEGWQRLAKTLSKHSDPAVVIETSGGMTVQRLLEAGYAVYPVNPKAAKRYRERKAPSGTKTDRLDAWSLADALRLDGHTWRQLKADDPLIAELRLLCRDEVALIEQRTALICQLRAALHEYYPVVLEAFEDWTVRSAWAFVEAFPTPEALTKAGKRKWEKFLHTHKLYRKQTYQRRLDLFAQAETFCGNQATTNAKSMLAVALAGQLRVLQNHLDKFRRQIEKLFAKHEDHDLFDSLPGAGQKLAPRLLAELGDDRNRFDSPQALQCYAGTAPVSFESGKIKRVRFRRACQKALRHSVHLWANLSRTKCPWAQAYYRKKRDEGQTHACALRCLGQR

SEQ ID NO: 476477 - protein, 342 aa, unidentified
MQVTTIGLDIAKNVFQVHGIDAKEKVVVRKQLRRSQVIAFFKALPPCLIGMEACATAHHWARELTKLGHEVRLMPAKDVKAYVKRNKNDAADAEAICEAVRRPTMRFVRIKSPEQQGQLMQHRTRDLLIRQRTQLINALRAHLAELGIVAAQGDAGVNALRAIVADERDERLPIDARASVVVLAAQLEALQTLIGAIEKRIKMQHRSNEASQRVETIPGIGILGATAIAATVPDPTMFRSGRDFAAWIGLVPRQDSTGGKQKLGPISKQGDRYLRRILVVGAIAVLRRAQENPGKYPWLTQLLARRPFKVVAVALANKMARTAWALLSHGGTYQAPELAEAA

SEQ ID NO: 476478 - protein, 330 aa, unidentified
MNFCGIDVSADELVVALRQGDRDLPQQRFANTAAGHRRLLAWLRGQGGATRITLEATGVYSLDIALALAAAPGREVAVVNPKLIRRFAESLDERSKDDPLDARILLEYSVRMPFRRWQPPSPTQLALRAITRHMLATTELRTATRNRWQIARRSASTPACVRRELERSLRQIDASLLRLQRQARTLVAHDPTLESQFQLLLTVPGIAELSALQLLAEIALLRDRKVRQWVKHAGLDVRHYSSGSSVCRRPHLSKCGNRYLRRALFMPALVASRFDPSLRAFYQSLLARGKHKRQALAALMRKLVHAIYGLFRHRQPYLGTRLCPRFAEAL

SEQ ID NO: 476479 - protein, 346 aa, unidentified
MGKSITDLSPVTTVGLDLAKHVFQVHGIDASGRVVVAKAIRRNKLLEFFASLAPCLVGLEASGSAHHWARELITLGHEARMMPPAYVKPYIRRQKNDASDASAICEAVTRPSMRFVGVRSLMYQAALMRHKAREMLVTQRTQLLNGLRGHLTEVGVIAPQGLRCARELAELIEACDETIPFEVCEALAPLVVQLRNLDEAIAQLDRIIAKLAQKDETARRLMSVPGFGPITASAMAATIQDTSSFAGPREFAAYLGLTPKQNSSGGKPKLGRISKMGNRYLRKLLVVGAHAVLFHRKPHTDPLRMWAKKLIEKKPFKLVAVALANKMARIAFAILRGKTVYREIPA

SEQ ID NO: 476480 - protein, 343 aa, unidentified
MTFVGCDLHTRQQQVAVLDTTTGEIHEQQLPHAGTAVEDFYAALPRPVTVGLESTGYAIWFHTLLQRLGHTVLVGDAAKIRAMVVRKTKTDRRDALHILDLLRHDRFPTIWLPDPATRELRALLMHRMRLVRIQTMLKNGVQALALNQGLVRGSKLLRTAGLAQLQALSLPPYTAQRRDQSLDLLGTLRTHLDHLDDAIAAAALVHPDAPRLLTHPGVGPLTALATVVVLGAVSRFPDSKHVVSYIGLAPTLNASADKYRLGKITKQGSTLLRFVLGQAAAHAARLDPDLTRTYRTLAQRRGRSKAKVAVARKLLVRLFIMLRDHIDYDEFRRRGRAPAAAPG

SEQ ID NO: 476481 - protein, 351 aa, unidentified
MSTKRILSNTIDTNQEYEVVGLDLAKNCVSAALITIEGELIGIDRLEYQDLRKCAQEMPATTFAMEPCCEMNLLVNELESWGHRCVVIDGKNVQNYIETHFSNQKTDLNDAQALAFLARDKQIRLIKPKDRQQLEFACLTTLREQYVKQYRQTLVSLKGICQSWGLNISKGISGKARLSEMIEKYEKFPEELRRELQNMVKHAQEVQKALTEINKTLKQVSKGDELCKMVQTVPGIGLVCACRLKATIGDISRFKHPKNFPAYFGLVPRSISTGHNEKKGRLTKRGDKTMRSLMIQAAGSVILMANKGNLKARALSKWILKKQREKNALGQAHVCCGSKASENYQSNADQR

SEQ ID NO: 476482 - protein, 419 aa, unidentified
MRSFKAKKIKKFNRKSLIVAVDAGKKIHYGYFRAPDGTEVEPFKIYNTKKSFNCFWYKACQFAKAHGLEQIVVGFESSGPYAEPLCHYLQDKPVQLVQINPMHTKRVKELTGNSPHKTDRKDPRVIADVLALGHALTVVIPWQAAAELRRLSHARQRAIKKRTAAVNQLGDLIFILFPEFNTIIKNVACQSAFYLFMHYPRPEDIAVSDGQLLAQVLHRVSRGRIDAVRFQRLIDAANASVGIKQGAEAIILELQQLVREIQFQDEFIGHLEKQMQQYLLQVPYSGVILSIRGIGVVTVAGLIGEVGDFRQFNTIAELIKLAGLDLYEISSGQHRGRRRISKRGRPLLRKLLFFAALNTVKNGGIMHGQYQQMLQRGMVKIKALTAISRKLLAVIFALVRDNAVYIENYCQVHTFKRAA

SEQ ID NO: 476483 - protein, 400 aa, unidentified
MRAVFGIDVSKASSEVAILVNGEKVHGYTMSNDAIGFARLLGDLRTVHKPEIIFEATGVYSRRLQTFLEDNGYAYTRLNPLEAKKQLDSLRVRKTDQIDAEKLAQSQFVLNRKTTYVQEEIYQNLRDLSRFYQNLTEDIVRAKNRLHKVLQVTFPELENILSTPSGEQYWNLVIAFPCKDFVLDLSKDELSESIRQSTSKRISDKRVAYLAEKLIALANQSYCAVKKTSPMLEEVRYYTKELLRLSEQRQAVLDEMVELAQPLPEYDILLSIPGIAETTATSIIGELGDIRRFQSANQINAFIGIDLRHYESGNFLAKEHITKRGNPYARKILFKCIHNIASASNTNPCHIADFYEKRKRQSQTTSTKPHTIASIHRLIRTMYYLIMHNKLYDYASTQNR

SEQ ID NO: 476484 - protein, 407 aa, unidentified
MSQAKSVPQRFIGLDIHKHYLIAVGLDGDLHQVYGPKRVPLSDLEAWRRKTLTPQDAVALEMTTNTWQIYDELQPHVHSVTVVHPPHVKAITQAQVMTDRLAALNLARLLAKGLLVGIWVPPQDVRDHRALAAQRTKMTRLATQAKNRLHAVLHRHHCAPPAAPLFDPAQRPWWLALPISPLERVRVQSDLDTLAFAQAQIAHLEEALAALAAQDERLPLLVQLPGVGWLTALTILAAIGDITRFPDAKHLVGYAGLGGRVHDSGLTTRTGGITKAGRRDLRAALVEAAQTAANTHPHWQAELARLEPRLGRNKAIVAIARKLLVAVWHVLTEGCADCHAEPARTARKLLQVTYQLGQANRPAGQSAAACVRQHLDRLGLGADLTAVRHGPHRTIALPPSGLAPESA

SEQ ID NO: 476485 - protein, 344 aa, unidentified
MSYYAGIDVSLESSAVCVVDGAGKILREAKVASEPRALIDWFRSLGLALERIGLEAGPLSQWLYAALCEAKFAVELLETRHVRDAFKAMPVKSDRNDARGIAQLMRLGWFRPVHCKSIEAQETRAILTARKLLQSKLRDIENSLRGVLRGFGLKVGKTTERTFAERIKELVVGHPSLELVAQALLEAHAVLLREFNGLDKHTQKLAKLHPQAKLLMTTPAVGPIVALTYAAAIDDPKRFRSSKATGAHFGLTPKKYQSGETDYTGRISKIGDASVREALYQAAHIMLTKPVKNCSALKSWAMRIARRAGMRKAKVALARKLAVILHRMLADAKPFNPMAKTIAT

SEQ ID NO: 476486 - protein, 324 aa, unidentified
MTDAVLGIDVSKNTFDTNLGAGTKARSKSFANSPAGWHHLIAWLGEHKIGQVHACLEATGRHGLGIALALHEAGHVVSIVNPAQIRDFARTKLGRNKTDQVDAVHIREYAELFKPRPWTPPSPAMRRLCELQTIRAGTVAGLTEWKNRRGSGIMDDLALSLAKTTIQHFTSQLEAVDQAIAETIDNDVELSAKRDLLVSINGVGEALAGIVLAELPGPDILGSSAAVTAYAGLNPQQHQSGISVNRPVRISKIGNAVLRTALYMPALSAMRYNPAVAALADRLKAQGRLKGKQIVIAAMRKLLVLCFGVLKTGKEFNPAMAIGK

SEQ ID NO: 476487 - protein, 373 aa, unidentified
MSNPSTIFIGLDVHKETTDVAFVSNQDEAVLFYGTIPTNSRSVGHLIKKFSSKASKLVVIYEAGPCGYWLYRMLERKGIECWVVAPSLIPKAPGDKVKTDRRDAMALARLAKAGLLSSIHIPNADDEAIRDLIRCREDCMLDLRQARQRLKSFLLRNGHSYSGRDNWSDAHKRHLADIHFIEPAKKITFQHYIGIVEHRYQSLQHIERELEHLGQQWCWYPLVQFLTVLRGIRFLSAITLVAELGDMRRFANPRSLMNFVGLTPSEHSSGQRQKIGGITKCGNTHARRILIEAAWAYRFSPKVSRELQIRQQEHSVNLQERSWQAQLRLCNKFRRMKAKGKEQNKVVVAVARELLGFIWDIAQRFEPNSKAVG

SEQ ID NO: 476488 - protein, 337 aa, unidentified
MGNYYFIGIDVSKKNLDCCLLSNGVVVKQDVISNHQKNIEDYLSVICAEQNIDAEQIVVCAEFTGLYIYPLTISCQAGNYKLWLEDPTQIKYSSGLQRGKNDPVDAKRIALYAYRYIDKLKIYNHPTISVESIKLLTTELNMLCVDRAKYQAQLSDQKEYMPDRVYKLKSKRLSLLIKELDKAIANIEAEIEDIVAKDALLSHQMKLLLSIEGIGKKTSLKMILETQGFTRFTDSRKFCCHAGVAPFSYSSGSSQHSKNRVSHRANKSIKSLLHLAALSAIQNKNSGLRVYYDRKVAEGKNKMSVLNAIRAKLVARMFAVIKNNELYNSNYTNQFVV

SEQ ID NO: 476489 - protein, 385 aa, unidentified
MFVGYRVGSGPARSIRQWWEAPVFTERTSIGLDVHARSVVAAAIDGVTGQVSQTRLTPSYEHIQEWIKQLPGPVAVADEAGRTGFGLYRALTGAGIRCEVLAPSKLQKPAGDRVKTDARDALHLARLLRLDEVTSVSIPSVNREACRDLVRAREDCRGDLMRARHRLSKLLLRHGIVYHGGAAWTDAHDRWLRARAVPQLLTPATRMAFDSDYEHVLMLQARRQCLDSAIEDIAADSEFTAVVRRLSCLRGVGTLTAFALAVEIGDWDRFTGNTIGSFVGLVPSESSSGSTRAQGPITKTGNTHVRRLLVEAAWHHRPKYQVRAVMRSRWELAPAAARARGHEGNRRLHNRWLGFLARRKRSTVANVAIARELAGWCWSLAVMDD

SEQ ID NO: 476490 - protein, 344 aa, unidentified
MDHFAGLDVSVKETSICIVDDTGKIVKEVKVTSEPEALLKVLGNPAYRFKRIGLEAGPLSQWLFSALAEAELPVVCVETRHMQAALKAQINKTDRNDARGIAQMIRVGLYRPVHVKTLRSQKLRMLLTHRKLLQSKAIAIENDLRGTLRNFGLKVGMVGKVRFEARIQELVENLPDLAELVEPLLIVRRALREQIVILHRRLLAIVRDDEVCRRLMTTPGVGPVVALTYRATVDVPARFRKSKSVGAVFGLTCSKYQSGEIDRSGSISRCGDEMMRVMLYEAAQSMLRSKKWSWLKAWAMQIARRRGMKKAIVALARRLAVIMHRIWVDGTEFRWTREQAAAAA

SEQ ID NO: 476491 - protein, 383 aa, unidentified
MVFVGLDVHKRVVQACVVDGAGVVVREARLPGSERILLAFLKTVGECKVALEATSGFELYYDALVSNGFSVSVANPFKVRLIAQNRFKTDRADALALAQLLRTGFLPTSYVPCGEVKELRRLVRERIHLVGLRARTKNRVRYLLQAYKQETKFDPFTKKGMKELTAMPLPSMQRCVRLYDSLSAEIVDVEKELEGHESQHARELELLKSIPGIGRFTSLVIIAEVDDITRFPSAKKLCAYAGLVPSVRQSANTIKTGGITHQGSKDMRWMLVEVAHGAVRRDVFLKQFFTRIKARRGYKRAIVAVARKLLSYAFHVLSQKKSYDEIVAQDRDKKKHAHDSGGEGKGFSVPPAEQNSCSPQGDWIEPLPDNRLNAARYTRHANA

SEQ ID NO: 476492 - protein, 389 aa, unidentified
MLEPFNPSRSLAALEQDSTVIAVIEMSQSRWLVAAVIPGIERQPLKKIDPDEELLLKLLHRWQNEAGRAGREIKRIVAAYEAGRDGFWLARWLRARGIEAYVIHPTSVAVSREHRRAKTDRLDTELLKRAFLGWLRGEKRHCSMAAIPTLEEEDTRRPNRERENLVTERTRLINQMKAILVRFGIRTFKPTLRKAEEKLEGLRTAEGTPLPQNTRAEMRRQLARLRVVREQISAIERERLRKLAAAPAEERGPHAMVRLLARVLGVGVETADMLVNEILLRHLRDRKAVARYAGLTGSPDESGRRRRERGLARAGSARVRCGMIQLAWRFLRFQKDSALAQWFRARTTDGRSATRKIMIVALARKLLIALWRLVTTGEVPRGIILRAAS

SEQ ID NO: 476493 - protein, 343 aa, unidentified
MVYYAGLDVSVEETSLCVVDGSGRIVKEAVVGTSPAGIASLLSDFAGGLDRVGLETGPQSAWLYEGLRAEGLAVVVIDAVHASAMLKGGFRNKTDRNDARGLADMMRVGKYRAVWVKSAACRQGRALLVAREQLVKTRTALVNTLRGLLRGAGIELGALGKGGFGAAVRSALNEERKLLASVVPLLRTLETVERELAGYDQRIKALAEGEAVCRLLMTCPGIGPVTAFAYRVGVDDPHRFRRPRDLGAYFGLTPRRYQSGQIDYSGRISHMGDAAMRRLLYLSAQTILRGGPRDPLSAWALRLAKRRGAKRAKVALARKLAVVLHRMWLDQAPYHVAAAKAAA

SEQ ID NO: 476494 - protein, 378 aa, unidentified
MNRIIKIGMDVHTTNYTLCIFEPSFEHNGTVHCITQVKPEIKKIIHVIETFKKKHENEELNIVCGYEAGCLGYSLYHELKEKGVECVILAPTTMKTEKGGRKLKNDYRDVKMIAECLAYGGYSAVHVPTELDNSVKEFIRMRDDIKENLKSIKQQIIAFLTRNGKQFEGKSYWTRKHIDWINTVSFSEPLLQDTLKEYMIEYNHLCDRVETLDKQIEEISLKEEYVEKVQQLQCLIGIKTHTALSLIVETSAFNRFKKGNMYSAYLGLIPGDDSSGGHEKKLGITKAGNNHLRRLLVEAAQGYTRGRVGFKSKDLKSRQEKCSSEVVAYADKANERLRRKYYRMILRGKKYNVAKTAIARELACFIWGIMTDHIDLCS

SEQ ID NO: 476495 - protein, 362 aa, unidentified
MRTDKYVGLDVDKSTIVAVVQNCEGRNLIKTVIEMEGVTVREFIESLSGKIRVTFEEGTQATWLHDLIYPLVEEVIVCNPRKNKLIQTGNKGDEIDAEKLARLLRLGELVSVYHGENSARGLKELVHGYNNLVSDTTRVMSRIKAMYRGRGIKCSGHGIYRKGERKEWEGKLGEEAARKRAELLFKQLDNDQELRKEARKAMLKEATKQPGYKILIEINGLGPIRSAIIIGIVGTPHRFRTKRQFWPYCGLGVVTKSSADHEIVNGQIRRKKRPAMTRGLNRDYSRQLKYVFKCAAIDAIKTEPFKSINEEMIKKGIRPEMARLTIARKISAIALRLWKKGESFNAEKIGKATLAAEVNAGA

SEQ ID NO: 476496 - protein, 449 aa, unidentified
MSKSGKVIGLPIVNVRAAGIDIGSRIQVAAVPPELCDNPVRTFQSFTADIEQMANWLVSIGITTVAMESTGVYWIPVYEILEAHGLTVVLANARDCKAVPGRKSDVNDAQWLQRLHACGLLRASFQPAREIAALRAYMRIRDRHLEYASAHMQHMQKALTLMNLQLHHVISDISGVTGLRIIRAIVAGEQDPDVLASMRDVRCHESLQTIRSALVGNYQPEHVFALSQALGLCDAYQARIADCDKQIESSLRVLNADRPQLETPLPAPRTKTKQANAPKFDVRSMLCQLTGTDLTVIHGIGPSIALSLVAECGTDMSKWPTEKHFASWLCLSPGCKISGGKVLSAKTRKSSSRLASQLRLAASNVGRTETALGAFYRRLAGRIGKAKAVTATARKLAILFYRAMRFGMRYEDPGVDQYEQRYRERVVKQLQRRAAHFGFSLQPTEVGVS

SEQ ID NO: 476497 - protein, 461 aa, unidentified
MSRPRAHQTRPRPAPPSTLPRLNRNAAGVDVGASAHYVAVPADRDPQPVREFSAFTADLYRLADWLQACGIESVAMESTGVYWIPLFQVLEERGFQVKLVDARQLKRVPGRKTDVVDCQWLQQLHTFGLLVGAFRPDNQVCILRSYMRQRAMLASYAGQHVQHMQKALVQLNVQLQLVLDDITGATGLRIIRAILAGERDPARLAALRAGRCKHSAATIAKALQGNWRQEHLFALAQAVELVEAYQAKIAACDGRIQAHLQTFSDRADGQPPPAGPAPRADRHDLSFEATAELYRLTGVDLTAVNGLQAHTVLKVLSETGLDMTKWPSSKHFGSWLGLAPNNRVSGGKVLSRRTASNANRAATALRVAAQSLHHSKSALGAFLRRKAAHLGMPKAITATAYKLARIIYSMLTKGAAFVELGQDYYERAYQARVLKTLTRRANDLGYCLVKHQLTLTHPASG

SEQ ID NO: 476498 - protein, 338 aa, unidentified
MALYCGIDLHSNNSYVAVLDEERREVDCRRLRNELPAVLGFLEPYKEELEAIAVESTYNWYWLVDGLMRAGFDVRLMNPTRASVHSAMKYTDDRHDARWIACLLALGILPEGYIMPVEERGLRDLLRRRLFLVHKRTAHLLSLKAIFARSTGKQVSVGDIQQWDCEAIREVIDDPLVVESITVMLPVVRVLTAQIKAVERRALKIGKVRDEFGLLQTAPGIGQVLALTIMCETGDIRRFPGVGNYASYCRCVPSDRMSNFKRKGSGNRKNGNKYLSWAFSEAAHHAIRFDPLAKRYYDRKRARSHLMVASRALANKMARACYYVLRDQVPFDPARAFC

SEQ ID NO: 476499 - protein, 347 aa, unidentified
MHTHQKSPDAVAVIGVDIGKNTFHLVGLDKRGAIVLRIKVSRSQLERRLANMPRCLVGLEAGCGSHHIARQIRALGHDARLIPAQYVKPFLKGHKNDYRDAEAIAEAVQRPTMNFVAIKTSEQSDLLSLHRVRSRLVGQRTAVINQIRGFLIERGITVRQGPAPLRKALPAILSSPADVLSPRMVHLIADLSEDWRRLDERIQVVSTEIETLAENDGSCQRLMTVPGVGPIISSAVVAAIGNGSGFSQGRDFGAWLGLVPRQHSTGGKERLLGISKRGDSYLRKLLIHGARATLRWVGRKTDRRSQWMRQLVERRGHNRTAVAVANKNARIVWALLTSHQAYEPAKG

SEQ ID NO: 476500 - protein, 449 aa, unidentified
MMEPAEIQDEEYEQILERVAAVDVAKATGMVCTRMPDESRPGRRLSKVWEIPATTNAIIELGEYLAGLGIQKITLEATSDYWRPFYYLLEAAGLDVQLVRAQDVKQAPGRPKSDKLDCVWQAKCTERGLLRPSFVPPAEIRQLRDYTRLRVDLTRDRSRHVQRLEKLLEDALIKLSVVATDIMGVSGRAMIEALIAGERDPEVLARLARGRMKVKHAALVQALTGRFDAHHGELARMLLDQYDALTAQVTRLTTRIEELIAAIPQARGVDADGSTGPGAGEAPDAAVRSAIARLDEIPGIGRHGAQLILAETGLDMTRFPTAGHLASWAKLCPRTIQSGARSRGGSTGKGNPYLKGLLGEAAAAAAKTDTFLGERYRRIVRRRGKLKALVAVARSILVIIWHLLADPAARFTDLGSGYYASRTDKDKKIRNHVRQLEALGLTVTVAHAA

SEQ ID NO: 476501 - protein, 360 aa, unidentified
MFTERTSVGLDVHARSVVAAAIDGVTGELVQTRLTPSFEHIRSWLRDLPAPVAVGYEAGPTGFGLARSLIAAGIRCEVVAPSKLQRPSGDRVKTDAKDALHLARLLRLDEFTAVSVPTVDQETARDLVRAREDCRGDLMRARHRLSKLLLRQGIVYSDGQAWTGAHDAWLRRHRFDSPALQMTFESDYDAVLTVKARRDRLDQAIAQMAANSEFTPLVRRLGCLRGISTLTGFALAVEIADWHRFTGNTIGSFVGLVPSEYSSGQSRVQGSITKTGNTHVRRLLIEAAWHHRARYLIGKTMRDRWELASPAARTRGDAGNRRLHQRWVRFSDRRKRHVIANVAIARELAGWCWSLAVLEE

SEQ ID NO: 476502 - protein, 406 aa, unidentified
MAQEQSSHKPERYIGLDIHKKYLVAAGVDAEQNQVMPFRKVTWGQFDAWMEKHLKPGDAVVLEMTTNTWEVYDRLVEHVHSVTVVHPPHVALITRAQVMNDKRASLILATLHAAGLLPGIWVPPQEVRDMRALVAQRHKMVRLATRAKNRLHAILHRHHLALPEGSQPFHPKHEDFWLELPVSEVERTIVQVNWETIVFAQRQAELLEECINKAAAQDDRVPLLVQLPGVGTLVAMTVLAAIGDISRFPSEKKLVGYAGLGARVHDSGQTHRSGRITKRGRKDLRWAMVTAAHHAVRSHPYWKAYYEWIEPRLGRPKAIVAIARKLLVAVWHVLTEECADRFADPTKVACSLFKHAYRVGVRNLPDDMSALAFTRYHLDRLGLGRDLTHLPWGSRNFRLPPSELAG

SEQ ID NO: 476503 - protein, 460 aa, unidentified
MNRKQRRATMRKIQSADLSLEVVHPNAGGIDIGNESHYVAVPPDRDSQPVRRFGCTTAELQAMAQWLSQCGICTVAMQSTGVYWIAVYDILEEAGLEVYLVNARDTKNLPGHKSDVQESQWLMKLHTYGLLRNSFRPTQEIRTMRTYWRQRNDLVQAAARHIQRMQKVLTQMNVQLANVLSDISGVTGQAIIKAILAGERDPHKLAAFRDVRVKASEEQIAQYLEGHWQEDLLFVLQQEKEGFDFCQKQMAACDEQLKQYLQQQEDRSQGAPLPEEKRKSRLKKKKGNMPQFELRAELFRMNGTDLTQIDGIDVLTAATVLSEAGSDMSKWADEAHFVSWLRLCPGNRISGERIIGKRRLPTNNRINVALKMAASSLRTSNTYLGAQFRRLRTRLGAPIAIKAMAAKLARLVYRMLRYGMKYVDQGAAFYELKHRELQVQHLKSKAAKLGYKVTPIPAAA

SEQ ID NO: 476504 - protein, 411 aa, unidentified
MDSTWTQSVPPAIAGGTDVMKQAPPTVSVKLTAQSLIAMRLKGGAMDAIYIGVDFHARQQTICYLKTETGELVIVALKHEDKEQVRAFYQQFQAPVIVGLEASGYSPWFEALLEQLGCEVWLGHATEIRRRARWRQKNDRRDAELIWELMVHQEFPRLHQPAGPSREVLRMLRYRQKLIKMRTMLKNSLQAIALQAGLAKGKQLFTAAGQEQFHAAAMSEVLQWQREHWFELLQPLNQQLLDTMVWFKAQSKDDVGIQRLRTHPGIGLLTSLCILHTLQPVSRFRNARKVAAYAGFDPVERSSAERQHFLGISKAGSRMLRYLLVEAVQTAVRHDEDLKRFYKRLAERRGRPKAKVAAARKLLIRAYIMLRDEIDYAEFRRRAVAARLARRGQGPTKVPEVLIGQPASPGA

SEQ ID NO: 476505 - protein, 341 aa, unidentified
MNSSKTVVGIDIAKRVFQLHSIDMETGEIVSLQLKREQFLGHFANRQKCLIGMEACGGAQHWARKLTAMGHQVKLLPGKAVKGFVTGNKNDRQDARAIWTAVQQPHVKAVAIKTEEQQAILALHRMRSQLVKFRTAQINGLRGLLTEYGEVMPQGKAGVRKGISDALGRLADRLPAMVIETLRAQWARIEKMDQEIATIEQRIKLWLKNDDACKRIAEMPGVGPLTATAAVAMMGDPKAFKSGREFAAFAGLVPRQVGTGGRVKLLGISKRGDTYLRTLLIHGARSVLTHAKEPGPWVMGLRQRRPLNIAVVALANKMARTIWAILAHERTHQKGFVSRPA

SEQ ID NO: 476506 - protein, 388 aa, unidentified
MAKIIRIGIDTSKSVFQLHGVDEAERPVLRKKLRRSQMLEFFSKLEPTKVGMEACGASHYWARELTALGHQVVLIPPQYAKAYVKRNKNDPADAEAVCEAMSRPTMRFVPVKTAEQQAALMLVGTRETLIRRRTQLTNSIRGYAAEFGLVAAKGLDKIEPLLARIAKDEKLPALAREMFATHGKEYERLKEEIAAIEAKQMAWHKENECSRRLVEVPAIGPITASVMVMKVPDAAAFRCGRNFSAWIGLTPKDHSTAGKKKLGVITRAGDEYLRRLLVAGATSVIKQVLAGKCRASPWLAALLKRKPVKLAAVALASKNARVAWKLMVSGERYDRTRYDAGGAPEFAAREVHAAAVTGASASRTSLAPRSKPQESRSKSHQRKQMTNA

SEQ ID NO: 476507 - protein, 341 aa, unidentified
MSEVRTIGLDLAKQVFQVHGADASGSAVFRKQLRRGQVLKFFSGLPRCLVAMEACGSSHFWAREIGRLGHEVRMIPPAYVKPFLKRQKNDAADAEAICEAAQRPTMRFVSVKSEETQGAVVALRSRDLLIRQRTQTINALRGHLAEFGKVVPQGSTNASKLIAMVEDPQTALPEAARTSLRFLTAILSQLTDQIRALDAQIVRQAREDETSRRLMTIPGVGPLIAAALVALAPSPETFKRGRDFAAWLGLVPRQHSTGGKQRLGSTTKMGERSLRRLLIMGANSVVVWRARKGAAPGTWLAKMLAHKPPMLVRVALANKMARIVWAIMARGEIYRAPVAVA

SEQ ID NO: 476508 - protein, 331 aa, unidentified
MNYSHFVGLDVGKKTFDASLMSAAEKELSHKSFDNTPEGIQSLLDWIAGYHLSLSKLLFCAENMGSYVTELSVSSVSMGFSLALVCPLTIKKSIGLQRGKNDRIDAKRIANYAVLHYRKLELYKLPDKDLVRLRGWIIIRDNLVKQKVSSIKLLETFSWMAKLADVTESISFLEEQLKSIKEKILEVEEDMEQLIAASTSLYTNYLLLRSIKGIGIINAIVLLCVTDNFQRFDNPRKFACYCGVAPFEHTSGISIRGKTQTSSLANKEVKVYLTRAAITAISWDPQMKAYYKRKIAEGKHKASVINAVRAKIIARSFAVIRRQTPFVTLAV

SEQ ID NO: 476509 - protein, 423 aa, unidentified
MNCSTLCIGADVHLDEIVLCAVDQADGQEVTDRFRVTNNLPGAQAAATTIARLATDLGYTRIEIAWEATGMLWIPFHRYLSRCPQLQSFELELVCLNPQLVAKFKEGLVLRRPKNDPLDAAAVAARLRFGELPLSYVPGDFWQGLRRLTRHRFHLSRTLSREKMRFQAYAFLKCSDWKRVKPFADVFGATSVTLLTEYTVAELTQMTHDELVDLIHRHGRKHFADPAATARKVRQALRSSYPVDPQLDEMLTATLAAAWAHIRFIQRLMKRLDQHIARAIEPVPNPLISVKGLGAVITAGLLAEIVDISRFAEHKHLAQYAGITWEKRSTGNFVSQNTRLTKVGSKYLRYYFILGANALRRFNLEYKAFYWRKHDEVAKYQHKRALVLTARKLVRLVHALLTKNVAYVRPQSLAIVQEDGALQ

SEQ ID NO: 476510 - protein, 351 aa, unidentified
MESQQTAHPKLFIGIDIHKRNWKVHCSTDLFMGKSFSMSANPEKLLAYVSKHFHGHQVTTAYEAGCCGYYAHRCFESYGWQSLVVNPADIHRKGKEQHTKTDKIDAQLIARELKDGRLESIIIPDKEREELRSLFRRRNDLVKDFRRVKSYIKMQLLYFGIKEPEEFDNDHWSHKYRNWLDNMVFEYPTAKATLDSRLRFFRFVDQELRDISTELRRYCKKHYKKDYMLLRSIPGIGGIVACGILCELGDLRRFNNIKHLAGYVGLAPSLYQSGKNQRTMGMTPRANRLLRSYFVEASWQAIRSDPVMQAYYRKHQGKNVKSVIVKVARKLLSRTLAVIKTEVPYTIGVIE

SEQ ID NO: 476511 - protein, 343 aa, unidentified
MDYFAGLDVSVKETSVCIVDDAGKIVREARVASEPEALLQVLTNTIYRFKRVGLEAGPLSQWLYSVLAEAGLPVICVETRHMRAMLKAQINKTDRNDARGIAQMMRVGLYRPVHVKTLRSQKLRVLLTHRKLLQSKAIAIENDLRATLRNFGLKVGMIGTVKFEARIRELVESLPDLAVLVEPLLIVRRVVREQLGILHRRLLTIVRDDDVCRRLMTIPGVGPVVALTYRVTVDVPARFRNSKAVGAVFGLTPAKYQSGQNERTGAISRCGDEMMRMMLYEAAQSMLVRSAKWSWLKAWAMKIARHRGMKKAIVALARRLAVIMHRMWVGGTEFRWTREVAVA

SEQ ID NO: 476512 - protein, 345 aa, unidentified
MNATTVAVDLAKNVFEIAVADTNWRVVERMRLTRAQFARWFDNRAVGLVVMEACGSAHHWARVLRARGIEVRLLPAQYVRAYVKRNKTDAADAVALLDAVRASDIRPVAVKSVEQQALQALHRMRSAWMAARTGRINMLRGFCREFGLEVPLGAERGLAQMARLVADEHSAIPAMLRTPMRLVLEEIRLMEARVDQIERELAEIARHSPACAALTSVPGIGLLTSTAMLAAVGDPRSFDSGRRYASFLGLTPREYSSGSSRYLGRISKRGNRYIRMLLTHGARSILRAATVARRAGRSLDRLRTWALALQERSCHNKATCALANKLARIAWAVWTKHERYQSASA

SEQ ID NO: 476513 - protein, 440 aa, unidentified
MSKRAYRAARVNDVNWDQLAQGKDGLDITLGVDVGKFSLWAVCRWADGRFERPWRVQNPVEIPTLLALLKRVSVGRKLVVAMESSGTYGDALRQALADNQIELQRVGGKAAHDYAEVFDGVPSQHDGKDAAVVAELAALGKAMPWEYQPADPWEQELAYWVEWMVAHRQMLTIWQGRLEGLLARHWPEATQVLKLSSGTLLRVLKRYGTPQALAADGEAAKLLARWGGAFLAPEKIEKLLAGARASVGVRLGEWQQRQIQNYAQQALAARQEANRAGRRLRSLAEGHAVLQAQGKVVGVPTACVLWASTGDPRKYHAAGAYRKAMGLNLVERSSGTYQGKLRISKRGSPRTRQWLYFAVLRLVQKCGVRSWYEAKKGHDEADARRALVAVMRKLAVALYYVGVHNEEFQPRRLFGRIRRHRGSPGEQKSRTKRRSRAEQI

SEQ ID NO: 476514 - protein, 315 aa, unidentified
MLIIGVDYHPSFQQIAFAETEAGEFGERRLNHSDGEADRFYRNLKQRGIKVRVGMEATGYSRWFERLLAELGMELWMGDAAEIKTKRVRKQKTDREDARLLLKLMLEDRFPRVWVPDPHNRDLRQLLWHRHRLVQMRTRIMNQLQAIAMNEGVRWKKRLWKERGRAQLAQLQLAAWASRRRQDLTELLDRLNPTIEELTAAAEQEAKKRPEVLRLMTHPGVGFLTALAFVLIIGTPDRFRCGKQIGSYVGLIPSEDSSAGRQRLGHISKQGSALLRFLLVEAAQALLDGLDISVGHRRCPCDPSQKTDAGGTPAS

SEQ ID NO: 476515 - protein, 354 aa, unidentified
MIIIGCDYHPGFQEIAFVDTETGDCGEQQLKHCEGAQEFYRALVAQGKKVRVGMEASGHARWFERLLAELNIELWRGDAAVIRAKRGRKKKTDREDARHILNLLLTGDFPKIWVPSWENRDLRQLLWHRHRMVQARTRVMNQLQAVALNEGLRCKKKLWRTHGREQLEAFRLAPWASRRRKDLLEILDRLNPTIAELTQAIEQEAEKCPQALCLRTHPGVGALTALAFVLIIGEAERFQCGKQVGCYLGLVPLEDSSGDKRRLGHITKQGNTLLRFLLVEAAQVSSRTIPEWRSQYIHLTMRRGRKIAKVAMARKLAMRLFWMMRKGWNYQQVIKFGSHVEQPGNRHGVQSNTE

SEQ ID NO: 476516 - protein, 408 aa, unidentified
MQVLHISCAGLDVHKDVIVACRRVVRGKNTSKEVESFGSTTRELLKLSAWLEETGTTHVVMESTGVYWKPVWNILADQFELILANPRHVKNVPGRKTDVKDAEWLSDLLAHGLVEASFVPDAPIAGLRDLTRTAKQLTRERVQHVQRIQKHLQAANIRLDSVLSDIMGKSGRRIIDAIVGGQTEPRKLAALARGVKATPEELAEAVEGRVSLATRKLIRTHLSIIDALDRTLDDLEKDIDEALLPFAEAVALLKTIPGVGDGTARVLVAEVGTDMSRFKTPGHLVSWAGLCPRMDESAGKRRSTKIRDGNKWLKTALCQAAWAGIRCKKRGYLHAQFWRLRARRGPGKAIIAVTASMLTAVHAILSTRRPFRDLGNNFFERKDQTHTVARLTKRLASLGYEVELKPAA

SEQ ID NO: 476517 - protein, 348 aa, unidentified
MTRILAIDLGKFKSVACLYDAESAEAVFQTLQTTPQTMHDLLVELEPDRLVIEICGIAGWIHDMATDLDIPIEVANPQHEGWRWNKVKRKTDRDDALKLARLAAMNQLPTVYMPGRRTRQWKSAIAYRHALVDRRTAIKNTIRALLDTQGLRMPSGASGWTAVSLERLRSLARPIGRCGADDLWRGQLQSELTSLRQINELLKRIEQRLDRLAAGDERVRRLQSIPGVGTRLAELVVATIDRADRFRTGREVSAYAGLVPRQFESGTMSRQGRISKQGPTLLRRLLVQIAWGMERRSAHVAALFARISGGQKTRRKKAAVAIARKILVWCWAMLRDGTSWRDPALRPA

SEQ ID NO: 476518 - protein, 377 aa, unidentified
MIYVDIDIAKLNHFAAAISSDGEILIEPFKFTNDYDGFYLLLSKLAPLDQNSIIIGLESTAHYGDNLVRFLISKDFKVCVLNPIQTSSMRKNNVRKTKTDKVDTFVIAKPLMMQDSLRFMTLDYIELKEFDRFRQKLVKQRTRLKIQLTSYVDQVFPELQYFFKSGLHQNSVYTLLKEAPTPTTIASMHMTHLAHLLEVASHGHFGKEKARELRILAQKSVGVNDSSLSIQITHTIEQIELLDSQLFHTELEMANLVTCLHSVIMTIPGIGFINGGMILGEIGDIHRFSELKKLLAFTGLDPSVHQSGNFQAQRTRMSKRGSRVLRYALINAAHNVVKNNSTFKAYYDAKRAEGRTTLQCPWTLCWQACQSHLEDAH

SEQ ID NO: 476519 - protein, 316 aa, unidentified
MTTTAVVVGVDVAKDRLDVAVRPSGEVWSEANDEAGITALVTRLRPLGPALIVCEATGGFERAAIAALAAAGFPVVVANPRQVRDFARATGQLAKTDQLDAGILALFAERVRPTPRPLPDAAAQLLDAVLTRRRQLLEMLVAEKNRLGFAPKPLHRGIQAHIRWLERQLDDVTTELATLIEGSPVWRAKDDLLQSVPGVGPIVSYTLLGELPELGTLSHKQIAALVGVAPLARDSGTLRGKRMIWGGRASVRTVLFMAALCGRRWNPALKVFYERLKAAGKPTKVALIACARKLLTILNALVRDQSRWTSHVQYSC

SEQ ID NO: 476520 - protein, 433 aa, unidentified
MSASTGCDAALWLCGSEKGRTMSAAVYRFYVGIDWATEKHRVVVLDAERRVVREREVCHEGAALESFADWLTQLAASAVETVAVALEVPRGAVVDVLLARGFHVFALNPKQLDRFRDRFTVAGAKDDRRDAQVLASALATDLATFRRLEPEHPLLLELRELSRLEDDLQEELGRLTNRLREQLHRYYPQLLHLVPAADEPWLWTLLERAPTPSVAQHLPRATVRTILSRHRIRRVDTDAVLATLRAPALPVAPGTVQAAQRHLAVLLPRLRLIHQQRAECATQIEGLLERLGESQEHRDVPILRSVVGVGRVVAATMLAEASRLLAARDYHGLRAQTGVAPITRQSGRRTLVCMRYACNPRLRQAAYHWGQSAARHDPVSRAHYERLRARGHSHARAVRGVVDRLLHVLIAMLAAGTLYDPARRRLPVGEAVA

SEQ ID NO: 476521 - protein, 342 aa, unidentified
MTLYIGVDIHARQQTLSYLETADGTTGQVVLDHEVDDVAGFYRQFQGEVIIGIEACGYTNWFEELVERLGHQLLVGDAAEIRRLARRRQKNDRRDADLLLDLLVHDEFPALYRYCQESREVLRQLRYRHKLVKLRTMVANTLHALALNAGLSLRAKLLTKGGRQQLSALPLSAISQQQRNELLSLADELTRRIQLVEQWLAVQAARDGRVQRLQTHPGVGLLTSLCVVHTLGEVQRFSSTRKVAAYVGFDPMEDSSAERKAYGGISKAGSRLLRYLLIEAGQTAAKDDEQLKQFYRRLLPRRGKARAKVAVGRKLLIRCFIMWRAEIDYAEFLRRGQKEETE

SEQ ID NO: 476522 - protein, 397 aa, unidentified
MYIVGIDIAKRKHEAAVIDGEGAVIIKPFSFTNNCSGYNRLLAMLTKAKLPLDEVSFAMEATGHYWLALFTRLQKEGFRVQVINPVQTNSIRSFYIRQAKTDPRDALLIAEVIRFGHFSESTLHPENIYELRELCRGRHAIVSMQADVKRKVVALLDQVFPEYETAFTNMFSDTSMAILQTCPTPKELSEMPLEELCHLIEVSSHKRFRMAKARELQELARNSFGFAMAGDVFSTMIRLYAKHLDFLKQQVREMDRKIAEIMDTLDTPITTITGIGPTLGAYILSEIGDISRFSSAAKLAAYAGIDPTMRQSGEYNGVRNRMSKRGSPYLRHAIWLAASSAVLHDPALKLYFQKKRDEGKPYMASVGHACRKMVSIIYAVMRDNKAYVPCIPSEISA

SEQ ID NO: 476523 - protein, 346 aa, unidentified
MMIIGCDFHPSWQQIAWLDTATGETEEQKLVHASGEAKKFYRQLAAPVLIGMETTGNSQWFVELAEDLGHEIWVGDAAQIRASYVRKQKTDKRDAAHILKLMVEGRFPRLWTPDREQRDLRQLVVHRHKLVEIRSRVKNELQHLSLNKGMQKQNKLWSAAGQKLLRELPLKPWAACRREDLLGLLAMLNQQIGKLDAAVQHAADGHPQAQLLMTQPGVGPNTALAYVLTVGDVSRFPRGKQVASYLGLIPREHSSGGHQMLGSISKQGNRLLRSLLVEAAQIAVRFDPGMKKEYLHRCHQKPKGVAKVAAARKLAVRLYWMLRTQVAYPEIVRIESSPRVALVGAS

SEQ ID NO: 476524 - protein, 346 aa, unidentified
MLYCGVDLHKNFSYITVMDEQGNNKEQLKTINTELPSFFDSLPEDAKVAVEATSNWYRFYELIEDKVTSVNLAHPLKTRAIAEAKVKTDKVDSTILAHLLRSNLLPTAYIPPKEVRDTRELLRYRASLVRLRTQIKNKIHAILLKNGIAHQFSDLFGKQGLQFLKELLLREAYQIPLTGYIQALENLTLLIKEISKRIDSLANKDDNVKLLMTIPGIGAYSAMLIMSEIGDISRFHSKKHLSSYAGLVPSTSSSAGRITHGSITRGGSKWLRWILIEAAQKAHLYKGPLYSFYRRVRYKKGYQKAVVALARKLSIVIYFMLKNRVTFKHFFSNYRSGQPVDYMVSK

SEQ ID NO: 476525 - protein, 349 aa, unidentified
MLAEKVDYVIGVDTHRDQHTLAVVAASTGAVIAQHAVATTESGYSAAVAFAERYAVGVRVWAIEGAGHYGAGFTRYLNRRAQLVVEVGRTARSERRLQGKDDALDAVRAARSALASETLTLPRAGQRQEALRVLLLTRRSAVDVRRLALVQLRSVIVTAPESLRGELRRLPVGQLIRRCSRFRRSDSRTPDELAVVLVLRSLARRIEAATEEANELEREIVGHVRALVPDLLNEPGVGPIVAAQLIVTWSHHGRLRSEAAFARLAGVAPLPASSGQTIRHRLSRGGDRQLNRALHTVILHRRQHDPATRDYITRRIAEGKTARDATRILKRYLARHLYRVMQNAPLAMT

SEQ ID NO: 476526 - protein, 452 aa, unidentified
MAKKPRKIKTAKGLRLKIVNPDSAGIDIADGEMQVCVPEDRDGDNNRRFGSFTEDLIEICEWLRVCRINTVAMEATGVYWIPLYLKLKDYGFDVILANPTQVKNFTQDKTDAADAESLMLQHSYGLIKPSFQPENITRQIRNLARHRMTIVDKSGQETQRMQKAMEMMNIKLSTVISDVLGKSGQAIIRAILDGNHDPKSLAELADPKCKASKETIAKSLEGTWDADKLFMLKQSVDCYDFYQKQLAECDKMIESLLAEYTAEIDIKSNKFVRTRKRTSQKNAVAFDMELYAHAVFGVNIMAMPGMSSNSMLQLVAELGHDFTDKFETCAKFCKWANTAPSNKISGGKLLSSHMKKRKNPVGQVLRICANAVRNEKSEMGAYFRRMKSKSGHNQAVVATAHKMARILYAMVKYNREYNPAKVGCTEKELLIKKRDRAQKALQKLEQKLKEAS

SEQ ID NO: 476527 - protein, 346 aa, unidentified
MKKIFIGIDFSKEKFDATLIKAEGVKECGPSVHEVFDNKTSGYRRLVKWVRSQSEDAPADSLLYCGENTGGYSIGLSNYLYASGYDMWLESAYSIKQSSGIQRIKNDMYDSRIIAEYAMRNHDRMILYKPLSTSLNSLREVFLYRHSLVRQRVALTNRRSEKRLTQEKSDVKAFMSFTSKHLITEINKAIAKCDEKIRDIISSDEELREVFDIITSMPGIGAQNATCLMVYTDNFTKFDMNSRKIACYYGIAPFERRSGSSVYQKPQVSQFANRMIKSLLSQAALAAIKADVNICCYYQHLIERGKHPMLVHNNIKNKMLHTLVAMVRNKQKYNPEHLYKPVCGVA

SEQ ID NO: 476528 - protein, 419 aa, unidentified
MMIYYIGIDISKYKHDFCIISNTGEVIVENLFFENNKKGFQELLEKLKPYNKSDVHIAFEATGHYSKNLELFLIDQGYSFMKMNPLVIHQFLKARSLRRTKTDKADSLAIANYLMSVPYKPNSDLLYNIFTLKSLCRAREQLIKERSKYQVLLTNQLDLTFPELKQFLNNRISATLLFILEKYTNTNHISLMRDYDSIKNISRGKFSYAKFAKLKELAKNSIGHHDENNDLLISTYVSIIKTLNDKIDPIEKQISTIIKELNPRMLTIPGLGEISAATILAEYGDINNFSSPNKMLAFAGLEPSIIQSGTIENNGKMVKHGSGHLRYSIMNAAMIILRYSPTFYDYYLKKRSEGKCHRVALSHVCKKLLRVIYTLEKNNIDFDSSLLKKYSLLCYFSLPSKILKNVIFEGFWRGINSNL

SEQ ID NO: 476529 - protein, 346 aa, unidentified
MMIIGCDFHPSWQQVCWLDTETGETGEQKLVQAAGDAERFYRQVPAPALIGMEATGNCHWLVDLLSELGHELWVGDAAQIRASYVRQQKTDKRDAAHILKLLVEGRFPRIWMPSSEVRDRRQLLLHRYKLVILRARVKNELQHLCLNQGVQRQHKLWSRAGQQVLRELPLKPWAARRREDLLRLMAMLDQQIEPLDQAVKAEAQRDKMALLLQTQPGVGPITALAYVLTMGEVSRFPRGKQVASYLGLIPREHSSGGRQKLGAITKQGNRMMRMLLVEAAQAAVRYDPEFRKEYRHRCHRKPKAVAKVAAARKLAIRLYWMLRTHKPYPEIVRIESSPRVPLVGAS

SEQ ID NO: 476530 - protein, 408 aa, unidentified
MASKIAGIDVHKKVLMVVVIDARTPDSKPERRRFTTMPSDLRRLSTWLEQLGVEEAVMESTAQYWRSVWLELEPHFRLHLAQAFSNRAPRGRKQDFKDAERLVRRLIAQELILSFVPDGEQRIWRNLTRMKLQLVRDRMRLQSQIECLLEEMRIKLSVVVTDLLGTSGLRILHALANGETDAKNLALLGDHRLKCGEEQLVEALTGRPHSMHRQMLSLQLERLRLLDEQIGKLNSLIAAAMNPHQDTVIRLAEVPGLGIDSAQQIIAEVGVTASTFRSAAEFTSWVGTCPGSQESAEENSSSRSAKGNKYMRRVLNQAANAAARSKGTHFQAVFRRLLPRLGYQSAVWAIAHRLCRLVWKILHEGIRYIEQGIESEPKLLIYRARSLAKQLRKFGYNVQITPADGAPA

SEQ ID NO: 476531 - protein, 356 aa, unidentified
MTKVTASFENETVYVGLDVHKRSWNAAIYLNEQYIRNIHQPPTPQALYHYLHHSYPQAKYVCAYECGKFGYWIQREFKQLGVEWLVVNPADIPSTHKDEVYKTDIRDARGIAQALSSGQLKSIYVPYEEQEADRHLVRQRKKIWRDLVRCKNRIKGFLDYKGIFVPSQYDNANWSRNFINWLSKLEFEHSSNRVTLNYLLTEMELLRKELLSISNTIRKLMRSKKYNKLYYLLRSVTGIGPLTAAALITEIGDMKRFASFYHLNSFVGLMPMEHSSGERELKGRITVRKHRQLRSDLVECAWTAKRTDPAVALYYSEQIKRGKNGKAAIVKVARKLLSRIRYVWLSGESYQTAVVK

SEQ ID NO: 476532 - protein, 413 aa, unidentified
MDPIIERCGGLDVHKDSITACVRVPGEQGARRQEIRTFGTTTHQLLALRDWLASFGVTLVGMESTGVYWKPLYYVLEDDMECWLLNAHHLKAVPGRKTDVKDAEWICQLVEHGLVRPSFVPPRPIRELRDLTRYRKALINERTREVQRLDKVLQDAGIKLSSVATEVLGKSGRAMLEALVSGTHDPEVLADLAKGRLRAKLPQLREALEGRFRAHHALILGELLGHIDYLDEAVARLSAEVEKRIAPFSEEVALLDSIVGVDRRGAEVLIAETGADMTRFPSAAHLASWAAVCPGNNESAGKHFSGRTRKGSKWLRTTLNECANSAARSKGSYLSSQYARLKGRRGHKKAIGAVAHSILVIAYHVLQRRRSYADLGPHYLLLRDNADAYKNRLVRQLERLGHKVTLEPLAQTA

SEQ ID NO: 476533 - protein, 421 aa, unidentified
MNACTFKATIGLDWADQRHDLWIQAADATKPQHVHLEQTPEALHAWVAKLRERFPAGQVAIGVETSRGPVISALLAYDFLVLFPINPKALKDYRAAFAVSGAKDDRTDSQLLEELVRLHPDRLHPLQPDTELTRKLAGLVENRRHLVDERTRITNQIHAKLKTYYPLAETLLRPDLASAMGAEFLSRWPDLTRLLAASPEQIRRFFHKHGSRSARKMEERLAAIQNAKPLTTDPAIIEPACELILGLAAMLKCLNTAVARLERSIQKAMDEHPDAPIFRSFPSAGPALAPRLLVAFGTQRDRFESADQVAQFYGIAPVVIQSGNTEITRMRHRCPKFGRQTFHENAACAAKSEPWAGVYYQQQKEKHEDKHHQACRALAFKLIRIYFACWKNRQRYQSQTYFAALAKTGSPLHHKLNEVGE

SEQ ID NO: 476534 - protein, 349 aa, unidentified
MSIIGGLDVHRRQITFDWVDRDSGEAHRGRIAPATRAGLRAWLGELPCAEGAFAVEGCTGWRFVAEELKAAGLVAYLAEPAETSSLRGPKRRAKTDRTDARLLRELLEQGRLPSSWIPPTWILDLRTTVRLRKTLVDQRTAWQQRIHAALFHHGLPRPTQELLSHGTRAWLEQAPLPAASRQALAVALGQIDGLDAELDPIDQWLCTLARRQPGCRALMTHHYGIGAITAPTILAELGDARRFAGGDQVVRATGLDITVYASDGKRSPGHLSRQGPEVLRWALFEAAKAAARPSSPDYAYYQQVKARQGGNRATLAVARKLARRVRHTLLQLGDAALAPLEDLPVAEVA

SEQ ID NO: 476535 - protein, 415 aa, unidentified
MEIVVERIAGLDVHKDSVVACVRTPGERPGRRRQQVRTFGTVASELAELAAWLAAEEVGQAVMEATGVYWKPVWYALEDSVGELVLVNATHVKKVPGRKTDVKDAEWLAQLGECGLLRSSFVPPEVVRDLRDLTRYRKKLIQARGQEVQRVQKLLEDAGVKLASVASDVLGVSGREMLDALVAGQRDPAALADMARARMRRKIPQLRQALATARFRDHHAWMLREHLARIDDFNAAITRLDHQVDVVITPFVEARDRLTSIPGVGKKAAEVIIAETGADMSQFPTPEHLASWAGMCPGNKRSAGKNYSGRTPQGNAWLSGILTECGWVVRQSRSTYLAAQFWNIARRRGQERAAVAVGHSILVIAWHIMSNPGTTYTDLGADYFQRRVDPDRERRYLLSRLKALGLDVELKEPAA

SEQ ID NO: 476536 - protein, 354 aa, unidentified
MRAKNIDFTGKNIYVGLDVHKKSWSVTILLDELEHRTFSSPPVPEFLNKYLRKHFPGGRYLSAYECGFSGYVHHRKLNELGIENIVINPADVPSSNKEKTTKTDKVDSRKIAKGLRNGELKGIHVFDRVHEEFRSFVRQRTIFQKDLRRSKQRIKSSLMYHGIEIPEDFDEASWSNSFEDWLSGLEMSTTNGTQVLENLYQNYLFNKNQIRILAIDIKKYARRHYKEDYFLLRTIPGIGQLTAVAIISELGDITRFKNLNHLASYVGLMPMSYNSGESEQSRGMTYRANNWVRTMLVEASWQAIRKDPAMMQYYLNHAGKINGKKAIIKVSRKLLNRVRFVLKNKQPYELSVQD

SEQ ID NO: 476537 - protein, 357 aa, unidentified
MIKNYTPKSKSEIPHQEEKVIYVGVDLSKSKLDVMSDKYRIYPNSDSGCKHFCRDLKQKSNNVVVVYEATGNISLQFAAMLDMNGIQRCQVSPRKIRHFAKGGIKEAKTDKLDCEVIRNYAITYSQYLQINAPMSKDYAEMRELQRVERFIAQNIAKTKQVLSDCRSEFARKTLNDKIKADMEQRKLINAQLHRLIKEDEYMGRKMRILMQEIGVGKETAVALALELPELGNLSRKEVAALVGVAPFNFDSGNKIGKRYIRYGRRNIRNLLYMCTRAALNAKTENVYHKRWKQLERKIKNPNSLTNNPEDKDYKRRMVACMRLMIVRLNAITRDWIAEGCPDITQRGKVIATTAIKK

SEQ ID NO: 476538 - protein, 441 aa, unidentified
MVNWLVPPSGYKLFWPDPEASRTFDYNQGRAVVEAIYERVAGMDVHRMEHVVTILVAQQDGTLSHETRRFGGFKRDMRALVGWLLSHRIQLVVMESTGIYWKSVFSHLEAAGIPALVVNAFHVKNVPGRKTDVSDSEWLAQLARFGLLRGSFIPPKDLRELRVVSRYRRKLAQTLAGEKNRLHKVLDDAGIKLGGVVSDIDGVCARKMIEGLIAGRTPAELAALGRGKLKSSDQVLQAAMDGDLSPRHRLVLSTAFNHLRYLEQQLAQLDRYLFEASKPYAWAWHLLQTIPGIDKISAAMILIEIGVDMQRFGSASRLASWTALCPGNHETAGKRKSGRIRHGNPIVRYLLCEAANAARRTKTVFRAKYISLTIRRGHKKTIIAIAHKLLRTIYVVLARRKPYRDTTVDYEAAMVAKNAPRWIRALKKYGYWPETAKPATA

SEQ ID NO: 476539 - protein, 392 aa, unidentified
MIYIGIDVAKEKHDCCIIDSDGVILNDSLRISNTLKGFELLYNSILSVLPDKDISNVKIGLESTGHYSTNIQSFLYNKGFKLSILNPLATNLFRKAQTLRKTKTDKTDALVIAKMLFSDDTKSYIPVSYQIQELKSLTRHRYRLIGYRSKLKISINRLIDIIFPELPKLLWSIHQSSSYALLKELTSPKDIESCHLTKLTNLLNKASKGKYTKDKAIELKTYAKDSIGTSNRSLSFELQQTIRLIESVQDEIKILDNQIKEVVTELNSPIMTIPGISYTLAAIILSEIGEIERFTTPAKLLAFAGLDPSTYQSGKYSASHTPMVKRGSKYLRWAILMASRTVCMRDLTFSEYLSKKRSEGKHYYIAMSHVSKKLLRVIFYLLKTDTAFVPQM

SEQ ID NO: 476540 - protein, 437 aa, unidentified
MGKEDEETTMSGKETVQAEPEFVAFVGIDWADQKHVWCLQKANSTQREAGELEHRPEAVEAWVGELCRRFGYGPIAVAGEQVKGALVYMLRKYECLHLYPVPSTMSASMREALYPSGAKDDPRDADVLLELLVLHRDKLRRLKPDNEATRRVQNLVEERRKLVEEKTAQLNRLTGYLKVYFPQMLEWFAKLDSKLVCDFLERWPSLEELQKVPSAELKKFFRHRRGRHGELTEWRMHGIGQATPAIRDRAVIEAKQTVVQVIAQLLRTLLEGIATLERKIAEAAEVHPDFFIFQSLPGAGAALAPRLLAAFGSQRDRYSRAEEVQKYSGIAPVTERSGKKKWVHFRWACSKFLRQSFHEWAGHSIAQSVWARAYYQRQRERGKEHHAAVRALAFKWIRIVFRCWQDRVAYDETRYLTVLAKRGSHLTSAFVDVAVSM

SEQ ID NO: 476541 - protein, 350 aa, unidentified
MIVGIDVHKRTHAAALIDERGGEIAALTFANSPKGYWQLIDWLVDHEAARAVIGVESPGSYGRCLVAALAGAGFEVLQVPAWRTHRERHRRGPGKTDPGDALSIAKVVLTNRDDLGPAEEPELVRALGVLELQRRRFVRDRTQAIQRLRSDWTQHDPVAETGVVRCDRQRELRKLKRIQLGEGLAQRAAARCIRELARDIDDLNRRITALDNEIAELLAEHDNPLEDLHGVGTNLAATIIAQAGDVRRFRDASAFARFCGAAPIPCGSGQTSGRHRLHRGGNRQLNAALYRIAIVQQRHHPQAKTYLARKIAEGKTQREARRALKRHLSNVLYRRLHTWANQTPAMNLLT

SEQ ID NO: 476542 - protein, 422 aa, unidentified
MKKRTYRATNVKQANWQKIAGLAAGQPVVLGVDVGKDDFFAVLMKTDRSVIDTIKWVHPQQTVEMVEHLLECVDRQTLQVVMEPSGTYGDALRGYLGDRGLAVYRVSPKRVHDAAEVYDGVPSLHDAKSAYLIGRLHLDGASEPWEALSASRRDHHALIAELDLYQGQHQANLNRLEAHLSRHWPEVLRILDLNTVSLHTLIGEYGDPSQVCAHREQARQLLQRSGRALLSTEKIEQVLTSSETTLGLPCTPGERHWLQVLGQELLRTHRALKAIEHQISQVVEEDRVLRRMANVVGKTSSLVLETTQGTPLDYANPHSYLKALGLNLEERSSGKHAGQLKITKRGPGKARKYLYFAALRWSHQDPVIEAWYQNKIKRDGGLESKAMTAVMRKLALSLWHVARGEAFDSRKLFNARALGIAA

SEQ ID NO: 476543 - protein, 419 aa, unidentified
MDVMVERCAGLDVHKDTVVACVRAPDPHGGRLSEVRTFGTFTVELLALRDWLLSCGVTLVAMESTGVFWRPVFYLLEDAVECWVVNAAHMRNLPGRKTDVADAEWIAQLVEHGLIRPSFVPPPPIRELRSLTRYRKAQIEERTREVQRLDKILQDAGIKLSSVASQVLGRSGRDMLDALVAGTRDPAVLAELARGRLRTKIPALTQALVGRFGPTHALVIGEILAHLDYLEGAIGRLSDRIDEAITPFAIERDLLTTIPGVDRRLAEAIIAEVGVDMTQFGTAERLSSWAGMCPGQHESAGKSRSGRSRHGDTWLQKHLTVAAMAAVHTKDSYLAAQYARLVKRRGKARARKAVGHSILVVVFHILASGQPYQDLGGDYLLRRYNPARRARQHLHDLERLGWTITHTEQGVICQQPAAA

SEQ ID NO: 476544 - protein, 412 aa, unidentified
MDILHRCCAGLDIHKKTVVACVRRIDAAGHAHQEIRTFGTMTCDLLALSDWLAEQGVEHVALESTGVYWKPVFNILEGRFGVMLVNARHIKQVPGRKTDVRDCAWIAQLLQHGLLRASFVPPPPIRELRDLTRPRAQLVAEKATAANRVQKVLEDANIKLASVATDVLGVSGRDMPGALIAGEDDAAKLADKARKRLRNKIPALQTALRGRVTEHHRFQLRLLLDHVTHLEGLIGRLGGRIEAVMAPFAEAVERLTTIPGVEQRAAEVVIAEIGPDMSQFPTAEHLASWAGMCPGNDESAGKRKSGKTTKGSRWLRQILTQAAWAASHTKGTYLAAQYRRLAARRGKKRALVAVGHTLLVILYHLLKDHTTCAELGGDFLERLEPDQLTRHLVKRLEKLGHNVILQPKEDAA

SEQ ID NO: 476545 - protein, 429 aa, unidentified
MEEVDDAELVVERVAALDLGKAGLEACVRVPHTHRPGRRMQELRGYGTTTAQLLEMVAWLRQWHVQRVVMESTSTYWKGVYYLLEAEGFDCWLVNAREVKNVPGRAKTDRADALWLAKVAERGMCRPSLVHPREIRRLRDLTRYRRALVQDRTREQQRVEKLLEDAQIKISAVLSNLHGVSGRAMLEAPIAGERDPRTLAQLAKGQARKKIKALEEALCGFFTDHHATILQMMLDNIDRISAQIAALDTRIEEAIGPFSSQAARLAEIPGVDAVAAAELIAEIGVDMTRFPSAAHLVSWAKFCPQTHQSAGKSKAQARGKGNPWLAGTLGRIAFANSRSDTFLGTRYRRLARRRGAQKAIVATGNSVLTVVYHLLSDPDASFIDLGPGYYESRINKHRRARDLATQLQALTGQHIAIRDGKAVITDTAA

SEQ ID NO: 476546 - protein, 347 aa, unidentified
MDHIGIDVHKKESQICILAEGGELIERRIPTQPRRFAEELGARPHARILLESSTESEWVARCLEGLDHEVVVADPNFAPMYATRTRKVKTDRRDARALAEACLLGAYRAAHRLSDAQRHVRARLTVRDTLVRTRTRYISLTRALLRQHGWLVPSGSAEGFPRRVMALLLPGRLRSEVAPLLAMMRHLQQQLAYSDERITAVTQTDERVRRLQSVPNVGPVTAAAFVAALDDAARFRRAHEVEAYLGLVPRELSSGETQRRGRITKAGSSRVRWLLIQAAVSMLRLRDPRTAALREWAERIAARRGKGIAVVALARRLAGVLFALLRDGTVYEQARREPRDMHAAVPA

SEQ ID NO: 476547 - protein, 404 aa, unidentified
MKVTSTFAGIDWSWQHHALCIVDDGGKRITETTVTHSKAGLTKITVLLRGHHVERVGIERGDGPVVEHLIRDGFEVVVISARQVKSLRARYGSAGNKDDRFDAFVLADALRTDPHRWAVVRPDSDATVALRALVRARQDLVGHRIAVHNQLLATLQHHFPGAIGLFHQLDIPISLAFLRRFPSETKAAWLSPTRLTHWLDANGYCGRATPADLMTHLHEAATGHTGGAVCEAGELIVLSLVDLLSSLRQRQSALEARIKEALLAHPDGAIMQSLPRSAVLRAATLLAEIGDCRARFPDSQSLAAAAGVAPSTRQSGKHCNVTYRRGCNKQLRAALVDWAQDTPRANAWAHDTYYRARARGCRHPHAARILAQAWTRILWRCWHDHTPYNPELHGRLSTLEMDAA

SEQ ID NO: 476548 - protein, 336 aa, unidentified
MKQVKQVVGIDVSMDKFDVQFGITDQELHHEYPAGAQFANKVTGFRRLERWAQKLSRSSKAPLWFVMEATGTYHEQLAYYLHERGHRVVVVLPTKLKYFMKSLDNKSKTDRLDARAITQFGLERTLEPWTPPSAQLRTLKILAREYDALVQQAVKVRNQMHAKDHAYTPPPETIARLREQHRLLVRQMKAVQAQIRAIVTEDQELSGRIANVTSAQGVGFMTAVRVVAETGGFHLIRNAKQLTSYAGYDVVIRQSGKRVGKPAISHKGNAHLRRAVYMPALAAIRFNPALRRFYKRLVGTKANKKVALVAVARKLLCLIYALWRTNTPYNPHYASA

SEQ ID NO: 476549 - protein, 383 aa, unidentified
MVAVNSGNTVRNELSAIFVSLELSRKNWLITSLSPGAGEKMSRHSVPGGDVAGLLERFGSLRKKAQARTGKDYPVIIIQEAGLDGFWIHRTLEQEGFESHIVEASSIAMSRRHRRLKTDRIDGEMLVRTLLAFKRGEPRVCAMVRPPSPDEEDRRRISRERKVLTAERVQHVNRIKGLLFSQGIVYDPMRRNCRERLEELRTGDGRPLPSHMKSQIIRELDRLDLIRNQIKAVEIERDALIAASQTPGQPSASMLTTVVGLGAEFSAVLWMEGLFRKFDNRRQVAAYAGLAPTPWQSGAVNREQGVSKSGNARLRATMLQMAWLWLRHQPTSALSLWFHERVAQSGGRVRKTMITALARKLLVALWKYVTAGVVIEGALLKAA

SEQ ID NO: 476550 - protein, 399 aa, unidentified
MTYDFVIGIDVGKYFHHACVLDKDGKQVKSKRIDQSEHSLRRFFDLFLALSSKILVVVDQPNNIGRLTVAVAQDMGITVKYLPGLSMRQLSRVHVGNAKTDVRDSYVIAHAGANLPDALRNVDRVQQVFSQLKVLNGIDEDLARSYTRLINQIRSSLVGSYPEFERVLRGQNIHRRWVLHMLAKYGGPTKIKRMGRARLITFAKKYKARNPEKIIDGLLDAIKNQTVVIPGSEYVELGVAMSATDALAKLDHRKVIEEEVCALITEVPQTHILMSMPGIGPKTAAQILMTVGDFSDFKTASHMASYAGLCPQTNQSGTSINTKSPNRAGNKKLKNALWQSSFSAIRYHERSRQYYERKRKEGKRHNAAVVALARRRLTVLFTMMANHSLYQEPEEQKIA

SEQ ID NO: 476551 - protein, 352 aa, unidentified
MDIIAMDCHKHYSLANVQTQDGQRLCEERVEHRRGNIRKFLSAYAPGTPVAIETIGNWYWIVDEIEAAGMAPRLVHARKAKLMLGSINKTDKLDVRGLNKLQRIGTLPTVWIPPAALRDQRELPRTRMVLSVARTRLKNRLHSVLDKYGLQDQFEEISDIFGRQGRAILEQTLAQLPVHTTYTTELLIEQLDRVQAGIAKIEKEIDKVFQPTAEINLLKSLPGVGKILSVVIALEIGDIRRFSRAERLASYAGTVPRVHASGGKTRYGRTRPDVNHYLKWAYIEAGNAVAVHRKHYPYRHVTGLYTRIRTRRGHAQGVGAVARHLAEATYWMLHKNESYQERGFKQVRSKGR

SEQ ID NO: 476552 - protein, 385 aa, unidentified
MSQTKFEPRRSLVAFDQHTTLVVVVELSLETWLVGGMVPGIAREPLKKLATPDPEAVLRLLYRWRDEAVNAGQTITRIVVAYEAGRDGFWLARWLRARGIEVYVIHPTSVAVSREHRRAKSDRIDLALLKRSVLGWLRGEEKHCSMVAIPTVEEEDAKRPHREREQLVGKRTGIINRAKAISIRHGIRGFNPNLRNAVDRLSSLRTPGGEPLPPNTRAELQRELEHLRFIKEQIKQVEKARLEQLAQTSEERLSATTRGLSRVRGLGIETADMLSSEMFSREYRDQRAIARYAGLTGSPDESGSRRREKGLAKAGNARVRRGMIQLAWRFRMHQKDSRLVQWFEARVAAGTKRKTMIVALARKLLIALWRLVTLGEVPEGVILAN

SEQ ID NO: 476553 - protein, 387 aa, unidentified
MSQTIATLMPAAVDYETTLILAIEVSNKSWVLAAQVPGLPHTKAKRTIDPEAKALQAAIAGYRARAAAIGHSIERVIAVYEAGWSGFWLARWLMSHGVEVHVVQPSSVPVDRRARRAKSDGIDSELLLRTLLAWLRGEPRVCSMVPVPDEADEDARRCVRERTELISERVGLTNRIGAILATLGVSDYNPLLRNRSRRLAELRTALGEPLPANAHAKIKRLLVRLELVLTQIAELERERDAVMETEASDRASRMIQQLAALRGIGVQSATVLVREAFVRCFANGKALGSYAGLASSPYSSGGIDREQGIGKAGNRRVRTVMVELAWLWTRYQPGAAQVRWFRERVGTTGRRVRKIMVVALARKLLIALWRFVIDGVLPEGAVFKPAA

SEQ ID NO: 476554 - protein, 415 aa, unidentified
MKVVYPICCGVDVHKSFLIGTIITTTGGVEPHYQKKRFSTYNNDLHRFCNWLLSNNCKNVCMESTGKYWVPVFNILEERGIATTIANPKWVKAVKGNKDDTKDSKWIGDLFRLGLVPGSFIPSKEIRILREFTRYRYKLVSMKSSEKNRFQNAFTVCNVALDSVVSDMFGKSAAAITNYLISEDSFDPEYCKSLLQRSLKKKADSVIESIEGYSITNEQKLRMKIIRSHLDYIQSAIADVDSAIDAMVAKHENLIALLQTVPGIDRNSAITIISEIGTDMEQFGSSKRLCCWAGLTPGNNESAGKKKSVRITRAGVYLKPALVQVAHAAVKATDNSYYRLKYEQISKRRGKKRAIIAVDRMILTAVFQMLSTGEAWNPSDLFKVDMPQPLKEKQLEKAVKQAMKFLEKQGIFVPA

SEQ ID NO: 476555 - protein, 322 aa, unidentified
MNKYRETYGVDISKDVFDVYGSLSGHHQFYNDESGFKKFLKGLPENSLVAMEATGYYHYRLAQFLYKNAVVVSVINPLSIKRFIQMKLAKVKTDKSDAKAICEYAQNNAVPVYNALTEVQSECLQLFRLLDTYLKQRTAVKNKVHGEEALGVPSKFVYRSLKRQRKQLDKEVKAIEEKILSLVKEDQEQQLTLLTSVPGIGQKTALFLIVITDGFSKFEKASQLCSYVGITPTTRESGSSVRGRARISKVGNRKLRNLLFLCAFNACKHNKACREIYERIVNKGKSKKLALIAVANKLLKQCFAIAKSGLPYDETYVSVLPK

SEQ ID NO: 476556 - protein, 339 aa, unidentified
MSAIVTIGIDLAKNVFAVHGVNATGQPALVRPSVPRAKLLELFASLPPCLIGMEACSGAHHWAREFQRFGHTVRLMAPKFVIPYRLSGKRGKNDAADAAAICEAVTRPNMRFVPIKSIEQQGQLLVHRARQGFVEQRTATLNRIRGLLSELGIVLPLKAAVVRREALARLEDLPGWANTVIGDLLSEVSRLDARIAQYDQHIKTMARQSTEAQHLMQLSGIGETTATALLSTIGNGRDFKCGRQLCAWLGLVPGQYSSGGKQRLGRITKAGDPYLRSLLVLGARAVLVAAKNKTDPISRWAVSLAQRRGYWKAIVAIAAKNARMCWAVLSKGEDFHLPA

SEQ ID NO: 476557 - protein, 374 aa, unidentified
MGTPSARTLVDMASVMFQELEEVPMTMLGGLDVHRQQITFDYVDDDGLVHWGQIRPATRKTLRDWLTQHCPDGDGEFALEGCTGWRYVSEELAAAGLGVHLGDPAEIAGSRGRKKRAKTDRADARLLRTLLVEGRFPESWIPPAHVLEVRTLGRLYCTLMDERRAWQQRIHAQLFHQGCPPIRALLSEAGRAALTRAELSVVGRQYIDAALRRIDELSAEIEPLRKQLVDFARHQPGCRALQTHYGIGWLCAAIIWAEIGDARRFGSSDQLVRFAGLDVTVYSSDSKRSPGHLSRQGSPQLRWAAFEAAKCAARRGSPDYAYYHKLAAKHDDHNGKNPTLAVERKILRRSYHTLRELGDAALAVPDTRSQEAAA

SEQ ID NO: 476558 - protein, 377 aa, unidentified
MLTLVAPHNNLFATEAPMDKYIGFDIDSNKTVCCIVKAGKKDKYRTINSTIPAMKAFITEQRADGSKAHLVFEISGQAGFIYDSLIDCADGITVANPSKMTWIYRTARKNDRIDARKMAVLLSIGEIPSVHMPSREVRQWRQMILHRRNIVQKVIAVKNRLRALLKSEGFDKPSDKGSWWKRSNRFWMRMLSERTDGGLDLWLVQLGNMIEELCTLEGQLKRVTGYLDKYLSQKDETDLLMSMPGVGPRTAEAVLAYTDNLKRFDNYKRYCSYFGLTPKLDESGSTRRLGHISKHGPSVVRWLLCESGWKVIRKSKGMREFYERVKAGQDARKKTAIVAVCRKMLCIMRAMLRDNEEFTEKLVGKVCGNVKQVKNAA

SEQ ID NO: 476559 - protein, 383 aa, unidentified
MKKTKGTLKRKVSIKEQGLHLAFELSESKWKLGFSDGKKMRFRSITVRNLEQLDEEIEKARERFKLKGEIRILSCYEAGRDGFWLHRYLSSCGIENVVVDSSSIEVNRRKRRTKTDRIDARKLLQMLMRYHGGERKLWSVVNVPSVEAEDGRQLNRELEALNKERTMHRGRIRGLLIQQGLEVRNPSGKKFLEELASLRTWDDKEIPEDLKERVVREHERLRQVEDQMRLLRKERERRVESRANASLRMVSQLRTLYGIGVTSSWDFVMEMYGWRKFRNRKEVGAFPGLTPTPYDSGGSQREQGISKTGRGRIRALSIQIAWSWLRFQPQSKLALWFWERFGHGGKRMRKIGIVAVARRLLIDLWRYLQYGVIPEGARLRASA

SEQ ID NO: 476560 - protein, 386 aa, unidentified
MQASTIDTPTAAQFGTIFVAIELSQKSWLVTLHSPDRDRMSRHSLASGDHARLLALIGRERDRVSRTTGGIPAVVSCYEAGYDGYWLHRLLLAAGITNYVFDPASIAVDQRARRVKTDRIDGERMLRTLMAYLRGEPRVVRIVRVPAAEQEDARRASRERGRLIKEQTAHTNRIKALLRLLGMAVGNPRRRDWLNWLTAQRDWQGQAVPPRMLSEIKHEHARLMLVRERLDEFVQASAAVDPAPAVVQMTERSELLLRLKCLGPAFATTLTNEVFYKDFRNRREVASYFGLTPSPWQSGGIDRDQGISKAGNPRARCAAIELAWLWLRHQPDSKLTQEYRRRTLDAGKRIKRVAIVALARKLVVALWRYLTTGLVPEGAMLKTAKA

SEQ ID NO: 476561 - protein, 346 aa, unidentified
MGKSITDLSSVTTVGLDLAKHIFQVHCVDASGCVVLNNSVRRNRLLEFFVSLPRSIVGLEACGSAHHWARELNKLGHDARMMPPAYVKPYIRRQKNDAADAAAICEAATRPSMRFVAVRSLENQAALMRHKAREMLVSQRTQLLNGLRGHLTEVGVIAPQGPKHARELADRIEVCDETIPIEVCEALAPLVVQLRSLDEAIARLERTVAKLAHQDETARRLMSIPGFGPITASAMAASVQDVSNFAGPREFAAFLGLTPKQNSSGGKTRLGRISKMGNRELRRLLVVGAHAVLFHRRPHTDPLRLWAKKLVEQKSFKLVAVALANKMARIAFAILRDKTVYRGVPA

SEQ ID NO: 476562 - protein, 427 aa, unidentified
MEFKQRNKQNQQIERITPKHVVIGVDIAKEIHVARAVNYRGIEIGKPLKFADSKEGFIRFQQWLEHLQSTHRLNNVLVGMEPTGHYWFHLADWLLAESIDVVLVNPATTKRNKENRDNSPSKSDMKDALVIADVVSRGYYTDLPRTPEVFQRLRVSMNYREICMKDLVIIKNRITRWLDVSFPEYTTVFKDWTVPRSLAALQAFPLPRDIKNLDSEKMIAGWKPFMKRVGGSRALQKAAELLAAARRSVGRTTCQEEERRQLANLVADYLRLEQRIGEMQKELIKLLEEIPELTQRLRSIQGLGTICIAALLAGTGNLKTYTHGNQILSQAGLNLAEKSSGKYQGQVKITGRGRPQLRKHLYLGVISLVSQNPAYRAWHEHNVKQKKMKPMASIFKLIGKLCRIIVGLVRQERSFDPKVANPAPLAA

SEQ ID NO: 476563 - protein, 789 aa, unidentified
MEFFETGLVEAEKSTKKKIKGGIDVHKRGCNIFLLNEREEKVKEKRIQTSYESFSKFFSPFLQEYDVEVALECGNLAFVICDYLSALGVGSYVVNAFKNRLIAETCQKSDKRDAKTLGYQLSRRILPPRVYHPTYRERELRSLVNHRHKLVADRTRAANRAFALLLRNGIFGSKSYLRNNEEYWKRLLRERLVSESNILYIEFKCFMEQYQLCNGQIGEMEAETKKHIASMYQLEYELLLSIPGVGHCIASVVLAYLGVIERFENVRHFWSYYGMAPSRRETDGKKVGSSKITKMGPSILRGYLTQGALSILRNKEKEENKPFVEFYQRIRTKKGWKKARVALGKKILGIIYGVLKNQTAYISNYAEHCAKRKVTVTDTDADTDTDTGSHIVPEASGLPESEKMLCNDDDNGLDQLDVDDDRQVKVTESKRREPPAHLSEPVASGAAGMGMGMERLLSIEEIKSLHMVEFLTHQYGLCFLPLGNQYVCRSPFTEEQKPSLIVGQFQGHWLFKDFSSGEGGSLIDFVLLKENFCDVAETLAYLRKLISVDKLEWLQSKGGGVGVGGVDKYEEKKKGGNYNLNYIYRKLCINEKEVCWKYLKGRGLGQELISELSNRGILLHNRYKGHSYCCFAVFDRHGDIRCLDNHQIEGKGKFVLGKKQIFTLDWAVLPGAKKVFISEGIIDYLSIKTLEPDIPGLALLGNAPNFDESLLQSVTVLISALDCDAGGIRALLSLKEKFSGKDISPYNLAGCKDPNEYLQTLTLGKKAKNRHSRVILADSEDTKDNVLST

SEQ ID NO: 476564 - protein, 401 aa, unidentified
MEGPIVSIDVSNGNSHYMCFIKNNKRFGKVKKIDHDIEGFKRLLEDIQKLEAETNEKVCAVFEATGVYTKPLERFLSKNSIKTYMINPLESARKRKEEIHNKKTDKLDPISISKVYYDKEEMMELKKKDETYNWLRKKNRLYEDQLNHLRKYKVTFQNQLSICFPGYLDLFKDGYSDIPMTILKKYPHPDLLKNKKAETVARYLEKNTCHNHKVSLEYALKIIEFAKKTYPGCEKDDVEVEIFKILLDKVIETQRECEKTLNEMITVASTLEEYRYISSIDGIGTNLAARIIAEIGDIEEFKSREALVAYAGLDPHIYQSGDQDGKHLKISKKGNKYLRCLLFLAVGCSIRGAKDNPVNRFYQKKKQQSNPLNSKAAKTACTAKLLKIIYGICKNKTTYER

SEQ ID NO: 476565 - protein, 402 aa, unidentified
MNSVGIDISKGRSTIAVMRPFGEVAISPFEVRHTDSELSELARRLKSLNGETRVVMEATGNYHAPVAKQLHDAGLYVSVVNAKLVHGYGNNDLRRVKTDRKDAIKLANYGLDRWLTLPRYIPEENTRLLLKNCYRQYRQYSKVQTVLKNNLISLLDMTFPNANRLFNSPARADGSEKWVDFVAEFWHCECVSERPLKSFVNKYWRWCRKHGYNFSEEKAHAIYDEASGHIGVMPKSETTKLLVEQAVSQLSATSAALAALKQEMQSLSSQLPEYPVVMGMFGVGPILGPQLIAEIGDVRRFYSKKALVAYAGIDAPPNDSGDVIGRHKSMSKVGASSLRRTLFLIMSAYLQNSPPNEPVYQFMDRKRSEGKPYRVYMMASANKFLRIYYATVKAYLETLEQF

SEQ ID NO: 476566 - protein, 320 aa, unidentified
MAELSHCGIDVSKDRLDVVVLPDEQCFSVVNAAAGWAELIEKLRGLNIVAIGIEASGGYERGIVRALLAARYSVRLINPFKLRQFAKACGVLAKNDRLDARMIARFVATMPTRPMQRNMAAERLAELLTARRQLSEEKVAAQNGSKLLEDSMLQRLYRRRITRMEADIMLLDKRLADMVAADPALAQRYELLISMPGVGPVLAYTLVALLPELGQMSRKQVAALVGVAPYDFESGKLKGMRCIWGGRAPIRRVLYMAALIASRCNPALKVFHDRLQATGKKSKVVIVAVMRKILTTLNAMARDNVLWNDRRNGRHAVSAA

SEQ ID NO: 476567 - protein, 353 aa, unidentified
MIIIGVDFHPGFQQIAFCNQDTGEYGERRLNHSDGEAERFYRDLEQRGISVRVGMEATGYGRWFERLLAELGFELWIGNAAEIKTKRVRKQKTDRNDARLLLQLMREGTFPRIWVPSPENRDLRQLLWHRHRLVQMRTRITNQLQALAMNQGKRCKKLWSVPGRAELEKLALDPWASRRRQELLDLLDRLHPTIEELTAAVEQEAHKRPEALRLMTHPGVGALTALAYVLIIGTPERFPCGKQIGSYVGMIPSEDSSADKQRLGHISKQGSSLLRFLLVEAAQAAARVNSEWRRRYIHLAMRRHNSIAKVALGRRLGIRLYWMWRNGCEYSPSFEFGSYAGQLGTGHGVIATP

SEQ ID NO: 476568 - protein, 310 aa, unidentified
MDVIIDKGCGLDVHKETVVACVMGSGIKKEIRTFSTMTGDLFRLKGWLSEKGITHVAMESTGPYWKPVFNVLEDSFEVILANARHIKNVPGRKTDVKDSEWICKLLRSGLLAASFVPPKAIRELRDLTRYRRKLTQSISAEKNRVQKVLEDANVKISSVVSDTFGVSASRMIEAIMAGELDTEAIADLAKGKLKGKKEELKKALVGHFQEHHRFMIQASLDHIEFLEKVIVGLDQEINRKLKDYHLGYELLQTIPGVKEHGAASIIAEIGADMDRFPSDGHLSAWAGMSPGNNESAGKKKVERRPTAIRI

SEQ ID NO: 476569 - protein, 342 aa, unidentified
MDIVGGLDVHRKQITFDCVQTQTGELFRGEIRPATRENLRCWLSGFSNDKRTAFALEATTGWRFVVEELQRAGIEAHLAEPAETKALRGPKKRAKTDRLDARHLRELLLIGRLPESWIPPEHIQELRTLVRLRKSLCEDRTAWQQRIHAQLFHNGYPQERNLLARESRERLERLEVPPSARKMVDHALSMIDHINEELAPIEKDLRSYARRQAGCRALMEHYGIGELTSVAMLSELGDSRRFSSSRKAVRYAGLDVTVSESDDKRAPGKLSRQGAPVLRWAAFEAAQVARRTGSPDHDYYVHTKERLGSSRACLAIARKLIRRAHHTLRELGEEALSKPLAC

SEQ ID NO: 476570 - protein, 363 aa, unidentified
MIVIGADIHKSTHALAAVDGITGVLAGETEIRADEAGHLAGLRWARELGQERVWAIEDCRHLSRRLEQALIAAGERVVRVPPRMMGQSRRGEREPGKSDQIDARAVARAVLREGVERFPEAFLDEQALEIRLLADHRADLVVERTRQINRLRWHLVDLCPDLEAKIPQRKLDSGVMLDRIARRLRSCERTARARVALELVASIRAISRQANELERELLALIKAYRPDLLGESGCGTLTAATLIARTAGAKRFPTDAHFARQAGVAPIPVSSGRKDRHRLHRGGDRQLNRALHVIAITRARIDPETRAYLDRKRGEGKTSREAIRCLKRHLARRIHHLLSMPPTNPDRKTRTELNSAISVPCLT

SEQ ID NO: 476571 - protein, 350 aa, unidentified
MIIIGCDYHPGFQQIAFVDTETGDYEEQRLEHSEGAEKFYRDLAGQEKKVRVGMEASGHARWFERLLGELNFELWIGDATEIARKRERKQKTDRQDAQHILQLLMENRFPKIWVPSGENRDLRQLLWHRHRMVQARTRIMNQLQAVALNEGLRCKKKLWREKGRQQLEAFRLAPWASRRREDLLQLLDRLNPTISDLTQAIEQEVEKCPEARRLRTHPGVGALTALAFVLIIGRTERFQCGKQIAAYLGLVPLEDSSGNRRRLGHITKQGSSILRFLLVEAAQVTARSIPEWRNKYVHLTMRRGRKIAKVAMARRLAIALYWMWRKGWDYEQLRKFGSHAGQPGHRDGVK

SEQ ID NO: 476572 - protein, 338 aa, unidentified
MNYAGIDHHRQYSHITLLDEKGEVVRAGRVVNLRREVERFLQGIGDVKAVIEAGRSSYTMVDVLEDLGIETTVAHPKDVKAIAKAKVKTDERDSYKLAHLLRTGYIPEVYKRTQENRSSQRVLRQRAFYVGKQTAVKNRLRALLAQQGEGIRQEVERVENLFTEKGMKVLTGLVLPQREAKMVRALLKTYHHIEKRINETNALVKELYEKMPSARLIQTVPGFGIFLSVLVAVEIVDIGRFEKVEKFHAYAGVIPSTHSSGERSYHGKIIKEGNRWLRWAAVEAVWPSLRADFDIRCFYDRLKRRKGANSAKVATARRLLTIIYRMLKENRAYIPNKR

SEQ ID NO: 476573 - protein, 350 aa, unidentified
MIIIGCDYHPGFQQIAYVDTETGELQERALQHREEAEKFYRELAAQGLKVCVGMEASGHARWFERLLAELNFELWIGDAAEIRTKRVRKQKTDRQDAQLILKLMLKDDFPQIWVPSWENRDVRQLLWHRHRMVQARTRLMNQLQAVALNEGLRCKKRLWREAGRQQLEAFRLAPWASRRRQDLLELLDRLNPTIAELTQAIEREVEKCPEARRLQTHPGVGPLTALAFVLIIGKADRFRCGKQIASYLGLVPLEDSSGSRRRLGHITKQGNSLLRFLLVEAAQVTVRSDPGWRSKYHHLMMRRGRKIAKVAMARRLAVRMYWMMRKGWDYEQLKKFGSHAGQLVSGDGVK

SEQ ID NO: 476574 - protein, 386 aa, unidentified
MSRPSNILLPAINYDHTLVLSVELSNKSWVLAAQVPGLPRTKAQRTIEPNKNALLAAIDGYRARAAAVGYTVDRVITTYEAGWSGFWLARWLVAQGVEVHVVQPSSVPVDRRLRRAKSDGIDAELLLRTLLAWLRGEPRVCSMVPIPDEADEDARRCVRERTELLSDRVGLTNRIGAVLATLGVNDYNPLLQSRRRRLAELRTGLDEPIPPNALAKIERLLARLELVLAQIAELERERDEVAAADAPDRAGKMIQQLASLRGIGVQSATVLVREAFVRHFPNGKALGSYAGLTSTPYSSGGIDREQGIGKAGNRRLRTVMVELAWLWQRYQPGAAQVAWFRDRVGSIGRRIRKVMVVALARKLLIALWRFVIDGVMPEGAVMKPSI

SEQ ID NO: 476575 - protein, 349 aa, unidentified
MIIIGVDFHPEFQQIALVDTDTGELEERRLHHPDEAEAFYRDLVSQGKTVRVGMEASGHGRWFERLMGELQIELWVGDAAEIKTKRVRKQKTDRQDAQLILKLMLKDDFPRIWVPSWENRDLRQLLWHRHRMVQARTRIMNQLQAVALNEGLRCKKRLWRTERPRLESFPLAPWASRRRHDLLELLDRLNPTIAELSQAVEREVEKFPEAQRLATHPGVGPLTALAFVLIIGEAERFQCGKQVASYLGLVPLEDSSGNRRRLGHITKQGSSILRFLLVEAAQVTVRSLPEWRSRYFHLMMRRGRKIAKVAMARRLAVCLYWMLRQRWDYQQWIEFGSYAGQPGNRHGVQ

SEQ ID NO: 476576 - protein, 395 aa, unidentified
MFYLGIDVGKNNHEAGFIREDGSHVGKSLRFSNSQDGFKSLSDFIISRLPENESFCIGMEATGHYWLALYSFLHAQGMVVHVINPIQSDSLRNFHIRQQKTDAVDCFLVAEVIRFGKFTETHLADEDILILRNLARFRESLKDTCANFKRQVVTILDQVFPEYDKLFSNMFGQSSKAFLKTYGTPDQTLDLNTRSLATLLRKASHGHHSTDKAREIKAAAARSVGLALCSDAFSFQLRILIEQIEFTEKQLDEIEKKIAQQLKKINSVILTIPGVGPSTGAIILGEIGHISRFSNPKKLVAYAGIDPTMYQSGNFNGQHNRLSKKGSPYLRRAVWMSALIAYRFDPVFRAYYEKKRAEGKSHGTALGAVSRKLLYTIYAVLKENKPYVVQLNTIQ

SEQ ID NO: 476577 - protein, 409 aa, unidentified
MKMAGIDVHKKVLMVVVVDTSALQEKPARRRFVTLPSELQRFRIWLQEQGVEEAVMESTAQYWRSVGLELEPHMRLHLAQAFSNRAPRGRKHDFKDAERLVRRLIADELILSFVPNGEQRIWRSLTRMKVQLTRDRVRLQNQMECLLEEMRIKLSIVVSNLLGASGLRILHALAQGETDPKKLAELGDERLHCTEEQLVDALTGRVQPMHRGMLALQLQRLQLIDQQMAQLNHMIAQAMKSHQDAVIRLAEVPGLGVDSAQQIIAEVGAQASTFSSAAELAAWVGTCPGKEESAEQNQSSRSAKGNKYLRRVLNQAAHAAVAKKGCHFQVVFRRLMPRLGYKSAIWAVANRLCRVVWKILHEGVRFIEQGREVGPREKKQRAQLLARALRKLGYEVTITPINQLAPKPA

SEQ ID NO: 476578 - protein, 348 aa, unidentified
MDHYAGIDVSLECSSVCVVDATGKIAREGKVASEPAALIAWFGGLGFALTRIGLEAGPLSQWLYAAMRDAGLAVELLETRHVRDAFKAMPVKSDRNDARGIAQLMRLGWFRPVHCKSIAAQETRAVLTARKLVQSKLHDVEMSLRGILRGFGLKIGKTTARSFAGRVRELVAGHPTLAMLAEALLAVHAVLLREFNGFEKVVRGVARSHAKARLLMSTPAVGPIVALTYASAVDDPARFKSSKSAGAHFGLTPKKYQSGESDRSGRISKIGDAAVREALYQAAHVMLTKPVKGCTRLKSWAMRIARRAGMRKAKVALARKLAVILHRMLADNAAFNPAAGVKTMTAAA

SEQ ID NO: 476579 - protein, 351 aa, unidentified
MTQISIIGLDIAKSVFQFEAQDAQGAVVRTERLSRDKLLPALATMPATIVAMEACATAHHWARQIRDLGHEVRLLPPAYVKPFVPRNKTDARDAHAIAVAATRPDMPRVPVKSVAQQGARSLHTIRDLLVGQRTQLINALRAHLAEFGLVGVRGDAGAKAVIGFVEAGHPAIPPMILPDLQVLVRQWHEAVKGIVAIEARIKAAAKADQRARRLMTIPFVGPMIAHATVAAIGEGRQFGSARDYAAWLGLTPRIQASGEMRRTGRISKAGDQRLRRLYVLGATAALAKAKRRPDDMDPWLVELLKRRPARVAAVALAARMARTAWALLTRGGEYDATRPHGQAGRLRPAAA

SEQ ID NO: 476580 - protein, 354 aa, unidentified
MKRARKELQPGDRVFVGIDLHKKKWHVTARTAEFELFSGSIPGFWKALQRILYRYKGHQIYTVYEAGYFGFWLHDHLVEYGAECIVTPPSLIPQEYGNKVKTGRRDSRKLAHYLAKGMLKRVWVLTEKERYHRQVTRRRRQLVGDRIRTQSRIKAELKLYGIDLPEPDGKWTKIYLGNLGRIRFNNRFMQESFKCLLEQYHFLDGQIVKQTKLLRELSKTELYRERVELLMTIPGIGMIAAMELLLELQNVRRFQRADQLAAYVGLTPSQYTSADKVRMGRITRVGKNSLRATLVQASWALIRKDGVMQEKYERLKVRSGGKRAIVAVARTLLIRMRRMLLDNEPYVIGLIAAN

SEQ ID NO: 476581 - protein, 384 aa, unidentified
MDPHKRTVTIEVMASDETVLGGGRFETTIEGYAAMREYVDRWPDRVWAIEGCAGIGKHIAARLLGDEEQIVDVPPKLSARARVFSTGQGRKTDATDAHSVALVGTRMAGLHPVVDDQQLAVLRTLVDRRRSLGEDHSRMISQLHQLLLLLIPGGAKKFLSAAQAKVLLAGVRPRDAAGKARRRVAAELIADLERVYRRSKAADKELEALVRATGTSLMDLRGIGPSGAARLLVEVGDITRFPNKAHFGSWTGTAPIDASSGDQVRHRLSRGGNRQINRVLHIMATVQLRNATIGRAYYDRRKNDGKTSMEAMRALKRRLSDVVYRTMLNDAIKGVGAAGTGPGGQPGTTTDSSAADSNPDIDASEKSLPGPADTQPRTTNAAAG

SEQ ID NO: 476582 - protein, 350 aa, unidentified
MIIIGCDYHPGVQQIAWVDTDTGEFQETRLQHREQAEKFYGELAIRGVRVRLGMEASGQARWFERLLAELQMELWIGDAAEIRARRVRKKKTDREDARHILRLLVEDRFPRIWVPSWENRDVRQLLWHRHRMVQMRTRIMNQLQAVALNEGLRCKKRLWREKGRQQLESFPLAAWGSRRRRDLLEILDRLSPTIAELTQAIEAEVANYPAAQRLMTHPGVGALTALAFVLIIGETERFQCGKQIAAYLGLVPEENSSGESRRLGHISKQGSGLMRFLLVEAAQVTVRSDGEWRSKYFHLAMRRGRKIANAAMARRLAVRLYWMWRKQWDYEQLKKFGPHAGQPGMSDGVK

SEQ ID NO: 476583 - protein, 416 aa, unidentified
MDAIVERCAGLDVHLDTVVACVLYGKLDIKPKKEVKTFSTTTKGLLELLDFINQKECTHVAMESTGIYWKPVWNILESGAFDLIVANAKKIKNVPGRKTDVKDAEWIASLLRCGLIEKSFVPLERIRDLRDLTRLRKELLGEVNRNKNRIHKVLQDANIKISSVLSDVFGETGKSILNQIIGNQCITEEFIYSLYEGRGKSKLKSTLMEMYEALNGKIRGHHVILLGMHNSNIVFLEKQINELEKEIDILLQKERDSLELLETIPGISKISASSIIAEIGTSMDVFKTEKHISSWAGLCPKNNESAGKKKRSGIKSGNNWLRSMLCECAWSATKKKDSRFKNKYWSMVPRMGRKKALIAIANMMLRLIYHLLKTKSTYKELEIQYFIDKDKRREDRIIKELKSKGYLVEKDSLQMA

SEQ ID NO: 476584 - protein, 413 aa, unidentified
MDVLHPRCCGLDVHKSSISACILLREAGRVQKHQRRFGAMTQELQELAEWLRQFGVTQVAMESSGVYWKPVWNILEGQFTVVLANAQHIKNVPGRKTDQKDAEWIAQLLQYGLLRASYVPCEIIRDLRDLTRMRASLSQEASRISSRIQKGLEDANVKLASVATNVLGKSGRAMLEDIISGEDNPEHLASLALGHLRVKIPQLRLALEGKIRSHHRFVLRRLLDQIQFVEQEIALLDERLEDIGRQRPDLAQAVARWDTIPGIDRVAAWALLAEIGDNMAQFPTAEHLASWAALCPGNHESAGKRLRGTTRQGSPWLCRMACQCAWAAARTKNTYLSSQFRRLAARRGKKRAIIAVAHTLIVIGYHLQKNQSNYDDLGGNYFDRIHSDGLKRYLVKRLEQLGHKVTLEPIEAA

SEQ ID NO: 476585 - protein, 286 aa, unidentified
MDNHTQYSGFAGVDLAKKVMQIHFVTGDGEITDKQVKRAEFLDFFRNRTKCLIGMEACGASQDWARKLEAMGHEVHLMSPKAVKPFVSGQKNDYNDAIGIYKAMFNGVRRVPVKSTEIRDLQTLRRIRSQVTKDRVKEINHVRGLLAEYGIVMGKSITAFNKGISSALESLKERGDVSPLVAEELRTTVESIKTKIERQKKLDREIEQLARGCKNYENFLKTPGVGPFTAAMLCVLLCDPDIFANGRKFAAYIGLAPRSRGSGGKYFVTSIPLKIQLRQRVQGSIC

SEQ ID NO: 476586 - protein, 343 aa, unidentified
MQTITTIGFDIAKSVFQVHGVDAAGEVVIRRQLKRRYVLAFFEKLPPCLVGIEACASSHYWSRELQVLGHTVRLMPPAYVKPYVKRQKNDAADAEAICEAVTRANMRFVPTKTPEQQSCLMLHRTRHLFIRQQTAVINSIRAHLAEFGIVAPVGRKGVTELLHVVADPSDKRVPEVARACLAALGTQLLRLKQQILEFDRMIMAWHRSNQTSKRLHYIPGVGPILATALVASVADPRTFRSGRNFSAWIGLVPKQHSSGGKDRLGSISKQGDRYLRSLFVAGALAVIRYAKVHGTKHRPWLTALLGRRPTKVAAIALANKIARMAWAMMAKGERYKQPVALAA

SEQ ID NO: 476587 - protein, 457 aa, unidentified
MSQTKRSRKSRGLFPVHPAAAAIDVGAALHVAAVGPDRDKEPVRTFRTFTDDLHRLADWFAQCGIRTIVMESTGVYWIPVFEILEQRGFEVMVVNARDAKHVPGRKTDVSDAQWLQRLHEYGLLRASFRPQAEIAGLRTYLRQRERLLDYAAAHIQHMQKALMQMNLQLHHVVSDITGVTGMTIIRAIVAGERDPNVLASHRDRRCHASVETVCQALVGNYREEHVFALTQALELYEVYQTKVTACDEQIEAILKRLKKNAPPPASKLLPVRQRTHQPNAPAFDARGALHAILGVDLTQINGLGPYLALKLVGECGTNLAAWPTAKHFTSWLGLAPHNKISGGKLLSSKTRRTSNRAASLLRLAAGTVGRTDTALGAFYRRLSARVGKAKAITATARKIAVLFYNTLRHGMAYADPGATYYEDRYRQRVLNNLQRRAKSLGFVLREAGLDTARADVS

SEQ ID NO: 476588 - protein, 323 aa, unidentified
MTFTAPFVGIDVSKATLDIAVCPGGERWSTANEGEAISKLAKQLNAVNPSLIVMEATGGLETLAASMLTLAGLSVAVVNPRQTRDFAKAMGVLAKTDALDARVLATFAEKVRPAVRPLADAQTQELEALVGRRRQVVEMLVAERNRLYTATLSVRPRLKEHIQWLEQELKDLDRDLRQAIRSSPMWRAKDKLLRSVPGVGPVLSYTLLAELRELGQLDRKQIAALVGVAPLNRDSGKMRGKRCIWGGRAHVRAVLYMGALIGTRHNPVLRAFYQRLRAAGKAPKVAIVACMRKLLTILNAMIKHGTSWQGGSTSCRLAAEPQT

SEQ ID NO: 476589 - protein, 340 aa, unidentified
MREERKNYLGIDVSKQWFDVSLLVVLNHVKQPILTDRFDNTITGMKDFKAWLKSKAVSYDENSLLVIENTGVYHRLIWSFCSTNNFQLHIGNAAHIKWSLGITRGKNDVIDSQRLCLYCYKQQDELKLTPSLNPAFMRLKDLMTSRSRLVAQLNSAKNYIKEIQCTNDKVLLTMLDKSHKAAIDGIKKSIIQVELMIEQIVQQDKNIYHNYQLIKSVPGIGHLTAIYIICCTNNFASKISGKQLGSYAGVVPFSNTSGSSIKGKNKVHKMANKELKKMLHLCALTAIKYYPEFKQYFDRKKAEGKNGMLVLNAIRNKLVLRVVAVVNKQQPYVDNTKVAA

SEQ ID NO: 476590 - protein, 358 aa, unidentified
MIETMTYVGLDVHARSTHAAAIDVASGELRRARFGGGADEVVEWLRGLPQPVRGCYEAGPTGFALYRAAEAAGLRVEVIAPSKTPRPSGDRVKTDRKDAELLARLLLAGQLKAVTVPPVAFEAARHLARAREQLRQDLMRCRHRVSKLLLLHGRVYDGSAWTKTHRRWLERQRFDEPATELAYLDALAAVDGLVARKAALDERLSRLACEGEWWPTVARLRCFRGIDTLTALVLCLEIGDFHRFRRPGQLAAWLGLVPSLNQSGASETRGPITKTGSSIARRLLVEAARHYLPQPSVGVALAQRRAGQPAEVLQLALRAQRRLHRLYRRLRERGKPGNITTVAVARELACFLWAAAVV

SEQ ID NO: 476591 - protein, 311 aa, unidentified
MSGPQYLGLDVAKASVVLASEPAGRTGQFATDPAGLQALVAVCQAQPVTLIVLEATGGSEAPVAAALATAGLPVTIVNPRQVRAFAQALGRLAKTDRVDAEVLALFAARVRPTPRPLPDEATQELEALLARRRQLLEMLHAERQRLPRARGREVRRNLRAHIRWLEHGSIDADAELERLIQQSPVWRVQDELLQSVPGVGPMLARTLLGLVPELGQLDRRQIAALVGVAPLARDSGTLRGRRTCWGGRPAVRTVLYMAALTAARYNPALRPFYQRLRAAGKPAKVALTAVARKLLVLLNAILRDQRPWAYA

SEQ ID NO: 476592 - protein, 423 aa, unidentified
MKRTYPICCGVDVHKTFLVATIITSEYVMPHYHQKRFSTFYNGLVAFKKWLLEYDCKDVCMESTGKYWVPIWNVLEDSCHVVIANPKWVSAVKGNKDDKKDSKWIGDMFRMDLVPSSYIPSKDIRILREFTRSRSKLVSMRSSEKNRFQNAFTVCNLTLDAVVSDMFGKSATDIENYLLDTDAVDPEHCVSLLRCSLKKKASDVVEAVSGFNMTPEQKERGRIVQEHFADIDHRIAQLDEIIGDLVAEYEGQISLLCTIPGIDRRTAITILSEIGTDMSQFGSSKRLCNWAGLAPASNQSAGKKKSVRISRAGVYLKPALVEAAHAAVKSTEKQPYYRIKFERLMKRRGKKRATIAIARMILTAIYTMLSTGEVFNPSDLKKFDMPEDLKRKQTLSSAKEAVKLLVSLGLVTAGSISLDALAG

SEQ ID NO: 476593 - protein, 319 aa, unidentified
MSKIILGIDVAKQKLDVALLTGGNTLTNQFDNSTAGFQLLQAWLKSLHLTQVHACLEATGNYSEAVAHFLHHAGHCVSLCNPFRIKGYAAAKMQRNKTDKADVRLIADFCLTQEPDQWFPPTPEVAQLQALTRRIEVLQDMLQMEKNRLALAPALTRASIQRIMDTFEQEIKSLRESIKQHFDDHPDFKEQSRLLQSIPGIGEKTANLLLAEIEFGRYASARQVAAYAGVTPRRSASGTSLNGTNLSKMGNGRIRKALYFPAIVAGGHNPIIKEFAARLEKNGKTPMQRVCAAMRKLLHIAFGVLKHKIPFDSNLAFSS

SEQ ID NO: 476594 - protein, 336 aa, unidentified
MMIIRVGLDTSKHVFQMHGVDENEQPVLRRQIRRSEVAKFFAKRVPTRIGIEACGASHYWARVLRSLGHEVMLLPPQYIKPYVKRGKNDKIDAEAICEALSRPTMRFVPVKTAGQQAALTMLGVRDLLVKQRTMLINAIRGHAAEFGLTVAKGPKQVNELLQRLASAEGVPALAREMVGVLASQLDGLDTKLKTIEKRLMDWHRQDHTSQCLATIPGIGPIAGVSFALKVADPQAFRSGRHFASWIGITPRANSTAGRQKLGRISRAGDEDLRRLLVIGATAVIRAAKPGRTSPWLLALLARKSKKLAAVALANKMARVVRAMMVSGKTYRRPAQA

SEQ ID NO: 476595 - protein, 352 aa, unidentified
MKQYYGCDAHKSYSLFAGINESGQPGPSVKVEHDRNSFRQYLNLLPPGSMIAIESVGNWYWLIEEMEKAGHIPLLTHPGKAKLMMGQINKTDKLDAYGLARLLRNGTLPSVWIPPSELRDQRELTRMRTALVKVRTMLKNRIHATLAKYAINIPEVSDIFGVTGRRLIETHLSKLPPQTANSLKVQLRFLDQVMEHMELAERQIGLIITETPDMKLLMTIPRVGPILSIIISLEVGKVERFPSAEHLASYAGTVPRIKASGGRTFYGKVRPDVNRYLKWALIEAANVIMLLQDKMSHRHVVQLYRRIQRRKGPAKAIVALARHLAEATYWMLTRGEPYREPVRSKLISSTQK

SEQ ID NO: 476596 - protein, 409 aa, unidentified
MEQLIERVCGLDVHKRTVAACVRVPGPRRTRTQEVRTFGTTGAELMALRDWLEAHEVTHVAMESTGVYWKPVFYVLEEGVTCLLVNAVHVHKVPGRKTDVQDCAWLAQLLEHGLLRGSFVPPAPIRDLRDLTRYRKVVSQERTAAANRLHKVLEDTGIKLASVATDILGVSGRAMLDALVAGTTDPEVLADLARGTLRKKLPALRQALAGHFRPHHAFLVSQLLAHLDSLDEAIATVSERIGEVMAPYAAEQARLDEIPGVGSRVAEVLIAEIGVDMGVFPSAGHLASWAGLCPGNNESAGKHRSGKTRRGNRWLRAALTEAALAATRRSGCALAARYRRLMRHRGHKKAVVAVAHSILVTAYHLLARQTAYRELGADYFDRLHAERAKRRAIQALERQGYKVTIEPAA

SEQ ID NO: 476597 - protein, 313 aa, unidentified
MMIDRTVLGIDISGAHLDVFAHPEGRARRLTNDADGIAAVTALAARRQAFVVIEATAPFDQPLIRALEAAGLVFHRANPRRARDFARSAGLLAKTDAVDARMLALYGTALALRPTEKVAPARLALQGLVSRRDQLVAMRKAERVRLRTMSEPCIAESHLAVIALLDAQIRTIERRIEATVAADAALARQRRVLRAAPGIGPVAASVLLASLPELGRVSRRAIAALAGLAPIARDSGLLRGRRCVQGGRKRVRDALYMAALAAVRTTPWKALFATMTTAGKPAKLSLIAIARKLLVTLNVAIRTGEYQPRPATP

SEQ ID NO: 476598 - protein, 386 aa, unidentified
MPKPADLNRCLAPLDQDHTIIAVIEMSQSSWLVAGIVPGIARHPLKKLAPDQDALLKLLHRWRAEAGQAGREISRIAVAFEAGRDGFWLARWLRAHGIEAHVIHPTSVAVSREHRRAKTDRLDTALLKRVFLGWLRGEPDHCHMAAIPTLEEEDAKRPTRERESLVGERTRIVNRIKAALARLGVRGFKPTLRKALEHLDALRTPEGTALPPNTRAELHRDMARLHFVTEQIQQIEAARGERLEQAGAGPNAMVRLLAQVVGVGIETADMLVHEVLSRNLRDRRAVARYAGLTGAPDESGSRRREKGLAKAGNARVRRGMIQLAWRFLLHQKESALAQWYRARTADARGSTRKTLIVALARKLLIALWRMVTTGEAPTGVVLRPAA

SEQ ID NO: 476599 - protein, 378 aa, unidentified
MMVIGIDPHKQSHTAVAADELGRKKAQKTVRARRDGHRELIAWAREIAPAGRLWAVEDVRHVAGGLIRELLAAGEQVVFVPPKLMAGERRGGRERGKSDPIDALAIARLALREGAGLPAARLDEQVLEVRRLTDYRDDLVAERTRVVNRLRWLVHDLDPELAPPPRSLGSGRTRAKLEAGLRALPAGAGRAVALSQLARVTALSAEITGLEKDLAGLVTVLVPELLAIPGVAVITAAKIIGEAGDIRRFRSPAAFARHNGTAPVPASSGTGTGGPPRLNRGGNRQLNAALHRIAVVQARCHPGAAALLERRGQDKHETRKASLRVLKRHLSDVIYRALNADAWRLDQPAPHAASGFPSKRGHFDLTDRACPRFVIAAM

SEQ ID NO: 476600 - protein, 321 aa, unidentified
MTYVGIDVSKVTFVVAYSSVKTNKTRTFKNTVNGVHEFVQTISASEHNCVLEATGNYSALLVYLLSEAGITISLENPLKIKNFARVMLTVTKTDEIDARLIALYGEKMQPAPYKLRSDAILVLKQKRTVLRQLKKQLVATRNLKGSMEVLPFFDPKCKKTIEKTITFLEKQIKEMEEELASLAQGEYKKQMDLLTSIKGIGVTLAAPLIVATGRFSYFDNAKQLTRYLGLSPTYHQSGTSVNVKGHINRNGDSSLRSQLYVAAFSSLRCNTECKACFDRLRSNGKPGKVVVIAVANKLVRQAFAVVTQGKPYVDGFKSEKP

SEQ ID NO: 476601 - protein, 377 aa, unidentified
MKEQTFVAREFEIFGGLDVDKKSIAVTFMSHQGILQSFSMPYRAENLLSYVGKHFAGKKVAFAYEAGPTGWGLYDRLTAEGHLCVVAAPSMIPKVPGQRVKTNRLDSQKLSEHLRGGQLKSVHVPSQSYRQLRQLVQLRDTFVQDLVATKLRVKALLLLEGLEFPPAPAGSQWSLIVRGKLKKVSCSSAVRFKLDQLMESLESTEKRVVQTIKEIRRFYQQDPELCQAMRHLKSIPGIGEIVASHLLARVGDPQQIGNVRQLAGFIGLVPTERSTGDRVARGHITRSGDGRLRSKLIQAAWSAIRQDPELREFYRSVYQRHPRDRAARKAIVAVARKLTTRIYAVLKQQRPYEVRKIVHSAPLTQEETSPQGTTRRR

SEQ ID NO: 476602 - protein, 320 aa, unidentified
MSVSSVVVGIDVAKEHVDIEVLGAELASQRWANDAEAHSALAAALQPLNISLIVMEATGGYEAALACALQAVGLPVAVVNPRQARDFAKSMGRLAKTDTIDAHMLAEFASVLVRRQDLASFIRPLADAQQQALAAMVTRRRQLLGMLLSERQRLQLAIPVVRPSIETMIDAIRKQLDDVDAQMVAHVREHYSALDVLLRSASGIGPVASATLIAELPELGRLNRRQIAALVGVAPMAWDSGTVRGRRRIQGGRFDIRRVLYMAALTASRRNPAITAFYQRLIASGKPPKVALVACMRKLLTVLNAMVRTSTPWDSSLHSA

SEQ ID NO: 476603 - protein, 354 aa, unidentified
MSNKSNSLVATIGIDIGKNAFHVVGLDRRGAIVLRQRWSRGQVQARLANMPPCLIGMEACVGAHHLSRGLHLQGHDARLMPAKYVRPYSKGQKNDFRDAEAIAEAVQRPTMKFVATKTAEQLDLQALHRVRERLVSQRTGIINQIRAFLLERGIAVRQGLRFLRTELPIILATRSDLLSPRMLRVIEELMADWRRLDERIEGLSEEIEAVARQDPACERLMTVPGIGPIISSAMVAAIGNGAVFTKGRDFGAWLGLVPKQISTGDRTILGPISRRGNRYLRALFVEAAWVVLVKTKDSDRYGLKAWIDAAKKRLHHNVLAIALANKLARIAWAVLNKERAFECVSTRATSSQPA

SEQ ID NO: 476604 - protein, 311 aa, unidentified
MQEVFVGVDIAKDWLDIFHPGSGLRRIDNTAAAARRFAKASAKAGVWVILEASGGYDRLLRDALEATQARFSRVNPRQARDFARALGVIGKTDRIDATMLARMGATLDLEARAPKSELLYDLTELHVTRQGLIRDRTAQKNRLNTAILALIKRQQRARIDQIDALMAEIDPAMLDCIKADETLPQRYDILSSIPGIGLVSACTILIEMPALATMDAKQVASLAGFAPMTRQSGEWKGHAHIQGGRAGLRRSLYMPALVATRFNVPLTEKYQKLIASGKAAKIAITAIMRKLIVLANALLRQNRKWTPNAPC

SEQ ID NO: 476605 - protein, 426 aa, unidentified
MIDHDVRVLARKTVRVKAFRLGEALDWAVGQARAKGFSLVTVACEPTGPRWLQVQRLCAERGLPLVCIQPLVSHIAREQQDYTTHKTDEADCVLIARLAVELHCYLPEELDETWAHLRHLGRRRAQLITSATASAQRIRDFLSVAWPAVTETCAQPLESVTWLAAVQVVTARCGADPGRLAAMGEQAFTALVRSAVPGWGGKKGWGTISRRIFAALTDTEGVVVSSRRGLLRRCADELGDLQRARAQRRAVEADMAAVLDELGLSRLGDIPGLTAVGAAAILAEAGDPRRYDSSSSLVKHAGLSPSDNASGAFYGAARISRRGRPGLRLAVWRAVWPMLRFNPVLAAKYQAMTSAADAAAQAAEAQAGAGSRQVSAAAAAARARRARARVACAASLLRWIYSMVVHDTSWDPAIASGAASCPAEAA

SEQ ID NO: 476606 - protein, 396 aa, unidentified
MSTVGIDIGGRSHAVARCREGQARADREILRVSQDRAGFAALDAWLGRQPDPVSLVVMESSGHYWMPLASHLAREGVPVALVNPLAARYFAKSRLGRTKSDPADARSLAEMAMRDAPVVRDPFAGLELRQAARFAMTLVSEQARVCQRLHRLVELGFPELGELFDDLTCRTAREVLRLAPTAELARRRRTGTLADANKAPGRRRLGDARAERLHDLAADSIAVPDLAAEVAFEVDLLLDQHDLLERQIGTAEAHVASLLDSELARRLQTIPGVGPATCAALIAEIGDITRFETFDQLLAYAGVHPAERSSGRKGANPETAWRMSKAGNAHLRTAAYRMAVVGTVHNPVIAAHYRRKREAGKSKMNALGHCMRKALSLVWGVWRNGADFDPSWGSGT

SEQ ID NO: 476607 - protein, 355 aa, unidentified
MTSTKYIGMDVHKESISIAVLNFAGKVVMECVIETKASTILQFIHGLRGDLQVTFEEGTWAGWLYDLLKPHVTALLVCNPRKIALLKDGSKSDRIDAHKLADLLYMNKIKPVYHGEHGPRMLKELSRSYLTITKDLGRVMNRLKALYRSWGIPCAGTQVYAPRFRSEWLSKITEAGVRRRAELYYQQLDALRLVRQQARKELLAEARKHRATKLLRQIPGIGPLRVAHLVAVMQTPHRFRTKRQLWTYSGLGLETHDSAQYRVVEQQLQRSKKSVTLRGLNTNHNHDLKDIFKGAAMRASTAAGPLRDFYEALLAKGRKPTMARLTLARKIAAITLIVWKKEVRFDANYLKQQAA

SEQ ID NO: 476608 - protein, 385 aa, unidentified
MTIQIQVPRFIPRDYDVFAGLDVDKKSMAVTFADHAGSQRAMRMANSATPLVNYVRKHFAGQRVAFVYEAGPTGFGLHDELVRRAYTCVVVAPSKVPRAPDERVKTNRLDSRKLAESLRGGQLHSIHVPSAVYRNLRHLVQMRDTHVRQLTSSKLRIKSLLLYEGIAFPDPHEKWTARALRELQTLPCSDTVRFKLDDLLDTLHFHFQAAARATKQIRQYCLQEPELQQSIEVLLSLPGVGWIVASHLVARLGNPREIKNGRQIAGFLGMVSSEHSTGDKENRGEITRSGDSRLRNKLIQSAWVAIGKDPELRAFYRRIYQRHPKKVAARKAIVAVARKLTNRIYVVLKEQRPYVIRPDSSIAPLTAEETVGPRERLDGAQNDQP

SEQ ID NO: 476609 - protein, 337 aa, unidentified
MITIGVDSHKRTHTVVAVDGNGRRLAEKTLATTPAGHLELVRWSRRWRERRWALEDCRHLTRRLRVPPKLMAGSRRSAREPGKSDPIDALSVARAALREPDLPIAHLDGVEREVRLLVDHREDLITDRTGHQARLRWFLVELGIPEPAARTLSRPVILDEVERALAARSEMSARISRDLVVRIRELTSAINVLEREIRTRTESLAPALLALAGCGPLMAAKLLGETGGVERFHSRAAFAAHNGTAPIPVWSGNIVRHRLNRGGNRQLNAALHRIAITQLRCPGPGRAYVAKRLACGDTKPEAIRALRRRISDEVFRRLRTDEAARIGSTASLALAVA

SEQ ID NO: 476610 - protein, 403 aa, unidentified
MRVSHERDDLHALCRPPPAKACRRDFIGACFSPTEACPPAVSPPGVCVQEGGPEVIVVGIDPHKQTHTAVAVDAATGRSLAELTVKARTPGFELLVEWARELDHDRLFAVEDGRHVSGHLERHLIARGERSVRVPPRMMGEARRTDRVWGKSDPVDATAVARAALRHPELPEASLAGVEREIGLLVAHREMLVNERTDRICKLRWLLHDIDPDLAPPLRTLDRLKRLDRLAEELRDLVLTVQVEVCLDLLARCREITVRANELERRIDGLVRTHAPELLEIPGCAALTAAKIVAEAAQIGRFPTEGHFARYAGTAPIPASSGARHRQRFNRRGNRQLNTAIHRIAVTQLRMHEPAGEYVARKRADGKTKTEAIRALKRHITRVVFKTLISVSQPTDRLTAAAA

SEQ ID NO: 476611 - protein, 350 aa, unidentified
MIIIGCDYHPGFQQIAFVDTETGDYGERRLEHSEGAEKFYRDLAAQGKKVRVGMEASGHARWFERLLTELTFELWIGDASEIRAKRVRKQKTDRQDAQHILQLLMENRFPKIWVPSGENRDLRQLLWHRHRLVQMRTRIMNQLQAVALNEGLRCKKRLWRQHGREQLESFRLAPWASRRREDLLQLLDRLNPTITDLTQVIEQEVEKCAEARRLRTHPGVGALTALAFVLIIGRAERFQCGKQIASYLGLVPLEDSSGNRRRLGHITKQGSSMLRFLLVEAAQVTARSIPEWRSKYFHLAMRRGRKIAKVAMARRLAIALYWMWRKGWNYEQSRKFGSHAGQLGTGDGVQ

SEQ ID NO: 476612 - protein, 355 aa, unidentified
MYGLKHQKEKRSMDHFAGLDVSVKETSVCIVDETGKIVREVKVASEPEALLSVLKNPAYRFKRIGLEAGPLSQWLFSALAEAELPVVCVETRHMQAVLKAQINKTDRNDARGIAQMMRVGLYRPVHVKTLRSQKLRMLLTHRKLLQSKAIAIENDLRGTLRNFGLKVGLVGTVKFEARIKELVENLPDLAVLVEPLLVVRRVLREQFVILHRRLLAIVQDDAVCRRLMTTPGVGPVVALTYRATVDVPARFRKSKAVGAVFGLTCSKYQSGEIDRSGRISRCGDEMMRVMLYEAAQSMLHSKKWSWLKAWAMQIARRRGKKKAIVALARRLAVIMHRIWVDGTEFRWTREQAVTA

SEQ ID NO: 476613 - protein, 324 aa, unidentified
MDEPRRVTTCVGIDVSKDRLDVHVLPTGEAFAVARDGKGLESLVERLGTLEVSLIVLEATGGFETTVAAALASAGLPLAVVNPRQIRSFAKALGKLAKTDAIDAEVIALFADKIRPQVRPVASSDARALGELVARRRQVVEMIGMEANRRRHAAGKRLAKTIDRHLAFLEKELAAVDADIDTDIRASPAWREAEDLLSSVPGVGPVTARTLIAELPELGGLDRRKLAALVGVAPFNRDSGAWRGHRMIAGGRTSVRNVLYMAALSAIRHNPVVRATYQRLVNRGRPKKVAIIACLRQLLTILNAIARTKSWGASRLSETSGCGN

SEQ ID NO: 476614 - protein, 358 aa, unidentified
MCKSTRNSQSRKEVVLTAKDRVFVGLDVHKKSYHAAVRVNGQEVATGVLAPTAEAVRVFLEPYRSGRLHVVYEAGPTGFGLVRALREAKVSADVIAPSKTPQTPGEENKTDRLDCRQLAFYDEKGMLKTVAVPTAEEEADRQVIRLRDQVVDARRRVKQQIKSFLLQHGVAEPTGLAHWSKESVEMLRQLPLVASLRFCLDVMVAELKDFDKLLEQVNREVERLSREARHTEAVTRLRKYSGVGVITAMQYRTEVFRPGRFANERQVAAYLGLAPRVSQSGQRRREGPLLKAGRGRLRALLVEAAWIWIQKDETAKATYKRLVQNTGQPNKAITGMARRLAIRLWRELVPPEERRGAA

SEQ ID NO: 476615 - protein, 344 aa, unidentified
MKIAVLGIDLGKNVCSVVGLDASGAVVLRRRVRRDTLIDLVANLPACIVGMEACCGAHHLGRLFAAQGHDVRLMSPEYVRPYVKAQKNDDRDAEGIAEAATRPTMRFVEVKTEDQLDMQTLHRSRERLVGERTALINQLRAVLLERGIVVPQGKRKLEQYLVIMMNEHDGEGLSARMRMLVADIRAQWQDLDRRIGAFDAEFGRWTKENEDARRLATIPGIGVTISTALIAAIGKAETFEHGRDLAAWLGLVPRQSTTGGKPRLMGISKRGNKYLRKLLIHGARAALPHIAEKDTALGRWAKSLLSRVHQNVAVVALANKLARICWAVLRSGQKFAAKGAPLVV

SEQ ID NO: 476616 - protein, 411 aa, unidentified
MDKVYDICCGIDVHKKLIVACLRKGNKHEIREFGATTRELLEMADWLKKSGCQMAAMESTASYWKPLYNILESSDLAAMVVNASHMKAVPGRKTDVKDAEWIADLLQHGLLQPSFIPDKDQRELRELVRYRKSLVAERTRELNRLQKMLEGANIKLSGTVRDINGKSARNILEYILTGKIFDEAVYNEMYEQNTIAHNLKASKEQIIDDLNGVMTPLQRRMMKELLSHLDELNVHIRNLDDEIDNFMKPEEKKASRAIQDVTGIGNTSAQAIISVIGTDMSRFKTDAHISSWAGLCPGDNQSAGKRKTGKTRKGNSLLRATLVTCAHAAVKHKSSYFHAQFMRISAHRGKKRAYVAVAHSMLVAIYHILKDGVVFKDLGAEYYNQFNKERKINAYLKKLKALGWEAPVVAA

SEQ ID NO: 476617 - protein, 430 aa, unidentified
MNNVPVAGIDVGKFFSEMAILSPSNEMCKRMKITHCMDDFNKALDLLKKAENEFNEKPVIVMESTGHYFKLLSKFLNNNGYEVVVANPIQTNSIKNISIRKVKNDKVDAKKIALLYRLGELNSSNLPDDDITALRCLCRQYYDLVRERTAYKNRLIGIVDQIMLNYKDVFSDLCCETSLELLENYPTPDHIIKADKSDLINIMAKVSGMGEKWATKKYDLLILKAREFQPLSISSFANTVMLKNYISIIRTMNKSIDEILKSINNYIVTESFTVVSEDIRLLSTIPGIGTLTAATIVGEIGDIRRFNSPKKLTAFFGLDASVCQSGEFIGTKNHISKRGSRLLRQVLYTSVLTSIGKKSNREACNPVLYKYYHDKCINKRKMVALVAVMHKLVFFIYAVLRDKKPFELRTPEEHIKMLAERTISNNKEIA

SEQ ID NO: 476618 - protein, 429 aa, unidentified
MNSCEQTAQDWLAHRAFGGLDWASEKHNVIVVDPRGKVVEDFEIAHSALGWKKFRERMAPYGAIPFAIETSQGAAVEQLLEAGMKVYPINSKSAKSYRERKAPSGVKDDWLDAWSFADACRIDGQDWRALRPEDPLVKELRLLCRDEVELIQQRTSFICQLRHALGEYYLTALEAFEDWGLVSAWMFVQRFPTPQILQAAGKRQWEKFLHARRLWRTESGPRRLELFAHATELCGTVPMANAKSQLALSLISMLFALEKQLGIYRRRIEELFSRHPDHDLFGSLPGAGPKLAPRLLSEIGDDRGRFEDGPQALQCLAGSAPVTRRTGKCKVRANPDHWPCHQRWACDKHLRHAMHLFSEHSLGQCVWAQIYYQHHRQKGSSHADALRRLAQRWLKIIYRMWMDRKPYDAMLHHHNQLKHGSWVFELKTA

SEQ ID NO: 476619 - protein, 340 aa, unidentified
MTITTLGIDIAKSVFQLHGVDADGTIVLQKKLRRGAVLDVLGKLAPCLIGMEACATSHHWAREIATLGHEVRLIPPAYVKPYVKRQKNDAADAEAICEAVTRPNMRFVPVKTEEQQGVLVLHRSRDLLMRQRTMLLNAIRAHFAEFGIVAAQGPRKVAELCMRLGDDETLGLPESARSALLAVAGQLDNLATEVRNIERQLMAWHRQNAASQRLETIPGVGLITATALAASVPDPTVFKSGRQFAAYLGLVPRQNSSGGKDRLGHISKMGNGYLRRLLVVGATSVTRRASTTDTRTGAWVRSLLERKPARVVTVAIANKTARTAWALLANGESYKATPAI

SEQ ID NO: 476620 - protein, 395 aa, unidentified
MSGVCVSNQETAMRRSARVTHMGLDIHRNFSQATARDEQGRVLWRARLPHADRQVLRRQLGEWPKVPVVLEATFGWGWLSDELAAAGQEPHLASSRKAAGWRDAQGIAKSNRTDADLLSDLWSEKKRWWEVWLAPPEVRDQREWLRYRMSLVRLQTGIKNRIQATLHRHGIVNPHSDLFGTAGRRWLALLVSEAPQQSLMRDSGRRTLKGQLLLLEQVRRLIAQATRELRQQVRHLPPALRLMSLPGISWVLAYSIVAEIGRIERFRSGRNLATYSLLVPKADDTGDESDTTPLGRRIGHAGRLTLKWAWIEAAHGAVRRGGRFKAIFDRRSDNGKRDRGRAYIAVAHELCRIAYVLWKKEVNYTDCPPPRPGSPSATSRPGTGQPDHPMVPALA

SEQ ID NO: 476621 - protein, 412 aa, unidentified
MEDILPCVMGLDIHRDSIVACLSKGSLDSEPETEMRTFSTLMPEMQKLREWVLESNSRNVAMESTGIYWQPIYEMLEDCFGGEISILVVNARHMKNVPGRKTDMRDAQWIASLLRAGLLNGSFIPEKPIRELRHLTRYRKSITYDVTAQKNRIDKFLQSSGFRFAAFLSDAFGASGRNIIRHLIECGSVSREALDKCLKTKTRNRIDEILIALNGTLSKHQRDFLKMIFGHLEELEAHKRVVESAINEEVERHSNALSLVCSIPGIDVTAAAAIVAEIGTDMGAFDDSQHICSWAGLSPGNDKSAGKHKSTRINKGNPYLKSMLCEVAWVIASHREMYLSGWYWRVKQRRGAKRATIALARKLLAMIYSMLKTRTPYDEEFFEQRRAQSERKRTSRIVNELEKLGYQVTAPS

SEQ ID NO: 476622 - protein, 412 aa, unidentified
MVVDNGHASPDEAGCWFVGVDWGGSFHQLCVLKASGTVLIQQRVDHDVAGLRLLAARLAQLDGPVLVAIERAEGLLVEFLQTLPGVSLYCVSPKISARARERYRLSASKSDTFDAFVLADTLRHEHRRWRPVSRPSPLTAQLQAVSRDRARVQRAKVACESRLQAVLAAYHPAPLHLFSELDRDISVEFIRAYPTPEQARRVKTARMAAFCARQHYSGRTDPQVLVDRLTPNLLSASPGTTAGKSFSARLFAEELRMHCDHLRAFDKQIDQLLQAHPDAPIFLSFPGIGPVVAATLIAEMGDDRDRFPQAAVLLAEAGLAPVTRASGRTRQVRFRYAANRRMRHVIDWWAFVATREDPWSKTVYDTGRAHGQGKYRALRGLGARWTRILWRCWTDHTTYDRDRHPRPELTAA

SEQ ID NO: 476623 - protein, 342 aa, unidentified
MEANRYIGIDLHRDCFTAGLRLENGREYLKAWKLEDMAKFTAKLRPTDEVAVEVTGNTRLFHDAVAPHVGRMVAVNPSQFKVITHSVKKTDPNDARNLALYLAKDLLPEVRMKDKTQAQIASLTQTRDTMVKLRTALKNKVNNICSAHGVNLNKESLASEKGLKAVLEMQFEMLVNLELQIIIEQIRSLNQSVAKLEETIGKEGQKLEGHKNLTSIKGIGGLGAGILLSIIGDIRDFADEGKLAAYFGIVPRVSNSNESEHSGRITKRGSKLGRTTLVQCALIAQRYSPYLKNYYEKKKSRGTGKAIIALARKFLGIIYRTLKNKWVFEDFPNFVLAEPATA

SEQ ID NO: 476624 - protein, 406 aa, unidentified
MIFVGLDWSEAHHDVCVLDDQGMVLAKGKVSDDVSGVGRLHAMAAEHAEDPSEVVVGIETDRGLLVGSLVQAGYRVYAINPLAASRYRDRHAVSRAKSDPGDAKVLADLVRTDRQNHREVAGDSELAEAVKVLARAHQNLIWSRQRQVNALRNTLREFYPGALRAFTTSQLATIEACSVLAMAPTPTWARDKLTLQRLRRSLSASGRKRNLDRRAGQILHALQAPELSAPALVEQAYGDVVGSLVVVIDGLTHQIVKLEAELAQRFEGHPDAEIITSLPGLSSVLGARVLAEFGDDPTRYQDARARRRYAGTAPITRASGTRLVVLARVARNRRLFDACYLWAFSSITTSAGARRYYDAYRARGKTHHQALRALANRWIGILHGCLTRHEPYRENVAWVAPVEAAA

SEQ ID NO: 476625 - protein, 409 aa, unidentified
MNATKMSAIGIDVSKGKSMIAAISGTKEILIEPQEFLHTEKGLSQIIAVILTLKGDIKVVMEATGHYHETVAQTLYQSGIFVSVVNPLLIHVYGDNSVRRVKTDKKDSLKIARYCLETWAELREYIPQETIRHHLKLFSRQYNLCIKTVHTLENNLSSLLDKSFPGATKFFTSQKKKNGHQKWVDFASSFWHAELVASMGEAAFVESYYNWCGQNSYKFTKVKAQEIYAASLGHSTTLKNNKECNLLITSAAMQVIALATTLAQLKAQLIYLSTMLPEYPAAISMFGVGELTAAQLIAEIGDMRRFHSGRALIAFAGIDPLPKQSGTYEKKSTKTSKRGSAPLRKTLFQIAVTYLRLSPETEAVYQFLSRKRAEGKPYFVYMTAAANKFLRIYYARVKEYLDGLEMADN

SEQ ID NO: 476626 - protein, 336 aa, unidentified
MKEQQIKHNEVQIKKFIKKLKLEWNEIHCCYEAGVTGYPLYRYLKSLGVNCILVAPGKIPRQNTDKIKTDKRDAIKLARLMRSGELESIHVPSEEDEAVRDYLRSRDSLRLDLGRNRQRLMKFLLRKNIKYSTTKYWTVSHYKWLNNLHFNNEILQETFNDYYSRVRVQEENLKAMDKKIQEIAESEPYREKVGILRCFRGVDYLTAMFLLCEVNDFKRFKTAGSFMSFLGLVPGEYSSGSKRKQTGITKTGSPRLRRILTEAAWQHRFPGTGSKIITARRSGQPALVVALAEKASLRLHKKFRNLQLRGKTPQVMITAVSRELSGFLWAAMNLVA

SEQ ID NO: 476627 - protein, 339 aa, unidentified
MQVTTVGLDLAKNIFQVHGIDNDGEVIFNRALRRAQVLAFFERLEPCLVCIEACGTSHHWARELIKLGHNVKLIPPAYVKPYVKRGKSDAVDAAAICEAVTRPTMRFVEVKTPEQQAILSVHRTRDLIMRQRTQTINMLRAQLAEFGVVLPQGVYHALKFAKNSLDGEPLNLPQDAQEVVFDLCEQLLFLHAKILRHSRHMTQIAKSEKRVALLRTIPGVGPITASAIVATVGSGKQFNNGREFAAWLGLTPLNRSSGGKERLGHISKMGDQYIRRLLVLGMTSRIRSIRLEPEKFDPWFADILSRKPSRVAAVAMANKTARMIWDVLTQNEPYKVRTI

SEQ ID NO: 476628 - protein, 348 aa, unidentified
MVTIGVDPHKQTHTAAAVNPLGVEVAHRTVPARPVGNGQLLEWARALDSERVWVIEDVRNVSGSLERFLIDRGETVVRLPPHLMADARRGMRERGKSDPIDGIAIARAALREGVENLPTARLAGPEREIRMLALHRERLVDMRTRLSNELRWQLHDLWPDWEIPTKAFGQPSWQTKIQARLARTEQTTQVWVARDMIRRLKELTRAAKDLYHKLAALVREVAPQLLAEPGIGVLLAARFIGEIAGIDRFSSDAQLARLAGCAPIPVSSGRSDRHRLDPGGNRQLNSAFYMLAIIRIAHDPRTAIYLARQRANGKTKREAIRSLKRYLVRRVYTLMRTPNNVPTTVYLT

SEQ ID NO: 476629 - protein, 442 aa, unidentified
MNTNAAGIDIGSGEHWVAIPEDRDEKPVRKFGCFTAELHAMADWLESCGIETVAMESTGVYWIPVFQILESHGFEVKLVNARHVKNVPGRKTDVLDCQWLQRLHTYGLLSGSFRPEDSICVLRSYWRHRDNLIRYAAAHIQHMQKALTEMNIQLHKVISDITGVTGMCIIRAILAGERDPVKLAQMKDPRIKSSVETIAKALEGDYRKEHLFALKQALELYDFYHQQIQACDQQIEDCLIQLESKVDLESNPIPASKRGNKKPQRNAPRFDLRTHLYRISGVDFTQIDGLDALSVQDILSEVGLDPGAFSTGKRFASWLGLCPHNRITGGQIKGSKTRKVVNRAAEAFRLAAQALANSSSALGAYYRRMRARLGAPKAITATAHKLARLFYHLWKTGEVYKDLGPDYYEQKYKERILRNIKKKAQQLGYQITLEPLANREVS

SEQ ID NO: 476630 - protein, 389 aa, unidentified
MYFVGIDISKYKHDCFIISGLGEVVFDVFSFENNKSGFEFLLERLNSLDSFEEKRIGFESTSHYSLNLKLFLEKHNYTFMEFQPALISQYGKALTLRKTKTDAIDARTIARWLMNVDYKPYPHSFYHNYSLKSLSRLRFSLIKQRTFYLIRLTDILDHIFPEFKPFFKDRFGVTALHILEKYRIPEKIASMKSTSYDELRRISRGKFSMQQFLKLRELAKNTVGVSNHIFEIELSCILRLYKQLDNEIQQIESEISALTNELDRPTLTIPGVGILSAAVILSEYGDITRFPSPSQMLSFAGLEPGYYQSGQSEHQGHMVKRGSSHLRCAIMNCCLPLTQFNMVFAQYYAKKRAEGKTHRVALSHVAKKLIRVIYTLETTNQPFKADKLR

SEQ ID NO: 476631 - protein, 337 aa, unidentified
MEQTRQYVGIDLHRRRSVIVRRNDAGETLETVRIDNDPVALSAELAKAGEHPEVILEATYGSYWAADVLEECGAKVHLAHPLGNNWGNRRVKNDERDATDLVDLLRMGRLAEAWIAPPPLRELRELIRYRGKLVHLRSSCKSQVHSVLAKEGVAVPMSDLFGQGGQRLLDKVVLGDAYRTRVESLREVIELVDREIAMLEKEIAPVFAGDLSYQAILAISGVGPVLGAIFVAEIGDISRFSSPGHLCSWAGLTPTHHESDEKVRRGHITKQGSRLVRWAAVEAVARQRGPTPIRAFQMRVGDRRGNKIGRVAAARKVLTLVYYGLRDGEIRCLAQTG

SEQ ID NO: 476632 - protein, 371 aa, unidentified
MTKRSTEEALEVVGLDVSDRSSTVSRMSMGSSEILERTTIATSAAGMESYFAGRPRMRVALEAGTHSPWISRQLEGYGHEVVVGNPALFQASVSRRKSDRSDADGLVRVARLDPSLLHPVRHRSAAAQRDLAVVRSRHALVRARTQLINECRGQVKSYGHRLPSCSAQAFAARASAVLPEDLRPALDPLLEVIAQLSAQIRAMERTLETLARQHYPQTLRLRQVCGVGTLTALSFILILDDPQRFARPRHAGAYLGLVPGRRQSGERSPHQPITKQGDPLLRQLLVQAAHYILGPFGPDCDLRRFGQRLIDRGGGGARCRAAVAVARRLAVLLLHLWRSGDEYDPFFVEHRRAHTADPAATDPQTAISTHA

SEQ ID NO: 476633 - protein, 309 aa, unidentified
MEQQIKFDQIITCGCGLDVHQKTVMATVRRSDTDFETREFNTYTRSLKSLREWCKAEGVTHIAMESTGIYWRPVFNILEEDFEIILVNARHIKNVPGHKTDKKDSRWISKLLLSGLLKGSFIPPREIRELRDLVRYKKKIVNQIASEKNRVIKTLEDANVKLSSVFSDVSGASASKMIQDIIDGKEEVEGLMQHIHGSVQAPRTEIRQALEGTLTNHHRFMLNLIKENIEEKQKTIEKLDCQIEKSVQQYAVEIDLLQTIPGVGKESAVRIISEIGAEMSKFPNEHHLSSWAGMSPGNNESAGKKKAHE

SEQ ID NO: 476634 - protein, 488 aa, unidentified
MTERRFRKHVKGRRGEEFRQKTKGLKAGEIIGAAIDVSRSFYRVTIFNFDGEVLREPFDVDVFKRGYKQLMDEIKRAVKEWEAKKVFWAMEPTACYHHNLARHLVDEGEEVIFLNPSQVASNRDQTMLRGLKGDDIDLGAIADLLIRGEGYFYNLEEGVYLELKERTWWREKKLKMQTQLKNQIRARLERIFPGLTNKYGGNQSLFSDLWEQGPARGLMKVGLTPQQILQLPIRCLKKKFKDVGHPISTNCAEKIKAYFERMLLPEDKVLGPVIELLRRDVKLLEALEAEMAEVEGEMIEGVKKTPWSHLLGKIKGIGDIMVASFAGAVGDINKFKRGSQIFRKSGLDSKSKQSGEYEARWLPIRRMGSKLLRCILYKMADSVIKHNPYFGLYYEYLVEKRKKLSKKAQIAVSNKLTRVMFALVRDNAEFAPPTAKIDYLEVLFAKAKQERKGRREERKIRREKASHDSQSFYGLEAPSLGKAVSLNS

SEQ ID NO: 476635 - protein, 472 aa, unidentified
MSQHKPSPSTSQSAASAAQAAPRRSRAQPVQLTVQHPHAAGIDVHSDMHMVCVPATSAPEPVRRFGANTCDLEAIAAWLKQCGVTTVALESTGVYWIPLFELLEARGFEVWLVEPGQLAHCGARPKTDVLDCQWIQRLHSYGLLRPSFRPPESILALRGYWRQRQMQIRYAASHVQHMQKALEQMNVKLTEVLADITGLTGRRIIEAILAGERNPQQLATLRHPQCQHSATAIAQALEGTWRPEHLFALQQAYELYRFHHRQIDECDARLQQELARLPDRSAGKPYTRRATKCGRKSNDLRFDACGPLFRALGLDLTEIEGIDVGTALVILTELGVDVSRFPTEKHFASWLGLCPRVYESNKTQRKKGPRKGKNRVAIALRMAAQATGQTKSPLALFYRRIKSRIGGKGAITATAHKLACLVYRMLKYGREYVKHSIEAYDKRLREQQERSLRRKARLLGFELVAHSASAPS

SEQ ID NO: 476636 - protein, 400 aa, unidentified
MLHFFGGIQMIYVGIDVAKDTHYAAVANSDGEVLVEPFAFGNDAAGFCLLQTKLAAYDRNEMLIGLESTGIYSENLICFLFGSGYHLAVINPIQTAALRKNNIRKTKTDKVDTMIIIKALMINTYRLYSERDAESLKLKSLCRFRQNLKKSKARLKIQLSGFVNMLFPEFLNFFKSGIHIAASYALLKKHSSPEDIAALRLNSLSTLLSKASHGRFGRDAAAALKGLAKSSVGVKNAYVSIQITQTIAQIELLEQQIRELDKLISETMNELNSVIMSVPGIGYINGAMILGEIGDIRRFKNSAKLLAFAGLDPTVCQSGKFTAKSTKMSKRGSKMLRFALINAAWQITLHDKTFNDYYDLKRSQGLNHYGALGHVAHKLVRVIFKLLKDNISFVSSDIPA

SEQ ID NO: 476637 - protein, 289 aa, unidentified
MPIVGGLDIHREQLTFDYLDTATGEVKRGQVAPAGRAHLRAWLARFAGRGDVAFALEGCTGWRYVAEELAGAGVAAHVAGPADTAFARGRKRHAKTDQTDSRHLRQLLAEGRLAECWIPPSVILECRALLETYHDLRAEHTAWVQRIHAVFFRQGAPALGDGALRTDRDLQALRAAAAAHLSPAGQLQVVTALDMLAGLEARLGVLRHRLLAAARSLTGARVLAERLYGVGPVTGLAMTCWLGGAGRFSSSRKAVRFAGLDITVWSSDRKGPARAAVPAGPAGAALGGV

SEQ ID NO: 476638 - protein, 341 aa, unidentified
MSIVGAFDVHRRQLTFDFLDTVTGEVKRGRVVPADREQLRRWLARFAGCDDAHFALEGCTGWRYVVEELAAAGIIAHLAEPADTAALRGKKRHAKTDKTDSRHLRSHLAAGDLPECWIPPAHVLEARAVARLYKDLLDERGCWHQRIAATLFHQGVPVTASMSTGQGRAAVADMDLSPAGRQAVETGLRQIGRLTSELEPLRRQLDMLSRRQPGCRALRATQFGVGAVTSVAIWAELGDVRRFGKSDDVIRHTGLDITVYSSDGKRSAGHLSRQGPQLLRWALYEAAKCAARPAAPDHVYYAATRDRRTGGLATLSVARKLARRCYHTLRELGEEAIAPAA

SEQ ID NO: 476639 - protein, 337 aa, unidentified
MIVKTTFMKKYNYFFGVDISKKTIDITCIIYQEMSHRQFTNDPEGMQLLLQWLKELNIVLGQTLFCMESTGLYCFPLTQFLTENEIDIWIEHAARIKKATALDRGKNDKVDSKRIAVYATKNLDHLRLWKPMDPTLQKIKHLATLRERLVDTKKKLVIPIKEFEEMGNIAMAKMLGKTIKHSLAALDKDLKNIETKIIEIINEDENLKQLYKLITSVVGIGFVTAINLLVYTNGFTVMKDARKLACYCGVAPFEYSSGSSIRGRTKVHFMANKKLKCNLHMASLSAVKLDADLKMYYERKVAEGKSKLSVLNAVKNKLLARVIAVVNKQELYVKKAA

SEQ ID NO: 476640 - protein, 323 aa, unidentified
MSASSVVVGIDVAKAHVDVSVLGAKLDAQRFDNQAEAHSALAAALKPLDVALVVMEATGGYETELACALQAAGLPVAVVNPRPACDFAKSMGRLAKTDAVDARMLAEFAAVLLRREDLARFLRPLVDTQQQWLAALVTRRRQLLAMMLSERQRLQITPKGLHPSIEAIVAAIKAQLDEIEDQMVGHVREHFGELDRLLQSASGIGPVASATLIAELPELGRLNRREIAALVGIAPMANDSGSSKGRRRIQGGRFDVRRVLYMAALTASRRNPAIKAFYERLVAAGKLPKVALVPCMRKLLSTLNAMVRTRTAWQPDYKPGTQS

SEQ ID NO: 476641 - protein, 402 aa, unidentified
MYNAVGIDVSKGKSTVAVLQPAGVIIRKPFNVNHTSSELDELAKYIGSLEGETRVVLECTGRYHEPVVKTLSEAGLFVSAVNPHLIKNFGNNSIRKVKSDPADAKKIARYTLDNWIELRQYSSMDNTRTQLKTLNSQFSFFMKQKVAAKANLIALLDNTYPSVNKLFDSPVRDDGSEKWVDYAYSFWHVDCVRKIGLKTFTERYQAFCKKHHYNFQPAKPAELFLASKDLIAVFPKEASYKLLIQQSIQQLNLASSHVEELRSKMNELASTLPEYATVMGMYGVGKTFGPQLIAEIGDISNFSHREALTAFAGVDPGVDQSGTHNSKSNKASKCGSNRLRKTLFQIMSTLLQTAPEDDKVYQFLVKKRAEGKPYYVYMTAGANKFLRIYYGKVKECIRNLEQ

SEQ ID NO: 476642 - protein, 405 aa, unidentified
MAAVMIGVDPHKGSHTAVAIGADEVPVGLVRVRACAAQAERLLTWAKSWPERIWAVEGAAGLGHLLAQQLVAAGERVLDVQPKLAARVRLLATGAVNKNDPGDARSVAVAALRSAACLPVRPDDHAAVLKIWARRHRDLSRARTQVACRLHAVLCELVPGGLSKEICAAQAAAILDQAEPGGAVRQARLELAAEFTADLRRIDVQLRETRKKLAVAVRASGSTVTEVFGVGPFIAATMIGDVRDVSRFASRDRFAACDGTAPIEVSSGNRKVHRLSLRGNRRLNHAIHMAAITQIRYRHSDGRACYDKKIAEGKTPKEALRALKRQISDAIYQHLKADAARAAAAGAQGPGGQPGNDSVASAASSHPERQLFGQATPGPVTTLRHPADQQERASSHARKKTARTT

SEQ ID NO: 476643 - protein, 341 aa, unidentified
MDIVVLGIDLGKNSCSLAGLDASGRVILRRRMRRSSVESFVNGLGRCIVAMEACCGAHHLGRVFVAQGHSVRLMSPEYVRPYVKAQKNDELDAEAIAEAATRPTMRFVAVKSQYQSDVQALHRARERLVSERTALINHLRALLLERGIVAPQGRRKLQEELAVFADEDGIEALSPRIRLLIEDLRSEWRALDERIAAFDVEFVRMAREDEAVRRLTTIPGIGTINATALAAAVGNARAFRRGRDMAAWLGLTPRQMTTGGKPRLLGISKRGNRYLRKNLIHGARAVLPYLVERETPLGRWARGLLARAHKNIVVVALANKLARIAWAVLARGRTYEAAAAA

SEQ ID NO: 476644 - protein, 419 aa, unidentified
MSFKILKFNCCGLDVHKTWIYACIGITDSNNRTEYKQARFSSFSKGLNELCDWLAKYNCKDVCMESTGKYWIPVFNILEQHNLWVTLSHPKYTKPMKGNKTDRKDAKWICDLYMCGMVKPSFIPPADIRELRDLVRYRFKLTCMITGEKNRAQNCLTVSNLKLDDVFSDVFGKSSRSITEQILKHPGETFDVTPFVDGRCKTPIEEIQAAVDGAISKEQAVKLRQCLDHIDELNKHISEVEQEILRLSDKYEIALNLIRTVPGFNKNPLTAIQVLSEIGGDMSVFPTAKHLVSWAGCCPRNDQSNQKIKSTRISRAGSYFKPVLVQVANALIKSKKHLEFTNRYKRIKARRGHKKAIIAICRMILTAIWHILSDLKPYTPEGFLESRPVKEEKVLSISQALNLLKQRGYIIKDEPLSVS

SEQ ID NO: 476645 - protein, 410 aa, unidentified
MNKQKANTVFVDHRNIVGIDIGKRKHAATAVTPKGAIIASLKSFDNNKAGVDLLERQVLVPATGKCKPRVAMEATGQYWNALHDELQRRGYPCVVLNPIQTGNRGAKRIRKTKTDPTDSELIARTILAGDAQATLVPDESIYELRLLVRHRWRMIRVHGVILRYAIGLLDRVFPECDGVFCKPFLTSMRALIREVGLTPKVLVANKAKAIKTLEKASRKRLAAETINELLKRAEQSIGTRQGDSVINAQFRMIADYLDFAESQVQTINKELKERMTALDSPLMSLGIGAEVAATILAESGDITRFPGPGEYAAFCGLDPSVRDSGDSIRGISHISKRGSPLLRWALYVSAQTMVNKHRDFTKIYERHLNKKRGHRFALTVVAHKLARVIWRLCKDGRSFAKRPPKRVGKK

SEQ ID NO: 476646 - protein, 491 aa, unidentified
MNSIFQRKNPAIEKLFADAGSPKKVMCIPIDYAKRQHTALVCNGEGSQLRGPFNIHNNPEGVKFLEDVVANLCRKHSIRKQHVFFGGEDCSAIAFNFIHALLQKGYLGIGLNAYDAAKERENQIASTDKLDLLGIASLLINKRWGRTLSDEYGAARILRELTHHRKSLVKAHTAGAYRIHHLIDQLLPGFLDEKQSGLTPFSDASLWLMSQSLAPRQLLARKSDVLAEKLSLFMVRDVAQKVTQLKTLARSVLPPPAQLCETLQSNLTHEVSVYQHISECIAATDKDIARRLAATPGAMLTTVPGIGCNLAAALYAEIGDPSRERCLKRMTSYAGLVARLKQTGGPDSEAQTRGRSRRACVPLKRTIMDIALKIGQYGDAELKADYARRVNERQDPRLTMGRRMLRICTHLIRTGEFFKPPSLLHDVDPSAAGDYYAAAWDKVLLKWRNAAAIQQAFANGTPLEQWRLMLNELYKLNLSKLSPQYDRLRQR

SEQ ID NO: 476647 - protein, 359 aa, unidentified
MRIIGCDLHARQQTLAMLDTTTGEVVKATLQHEGNVVREFYCNLPRPVRVGIEATGSMQWFVNLMEELGIECLVGHPAEIRAAEPRKQKHDRRDADLILTLLIGNRFPAIWLPTKELLDLRALLRHRHQWVRLRVKIQNALQAMALANGLRRGSSLWTQTGQHAIASLRLAPHAAYRRNELQAMYGKFETEIEKLNQRVEEQARKRVGARLLMTHPGVGPVTALATEVFLGDPTRFANSKELASYVGMIPGEHSSGKRQRLGGLTKQGNPLLRFLWSEAAIHAVHRDPELRHFYRRKLIQKGLGKARAAVARKLGIRMWIMLRDRIEYNEFCRRGQMQQKSGDAYAGMPGRRYGAKITG

SEQ ID NO: 476648 - protein, 404 aa, unidentified
MEAMIINCAGLDVHRKQVVCTLIQDTKRTTREYPTFSRQLKELARWLQREQVGLAVMESTGIYWKAVFACLEEAGIEGRVVNARHVKQVPGRKTDVCDSEWLAELAQFGLLRPSFIPPRDLRELRLLTRYRRKLSGILAGEKNRLHKVLDDAGIRLGCVVSDIDGVSARAMVEALIEGGSTPEQIAEKALGRLQKKKDALELALEGEISDRHRLVLQKMLGHVKWLRRQIAIIDGQIVAAMKPYEQEWKLLQTIPGLDVVGAAMLIAETGVDMSRFGSKDRLCSWAGICPGNNESAGKRKSGRTRKANPYVRSLLCEMANSARKTQSQFQGLYKGLVIRRGHKRAIVAVGHRILQIAYIMLSRKEPYRDPEIDYEALVVRRNAPRWLKALQKYGYLNSIVQVKQ

SEQ ID NO: 476649 - protein, 321 aa, unidentified
MSEASNQWWVGVDVSKDWLDCCCTGAPAEQQSSRWSNDAEGIGALLKALSGAPIGLITLEASGGYETAAATRLAAATLPVVVVNPKQVRDFARAKGILAKTDRIDARVLAQFARLIRPAVRALPDDEQRELMELVDRRAQLVAMRAQERTRLATVQPVARESITEHIRWLDERIGKLDVDLTHRLRTSEAWKVKVDLLKAVPGVGKVTLFTLLARLPELGQLNRRAIAALVGLAPMAADSGQHRGKRFVQGGRAEVRAVLYMATLTAKQHNPLIRTLFERLKAAGKPFKVAMTACMRKLLTILNAILKSQQPWNPSLPSNP

SEQ ID NO: 476650 - protein, 322 aa, unidentified
MTKADTTLNTKATHFGIDVSKAHLDIHCLEANRSWRIANTPKAIRTFIREEHALLKGSFVVVDGAGGLEYDACTMLAKAGIRVHRANTYQVRNFIRSFGQLAKTDQLDARMLARFAAERGTRLRLFVPESRPRRRLRQLARRREDLVRMRASEKNRLHSPEGKEMTASIRRMIRAMDEEIARIEAQMERLMMREDALRRRREVLLAIPGIGKTTAHVLLAAMPELGSLDRRQVAALAGLAPFARDSGMQQGRRHTGAGRGLVRRTLFMATLSAIRFNQLMRVFYERLIQNGKKPIVALIATARKLITIINAKLRDALFPQLS

SEQ ID NO: 476651 - protein, 285 aa, unidentified
MQHYVGLDVSVKETSVCIIDKAGKVIREVKVATEPVAILAVLTEEPLALERIGLEAGPLSQWLYSALAEAGLPVICVETRHMKAALSAQINKSDRNDARGIAQMMRVGLYRPVHVKTLASQKRRMLLTSRQLLQAKALDIENDLRGTLRNFGLKVGMVGTVKFEARIRELVADHPDLAAIVEPLLIARRVLREQLDVLHRQLLEIVRHDEVCRRLMTTPGVGPVVALTFRATVDVPSRFTSSKSVGAAFGLTPRRQQSGEIDRMGGISKCGDAMMREMLFEAAWS

SEQ ID NO: 476652 - protein, 354 aa, unidentified
MKTPNNQLDFTGYQLYIGIDVHLNQWTVTIRMRDLELRTFSMDPSPQKLLEHLKKNYPHADYSSTYEAGFCGFWAHRELTKFGIKNIVVNPADVPTTHKEKTQKRDKRDSRKLARELADGSLEAIYIPTQPQEALRLLSRLLVQLSKRNRQLKSRIKQFLHTQGIILPKRSEMSHWSGRFIQWLKSLDFEYDDARYYLDELLIDLQRARKQKTQHLRKIRTRITGNQIIQLLRTVPGVGLVTAFTFYTEIMDICRFQKLDHLIAFIGFIPSVEASDKKEKIIGLTNRCNKYLRYLLIEATWVAVRKDPALTLAFNNLLKNKSKQRAIIRIAKKLVNRMRSVWKNQQQYVIAVIE

SEQ ID NO: 476653 - protein, 343 aa, unidentified
MAQHMIIGIDLAKHVFQVCMVTPTGTLKTNTAVARGKLLALIARQPPALIFMEACGGAHDWARRFCAMGHEVRLLAPQYVTPFRRGQKNDPNDALALTEAGQRPNIPTVPIKTIEQQDLQALHRVRERLVKHRTAVVNQARGLLLEYGIVIPQGIARLRKRLPRVLEEADNGLSFLMRDLLQSMQRELSALDTRITDVTCQLTRLSHELEACQRLQAMEGIGPLSATALVAALGNGHDFQTGRQVAAWLGLVPRQHSSGGTMRLGGITKGGNSYVRRLLIHGARSVISHVRDKPDAKSAWIRQLVTRIGVNKACVAVANKMARVVWALLHTGEQYRKPVALPL

SEQ ID NO: 476654 - protein, 337 aa, unidentified
MKYCGIDLHSNNSVVIVSDEEDRIVFNKRLPNDLGQIRAALEPHREELAGVVIESTYNWYWLVDGLMDAGYRVHLAHPSAIKKYEGLKHSGDFADAAYLAQLLRLGLLAEGYIYPRAERGARDLARKRMQLVRYRTAQILSIENILIRQTGARMKGDVVKRLTAEQVDAFGFAPDVALAVEANRAVSQALGQQIEALERRLKERVSLRPEYRLLKTVPGIGQTLATTIMLETGSISRFAQVGNFSSYCRCVDSLRESNGKKKGEGNTRNGNKYLAWAFVEAANFALRYCPQAKSFYDRKKSKTNRVLALKALAHKLARACYHMLRDQKPFDVHLCFG

SEQ ID NO: 476655 - protein, 309 aa, unidentified
MTIHQTVLGCDISKSFLDVFDPRSQRCERIANDKHAIEAFAASLAGTNCLVVFEATGVHDRLLRHALGEHGIAARRLNPVQARRFAEMRGRLAKTDRIDATSLSDFGKMVQPKPDPAPSRDRERLAALARRRDQLVELRALEKRHRADAFDASIIADIDVVIESLGNRIAAIETEIDRHTRRDVELTAELKRLTSAPGVGKITALTLVAHMPELGSLTPKKIGALAGLAPFNNDSGHRRGRKHIKGGRRRVRNALYMAALGAIRANTRFKSFFNAVTDRSGSKKVAIIAVARKLLTVLNAMQRDKKAFA

SEQ ID NO: 476656 - protein, 360 aa, unidentified
MTATMTWVGLDVHARSTHAAAIDRDSGELSRARFGVGADPVVAWLRQLPQPVHACYEAGPTGYALYRAAVAAGLRVDVVAPSKTPRAAADRIKTDRKDAELLVRLLLAGSLASVAVPSAESEAARDLARAREQVRADLARLRHRVSKLLLRYGRVYDGGGTWTQAHRTWLAGQRFEHVATELAYLDTLAAIDGLLARRAALDERLSLLATEPQHWPTVARLRCFRGIETLSALILHLEVGDFARFQRPGQLAAWLGLVPSLHQSGESETRGSITKTGSGFARRILVEAAWHYLREPRIGATLRDRHAGQPDHILQIAWRAQHRLYRLQRSLRARGKPGNVAVVAAARELACFLWAAAVAD

SEQ ID NO: 476657 - protein, 337 aa, unidentified
MKVTLIGIDLAKSIFQVCGVNQAGKRVFNRQVRRARLMEFLLQHPDATMAMEACSGSNYWGRELQKLGIKVMLIPPQHVKPFVKGNKNDRNDAFAITEAARRPDLICVEPRTPAQTDMIQVHRVLDRMVRQRTALINQIRGFLNEYGVVVARGKEKLLAAMPDLLEDAGNGLTPSSRALYQEMYEQWRQVNEAIKRIDKRLEGQAKTNEAAQRLMKMKGVAVKISTATIAHAGNGHGYKSGRHFSANLGLVPKEHSSGGKQKLGGITKRGNAYLRRLLIQGAWSVVRNADKNDDRLSRWARQLVERRGKHKAVVAVANKMARIMWSMLYHQTEFRAN

SEQ ID NO: 476658 - protein, 345 aa, unidentified
MTEAYDGRQVVGMDLHRRRSVLVRMTLDGRKLETARITNSPQALRAVIGRAGECPLVVVEATYGWYWAVDVLAAAGAQVQLAHPLGVKAFSYRRVKNDERDAADLADLARMGRLPQAWIAPEPVRAVREVTRFRHKLVQQRTSCKDQVHAVLAKAGITVTRSDLFGRGGGLWLDQLVLAQPYAGKVAALRALIAVLDGQIGLLGEQAAGMLAADAGYAAVRELPGIGPVLGAVIVAEIGDITRFAKPGQLASWAGLTPRHHESGTRVIRGHVSKQGSRMLRWALCEAIQRQPAGTRPQQVKDGIIARRGEQARNIAKTAAARVLLTQVFYAWRDGHARSARRPAG

SEQ ID NO: 476659 - protein, 387 aa, unidentified
MTVYVGIDIAKEFHFASIMNHDGVPSKPFAFENNAQGFHALLSACSSYAKEELVFGFESTAHYQDNLTFFLNNLGLRIMLINPLQVSALRKSTIRNTKTDRVDAHLICLALCYFHDHTTARASVSNNELYQLCMTRHDLVSKRSAAKIQLVAHMDRIFPELARFFKGNLHLNTSYKLIEVYPLPSQIEKTRIDVLTKLLYRASHGKYSREKAQELKSLASVSVGIPSEIFAFKAQLLVHQIEFLSSQIQTIEDKIKSFDSLQESPIYTIPGINTIFAAYILSSIQNVTLFDKSCKLVAFAGLDPIVRQSGKFTASSTHMSKRGNSLLRYALIWTSWNVVLNNKTFADYYDKKRSEGKSHYNALGHCATKLIRCIHTMLTHQVAFNLE

SEQ ID NO: 476660 - protein, 364 aa, unidentified
MASTSSIHIPSIPPAISGHIVVGVDTHKHIHVAAILDATGGIQATMTIATDTGGFQQLLAWAQSFGQIIAFGIEGTGSYGASLTSFVRRKGYKVIEVNRADRRMRRLVGKSDTLDAQNAARAVLSGFATAEPKTADGTVEMIRQLKVAHDTAVKNRSAAMITLKAMLVHAPEQLRLEMARKTQIMLARHLASLRPRELKTPEDSIRHTLRALARRWQYLDTEIKELQTMIEELVMKCAPQLVAPFGIGIDTAAEILIVVGDNPERIKSEAALAKLAGISPIPASSGMSTGRYRINRGGHRQLNAVIYRAVIVRMRFHEPTIKYVTRRTAEGKTKKDIIRCLKRYVIREVYHLINPAENTAQIAA

SEQ ID NO: 476661 - protein, 365 aa, unidentified
MKNSKTFLTGCDVHDKTLVLQSTLGLEEPELTKWANHRESRGKMIRHLKMAAQKKSAKRIVFVYEASGSGFGLHDELEAAGIECFVLAPTKIRKSTKDKKDKSDAKDALRLLEILRAHVLAGNALPAVWVPDPETRDDRERVRARIDMGKKITVVKTQILSLLRRNGVERPGTVGKPWSRPFMGWISDLAVGDEPGLGEGAQIVLCSLLRQLMFWKAEQATLDRTVENLSKEKRYTSRVKVLTAEPGVGLLTAMVFLTELGKMNRFPNRRKIAAYLGLAPTSFESGEASDRKGHISREGPCRVRKVLCQASWYRVRAHPEDKPVFKRMNRRNPRKKKIAIVAMMRRLSIRLWHLALNEEVGSKTA

SEQ ID NO: 476662 - protein, 347 aa, unidentified
MTYFTGIDVSLRSVSICVVDDRGEVCREAKVDAHVDVIVDWLHAFSPELKSVGFEAGALSQYLTYGLQAAGFEVICLEARQVKNTLDAMRNKTDRNDARGIAQILRTGWYSRVHIKSLHSHRVRALLASRKAILAKCVDLENELRGLLRVFGIRLAPRVGHGSFDAQVRSTFADDEMLSCALVPLLDARTVLYKTYLKLDNAVKALTKADPLCVRLMSIPGVGPVTVLTFKSAVDDPARFKSSRTVAAHFGLTPKRYQSGEMDNPGHISRAGDADVRSALYVAAHSLLTRNAQWSSLKAWGMRLAKTRGHRRAVIAVARKLAVILHRMWVDGSEFRWGAQEPVAVKA

SEQ ID NO: 476663 - protein, 375 aa, unidentified
MLPPYQQRMLAGGTEDKEHAMSQNLDVSPAAIGIDIGKNSFHIVGQNQRGAIVLRQKWSRGQVEARLANLPPCRIGMEACVGAHHLSRTLKALGHDARLMPAKYVRPYSKGQKNDYRDAEAIAEAVQRPTMKFVATKTADQLDLQALHRVRERLVGQRTGIINQIRAFMLERGIAVRQGLRFLRAELPNILATRTDALSPRMLRILEDLSADWRRLDARIEDLSNEIEALARQDKGCERLMTVPGIGPIISSAMVAAIGTGDAFSKGRDFGAWLGLVPKQLSTGDRTILGSISRRGNRYLRTLFVQAAWVVLVKVGPKHWDRYGLKSWIEAAKKRLHHNVLAIALANKLARIAWAVLHKGRAFECVKTNEAYRPA

SEQ ID NO: 476664 - protein, 385 aa, unidentified
MQVMIEGQSHFQPFGLPYWGFEDLNKGVGSMTASYEYHIGVDYHKSYSHLVVQDSSGKTLRSGRVKNDRQSLGGFLERYRENSHAVVEATRNWMVMYDWLDDICDDVVLAHPLKVKAIADAKIKTDKIDATVLAHLLRADLVPEAWAPTDKARELRIALRERMFYVRLRTMTKNRIVTVFDRYPEQTAQLKKLGDLFGKAGRAQLVQVNVSEIDRIQIDRGLAFIGDIDGRIKQSEATIRAMTRANANVRLLKTIPGIGEFFARLIDAEIDDISRFRTPKKLAAYAGLVPSTYSSGGKTFHGKIIKQGNKWLRWALVEAVAPAIASDAQLRAQYEHLKLRGTNKARVAIARKLLTIAFQILRDQRAYEPRGTSQEEGTSTISRLS

SEQ ID NO: 476665 - protein, 403 aa, unidentified
MAAVMIGVDPHKGSHTAVVISPAEEPLGELRVRASAGQAGKLIGWAAAWPERTWAVEGAAGLGRLLAQQLVAAGERVLDVQPKLASRVRLLQAGDTNKNDPSDALSVAVAALRSTVCREVIADDYRVVLKVRAERHRDLARTRNQVACRLHSVLCDLVPGGHQKEISAAHAARILAQATPSGAVALARAELAAEFLADLRHLDGQLCDTRKKLAAAVRASGTTLTQVFGVGPVIAGTVIGDVGDVARFPGRDHFASYNGTAPVEVSSGNRKIHRLSLRGNRRINHAIHMAAITQLRHKHSEGRAYYDKKVAEGKTHKEALRSLKRKVSDAIFARLQADARQARESGPGGQPGNGSDSSAASSHPERQLFGPATPGPDTTIRPGTTAGTPSPSKPALKKTRPAT

SEQ ID NO: 476666 - protein, 385 aa, unidentified
MVNHNDLSRSLVAFEQDNTIIAVIEMSLNSWLVAGIVPGIERHPLKKLSFDEQMLLQLLYRWRDEAVKAGRTITRMVVAFEAGRDGFWLARWLRARGIEAYVIHPTSVAVSREHRRAKTDRLDTESLKRAFLGWLRGEPDHCSMAAIPSLQEEDAKRPTRERENLVGERTRIVNRMKACLVRFGIRNFNPTLSRATERLNALCTPEGVSLPPNTLAELRRDMARLRFVMDQIKEIEAARLQRLERAPAEGPHAMVRLLARVIGVGLETADMLVHEILSRKLRDRRAVARYAGLTGAPDESGSKRREKGLAKAGNARVRRGMIQLAWRFLLFQKNSALSQWYRTRTESAGKKRKTMIVALARKLLIALWRLVTTGEVPAGVVLRAV

SEQ ID NO: 476667 - protein, 375 aa, unidentified
MKEKLRFLGLDVHAETIAVAVAEPEGEVRSLGTIPNRAESIRKLIKELGPAAKLRACYEAGPTGYVLYWQLTELGVECEVVAPTLVPVKAGDRVKTDRRDAEKLARCYRSGDLTAVWVPDEGSEALRDLVRAREAAKQDQTRARHRLSKFLLRSGQRPPTGVRPWTRPYLIWVAQLRFTQIAQESTRHDYLHEVEHMRGRVERLEQAITEAVKVASPALQQVINDLQALRGIADISAVTIAAELGQVSRFDSARQLMGYCGAVPSEDSSGKRTRRGGITKTGNSHLRRIVVEAAWSYRRPPGIWYGLRRRQESISEEAKEIAWKAQHRLHKRYMKLGAAGKDQRKIVTAVARELLGFIWAIGTRAETISRQQVAA

SEQ ID NO: 476668 - protein, 352 aa, unidentified
MEKRIRQSVGIDCSKDHLDCSFGIMHASFDEVIISNSKFTNNAAGLKKLLLWSKKLMNTDCEVVFLMEATGVYHERAALFLYESKNKVAVLLPNKVKAFAGTLKVKTVNDKECAKIIALFGLEKNVDPWSPPQEVFNQIRQLTRERDQLLLERTMKKNQLHAEKSGAWPNSGSIKRIEQVVKILNKQIKEIETEIKDLINANPFLKEKMKKLCSIKGVGMITAAIVVAETNGFNLIRNKSQLISYAGLDVIEKQSGTSVRGKTRISKRGNKYLRKCLYFPAFTSINHYEPSKNLYTRIISKTGLKMKGAVAVQRKILVLIYVLWKKDQFFNPDYHKAKQEEPHQDAALHELA

SEQ ID NO: 476669 - protein, 368 aa, unidentified
MKQQTSSATETQTKGSKIIDYSGKLIYVGIDVHKKDWQVAKVHEGICLGNHRMGASSVRLIEHLQTHYPGATFKCVYESCAWGFTLQRQLSAAGMECIVVHAADVSSSDKEKRRKTDKVDALKLARHYASGDIKEIYVPAEDLQRDRNLVRFRKKLVGDLTRSRNRIKSLLKYQGVDIPAQFDKAHWSRNFMNWLEQLGRHDAEMGSTLLLMLEEVKLLRQLLLKAEKQLMAMMATEKYRARFNLLMSVPGIGRKIATLCVLEIDNIKRFRSFDQLNDFIGLCPDTADSGDTERCRGITSRRHKQLRANLIEAAWQAIRIDPALLERYQQLTKTMKGNQAIVRIARKLLRRMRAVLLSGICYQKGVIA

SEQ ID NO: 476670 - protein, 352 aa, unidentified
MIIGIDPHKMSHTANAVDPATNTTVASVRVDATLAGYRELMRWAKQFGERRWAVENARGLGRHLAQWLVARGEVVLDVPCTATARVRELSRGSRRKTDVIDAAAAASVAALHGDATVVAAEDHTTVFAMLEERRANLAAQRVRITNQLHAVLRDLVAGGAAVAITAKSASSLLRTVRPESLAERTRKQLAHDLVRDVRAVDASLADIEKRMTAALDDHGTRLREIDGVGAITAVRLIGRTGPASRFGSPQAFAAYAGAAPIEIASGEHSRHRLSRAGDRRLNSAIHLVAVTQVRMRNSIGRAYFDKKIAEGKTRNEAMRCLKRRLANHIWRMMIADEQRHGTTPRENIEIAA

SEQ ID NO: 476671 - protein, 319 aa, unidentified
MPFPEDTIMPCWIGLDVAKDSVVMAVDGVAATTTFLLAGDGLAALVAALRRAQPTLIVLEATGGYEQPWVTACVSAQLPVVVVNPRQVRAFAKAIGRAAKTDVIDAHVLATFAARVQPPIRPLPDAARQELDALVARRHQLVTMCTAEQQRLGQARAAAVRQSLQAHITWLQQQINDADRALHDVIRDSPIWREQDDLLQSVPGIGPITARTLLATVPELGQIPHRPLAALIGVAPLNQDSGQARGRRRTWGGRAAVRRVLYMAALTAVRHNPLMKATYVRLIAAGKPPKVAIVAVMHKLLTVLNAILRDHKPWRPVAA

SEQ ID NO: 476672 - protein, 343 aa, unidentified
MGTVTTTAFVGIDVSKKTLDACLLTPDGKARDHAFANDPDGHAALVAWVDGHASGADVHYGMESTGGYEDALATHLHAAARRVSVINPVRVKYAGVVRGRGNKTDKADARLIAGYVRDHRPPAWVPPTPAVRELQALVRRRDDVRALAAQEKTRLDSPLLTPAARKSVARVIKLLGKEADAMQAAADALIAATPEMAADRVLLASIPGVGDQTASTVLAELPPVAHIPSAQAAAAYAGLAPREHRSGTSVRTRTRLSKTGNARLRKALYLPTLTAIRFNPLLKRFYDRLVAAGKAKMQAVGACMRKLVMICYGVLKNRAPFDPAWSMVRPPVGGAPDHPPTGG

SEQ ID NO: 476673 - protein, 423 aa, unidentified
MEVIHERVAGLDVHKDSVVACVRIMSGGKAKRECRTFGTTTAELEALRDWITSWECTLVAMEATGVYWLPIWKILLGGAFEMNIANARHIKAVPGRKTDMNDAMWIADLAAYGLIRASFVPDEEFHELRTLTRTRKQLVRDQTSHVQRIQKTLTEANIRLDSVISDIMGVNGRRMIEAMIEGVRDPGKLAALGDRRLKATRKELHDALHGRLTDHHRFLLKLHLDQYDALEKTIRVIDAEVERRIARLDKQAKPAETPLSRLIELLVSIPGVSYLSAITIISEIGSNMSRFPTAGHLIAWAGLCPGQNESAGKRKRSRLRKGAPWLKTMLVQCAWAAKRQKNSYYRAQFYRLQARRGPQKAICAVAASILTAIYHILKDGVPHQDLGIDYFDKRKPEAKVKRLVAQIAKLGFEATLQPIAKAA

SEQ ID NO: 476674 - protein, 343 aa, unidentified
MAIFVGLDVSLKMTSICIIDADGTLVWQGKVLSEPPALIMALWPYRDRIKLVGIEACPLSEWLYAALVESGIPTVCIETRHAQRFLSSRPNKTDKSDAHGIGEMMRLGHFRPVHVKSNASLMLRTILGARQNFVGHMIAVEQTIRGLLKVHGLKVGAVLRCAFAARIECLLADAPELRIAIAPLLETRNMMRKQQALLDRQMSQLARKDDVCKRLMTISGVGPIVSLAFKAAIDDPARFRSSKAVAAHLGLTPRIYQSGEIDRSGNISKCGDTAMRHALYEAANSHLRVSKKWSPLRAWGVKLAKRIGAKKACVAVARKLAIIMHRMRVDGTEFHFSKAPTTA

SEQ ID NO: 476675 - protein, 321 aa, unidentified
MQTIPVTVYAGVDVAKATLQLHLQGRQAEFSNQAAGLVQLCQQLKTIPHIHVVCEATGGSERLLVQAMHQAQIPVSVTNPAQVRAAAQAQGQRAKTDRIDAALLTDYGQRYQPKPTSPTTASQDQLVALTQWLMQLVQAQALAKTQAEHHQAAFVCGRHTKLMAHYQSQIVAVEKQIRALLAQDAQLQQRVDCLDEIKGVGARTAWLVLAHMPELGQINRQEVAALAGLAPWTRESGTMKGMRCIGGGRPEVRLALYMAALSAARCNSVLKPFYQRLRAKEKPAKVALTAVMRRLLVYMNHQLKALQATQTDTKLQNSKIP

SEQ ID NO: 476676 - protein, 428 aa, unidentified
MSKKDYSKQMQKRQRIKESTLVVGVDIGRQFNAVGFMNKEGAVLGKHPKVYNSRAGFDYFVNSVEEVKAKHGLTDVLIGLEPTGHYWRNLAYFAKSRGYAVQFIRTTALKHQRELDESSSAKNDLRDAITLANITREGKYIDTVIEDGIYRQLRTLCKVRERIKRYNVGSKNTLVAALDDYFPELRKIFWSAHSRGLWAILEMCPFPEDVLKVKVSKIKRIIAKSSRRGKTAYDKAVDLHMAAKESIGIKNIGNSDRYRIKICLQEVKRTEEMLKEIEKEMKALLKQIPYAQYILSIYGMGPLSTAMFLGELGNPANFHNARQIIKYAGYDPQEKDSGQRVGRKRISKKGRWLLRKTLFFMGMRVVVKDGYFKEYYQRKLESKNRFGQLLKKREGLCAVVIKLIKVMFALMRDRRMFDNKTVVLPLAA

SEQ ID NO: 476677 - protein, 422 aa, unidentified
MEAYEWVVGIDWAMDAHQVCVVDRDGRPQWTREVPHTPDDVQEFMAWLLAHTACDPSRIAIAIETPRGSLVDTLIERGFAVWAINPKQLDRFRDRFTVAGAKDDARDALVLGASLRTDRHAFRRVAVDDPVIVQLRSLSRLEEELQQDVRRLTNRLREQVYRVHPALLTLCPAADEPWFWTLLEQTATPDDRAQLTATAVKTVLRSHRLRRLTADAVLAAVRGPNFYTAPGVVEAVKVQIETLIEHLRLVAAQHRRCGDQIERVLSELRARPEAADPAEHRDIAILESLPGVGRMVTATMLAEAAYALADRDYDTLRTCAGIAPVTKRSGKRRRAIVTMRRACNRRLRTAVYHWGRVSIRWDAGARAYYDRLRARGHAHARALRSVVDRWFRILIAMLRDRRLYDATRFEATVAVSVPGTAA

SEQ ID NO: 476678 - protein, 480 aa, unidentified
MAKRAVQHADLKAVPMLLNESLYVGIDIGKAKHVAGFLSKTLLERHERFEACPALVFENAREGFRLLIERIRSLAPLEHIFVLMERTGHYHRTLEQYLQELDITVYVMHVQSRSTGMLKTDKRDALTLANQLYNQLELGVQVPNKLQLIRRVVPPTQAAAELRGLIRHRYELIHESTRRKNKLTAICDELFPELVRVVKDPNGQVALALRERFPTPAALATVSLTTLQQIRGGARSFSDAKLVELQRQAAQSIGIKEVARLRGLVLEQTQLIKELQMLQEHIQQLDKEIGGIVEHAREGQILLSFPGIGPIMAATSIAAIGSIHNFPSAAALKSYFGWAPVVAQSGSTLDHTRLTHGGARTMKHMLFLAVFQAIRLKDNEWARLYERLVKTKCPFDERTQSYLGKTRVIGRVAGQMTEAIYALLKRDAELLSKVPPSQDPPPPLLYDPEVHRQHRLGHYRPLKSTPPPNTITLLHPLPAE

SEQ ID NO: 476679 - protein, 343 aa, unidentified
MGDVITIGLDIAKSVFQIHGVDADGTVVIRKRVSRAKVLEFFAAVPRCLVGIEACPSAHYWSRKLEVLGHTVKLMPPSYVKAYLKRGKNDANDAAAICEAVTRPSMRFVSTKSEQQQSGLMLHHSRRLIVRQRTMLSNAIRGHMAELGIISAKGRNGTAELLEIIANAKDNCIPAAARFSLEVLARQYIAIATEIGVLEKRIHAWHRSCEESRRLEEIPGVGPIVATALIAEVGDWKAFASARSLAAWIGLVPKQHSTGGKERLGGISKQGNRYLRWLLVAGAMAVIRYARRHGTKRLWLTRIMERRPIKVAAVALANKIARMAWAIIVRGERFREPRLLLAA

SEQ ID NO: 476680 - protein, 357 aa, unidentified
MKKSIKKSAVEVASLGIDLADQWSDWVTLDDAGVVIERGRVKTTEPHLRAQFGPMAPTVIAIEVGTHSAWVSRLLRSCGHRVVVANARKVALIHQNRRKNNRIDAEFLARLVRVDEKLLFPIEHRSEEGQQDLTILRSRDVLVGARTKLVNHVRGISKAAGVRLPICSTEAFVKKCGPALPTGIAPAVKVLLEHITQMTTHIRDYDRTIDKMPKKYPAAKLLMQITGVGALTAVAYVLTVEDVHRIARSRSAGAYFGLVPGSDDSGEDHEPGRITKEGDRYVRRLLVAAGHYIIGRFGPDCDLRRHGLGIAARGGKNAKKRAVVAVARKLGVLMHRLWLTGEVYEPLYNANRQQVAA

SEQ ID NO: 476681 - protein, 317 aa, unidentified
MKDSLIFVGIDVSKAQLDVAIRPTGETLSVANDKAGIKALVKRLAKIQPGLVVLESTGGLERQILCAVVSAELPAVRVNPRQVRDFAKATGQLAKTDSIDAAILAHYAQAVRPQLRPLPDAVAMELRALSARRRQLIEMIVMEKNHLATAAKAVAKDITEHIGGLEQKLQGVDTDIDGLIEQSPIWKEHEDILRSAPAIGPVTSRTLLAELPELGTLDRKQIASLVGLAPFNRDSGTLKGRRSIWGGRASVRCALYMAALVATRCNPVIGGFYKRLKAKGKPFKVALVACMHKLLTILNAMIKHKSRWSDTFSLQTT

SEQ ID NO: 476682 - protein, 357 aa, unidentified
METAYDGRQVVGMDLHRRRSVLVRMTGDGRRLGSARITNSAAELRAQIARAGKHPQVVLEATYGWYWAADVLAAAGAEVHLAHPLGVKAFAYRRVKDDFRDSADLADLLRMGRLPEAWIAPREVREIRELTRYRIKLVRIRTSCKDQVHAVLAKLGIPVAHSDIFGAGGRAWLDQLALPQPYAGKVCSLRHLAGELTGEIDMLAAVIRDLLAGDRGYQVIQQLPGIGPVLAAVIVAEIGDVRRFATADRLCSWAGLTPRHRESDVKVVRGHVTKQGSRLLRWALIEAIQRVPRDCVIGGVKDAIIARRGKQARNIAKVAAARRLLALVYYGLRDGQIRCLSRPAGSPPPAIPPARAA

SEQ ID NO: 476683 - protein, 377 aa, unidentified
MASSILAPPAKEIDPSPQHRVLIGIDTHKDNHVAFAIDYRGASLAEIIVPACLLGYEALLEWALELVHGVMPGLAFGIEGTGSYGSGLSRHLMAAGCTVRDINRIEKSTRRRRGKDDSIDAEAAARTLLSGTATTIPKAGNAGVEMIRMLNNVRESAIHSRTKAINQLRALLVVADPALREELAGMPTAALIHHCSTLEPEPNGNPRASTHNCLRLLASRWLALTAEIEELSTELDQLTKTVAPELRDAYGVGLECAAVLLVSAGDNPERIRSEASFAALCGASPLPASSGNTTRHRLNRGGNRRANRALWRIAITRMRWHPATKEYVERRTGEGKTKREILRCLKRYIAREIFRLLRSMTLGDPLPCKGSAAVVAA

SEQ ID NO: 476684 - protein, 315 aa, unidentified
MKTTTKTTERNVGIDIGKSTLDIFVLEQDNHWQTDNTEAGVRALAARLARYKLARIVVEATGGYERKLVYALAEKGLPVVVVQPMHVRQFAKAQGILAKTDKLDARVISEFGAIMKPPIRQIQTKKIRYFRDLLARRRQLMEARTQELNRLDKADKAIQSTHKRLIKILDKEVAWVTAKLERTVGEVTEWQETYEIVTSVPGVGDGVAHTLLGELPELGSLSPRQIAALCGLAPFNRDSGSFKGKRRIKGGRAPIRTMLYMAMMCAIQHNPVMKKFYAKLVAAGKHKKVALTACMRKLVTILNAMVRDGRRWQEA

SEQ ID NO: 476685 - protein, 343 aa, unidentified
MRHHVTIVVADHHKSVFVCQVLDRETGEVSWASLESRRNVLRPFLEGLRGPVLVFVEACRSWEWVSDLCEELGIELRLVDPSQMPEIARSTKKTDRHDVEAMVKRLLVTGELPQSYRASRPERELRALTRRLGDLRNTRRRLIHQIHAVIDAQGLPASKRDFVRNPWRETMRLSLSRHACLDLECLLLQYDQNLALQELLEGEVEQLVKDREDYRRLKAIPGVGPVIAATILAESPGIERFKTARQYGAFAGLTPNVRSSAGKAKLGHITRNGPPQLRWALGQAAMVGLCSRTPTRIKAFYQRKKKRGKPGSVAVCAAAHKLARAIWVVLVRKEDFVADPKAA

SEQ ID NO: 476686 - protein, 408 aa, unidentified
MNTLYVGIDVSSKSNVVYLMLPNGDKHSNFSVANSHEGSTLLVKKIYSALTSHSLDTVLIGLEATSVYGDNLVYFLREDATLAPFNRKIHVLNPKQVKKFHDTYNDLPKNDYVDSFVIADCLRFGRINKEVYMGDYRYKALQNLTRARFFAVQNLVKEKQRFMNVLFKKYSTMTQEKVFSDAFSTTALAVYDEFESAEALANMDLHELTDFVMEKGKNRFPNPDAVAKAIQKAARSSYRLPKTVNDSVNQVLSISITSMKALESQIKEFDKAIKALMELLPNVLISIPGIGPVYSAGIMAEIGDINRFDNQASLAKYAGLAWKQHQSGGFEAEVTRLIPSGNRFLKYYLCEAAFSLVRCDKEYSDFYHLKYKEVNRCQHKRALALTARKFVRLVFRLLKDNRLYCPAK

SEQ ID NO: 476687 - protein, 433 aa, unidentified
MNSSTTTPTTNFAAFIGIDWADKEHEIWLRPADGSPAKRSTLSQNPVAIQEWVSQLRQQFGGQLVAVSIELSHGPLLAALLGVEFLVIYPINPKSLARYRQAFRPSGAKDDRSDAELLSEFLRHHFAQLKPWQPEDAQTRLLGGLTQVRRHWVDEVTGALERVRANLKHYYPVILELFTDGLAQPMVVHFLQRWPNLKSLQAASQSELRKFFYGHNSRSAQLLEERLQLILKAKALTEDAAVLGIYQTDTLVIAELLGVLLKNIKEIQKQISKLFAAHSDAFIFQSLPGAAEVLGPRLLTACGTQRERFAEAVALAQLSGIAPITVQSGQSEYQMFRFTAPHFMHQTFWEFAKCSIKYCLWAKAFVDQKIHKGMGFNAAVRALAFKWIRIIWRLWQNREVYDETKYLAGLCRAKPGGVQPLITSVSSLDSALL

SEQ ID NO: 476688 - protein, 356 aa, unidentified
MSSEVKYIGMDVHKEAIVIAVRDTRGHVVMESIVETKASSILQFIRGLQGELHVTWEEGTWAAWLYDLLKPHVHRVLVCNPRCNALLKEGSKNDKVDARKLADLLRTGMLRPVYHGEHGLRTLRELARTYQTLSQDLNRVMNRLKALYRGWGMACGGTQVYAPRYPDEWLGKIEHAGVRRRAELLYQQLDGLQALRRTLRSELLAESRKHKASKLLRQIPCIGPIRAARLVALMQTPHRFRSKRQLWTYSGLGIETHDSAQYRFVRGELQRAKKPQQIRGLNRNHNHEMKDIFKGAANRASCGVGPLRDFYVALLDKGMKPEMARLTLARKIAAIALTLWKKEERFNAEHLKTQAA

SEQ ID NO: 476689 - protein, 368 aa, unidentified
MTLPLYVGMDVHKETIAVALADDGRNGEVRSYGTISNTPEAVTSLLKKLTKPDVELHCCYEAGPCGYRLYRQIIDAGHMCIVIAPARIPRRPSDRVKTDRRDALMLAKLHRAGELTPVWVPDPCHEAMRDLVRCRATACVQQTTARQRLLSLLLRLDRIYEGKHPWTQAHHRWLSEQRFEFPAHQIVFQNYMNDVLTSDDRIKNITQQIELLAAQWAMKPVFDALCTLRGVSSTVAATVLAVIGDVRRFESPRHLMAYFGLVPSEHSSGNTVRRSGITKTGDHEVRRLLVQAAWAYRLPPRVSRRKVDVYAATSEQVRAVAWKAQVRLNGRYRRLVMRGKSVQVTITAVARELVAFIWEMAQVVPMKT

SEQ ID NO: 476690 - protein, 315 aa, unidentified
MTQTNITTAGIDTSKAKLDIAVHGRTERWQVANALSGWRVLAANLTKADVTRVGIEATGGYERGVVEHLRAAGFTVLVLQPMQVKAFGRVHLRRAKNDALDAALIAACAATLDQPRIAADPRLAELAGYLTFLEQTEEDIARFKTRLEHIDEPRLRRIVTTDIKRLKARKAAQIQDIAKRLRAHNDLAKRLDLMLSIPGIGERTALALIIRMPELGRISREEAAALAGLAPFDDDSGKYKGQRHIAGGRGRLRRSLFAAALPAAFRWNKALIALYARLMAKGKAHNAALIACARKLLIYANTVVQRGTPWTEKAA

SEQ ID NO: 476691 - protein, 408 aa, unidentified
MATPEQVDVWVGLDVGKEEHFAEVLNDAGERIFARSLVNDQRALEALLDRAGEHGVVGLVIDQPGSIAQLALAVAAARNVPVAYVPGLVMRRAADLYPGEAKTDKRDAFVIADTGRTRRKQVHWLDVGSDELLDRLRVLNGFDIDLAGDQTRLSNRLRDALTSISPALERALGARLNQAGVRDLLAAYPTPAGLRAAGRARVTKTVKARSPRIAAKVVDSVLAALEAQTVTVPAEATIGRVIAELAVELDRVFRRRDALAEEIEEVFLAHPFGELLSSMPGIGPRTGARILAEIGDGTRFPDGDKLASYAGLAPVTRQSGKSINGESKSRRGNHRLKNAMFLAAFASLRSPESRPSTTASGPKENDTTQRSSASRGGAATSSSPCSATMRPTDHRALRLDCPKRHEPR

SEQ ID NO: 476692 - protein, 394 aa, unidentified
MKLIGIDIGKNKHFFCVMDQQTGEIISQPVSFSNDKEGFDFLVQKIKSYPKDSILIGMEDTGHYHFALLKYLLNLQYTVALINPKTTDFNRKIQGGITKNDKLDTINICDVLDTPERKKQYRITKVNSFDLYEQKQLTRHHHNLKEEENVYKNRLQKCIDIVFPEFNKLFNSKYGIVYMNILKMFGSAENIANTDIRTIRKCFEIEGRGNRISLTPERLKECARSSIGISSSAEVIQIKHLTAQIELIEEQLTEIDKKIEEFSIQNNSPILSIPGISHFSGTSILAELGDISNYSKPSQIIKFAGVAPLHYESSQFNAQHTAITKKGSKYLRKTLYQIILPVIRHNPVFNKYYQLKISQGKGHRCAQGHCVRKLLRIIYHLLKTNQQFDPQLLR

SEQ ID NO: 476693 - protein, 309 aa, unidentified
MKEKLVYLGVDIAKSYLDAAIEKETRRFSNDTIGHRELIKWVKQMKVSVQVICESSGGYERALVQGLARARLKISLVQANRVRQFARAAGILAKTDRIDAEVLCEFGKVMRPQTVTAATLEQEHLRELESQRRHLTHLLVMEQNRGARVSDPVVRRLNRGLIHQIKKQIEQIDLLIKEHIEQSQELSAKAKKLTSISGVGLRTAALLLAQLPELGELNRREVAALVGVAPFNRDSGRMRGKRAIYGGRRPVRHGLYMAALVAARHNPILRQFYLRLRAAGKPAKLALTATMRKLLIVLNSALKPDLSYA

SEQ ID NO: 476694 - protein, 384 aa, unidentified
MPEPATALDHESTIVAVVELSARSWLVGAQVAGVPRQCRQKLAPSAEGLLDHLDHLRQRAEKAGKRVSRVVVAYEAGRDGFWLARWLLGRGIEVYVIQPSSVPVDRRARRAKTDALDVEMLLRTTLAWLREEPRVCSMVPIPSEVEEDGRRPSRERQDLIRERLALTNKIDGVLATLGVGGYRPLRRDRRERLEALRRPGGDPLPAHAKARLARLLDRLELVLEQIGVLEEARDAVVARDAVPGGEADSLIRRLAGLKGIGPELATLLAWEAFVRPFRDRRALAAYAGLTGTPFDSGDRRREQGIGKAGNRRLRAALVELAWLWLRYQPDSALAAWFRRRTQAAGGRTRKVMIVALARKLFVALWRFCRDGTIPDGAALKTAPA

SEQ ID NO: 476695 - protein, 352 aa, unidentified
MAIVANTYAHVIGIDTHARTHTLTVVAAATGAVEASASFPATGAGMSRAVTWIIRRIQSLTFTLVVIEGIGAYGAQLARACRDAELRVVEPLPTPKGLRAGRGKSDPIDAELIARSVLAADVQRLREPRTDEGVRAAARILVGAREQLNAYRIATINALTALVRTVDLGIDARRPLTSVQIATIDAWRDRNEDVAVATARREARRMARVIRATEDDLVANERDLAALVAVSDAAPLLDMPGVGAITAATILTSWSHAGRIHSEAAFAAIAGVSPIPASSGNTSKHRLNRGGDRRLNSALHAITLTRMSHHQPTKDYVARRRAEGLSTKAIRRCLKRYLARQIYRTLTQAAAA

SEQ ID NO: 476696 - protein, 393 aa, unidentified
MTFVGVDSSAREHTIHVTRDNGEKPYRFTISNDLTGFQVLDHMLRSDTAVMVGFEMAHGPLVDFLRNRTYTLYSINPLKIKRFKETVQVAGDKNDNIDALAIAEYLRSNMNRCRPMTQQSVEVEKLKHLSIVHARLTEEHARYLNKLHFAVREYFGVHEGLFGEFGGKTQLALLQQYTTFEDLSRATNEELTRFLQDHSYRNKIWIDKIITKIRAYKSIVSPDRAYAYPFEVTCLCTILGNLKASLERIEKEMVVIVAQHPLGHVFRSLPGAGTILSAKMLALFGDNTDRFTDANGAQCLFGTAPRNYQSGSYHKVVMRRACNKSARACLYTFAFASLRLSPWARAYYDAQRARGKTHSVSIRALSNKWVPRIFSMWKHGTAYDIAYKNRKIA

SEQ ID NO: 476697 - protein, 410 aa, unidentified
MELLHRRCCGLDVHKETVVACLRLVSDGKVTTEVRTFRTTTADLLRLSEWLAANDCTHVAMEATGVYWKPVWHILDDGEFELVLANAAHVKNVPGRKTDVNDAMWLAELLAHGLIRASFVPDTQTQEMRNLLRTREQLVREQSSHVLRVQKTLEDANIKLDSVLSDLMGKSGRAMIEALITGETNPAKLASLADRRVKASPEEFREALRGRVTKHHRFLLRLHLNQIDALDAATVTVDAQVEANLGPFRTAVDLIISIPGIKNLGAHVIVSEIGIDMSRFPSDAHLISWAGICPRNDESAGKRRSNRLRKGAPWLKTTLVQCAWAAVKKKNSYLQAQFYRIKARRGPKKAIMAVAASILTAIYHMLKDGTTYQDLGCNHFDRRSTDQQKNRLVKRLAELGYAVEITPIAA

SEQ ID NO: 476698 - protein, 317 aa, unidentified
MQITTIGFDIAKNVFQVHGIDVAEKVVVRKQLRRGQVHEFFKALPRCLVGMEACATSHYWARELTKLGHQVRLMPAKDVKAYVKRNKNDAADAEAICEAVRRPTMRFVQVKSAEQQSQLMLHRTRDLLMRQRTQVINALRAHLGELGITAAQGKAGLTQLLAIIAGSANERLPTEAQASLMVLAAELQAMRTLIASIEKRIIAHHRLDEASKRLRSIPGIGIVGATAIVATITDPKAFRSGRDMAAWIGLVPRQDSTGGKQKLGPISKTGRSLFATHPGGRSSFGVEARAAKAGEVSLAHAASRPQTVQGRGGRAGQ

SEQ ID NO: 476699 - protein, 412 aa, unidentified
MQVVHRVCCGIDVHAKMLVACLILANGEKQKRTFSTMTAELLQLRDWLVAVQCTQVAIESTGVYWKPVFNILEDALTVILINPEHAHALRGRKTDVKDAEWLADLLRHGLLQPSFIPPPLIRELRELTRYRESVVREQSSVANRIQKLLESGNLKLGQVASDALGVSGRMILKALAKGESDPRKLAALARGKLKEKSLSLEQALQGRLTGNQRFVLGELLSRWEQLEAADARVTSEIDKYVQANPKLARARELLDSIPGIGPRVAEVIMAEIGIEMASVFADAAHLASWAGICPGNKATGGKRLSGRTRKGNTYLRSALVQAAWGASLKKHCYLSSQFHRLVKRIGRKKALVAVAHSLLVIIFHVLQNDQTYTELGGDYFDRRHVEQQRDYYVRRLQMLGLKVTLEELPQAA

SEQ ID NO: 476700 - protein, 373 aa, unidentified
MSKVSKFVGLDVHKETIAVAVARGDSAAESLGSIPNDPDAVVKLVHRLGADDGLWCYEAGPCGYELQRLLSELGVNCIVVAPSLIPTKPGDRVKTDRRDALKLARLLRSGDLTAVWVPDAAHEAFRDLTRARQAAQEDLTRVRHRLTKLLLRLGVRAPATAWSKAYRQWLDALTLPQSLQQLVLDETRLAVAQGEQRVERLTAAITEAASQVSQAAPIAAWQSLRGIRLTTAAMVGAEIGDVTRFRSPRELMAYAGVVPSEYSSGGSTRRGRITKTGNAHLRFALVEAAWHYRHGPRLSKALKARQQGQPAEVLAIAERAQRRLNSRYRHLVARKTKQQAVVAVARELLGFIWAIAWAVHPDQRLRPAQRQAA

SEQ ID NO: 476701 - protein, 332 aa, unidentified
MSYQLFVGVDIAAKTATVQWRSQDGQWGTSEVIAQTPAAYATLVAQLGMLAAPQHTLVVMEATGTYWQRLAWALYQAGLIVSVVNPAQPCHFARMRLQRAKTDAIDAHLLADFAACVQPAPWTPPPTVCEQLHQRLALREDFLKTAAQDRNRLHALRHAAHPDPTLLARLEAHLAFLQAQVDDLTREIAALLETDPAWAAHARHLRSVPGLGPISTAWILVATHAFARCDSPEQAASFAGLAPHARDSGTSLHGHRSVGGAGHAALRHALYMAAASACRFNPIIHPFYQRLLARGKPKKLAQVAAARKLLHIAWAVVVKRCDFDPAFSVSGS

SEQ ID NO: 476702 - protein, 342 aa, unidentified
MQITTIGLDIAKNVFQVHGIDAAEKVVVRKQLRRSKVIAFFEALPPCLVGMEACASAHYWARELRKLGHEVRLMPAKDVKAYVKRNKNDAVDAEAGCEAVRRPTMRFVGVKSAEQQGRLMQHRTRDLLLRQRTQVINALRAHLAELGIVAAQGREGLKELLAVIADEKDDRLPIDARASLMVLAAQLQALQTMIGSIEKRIIAQHRASEESKRVATVPGIGTLGASAITATVTDPSAFRSGRDFAAWIGLVPRQDSTGGKQKLGPISKQGDRYLRRILVVGAIAVLRYAKQNPEKYPWLTQLLARRPFKVVAVALANKMARMAWALLAKGGTYRAPALAAAA

SEQ ID NO: 476703 - protein, 417 aa, unidentified
MKILALDLAKNKSIYLDYVTGGGDRRFGKVATNAGELEKLLRQCSPDRLVIEASPAAGWVCDLARAMKISIQVANGNDERWRWKTVKEKSDRKDALKLAQMSEMESVPTVHVPRAAVRQWRSLIEYRRSLVDRRTAMKNSIRAIFEREGLNLPSARKAWTKEALEGLKKQVSAAASGELWLFQVGCELEQLERVQGQIERVEAKLQEVGEQNQAVARLQTAPCVGPRLSEAVVAILDDPHRFRNARQVACYVGLTPRRWQSGQSDRQGHISKAGNRLLRSLLVEIAWLGVRNRTWMLEVYERVRRGSEKRKKIAIVAVARRLLVRLWAMLRDGTQWREESLPAKEAMDLSLCASSGCCEKGSGPTLKKDRPDNRRMVHVGAPVASQQSRILRVDRRNVTKKKRAGKVPACVVPACVG

SEQ ID NO: 476704 - protein, 367 aa, unidentified
MKKHTTMNKPVSATDVSVCTTVAVDLAKKVFQVAGEDAQGQLAYEQRIKSREAFQAFLQKLPEGVTVLMETGPGAQAWARLLQAQGNPVRILPAQRVAEHRSGAKNDRNDAHAILRAGRDSSIASVPVKSVAALAMQAWHRVRRGYVQRRTAMGNQIRGLLLEQGIALAQGDVGLKQGVTRVLEDARQPLPALLRELIDEMLNEWQRLGERIAALTGRLEACAAADPTAKRLMTVRGIGPITATALLAKQVEPERFANARQFAAYFGIVPDQHSSGQKVRLGKMTKRGDAYVRSLMVVGSHAVLKQLRPDSEHPDDRRLQRWLQRLGRKGAAVRLANRNLRIAWVLLCSEQTYQRKPNACREMEMSH

SEQ ID NO: 476705 - protein, 344 aa, unidentified
MDHFAGLDVSVKETSICIVDDAGKIVREVKVASEPEALLAVLKNLAYHFKRIGLEAGPLSQWLFSALAEAGLPVICVETRHMQAVLKAQINKTDRNDARGIAQMMRAGLYRPVHVKTIRSQKLRMLLTHRKLLQSKAIAIENDLRGTLRNFGLKVGMVGKVKFEARIRELVENLPDLAVLVEPMLIVRRTLREQIVILHRRLLAIVRDDEVCRRLMTTPGVGPVVALTYRATVDVPARFRKSKAVGAVFGLTCAKYQSGEVDRNGRISRCGDEMMRVMLYEAAQSMLRSKKWSWLKAWAMKIARHRGMKKAIVALARRLAVIMHRIWVDGTEFRWTREQATAAA

SEQ ID NO: 476706 - protein, 342 aa, unidentified
MKTKFIHFVGIDVSKGKIDVCLILNFEKSELFFSEFEQNKKGFAAFKKWLKEHAGKDLSQVFVCVENTGLYDDAVLYYLANNEISVCLENAATAKAAKRDQRQKNDKLDAKGIALYALRYHDEMELWDKPREVVEKIKQLLSCRSRLIMHLTALKQAQNEADSVKWSGVKLIKNNEAGIRGLQKDIEKIEADIWKLIENDATLLKMFQLLLSIPAIGKITAWHFICYTNEFKRVKSGKQLSAYCGVVPFKEKSGTSINKPARLPKRANFILKKLLHLCALTAIKMKGEFAAVYQQKLEEGKHVLKAINVIKNKLALRIAAVIRNEEPYKENYVYKLTVNRAK

SEQ ID NO: 476707 - protein, 318 aa, unidentified
MGGVNAAIEVGKQQLVVQLGSQGEQFSEANEPRAIKRIAKRLLQAGCERVLIEGGSYQSVLIAGLRAAELPVVIVNPRRVREFARSIGQLAKTDKIDARILALYGEQTQPPLRELPDEQSQALRALWVRREQLIEMLVMEKNRLEHAAEKAKAVRHNLCSHIDYLRKQVKQADNDLDREVRNSALWDKYEMLNSVPGVGPVLSVALLSDLPELGRLNRGEIAALAGVAPFNCDSGTLRGQRRIDGGRSRLRRVLYIATVAAVRCNPALKPFYLRLRAAGKPAKVALVAVARKLLTILNAMLKTKTAWRPPCPARPELT

SEQ ID NO: 476708 - protein, 348 aa, unidentified
MVIVGVDAHKRTHTLVAVDEVGRKVADKTVAATPEGHLEALEWAARWPERMFALEDCRHVTRRLESDLLAAGEAVVRVPTRLMAGERRAGRERGKSDPIDALAVARAALREPNLPVAQLDGEARELRLLVDHREDLVRERTRIQSRLRWHLHELFPGLEIAPKSLRRQHVLDDLAGRLADVEGTVALIARELVVRTRELTIRANELEREITKLVRRLAPTLLALAGCGALSAAKIVGETAGAGRFRSKATFARWNGTAPIPVWSGSPDRQRLNRGGNRQVNAALHRIAITQWRGVGPCGRAYVERRIAAGNSKTEAFRLLRRRLSDEVFRRLLADESANIHAAVQRAA

SEQ ID NO: 476709 - protein, 407 aa, unidentified
MLAVVVGEWTAEEELVFQRRQFDNTEAGIHQMRDWFVECHVREAVMESTAQYWRTVWLELEEKFRLHLAQAMSNRAPRGRKRDYADAERLVRRLIAGELVLSYVPDREQRLWRMLAREKHLARRARVQQVNALEAFLEQIRIKLSSVLSDITGVSGWRILEALAKGEPEPAKLAKLADPSVKCAPEQIQAALTAAPHLRAEERAVLRQFLDRIELFGKQIADNDRLLAVCLAQYQDAVTRLAEIAGLGADSAQQMIAEIGPKAEVFDSPAQLASWVGVCPGREESAGVSKSDRSPKGNRPMRRLLAQCANAAIKAKGSVFELYYRRKVAHLGHCQAVWAVAHKLCRVIWKVLHDGVRYEERGSRLNSKQEAKQLQRLKRQLRLLGYDPATLRRLQPPSTLAPGASMA

SEQ ID NO: 476710 - protein, 375 aa, unidentified
MDKYTTKYVGMDVHKETIAVAIAKEGRGEPVFYGEIPNNAEAIRKLVKREASNGERVSFCYEAGPCGYEVYHQLIDLGQRCDVVAPSLIPRKSGDRVKTDRRDANTLTRLHRAGELTPVWVPDKEQEAMRDLTRAREDMKAMEGHAKQRLGAFLLRHGKRYPGRSKWTQAYFRWLEGIKFEIPTQQIVFQEYVDTVKQMKGRVASLEAEMRHAVEGWSLAPVVTGLMALRGVDIITAMTVIAELGNISRFDSPRQLMAHLGLVPSEHSSGGRHQRGGITKTGNGHARRVLIEASWCYRLPARKTAHFRRRAEKASETVQAIAWKAQKRLCKRYWYLINKGKLPVEACTAVARELSGFIWAIACDVMGKTNACVTR

SEQ ID NO: 476711 - protein, 334 aa, unidentified
MVDTETGELIERRLEHGKGEAKKFYAELHPPVRVGMEATGYAQWFERMLAGLGHELWVGDAAEIRAAMVRKQKTDSRDALHILDLLLANRFPRIWIPSPAERDLRQLLRHRHKMVCLRTSLRNQLHALAMGQGVYRKRKLWTAGGRTELDALGLDPWASRRRRELLAILDQLDPSLAELDRAVGKEAEQRPAARSLMEQPGVGPVTALMFVLTIGPVERFRTSKQVVSYLGLNPRESSSGGRQRLGSISKQGNSMARFLLVEAAQTASRNDEELRRDYPRLKFRRGTAVAKVAIARKLAVRLYWKLRKHSSTVPPARMQGSSEHPVVDESLSSN

SEQ ID NO: 476712 - protein, 407 aa, unidentified
MEVLYPRCAGLDVHAGQVTACVRVAEGAEVVYHRRTVATTTRDLLTLADWLTAHACSHVAMEATGVYWKPVWHILEDQFILILANAMHIRQVPGRKSDVNDATWIADLLAHGLIRASFVPPTPIQDLRDLTRTRRQLVAEIARHTLRIQKTMEDANLKLTRVISDVLGLSGRAILKAIVAGETDPERLVDLTSGRLKASRAQLVQALQGRITPHHRFLIGLHLTQVEALEAAVAHVEGHLGDTLGPFRSAVTLLTTMPGLGETAARVLVAEIGVDMTRFPSAGHLVSWAGLCPRLDERAGKRHSTRVRHGAPWLKTTLVQGAWAATRAKHSDLQAQFHRIKGRRGPKKAIIAVAASMLTAAYFMLRDGVEYRDLGGRYFEDRNKQQVTDRLLRRLRDLGVSVEVKAA

SEQ ID NO: 476713 - protein, 392 aa, unidentified
MVFVGIDVAADKHDCCILSPEGVVLNTFSFSNDKSGFDYFLAIVTRHCGNSDLSDAKVGLEATGIYSTNLTNFLLAKRLSVKIYNPLQVNLLRKAQSLRKTKTDKSDARFLAQLLFSDDSKPYSQPLHHISELKTLTRSRHRLVEMRSKLKMSVSRLITILFPELPRIVWSVNQKSCYALLLEYPTAKSIAESHLTKLTNLLCVNSNGRYGRDKAIEIRELAKQSIGLDSRATGYELKQTIRLIQNIQSEIDELEAEIKAVMLEIDSPVLTIPGVGYILGAIILAEVGNIENFDSPAKLLKFAGLEPSVYESGKYKASDTPMVKRGSKYLRWALLQAARLVAYRDTTFRAYMAKKRSEGKHFFVATSHVAKKLVRVLFHLLNSGQSFEPQTV

SEQ ID NO: 476714 - protein, 328 aa, unidentified
MHFIGCDVSKASLDMAGRKCTSRRLFNTGKVTNTRRGWQDLVHWTQQHYGAGSEPICVVLEATGVYHLKVAGHLVCAGLKVIVVNPGRAAQFAKSINQVNKSDSLDARSLQRYGEQLDAPHWFNPDTKEINQLKALLSRLTQLNKDRQRERNRLESCAWIEAGEILKVPLRRSIKRLEKDRQQIQRSINELIRNCPQMHHNQKLLYSIKGIGPQASQWLLPLLHSGRFNSAREVAAFLGLTPCHRQSGSSLKSRGQLSGRGNKNIRSKLYMPALSAIQYNPEMKAFYEKLLTRGKTKKQAVIAVMRKLVHVCYGVINTQTLFIENYAA

SEQ ID NO: 476715 - protein, 347 aa, unidentified
MNFYNNTHPYYCGIDLHARVLYVCIIDQAGNTCLHKEISADPEQLRKLLNPYIGNVVVGVECMHCWYWVSDFCDEIGVDFILGHALYMKAIHGGKAKNDRIDSYKIAKLMRGGNFPLAYVYPKEMRATRDLLRRRTKVVRHGADLKAHVSNTTSQYNLPPNKVNLKNVCAREELSKTFPDNVVQKNVDLDLAIIDCYAKQLSKIEWFIEQQAKQHKPIHLHLLKSINGVGRILSLTIIYEIGDISRFESVQNFASYARLVKCKADSAGKTYGTQGNKIGNAHLKWAFSEAAVLYLRGNTKAQAYLIKLQKRMSKAKALSALAHKLGRCIYFMLKNETVFDEKKFLSG

SEQ ID NO: 476716 - protein, 392 aa, unidentified
MFFLGLDIGKNTHVASLIDDNGKTVFKAFSFPNSTIGATSLLDKLTPLSNEIEIGMEATGHYWLALYSFLVEHGFVIHVINPIQTDGWRNATEIRKHKTDIIDSVIIADFIRYGEFLETSLADEDILSLRNLTRFRNYLVSSIGDLKRKTICILDQIFPEYESVFSNIFGKTSKEILLHFSSPAQFESITSEQLETALEQVSFKKFASKKISCISNIAKTSFGITFGLQSLTLQLKLLIQQINFIEQQVHDVEIQIKQLLHKINTPITTIPGIGDIIGATILAEIGDIERFSNPSKLVAYAGIDASVHQSGDYISTNNKMSKRGSPYLRTALFRAALIASVHDPVFKAYYQKKRSEGKHHLTCLGAVARKLCYTIHAILKNNCEYKVQLPTK

SEQ ID NO: 476717 - protein, 460 aa, unidentified
MAKPSDALRPQPAVPVALAQLTPHAAGIDVGSSSHYVAVPADRDEHPVREFPAFTADLYRLADWLSACGVETVAMESTGVYWIPVFQVLEARGFEVKLVDARQLKRVPGRKTDVADCQWLQQLHTFGLLAGAFRPDDQVCVLRSYLRQRAMLVTYAGQHVQHMQKALVQMNVHLPHVLSDLTGATGLRIIRAILAGERDPHRLAALRDASCKQPEAIIAKALQGDWRVEHLFALQQALDLVATYQAQIAACDARIEAQLQRFDDRSDGAPPPKGRRPRKDRHDLGFDATAALYRMTGVDLTAVNGLEAHTVLKILSETGVDMTRWETDKHFGSWLGLAPNNRVSGGKVLSRRTAPSANRAAAALRLAAQSLHHSKSALGAYLRRKAAQLGMPKAITATAYKLARIIYQLLSQGTAFVDPGEDYYERQYRARVLKQLTRRAQELGFRLVPQEEASLQPAHA

SEQ ID NO: 476718 - protein, 321 aa, unidentified
MKKHTTAKKKHQALTKVTKTKKKQVVEMAASQRLTIGLDLGDRTSRYCILNEAGEVVSEGQLLTTQTGLNALFEKMPSSRVALEVGTHSPWVSRQIGGLGHEVIVANPHKVKRITQSVRQNDRIDAQKLARLARVDPQLLAPIRHRGAEAPADLAVIRARAELVAARTGLINYARGLAKPMGERLQKCDADQVEGALAQPLSAAAQVVIGPLLKSVEAIREQMGVYDRKIEEIAQRYPEAELLTQVYGVGTLIALTYILTIEDAQRFPHSRDVGAFLGIQPQAAGQRRQPARAGDQQNRRSFVAELFGVGSALQLAEGSAG

SEQ ID NO: 476719 - protein, 385 aa, unidentified
MQQNDLSRSYVPFKQDNTLATVLEMGSKSWLLAGLVPGVKRQPRKQLSIDPERLLAQLHRWRDEAIKAGHAIERIVVGFEAGRDGFWLARWLRARGIEAYVIHASSIPVPREHRRAKTDRLDTEMLMRALLGWLRGEPRHCHMVAIPTLAEEDAKRTSRERESLVDEQTRLTNRLKSILVQLGLPNVNIKLRRTAKLLDQLRTPEGELIPPLTLAELRRGLERLAVIKAQIKAIEQARLQRLKAEPTKGSHPMVLMLAKVLGVGIETADRLVHEVLSRNLRDHRAVARYAGLTGSPDESGTQRREQGLAKAGNARVRRSMLQLAWRWLLHQKNSDLAKWYRARTADGRKDTRKIMIVALARKLLIALWRYVHTGEVPGGVVLKAA

SEQ ID NO: 476720 - protein, 345 aa, unidentified
MLTNSLKIIRRFTVSNCIGIDVSKASINIHIAKNNQDLVLENSLKGFKSLLSKLKKIYKKEIENIIFIFEPTGSYSEALRKYCSEKQIKCFIINPKQFSNYAKALGVEVKNDIEDARVLSKALALAKEGQVKVPLVNKDVEQIKELMSFYKFTKKQTTQQSNHLESLTSKDGDKFSIKELQKSIVASKKKELRIIEQVQTLIDSTDEYRIAYENIISIKGVGQIAGIVLLHLFLKYPEANQRQITSLTGLNPIYRQSGTSIQSGYRIAKTGAGLYRGTLFMATLSAIQYDKKFKAIYNRLKEKGKHSTSAQIAVMRKIILLAHSLYKNNRKYDENFNSQEASNMQ

SEQ ID NO: 476721 - protein, 452 aa, unidentified
MLTSLVTNDQREGMEMNQAERPSSPVDASSFQVVVGIDIGSQTCSMCTLTPDKRQVIKPTEFANALAGFGVLQEKLEQLGVPPEQVLIGLEATSRYGENLYHFLESRGYQLCLLHPRQTHQFAQQRGLRAKTDKLDATTIARVLLSGEARRGYVPSDLVATYRELVRLHTQLADEVARYKNEIQALLTVLFPEFSQVFANPCRATALALLKRYPSAHAIASAGVEAIASKLHELAPRNYGRSTAEHLVSLAQHSASQGIALAARSISLKMVCDQLEHTQANMAQLEGEIDKLLETDAGAKGLTSVPEFGHKTVAVLRAELGDVTRFQRTDQVVAYAGLDIEVKESGKWKGQAKLSKRGSGRLRRILYMAAVRCIRLPGSAFGAYYHRLVARGMKKRDALMAVMRKMLSVAYRLLRSEETYDPTKVCAVLVTQPVESPALHTPSSAKLVATGA

SEQ ID NO: 476722 - protein, 409 aa, unidentified
MHETQPVVGSGDVVVIGVDPRKASVTIEARDTREILRASGTFPTTTAGYRAMIQVARQCPRRIWAVEGARGVGRALVARLLAGGERVVDVPAKLSARSRVFDTGQGRKTDAHDAHAIVMVALRDHQLREVVIDEDLEVLRLLVDRRDELAAARTQALNGAHRLFAELMPGGAPTKKSVTQYQALLAGIRPRDGAGRVRRRMLAEELTEARRLEVRVKEITAEIKAAVLARGSHLMDLPGIGPAGAGRILADVGNVARFPSRHHFASWTGTAPIDASSGAHQRHRLSRAGNRRLNHVLHIAATVQMRHHDTAGRVYYDRKRAAGKRPLEAMRCLKRRLSDVVYRQLVMDAVGVQMAKIEAGPGGHSGATLQSSAAGLPPHTGTSDQPLPGPATTTLDPPIHSRQVPITAG

SEQ ID NO: 476723 - protein, 341 aa, unidentified
MSYIGVDLHTNSFTAAYRTRQGRLRVATFGITEMSEFRKSLRRSDELAVEATGNTAWFVKSVRDRVKRVVAVDTHKFEVIRRSVKKTDKRDAKTLALFLSKDMLPEARMKTEKNAQLHSLAATRDKLVKQRTALINKIHNVLNRYGIKFKKESLCTEKGLRSVFSFDWDAIVKMELEVLVDQIRSLSSNVKKLDDQITEQGSKLKGHKNLASIKGIGSRSATVLLSVIGDVNDFADEDKLSAYFGIVPKVKDSNETIHHGRITKHGSKLGRTTLVQCTLAAKRYSPYLRNYYERIKSHRGSGKAIIATSRKLLGIIYTTLKNDWIFEDFPNFVIANSCVKK

SEQ ID NO: 476724 - protein, 316 aa, unidentified
MNTLSNFEINVGVDTGKKQLDIYIRPLAIFFKVENNPQGIKEAVKKIKLHAPSRVIIESTGGFETLFVEACQKAELPIMIANPLLVRRFAAATGKLAKTDRIDAEIIAFYGEALKPRLSAVKPEQLSLMSDLLSRRRQLKEMATMEKNRLAIMPKSFHKDIHQLLKAIEKQVERIDAQLDELIENTPEWHQLSALLQSTPGVGKVLAYTLLAELPEIGQLSSKQIAALVGVAPMNKESGAYKGKRQIRGGRQQVRTVLFMAIMSAIQCNSVIKSYYERLKLGGKTPKVAMVACMRKLITILNTMVKKNTYWVANPI

SEQ ID NO: 476725 - protein, 412 aa, unidentified
MQVLYSRCCGLDVHQKTVVACVMITQANGKVDKSICTFATTTAALVALGDWLASLEVSHVAMESTGVFWRPIYNVLEDQFELILANAHEIKALPGRKTDVRDCEWIADLLRHGLIRPSFIPAKPVRVLRDLMRYRKSLVYQHTQQINRLHKVLETANIKLTSVVSDVWGKSGQSMIKAIIQGENDAQTLTELARGTLRGKLPQLQEALAGRIQPHHQVLLQQIFAQLQFLESSMQQVLQEIEAQMEPYQAVVELLLTHPGVQAVAAMGFVSEVGIDLSRFPSAKHFASWIGVCPGNHSSAGKRKHGKTTKGNPYLRALLAEIVWAISHTKDNYLSAQYHRLARRIGKTKAIVAVSHTVAVNFYHMITKRIPYQELGANYFDTLDRERLTKHTVKRLEALGYEVTLTPKEVGA

SEQ ID NO: 476726 - protein, 339 aa, unidentified
MLYVGLDVSVARTSVCVMDAAGQVVREQCVASTPEAIAAAIKASGGAVERVGLEAGINSAWIARGLLDAKLPVIVIDATHAAAALKTGFRNKTDKNDARGIADLMRVNKFRAVWVKSVAAQRDRALLAVREQLRRQSLDTRNMIWSILQVEGLKPPKLTNPAFQSLVVKSLDDPALAPLLRPLVALVEHLDSQVGGLDRQIAARAKAQAVCKRLMTVPGVGPLVALTYTASVDDPARFRDSRTVGAHFGLTPRRFQSGEMDWSGGISRAGDADVRRALYQAANVLIHHSRGWCALKSWAVRVAKRRGLSKAKVALARKLAVVLHKMWTAGEDYRLKAVA

SEQ ID NO: 476727 - protein, 411 aa, unidentified
MSTQALGWDIHRKFSKVSLMEKTAEGEIRVIERARLEHADRDAMRRWLSRLPEQTPVALEAAFGWPWIADFLEDLKLDPHLGHPPALKVLAQHEAKSDRCDGDRLGKFQLRGIFPESYLAPPDVRQIRERTRYRMALSGLRSSVKNRVHAILHRFGILHSFSDLFGKQGRRFLEQLELPSASRAVLTSSLEILDEVVRHIQDVEKWMENNLEEDEIVRLLRTIPGIGLILAHVIRAEIGQISRFPTARHLRSYAGTAPLSDDSADRHGARHCSPACNHALRWALIEAVTGMLLTTGEKSLRLRRLHTRLTHGGKSNKNQAKVALAGELAELVFIIWKKRTPYEAMPPARPGSIQKEPAREPAREPAREPRHEENQENQENQENQVSANMRSDQSCHPIARRGTSGAGQAHL

SEQ ID NO: 476728 - protein, 372 aa, unidentified
MTSLIYVGMDVHTTSYTLCCYSMESDSIFAMVKIEPDYHNILRYLERVRKNYSEKCKFLCGYEAGALGYTLYHQLTNKGIECVIMAPSTMQKTNKKEVKTDKRDAIKIAKGLAYNSYKAVYILDDEDNAVREYIRMRDDHNSTLKRTKQRISAFCNRHGRNYTEGSKWTQKHLRWLEKQDFGSPTLQETLKEYLILYYQAQSKLELFKQRIEEFANQERYQEKVSKLRCFVGIDTHTALALIVETGDFIRFKKAQHYAAYLGLAPGENSSGSTIKRTEITKAGNSHMRRLLIESAHSYQRGTQGKKSKRLTNRQFGNNSSVIAYADKACERLRRKYWRIVLRTQKKNTAVTAVARELACFVWGMMTDNISQV

SEQ ID NO: 476729 - protein, 385 aa, unidentified
MDKSSTLFVGLDVHKDSIDIAVADAPRDGDVRHVGTIGGDLASLDKALRRLVSRGQPLHIVYEAGPCGFVIWRHLTRQGLHCEVVAPSSIPRAPGVRIKTDRRDALLLARLARSNDLAVVRVPDAADEAVRDLVRAREDAVREQRNGRHRLKALLLRNGTPYSGKSSWTAAHLRWLAAIKLAHAAQQIAFQEYLHMITEATARIARLEQALRDALPAWHLLPVVQALQALRGVQLIAAMTLVAELQDFLRFESPRQLMAYVGLVPGEHSSGPKRRQGSITKAGNSAVRRMLVEVAWHYREGPRVSPIIAKRHDGLPTALTDIAWKAQTRLHAKFKRLLARKVMKTKAVVAVARELSGFVWAIGREVQTSGWRGTADTGTPQSAAH

SEQ ID NO: 476730 - protein, 341 aa, unidentified
MGQAHTIGLDIAKWIFQAHGADASGRVVFRKRLVRAKVLAFFAAQPPCTVALEACAGAHHGARELGKLGHTVRLIPPAYVKPYVKRHKNDMADAEAICEAAQRPSMRFVPVKTEEQQANGVVFRARDLLVRQRTQCINALRGHLSEYGCVFPQGITHAAAVIAHVEDPDSAVPESARAVLKVLIGTFQALEAQIQALDAEITQRAKADPVARRLMTIPGIGPIAATAITALVPAPEGFRAGRDFAAWLGLTPLQKSTGGKQKLGAISKMGERTIRRLLILGASAVVRWAGQRGTPAGSWLARMLARKPKMLVTVALANKTARIVWALLVKGGVYRAPAPAA

SEQ ID NO: 476731 - protein, 412 aa, unidentified
MEILYAICCGLDVHKDSITACLRRLGAAGQVTKGLRSFGTTTGALLTLCDWLVEAGCTHVAMESTGQYWKPVFQILEGHFAQVLVVNARHIKALPGRKTDMLDAEWIAQLLQHGLLRGSFIPPAPIRELRECARYRTQVIRARADEANRIQKLLEAANLKLGSVASNVLGVSGRAMLAALVRGETDPTALAGLAKGRLRKKQDQLVAALTGRITPGQRALLGQQLAHVEYLDRAIAELDALIATQMAPYQAEAARLQTTTGIDTRTAEALIAELGVDMAVFPSDRHCASWVGLCPGNNESAGKRKTGTTRKGNKWLRSALVAAAWAATHTRTYLGAQYHRLARRRGKKKAIVAVAHSLLVIAYHILKEGTVYRELGHDYFDKRDTVRLQRRLITRLESLGLRVTVEPLPQAA

SEQ ID NO: 476732 - protein, 326 aa, unidentified
MPTAQKIVGVDVGKEKLDICYPDGEKETVRNIKSCRTKVIKTAARINAIVCFEATGPYDEALAEECLARGVRAVRLDAWGARRFAESQGRIEKTDRIDCEIIRDYAASLKDEKLHFIKPRSEAQKRLKKNVCVRMNLMKARAIVYNQLEHIHDRESRRHLESSIAKLDREIARIETECDKAIADDERMKALSGRFLKVKSIGPCLVRTVFAYCPDIGEFNSKSIAKMCGSAPIDNESCTIRHKAKPKRGRSDLRKVLYMAAVSASRCNHILREFYRRLVARGKPRKVALTAVARRIAILLNNIAKYPDFVPALDPKDGAGAESRKR

SEQ ID NO: 476733 - protein, 424 aa, unidentified
MKVTYQTCCGVDVHKSFLVATIIKTTAGIEPSYQKKRFSTFNNSILDFKSWLLENECHDVCMESTGKYWVPVFNLLEDQINVTIANPKWVKAVKGNKDDTKDSKWIGDLFRLGLVKSSYIPCRLIRILREYTRYRYKLVSCRSSEKNRYQNALTVCNIALDSVVSDIFGKSSSSIIDYLLEQSGTTINHEEIASKLLKSLKSKEDAVIESIEGYQMTDAQKYRMRLIRAHMDYITAEINDIDKQIESLISSDPDYDKAIRFLTTIPGVKRDSAITIISEIGIDMSQFCNSKRLCCWAGLTPGNNESAGKKKSVRITRAGVYLKPALVQCAHAAVKSDKSPYYKTKYESLVKRRGKKRAVIAIARMILIAIYRMLSTGEVWNPSDLYKIDMPAPLAEKQKAKAIKQAKKLLQKEGLLPPDEPLAS

SEQ ID NO: 476734 - protein, 381 aa, unidentified
MTVLSLQLVVAHLFGPSQGEHMTSHSEPTSIAVIGGVDTHKDIHVAAVVDAHDRVMGTRSFPTTRQGYRQLLAWMRTFGDLQRVGVESSGSYGAGLLRALQQAGVTVLEVTAPDKQDRRKRGKNDDLDAQNAAHAAFAGKRTVTPRSRDGMVEALRVLVACRKTAVTARRVALQMIHNTIVAAPDGLREQLRAMTRMQLIRTLAAWRPDLSAFRDVEGAYRISLKALGRRYLELHDEIADHDTMIAAIVTDLAPNLIARNSISYNGAAQLLLTAGGNPERMRSEASFAALCGVSPVPASSGKTVRHRLNRGGDRAANSALHIIAIGRLRTDPRTKAFVARRVAEGHSKLDAIRALKRYIAREVFALIMQRQKEINASRITA

SEQ ID NO: 476735 - protein, 363 aa, unidentified
MSEDKYIGLDVHQTSVSVAVLDREGKLSMECVLETKASTIVEFIQGVRGSLAVTFEEGTCAAWLHDLLQSHVSRLVVCDPRKNALLQDGSKSDRIDARKLAELLRGNQLSPVYHGDHGVRTLKELARSYLILTQDLTRVMTRIKALYRSWAIPCSGTRVYATRHRSEWLAKISQTGVRRRAERLYQQLDLLRPLHQQARCDLVDESRRHPAVKWLRQIPSIGPIRAALLVALLQTPHRFRTKRQLWAYSGFAVETHDSGEYRYVRGKLLRNRERIRVRGLSDNYNRDLKNLFKSTAISASTRPGPLRDFYLALLAKGMRPSMARLTLARKIAAITLTIWKKGAPATPLGWLYDSETLSQKCGK

SEQ ID NO: 476736 - protein, 342 aa, unidentified
MQISTIGIDIGKNSFHFVGFDARGGIVVRRRCSRTQLIRALATVPPCLVGMEACCGAHHLGRILVAQGHDVRLIPPQYVKPFVKSHKNDLLDAEAIGEAVQRPTMRFVPLKTMEQLDLQAIHRLRTRLVARRTAVINQMRGFLLERGVTFPIGREALVKRFPEVLDNPALGLSVRFCRLLQQLRDEWRLLDDDIEDVDQEILSLAHDDEACDRLMQVPGIGPLTATALVAAVGNGAAFAKGRDLAAWLGLVPRQHSTGGKTVLRGISKRGNAYLRCLFIHGARSVCRHHHQKPHRLGRWLTSLEARAHPNVVVVALANKLVRTAWAVLQRNTHYDGRLLANA

SEQ ID NO: 476737 - protein, 372 aa, unidentified
MKYSTVYVGMDVHKDSFSLCCYTNEKEQAEFPQKVEGHYSKVLNYIEAMRFHYGDDALFICGYEAGGLGFKLYKDLTARNVKCVIMAPSTMSTPKGKRIKTDSRDAALIARCLAHHDYSAVHIPTEEDEQVKEYIRMRDDHKAGLKRVKQQIQAFCLRHGCQYSSTKNSWTQAHILWLRGLKLDGLYAETLEEYLLEYDYLTQKLERIDKRIEGLATDDEYWERVHRLECFIGIKKLTALSIVVETGDFKRFADASQYAAFLGLTPGENSSGGSQNRLGITKAGNAHLRTLLVEAAQSYTRGQPGHKSKLLAARQEGNSPAVIAYADRANERLRRRYYRLTLNHGKKANVAKTAVARELACFIWGMMTDNIA

SEQ ID NO: 476738 - protein, 345 aa, unidentified
MQVTTMGIDLAKNVFQVHGVDASGKVVVRKALRRSQLLPFFEDLAPCLIGMEACSSAHHWARELNALGHTVKLMPPSYVKPYVKRGKNDVADAEAICEAVTRPTMRFVPVKSTDQQAVLMLHRTRALLMRQRTMVVNALRGHLAEFGLVAAQGGKSLAELIESVFEGSGTDDDAVPPLARRALAPLVAQLRQLQAQIKAIEVELLAWHRATDASRRLETIPGVGFITATAIAATVTDPSHFTSGRQFAAWLGLVPRQNSSGGKERLGSISKMGDRYLRTLLVVGATSVMRYARSKNAAGAQWVNALLARRPARLVSVALANKTARIIWAVLVRGETYRAPASAAV

SEQ ID NO: 476739 - protein, 391 aa, unidentified
MQALLECCCGIDIHKERVFACIITGKPDEESVIIEENFGTTRAQLQNMCQWLLKHNCYYVAMESTGVYWRPIYEACEEFLINFKCLMVVNAHHMRNLPGRKNDVKDAQWVATLFRHGLLEPSFVPERTIRNLREFSRLYRSFVKERVSYVNRLEKFLQAHGLKLSSVLSNIIGISGRRLLDLLVQNGQLTLLEVQSSISKRVRKSPEEISSAVSGFLDFAERLLLKTLLSKIDECDAQIAQLHQHMLEIAAPYRLQLEQLDSIPGIDVVAALAITAEISATPQEHFDSSKKLVSWAGLSPRNDESAGKVKSRKITKGNPYIKSILCQSAWSAVRVRKSPFHAWFWSHQGKLGKKKAIIAVARKILALCYKLLKSDGFYDPVVALRPIQSPS

SEQ ID NO: 476740 - protein, 352 aa, unidentified
MDEKYVAMDVHKASVVIGVRDGTGKMIARAMVETKAQTLKDYVRGLSGTIHLTFEEGTQSAWLYDLLRPLVAECIVCDPRRNKLLEDGNKSDEIDVTKLSELLYLGRLRPVYHGAQGTRALKELAHNYEALVKDQTRVKNRLKAIFRGRGISYEGDEIYDCQEAEQWLAKLSERGVRERARQLYQQLAQLAEWVGGARRQMLAESRRQKAKKILQLIPTLGEISVAQLIATVDTPFRFRSKRQFWTYCGLAVVRHTSADYHFEQGELRRRLKPGPTRGLNRNYNRRLKRIFKTAAQTGSTKGPFKSYYQGLLGRGLSPELAQVTLARKIAAITLTLWKKGERFDPEKLVKSD

SEQ ID NO: 476741 - protein, 344 aa, unidentified
MDHIGIDLHKRESQICMETSDGEIIERTIQTTRDRFAAVLGGRAPARILVEASTESEWVAQCLEALGHEVIVGDPNYAPMYPERRRRVKTNRRDARTLATACRLGAYRPAHRVSAEQRRIRQQLTVRDVLVRSRTRAIAMTGALVRGEGLRVRSGAAEQFLTRLDALPLPPALHATLGSTRALLTTLDAEIRQADAAIEQIAVQDPVVARLTSAPGIGPVTAAAFVATLDRADRFAGAHQVESYLGLVPSEDSSGDYRRRGHITKAGDPRMRWLLVQAAWAVWHSKHGDAQPLRVWAQRIAHRRGRSVAVVALARRLAGMLFAMWRDETPFEVARLKRRAMTAS

SEQ ID NO: 476742 - protein, 457 aa, unidentified
MENYYMGIDVSKGYADFVILDAKKDVVEPNFQLDDTFGSHCKLFEILKRFFDRHSGSVLFAAVESTGGYENNWLHSLGGFQGTLDIRSARLNPLGVRANSKASLRRVITDKISARDVAEYLIAHPEKVTYQQEDSLAGLRRQWGFVRLLVKQKTQILNQFESLLYTANPELIAYCQSGVPAWLLKLLKRYPTAVKLAKARATSVARIPYVTADRAKELIEQAKKSVASATDETTGNLVAAMAEQIIRMEETIRIQAQQMAKRCAIPEVALLKTIPGISDASAIGLMLEIQSVKRFSSVKKLAAHFGLHPAFKTSGDGTSGVRMSKQGRKEPRKILFMVAMVSLTANPHIRKIYEEHTEKGMEKMAAIGLCMHKILRIIYGMLKNNQAYDSQVDQKNRENRTARKATHTVKNVNRRYETFDQQAPISRRQSNKRKEWKQSQGDNITQCGIGVPIPSAA

SEQ ID NO: 476743 - protein, 323 aa, unidentified
MSSFVGVDVAKNTFDIATHLPNGKHKTKAKLANDSKGFKEFETWLQKQVEPSALIVMEATSVYHLELAEFVYNKGYRVCVVNPATTHAYADSELRRIKTDKSDAKLIADFAREKNEKLALWAPEPLKYRQLKALVRRLDDLQEMERMERNRLDVSDEKVKASINSVLQHIEKEIAETHKAIKNHIDDDPDMREMRDLIVTIDGIGEKTIERLLAELGDLRKYDDPRKLVAAAGLNPKLHDSGKLKGRTTISKIGSVRVRAGLYMPGLVALQHNEAIKAMKDRLKANGKAPKQIICAAMRKLLHFVYGVLKSGQPYDPKLALAR

SEQ ID NO: 476744 - protein, 329 aa, unidentified
MDIKEVIGIDASKLTLDCCIHGSGLQKVFSNNSKSIGQLADWAISNSCSEKKHVLFVFEDTGLYTFELISFLNDGNYYMFVGSGLEIKRSLGIARGKDDKADAKRIAQYGYRIREEITPYHMPSKSLVTLKRLMSLRRKLVTHRAGYVANLKEQKRVLKDEEVLFAAQQAVIDAIAVQITGIEKEIERIIAQDPKLERLQKLLTGITGIGKVTARFLIVYTVGFTAFENWRKFASYVGIAPFPNRSGTSIKGRNKVSNLANKEGKALLHMCATCAIRCNPEMKVYYKKRLEKGKHTMSTLNIIRNKLLARAFAVAGRGTPYVDTMKYAS

SEQ ID NO: 476745 - protein, 343 aa, unidentified
MNKLNVIGVDLAKNVIQVSVLSPSNRELRNSALSRRKFAEFLAKQRPGLVAFEACATAHYWARAAQRHGHEVKIIPAKAVFPFRQGHKTDENDALAVAEAARRPNVKLAPLKTVEQQGMQAVQRSRELLVHERVSLSNHLRGLLMEFGIVIPQGFASLYRRLPEILEDGENELPDLYRPTLNLLYGRLCDLRNDLEQLNGEIETLVRQHPMCQRLTELEGVGPISSVLLYATLGTGEAFANGRQFSAYLGLTPKQFSSGGKVNLVGISKRVANKRLRAVLIQGARAYVYHMKEPKTTKDRWLWTIVERSGKCKASVALANKNVRTAWAMLTQNTEYQRYPLAA

SEQ ID NO: 476746 - protein, 350 aa, unidentified
MLIIGVDFHSRFQQIAMVDTESGELIERRLDHSNGEAQKFYAELQKPVRVGMEATGYAQWFERMLAKLGHELWIGDAAEIRAAMVRKQKTDARDALHILDLLLANRFPRIWIPSPAERDLRQLLRHRHKMVCLRTSVRNQLHALAMGEGIYRKRKLWTARGRTELEGLGLDPWASRRRRELLAILDQLDPSLAELDRAVAQEAEQRPAARGLMEQPGVGPVTALMFVLTIGPVERFRRSKQVVSYLGLNPRESSSGGRQRLGAISKQGNSMARFLLVEAAQTAACYDEELRRDYQRLKFRRGTAVAKVAIARKLAVRLYWKLRKQNSAVPPARMQGSSEHPVVDASLSRN

SEQ ID NO: 476747 - protein, 352 aa, unidentified
MLISHYIGFDVHKKSISYCIKTADGRIVDEGRIPATRQALREWAQKRTAPWHGAMEATLFSGWIYDTLKPFATLLQMGNPSMMKAIGAAKKKSDKLDARTIADLVRCNLLPVCYVAPPEMRDLRRLLRYRNLVVGQAVQMKNRMSGMLMEVGAEYNKRRLHGKEYFNELLDRLDEEVPESVKQLLQLSRGALEMFAATQRQLLDRLNKDPLLVKRVKRLQSIRGVGEVTSLTWALEVCDPKRFPSIADAVSYCGLTSALVSSADKQKRGPISKQRNAHLQTMLIEAAKLAPRWNPQLAAVHERELKSGDCNRATLAVARKLVAYLLAVDKSGKPFEVRNPPVKEMEEVRQMA

SEQ ID NO: 476748 - protein, 371 aa, unidentified
MNSILYVGMDVHKENYTLCCYSFDRDKVEYRQTVPSDYRLILKYLEQVRRKYPEEVEFICGYEAGCLGYSLYHQLTDHGVKCIILAPTTMGITNTNRVKTDRKDAANIARCLAFHTYSAVYVPDGEDNAVEEYLRMRDDQKLALKKIKQQITAFVLRLGKQYTGGKSLWTENHLKWLRGLDLTLLEKETLQEYLITYDYLTDKLERLDARIEELARNERYGERVRRLGCFIGIKPHTALSLLVEVGDFRRFEKAPNFAGFLGLVPGEDSSGGGRNRLAITKAGNSHLRRLLVESSQSYSRGTIGFKSKELKKRQEGNPPEVVAYADRANERLRRRYYRMTLKNGAKRNVAIVAVARELACFIWGMMTDEIT

SEQ ID NO: 476749 - protein, 377 aa, unidentified
MKQDSRFIGLDVHAATIAVAVAEPSGEVRTLGTIPNTPEGVRRVLAKLGGRERLRVCYEAGPTGYALYRDLTALGVRCEVVAPTLVPVKPGDRVKTDRRDAERLARSYRSGDLTAVWVPDAAHEALRDLVRAREAAKRDQLRARHRVSKFLLRHGRRAPAGVTAWSARYRSWLQGVHFAHAAQEATWGDYLHEVDHATDRIARLERTLAAMVEMAAPALRAVIAALQALRGVAALTAVTIVTEVGPLSRFAHPRQLMGYSGAVASEDSSGPRTRRGAITKTGNAHLRRVVVEAAHAYRHRPALGHPLRVRQRGLDDTVTAIAWKAQHRLHTRYRRLLGKGKPVPQVVTALARELLGFIWAIGLHVERGLPGAAPAAA

SEQ ID NO: 476750 - protein, 452 aa, unidentified
MCLEDRPILEPNAAGIDIGAREMFVAVHSERDQHPVRVFPTFTEDLEKLAEWLVSCGITTVAMESTGVYWIPLYDVLEKYGLKPCLVNARSMKNVPGRRTDWHECQWLQFLHSVGLLRSAFRPEGEVCSVRVLMRHRNELVLMANQHIQHMHKALTQMNLQIHHVIDDITGLTGMAIVDAILAGERNPAVLAELRDRRIKASEETIRKSLVGNWRPEHLLTLRQSRNSYQHYQAQIAVCDEEIEKLIVEFTPWVDPEERPLPPDRKKKQRRNKNKLGNPKTGFNLRTESYKLFGVDLTQVPGLAKNILTLFTEVGRDMSKWPTAAHFVSWAGLCPDNDISGGRVLWRGLRHTHHRAGELFRLAAMGLHHDQTPMGGYLRRMKSKLGPAGATTATAHKIAIIFYTMIKNQVEYDATLWAEADAQREKRFQEKLKRQARQLGYKLVPIEEQPAA

SEQ ID NO: 476751 - protein, 413 aa, unidentified
MQVVYERCCGLDVHKKTVVACRLLSQQKGTVEKSIRTFATTTNGLRELDHWLAEGQVKQVALESTGIYWRPIFNLLEGRYEIVLVNAQHMHAIPGHKTDIKDSEWIADLLRHGLLKASFIPPKPIRELRDLVRTHTHLMQERNRHMNRIHKILETANIKLSSVVTDIVGKSARQMLEALIAGESDPAQLAKLARGRMRPKIAQLQQALQGHLEPHHRFLLRETLAHLDFLQLRVGQLEQEVAERLSPFEKSLALLMTIPGISRRSATILISELGTDMTAFPSAAHLASWVGLCPGSHLSAGKRRNGKPTKGNRYLRSVLVQIAWVLTRMRDNYLSAQYRHLRPRLGEKKAVVAVAHSVLVIVYQVLAKQEPYQDLGPDYFRRQDKEQQARRFVRQLENLGYHVELASPEEVTA

SEQ ID NO: 476752 - protein, 366 aa, unidentified
MKKISTVARRRNKIFNEPKLTIGLDLGDRASHYCILDEAGNVILEHSLPTTPKGIHQVFSRIPRSRIVLETGTHSPWVSRQLAQLGHEVIVAHARNVRLIGESSRKDDQLDARTLARLARIDPGLLGPVRHRSAKAQIHLTVIRARATLVSARTALVNAARGLTKSYGERLRKCGSGQMNREITKGLSQELRDVLDPLLQEIESLNERIAEYDRRIEQIAKEVYPEVALLQQVKGVGTLIALTYVLTLDDPHRFRRSRDAGCFLGLRPGRRNSGMSEPQMHISKEGDRYLRTLMVQGAHYILGPFGQDSDLRRWGLKLAERGGKNAKKRAVVAVARKLAVLLHKLWVSGEVYEPLRNNHRVMSAVA

SEQ ID NO: 476753 - protein, 355 aa, unidentified
MDVHKYAHHAVALNCLGQELSQLSFTNDELAHCRTWLNGLGAKPAIVVGLEDVNGVGTRLSQFLLQEGFTCRYVPAILTERERKHSVQHDKSDYLDAKRVGKVILTKSEETLPVSTILTQENTYIKELDLLLQERQELVREQTAVKNQLHVLLHQYYGNTYRQEFKHIFSQKALTWYKKDLQIIQSDTKGSALLAAAILRRVERLQLILSQVAAIDKTLNGTSKTSREVEVLTKELVGCGNLTACKIIVEVGTIHRFTSKDKLAKYAGIAPVRDQSSSKNRFYTNSGGNRKLNQAIHTVALSQIGAGGYEDAKKYFQKKVNEGKSKLWAIRCLKRQISNRIFLLLKNASNTKLTN

SEQ ID NO: 476754 - protein, 369 aa, unidentified
MNNGSTVVGLDVHKETVVAAVLPPGADRVRETVTMENAPTAVARFVTRLAARGPVAFVYEAGPCGYEVQRQLTALGHPCAVVAPALTPVRPGDRVKTDRRDAEKLARLYRAGELTPIRIPTRAEEAARDVVRVREDVLADRLRARHRLGKFLLRQGRVYRETKAWGVAHRAWLRSQRFEWAALQQTFAAYLRALEEVEAQLEVLDQQVVDLAQQAPYQTLVQALRCLKGIDTLGAVTLAVEAQEFRRFPRARAFMSYTGAVSAERSSGGTVRRGSITKAGNAHLRRILVEAAWSARHGTGVSRELAERRKGCPAEVVRIARKAQARLHRKFWRLTSRTKPSQVAAVAVARELAGFVWAIAHQVPEGGPA

SEQ ID NO: 476755 - protein, 343 aa, unidentified
MQRITTIGFDIAKSVFQVHGVDATGEVVIRRQLKRRQVVGFFQKLPACLVGIEACASSHHWSRELQALGHTVRLMPPAYVKPYVKRQKNDATDAEAICEAVTRANMRFVPTKTPEQQSGLVLHRTRHLFIRQQTSVINAIRAHLAEFGIVAPVGRHGVEELLNVVADPNDKRVPEIARACLSAFGAQLRMIKEQVLEFDRLIRAWHRSNEMSMRLDEAPGVGPVLATALVAAVADPKSFRSGRNFSAWIGIVPKQHSSGGKNRLGNISKQGDRYLRGLFVAGALSVIRYAKIHGTKHRPWLTALLARRPTKVAAIALANKIARMVWAMMARGERYKEPVALAR

SEQ ID NO: 476756 - protein, 389 aa, unidentified
MSECITWVALDTSKRKHAVAVLDPGAKEPRESSVVNEPRALRRLARKLVREAAGEVRICYEAGPCGYALQRQLEGSAELVCEVIAPSLVPVRPGSRIKTDRRDARKLVKSYRAGELTVVHPPTAREEAVRDLLRCREDAMQDLLRARHRLGKFLLRRGHVYVGGKAWTGKHEQWMKGIIWEAEADREVFESYRLGMSQLLDRLGELDEVIEAMSAEEPYREPVGWLRCFKGIDTVTAMTILAELHEVRRFKSARGLMGYLGMVPSEDSSGDRTRRGGLTKAGNSHVRRVLIEATWHNRHRAGVGYRLRKRREGQPAWVIAHADRAMVRLSKRYRGLCARGKPKNKVVAAVAREFVGFIWAVLREGEIRKEKERLQGELRHTRVGSGAAA

SEQ ID NO: 476757 - protein, 370 aa, unidentified
MKHYSGAFIGIDTSKLRNAIAVAEEGRAGDVRFLGEVDTAEVATRKLVAKLATKYRQLTFCYEAGPTGYGLYRLIRKLGHDCIVVAPSLIPKKPGDRVKTNWRDAVGLAKLLRAGELTAVWVPDERHEAMRDLSRAREAAQRDLQGKRQQVSSFMLRLGRHYPGKKAWGRAHMNWLMQQKLEQREQRIALEELLGAVRQESERVERLEQAIRDATPEWSLAEVVTALQAMRGLDLVAAVTVLAEIGDLSRFQTPRELMGYLGLVPSENSTGDTVNRDGITKAGNGRARRILVEAAWSYRHPPRVSLKKQIKVAAAPKTVREIAWKAQMRLCGRFRSLTRKGKRPNVIATAIARELSAFIWAINREVMAGR

SEQ ID NO: 476758 - protein, 421 aa, unidentified
MQRVSQEEFAAFVGLDWADAKHDVCLQAAGTARREFLSFEHRPEVIDAWVQTLRTRFHGHPVAVCLELKKGPIVSALRNYEFLVLFPVNPLTVARYREAFIPSRAKDDPTDAELQVELLLKHRDKLKPLRPQSPAMRALTQLVEHRRRLVGDKVRCTHRLTSALKNYFPQVLQWFPEKDTAIFCDFLSRWPTLKAAQLARRSMLEGFFRAHHVRSVEVIDTRLQAIKSAMALTADDGVITPNVLLVPALIAQLRVTLQAIADFDSAIAQYAQDHPDFSLVDALPGAGAVFAPRRLVAFGEQRERFTSAEELQKYAGIAPVTERSGKKSWVHWRLQCPTFLRQTFVEWAAESTRHSFWAQVYSQQQRDKGKAHQAAGRALAFKWIRILFRCWQDHTPYDESVYLQALKRRSAPLLHHLAKGA

SEQ ID NO: 476759 - protein, 338 aa, unidentified
METYAGIDLHSSNNYIGIMDQDHKRLFGKRLPNNLDKILMVLEPFKPDLKGIIVESTYNWYWLVDGLQEHGHKVHLANPSAIKQYEGIKHTDDKWDSFWLAQMKHLNILPEGYIYPKEQRAIRDLLRRRLFFVRHRTANILSLQSTITRNLGIKMSGNEIKKLDMDDACDLFDSANLVFMAQNNISTIKHLGKIIKGIEKEVKSQVKLRKEFVMLTTTPGIGLILGLTIMLEVGDIGRFLKVGNYSSYCRCVGSKRLSNGKKKGENNKKNGNKYLSWAYVEAAQFARRYIPSAQRFYQKKMAKSNGVLATKALSNKLSRATYFMMRDQVPFDEDMLFR

SEQ ID NO: 476760 - protein, 403 aa, unidentified
MAKVFIGVDPHKISATIEVVDENERVLATGRFGTDKAGYAAMRKHVSAWPDRVWAVEGSNGAGRPLAQRLLADGEHVVDVPAKLSARARLFDTGHNRKTDAHDAHAVAAVAVRTTGLRVLAYDVELEALRMLADRREELTRQRIQTVNRLQRLLSELTPGKAKKDITTGQAKQILAGVRPRDLAGKTRRRLAAEQLAEVVAVEKKMKALTAELKAMVIASGSRLMDLPGVGPVVAARILADVGDVARFADRNRFASWTGTAPLDASSGEQIRHRLSRAGNRKMNHMLHIAAATQARLDTEGRAYYRRKLAEGKTRMEAMRCLKRRISDAVYRQLIADARAADIADVETGPGGHCGATQESSAVDLPPHIDTSDQPLPGPANPTLPPTPRPRKTSKRKPAMTAG

SEQ ID NO: 476761 - protein, 341 aa, unidentified
MTIVDSTRLLVGGVDTHLDVHVAAVVDPNGGVLGIKSFPTTSAGYNDLSSWMYSFGPLQRVGVEGTGAYGAGLARHLAGHGLEVIEVDRPNRQARRRNGKNDELDAVEAARGALSGRVTGHAKAGNGNVEALRVLLIAKRSARSQRIATVVQLRHLVFTAPDDLRQRMAPLTAAGLVKEAARLRPRPGTDTVVHAVKTTAVVLARRVQALDDELRLLDAQIEPLVKATAPALLNIYGVGFDTAAGDNANRIHSEAAWAKLCGAAPIPVMTGKSSTRYRLNPGGNRHANNALWRIVLTRLGQHEPRTVAYMNRRLAEGRTKPEIIRCLKRYVAREVFRALPR

SEQ ID NO: 476762 - protein, 350 aa, unidentified
MWQQLTGRLEHIIGVDTHKGTHTLAVVDANGGEVAIKTIRTSAAGYGQMLAFGRDNAPGRRIWAIEGSGSFGAGLTTHLLEQAERVVEVDRPMRRPHRSGAKSDELDAVRAARQAWGQRHLYEPRRRGSREALRVLARTRQGAVAAKTSAICHLKALIITAPEDLRRELRPLPTGALVNRCAAMRDSSRRDTERAATVSALHSTARRIQALTAEAKELEQQLETIVRTEAPALLEQPGVGVLSGAELLIAWSHPGRLRSEAAFASLAGVAPIPASSGQITRHRLNRGGDRQLNRALHVIVLSRLQHHPETKAYAERRTAEGKSYREIRRCLKRFVARRFFKLLESTSMAA

SEQ ID NO: 476763 - protein, 344 aa, unidentified
MGEVSTIGLDIAKSVFQVHGVDVAGAVVIRKRVSRAKVLEYFGELSPCLVGIEACPSAHHWGRELQALGHTVRLIPPSYVKAYLKRSKNDANDAAAICEAVTRPSMRFVPIKTREQQSALMLHRTRQLLVRQRTMLSNALRGHLAELGIVSAKGRNGTAELLRIIADDRDSRVSAAVRGILNVLARQYGAIGAEIASIDKSIMALHRGCEASRRLAEIPGIGPVGATALVAEIGDWNTFSSGRSLAAWIGLVPKQHSTGGKERLGSITKQGNRYLRWLLVVGAMAVIRYARKHGTQRRPWLARLMERRPTKVAAVALANKIARMAWAIMVRGERYKEPKLSLAA

SEQ ID NO: 476764 - protein, 342 aa, unidentified
MSINKSTVSYRLFVGVDIAATTATVSWMHPREKASRPVTIEQTPDGYASLERKLRATGKAPAAVLVVMEATGSYWITLATQLVHAGFCVSVINPAQAHHFAKALLKRAKTDAIDAQTLAQLAMMLQPTPWTPPPPIYYELQQRLAQRDALLDLQQQVRNQLHALLQLPEVIATVRERFEALLATFATQLAAVEAEITAVWQQDAAWATAAQRLQSIKGIGWVTAAWTLVSTLNFTTRDTVEGLTAYAGLAPMPRQSGTSVWHRPTIGHTGNGRLRTAFYMATLSAAQHNPMIKTFYTRLRAAGKPEKVARCAAARKLLHIAWAVVTKAQDFDPNYAQKMQRA

SEQ ID NO: 476765 - protein, 350 aa, unidentified
MKEATTIGIDIAKRIFQVHGVDKNGKTVLKKKLMRDQVLIFMANLPKCLVGMEACGGANYWAREISKLGHEVKLMAPQFVKPYVKTNKNDQADAEAICEAASRPSMRFVPIKSVEQQDILSIHRVRSRLVKNRTALANEIRGLLHEFGIIIPKGINKITAKLTEVLDSEKLSPISQQTFSDLKDEFIENDKRIKDLENRLKILAGELDKYQHIIAIPGIGLITATALIASIGNASCFENGRQLSAWLGLVPRQASSGGKEKLLGISKRGDIYLRTLLIQGARAILNTKLRTTTESQKAKKDYSKFTQWMFNLRDRSGHNKTVVAVANKLARVVFAVLSSGKDYVENKVCS

SEQ ID NO: 476766 - protein, 343 aa, unidentified
MYFIGLDVHKKTISFCVKDAAGRVHQEGKIASTRRDLDCWVRTLPQPRTMAMEATIFTGWIYDHLLPHAEKVKVAHPLMLRAIAAAKKKNDKIDASKIADCLRCDFLPECHMASTEIRDRRRVLRYRNLVVKQMVQMKNRVSGLLMETGVSYNKQRLHKVGYFGELMSTNADVSDAVRPLLNLSRGMIRRSGKLEYDLVSSLERDPLLKDRLRRLRTVPGVGPITALTWALEIGDYTRFSSNKQAISYCGLCADEKSSADKVMRMPLSKQRNKQIQKVLIEAAKLAPRESPELAMIRARELERGNPNRATLAVARKMVCYMMAVERRQQDFVPAGECIPTAAA

SEQ ID NO: 476767 - protein, 508 aa, unidentified
MTLCGPRGTAEKRRLPAHQSHKRRLGLLQLPSPVGGGDCRSSMSSRSLWLVGLPVVSRDGLVAQLTQIHQMRGVAMGQTETSSSPVDASSFQYVVGIDIGSQSCSFCTLKPDKSQVIKPTEFANAMPGFTFLHEKLERLGVAPSQVLIGLEATSRYGEHLYRFLESQGYQVCLLHARQTHQFAQQRGLRAKTDNLDANTIARVLLSGEARRGYVPTELIATYRELVRLHSQLSDEVARYKNEIHALLSVLFPEFVQIFIDPCRPTALGLLKRYPGAQAFVAAGVEAIAATLHELAPRHYGRGTAQQLVTLAQHSTSSGVAVVARASSLKILCDQVEHTQRNLAQLEEEIDKLLAADKGSKGLQSVPEFGRKTVAVLRAELGDVTRFQRADQVVAYAGLDIQVKESGKWKGQAKLSKRGSGRLRRLLYLTAVRCIRLEDSAFGQYYHRLVARGMRKIEALMAVMRKMLIVAYRLLSTGEMYDPMKVCAVPGAHPAQHTPSSGLLVTAGA

SEQ ID NO: 476768 - protein, 345 aa, unidentified
MHIASIGIDLGKTTFHLVALGERSKVLVRKKFSRTQLLAYTANLPCSLIGLEACAGAHFMGAALREQGHEVRLIPAQFVKPYRKSNKNDFIDGEAIAEAVTKQNMRFVQIKSQEQLDVQAMHRVRDRLVQRRTALIHEIRGFLLERGITFPAQPIHLRKNLRAVVEDAEQHLSPRLRWLLDRLWQEWKQTEIDIETITDEIERISNEDERCQRLRQIAGFGPWVSTAMVAAIGNGAAFRRGRDFAAWVGVVPRQYSTGGKQKLFGISKRGNLYLRRMLIHGARAVLFRIKYDTAGLGQWVYRLSQRAPRNKVVVAMANKLARIAWAVLSSGRDYRHPPLQQRATA

SEQ ID NO: 476769 - protein, 332 aa, unidentified
MHYVGIDVSKRSLDVCLLAEGSKGSRKTNTLSNGQDSAQNLAKWLILQKCELSQTHVIMEATGIYHEYLACGLHQMGILTSVINPCRSREFAKAMGIFTKTDAVDAYVLAFYGCLKQPEAWTPPEEEVRKLRALLQHRDSLLNDKLRIDNRLNTLKSTEAVQEVMDSLSLVNQYLKSEVARIERLISSHIAQHPGLKRDLKLLMSIDGIGKQIGWNMLAVLRGNNFKSAEQLAAYLGVVPVERRSGTSVHGRARLSKIGSSNIRAKLYIALTAISKNSHIKALYERLLAKGKMKMSALGAAMRKLVHLCYGVLHTQQPYDEKYKAKIINFSS

SEQ ID NO: 476770 - protein, 461 aa, unidentified
MDRKQGKQRRPIQASDLDALEQINLDAAGIDVGADELYVAVPKGRDVESVRVFGTFTADLERLADWLQQCRVTTVAMESTGVYWIPLFEILDSRGLDVYLVNARHLKNVTGRKTDVLDCQWLQRLHTCGLLQASFRPSDEICALRALVRQRGMLVQYRAAHIQHMQKALQQMNVQLTRVLSDITGMTGMKIIRAIVAGERDGQVLASYRDAKCKHSAADIVAALQGNYRREHLFALRQALSLYDIYDSKIRECDTELEAMYQDLEAPQTPDKPATQPPTRRTGKPRKNQAHFDLAASLYAMAGVDLTRADGIDALTVQTVLSEIGTDVSAWPTYKHFSSWLCLCSQNKITGGKVKHRGTAPTSNRVSTALRVAAQSLSRSNSANGAFYRRICARRGPAIAVTATAHRLARQIYFMLKYRTDYVDPGPEEYERRHQERVLANLKRRAARLGFALTPVAAAVS

SEQ ID NO: 476771 - protein, 420 aa, unidentified
MKNDNTKKVKKLSEKTLLVTVDMGMTRHTGYCRCPNGTEVKPFDFANNRKGFEEFWFCICQTKKIHNLQEVVVGFESTGPYAEPLLHFLRRRGIKLVQVNPLHTKRLKELQGNSPCNTDHKSPKIIADIIQLGHALTVVIPQGTIAELRRLTSARERSIQRRTALLNQLQTLVFIIFPEFLQVMKDIGSKTSQHLLKHCPTPEDIILKGIDALAQILKLISRGNMGKDRAEVLYKAAQDSVGVKEGQKSLLLEIAECISAIEATEKFISMLEAEMNKYISEIPYSRSILSIKGIGTITVAGLIGEMGDFRQFHTISEVIKHAGLDLYEISSGKHKGKKRISKRGRHLLRKILFFAAINTVRKGGVMHEYYQRCLQRGMLRMKALIAIARKLLRIIFAVVRDRSVFVPDYSKTQYHLKEAA

SEQ ID NO: 476772 - protein, 336 aa, unidentified
MNFVGVDLHKKTAVVCVVNQARQLLETRRLACGDPEGIRKWFATLGAFQVVVEATASYEWFVQLIEPMADRVVLAHPGKLRVIAESTRKSDKLDAKVLAAFLALDMIPEAYRPTPRQREHRQWVRHRQYLRVRVASIRNRLRRAFSNYNADRLDLFTAAGRKASAAIKLSVVDRFAVTQLWRELDFFEEQLDEVHKALRQFAAQAPPAEAAARRLLQSIPGVGEITTEVYLAEVADVRRFRSQKRVVAYAGLAPTIRESAGRRHELGITHTGSRLLRWVLCQAAWQLVRRDAHWRRIFESLAERRGRKRAITAVARRLLCVMTSMVMNGQEYRRAA

SEQ ID NO: 476773 - protein, 320 aa, unidentified
MTILTSPTVIGVDVAKAEIVVYREDLEITQVINNDRTSVGRCLKTLPAQSSIALEATNLYHLNTAELAHGMGHRVYVVDPYRVSHYRESIGQRAKTDPCDARLLARYLTSEQHRLRVWSPPPRHYTVLKSLLNKRAQLMKARVSIMLSWSNEPLLEDLLAHGLEHFKQLDQAIQELLRKVSQEAGISENIRRCKAIEGIGELTATGLATTYMRGEFASADAFIAFLGMDLKAKDSGKKHSPRHLSKKGDGELRRLAHNAAMAACRSPVWKPFYESYLARGLARTQALVILARKLCRVAFALMKNQSEYQPNLRLQGSPAT

SEQ ID NO: 476774 - protein, 347 aa, unidentified
MVYVGIDLHRNRSQIAVLDQQGAELLSRRIVNDRDIFLELLHGLGDDVQVALEATYGWEWLADLLEEAGYELHLAHPLRTKAIAAARVKTDAVDARTLAHLLRTDLLPEAYIAPRELRDLRDLLRHRVALTRMRSALKQRVGAVLAKHGIARPYSNLFGPGGSRFLTELELREGPRRRLDSLLALIAAFDREIDTTTKEIEQRASEDPYVDVLCQIRGVGRYIAMLVIAEVGDIARFASARHLCAWAGLTPTVRSSDGKARLGHISGQGSPALRWALVEAAQHAPTGGGPLRQSYERIAKRRGKQVAKVAVARKILTLCYYGLRDGEIRCLAPRAKARTMRTTAVTR

SEQ ID NO: 476775 - protein, 425 aa, unidentified
MKKTDYLSTLFVGIDIGSRINVVSAIDFNQEYLIRMKPVPNAKEGAETLESLLVDVLSAHHEFNHVIIGLESTGFYGVHIANYLSASDKLSPFGTEVYCLNPKEVAKYKESFNALVKNDGIDSFVIADFARVGRISIKPWRGAQYLALQRLTRHRLHIAECIAQEKTYVLNNIFLKFSEFAMMKNEDHPFSNKYGATAEAILEQYVTNDDIIDASIEDLVELIESKSRGRITDPEETAKLLQAAASASYRLDKVIAEPITLSISSSFNCIRAFEKELKAIDKAIEQTVQGLNPTEYQVLRSIPGIGHVYAAGILAEIGTIKAFPNNNALAKYCGIVWKENQSGNFRAEDTKMSKAGNRYLRYYVIEATGSVINHCPEFKAFYDKKFAETTTHQHKRALALTSRKFLRMLFGLLDKSQLYSPDKSR

SEQ ID NO: 476776 - protein, 334 aa, unidentified
MTFRNFIGIDISKGTFDFALIKDGDLANPISGETSNNPSGIIKLEEFLKKQGLIKEEILFCMEHTGIYCRLLSQYLVENNYHLWLEMPVQIIRSLGVQRGKNDHIDAIRIAEYACLKKDKAVLWQPTREVVIQINDLLTLRDRLIDSRKSLKQPIKEFIHAGFKDTAKLIQSRCSETLNALDKEIGLIEKELDKLIRKDSNLKRLYKLATSVVGIGKITALTLLYFTNEFKLYINGNKLACYCGVAPFEHTSGTSVKGRSRVSSFANKRLKKLLHMVAMATILCDKELSQYYQRKVSEGKNKMLVINAIRNKILHRLCAVINRGTPYLLDYQTT

SEQ ID NO: 476777 - protein, 335 aa, unidentified
MDIRYFIGIDIAKATLDWAVYDGKKVVLQINTPNTIVGIKTALRLLKTLPDWKPSEAIFCMEHTGIYNAHLLDFLHKLRFPIWLESSLQIKKAGGLQRGKTDSIDAQRIAEYAFRFRDQLRLWEPPRQVVQKLALLSAVRQRLISVYNQLAGPLAEQQGFIDPALQKQLSKSCQASLLALEKDRKVVEKAIDALIEADSRLSQLFELVTSVPGIGMATATEIVISTNEMKAITDPKKMACHAGVAPFNYQSGSSVRGRPGVSQHARKRLKSLFHLGAMAAIRAKGELQDYYHRKVKEGKNKMLVLNAIRNKLIHRVYAVVARGEKYDKNYVSPLA

SEQ ID NO: 476778 - protein, 282 aa, unidentified
MESIVYVGMDVHKATYSLCALDKATGALLAETQCASEPKLVEKFINGLAEELDPDTKFVTGYEAGILGYSLYHSLKNLGIDCIILAPTTMYSSAKNKMVKNDSMDARMIAKNLAANTYCAVYVPDEADNEVKEFIRLRKMMKKDLIRVKQQIGMFLLRQGLKCSASKWTLAYMDWLKKVPLSPVLRSVLDEMTLQKSELEEKIARYDQTIETFANSERYTKPIHALTSMKGFKTTTAMTIHIEIADFKRFKTAKAFMSYVGLNPSEHSSGDHTIKGGDFEAR

SEQ ID NO: 476779 - protein, 316 aa, unidentified
MAETLFVGIDVAKESFDVASEPAGLKLSLPNDPTGRQKLLDTLQGHSVALIVLEATGGYERTLVADLLHAGHRVVIANPRQVRDFAKGIGILAKTDEIDAGVLAIFAKTVQPQPRPKPSGNVSLLKELVTRRQQLSRLLTAESNRLGMAQYSQVRKSLQKVIRTLKRQILDLDRLIRDNIESDENLRRKDEIVQSVKGVGPGTSAMLLSHLPELGTLNRQQIAALVGVAPWDFKSGKWAGRSRIWGGRMEVRNMLYMAAMTAARYNHTIRRFYDRLISQGKLFKVAITACMRKLLVILNTLVRNNCLWSPTTAKNL

SEQ ID NO: 476780 - protein, 359 aa, unidentified
MGELGRLSLVPAESPNSCLGRTASPHPQGWVSAGGFARNVRKHLTTTEVFIGIDVARDSLEIAVRPAGEHWTVSNDTRGIAALVPRVRALRPTLVVLEATGGFELEVLAAFGSVGLPAVAVNPRQVRDFAKAAGKLAKTDAIDARVLAHFADAVRPAVRPVPDSATQALSALVTRRRQLVEMLTAEENRRSSASPVIRSDIQDNIAWLRTRLRGIDKELSQAVRDSPLWRAQEDLLRSVPGIGPVVSVTLLAELPELGVLGRKQIGALVGLAPLNRDSGTLRGKRTVWGGRASVRAALYMAALVGTRRNPVICALYARLLAAGKTKKVALTACMHKLLTIINALLKHHTRWAPTTSAIV

SEQ ID NO: 476781 - protein, 386 aa, unidentified
MQTPNDLNQSRIVLRQDSTMIAVIEMSLSSWLVAGIVPGVERQPLKKLAVDESALLKLLNRWREEAEKAGRKIERIAVAFEAGRDGFWLARWLRARGIEAHVIHASSVAVSREHRRAKTDRLDTELLKRAFLGWLRGEREHCKMVAIPTIEDEDAKRPNRERESLAGERTRIVNRMKAALSRLGIRGFNPKLKKAAERLKDLRTPEDQPIPPNTLAELRRDMERRRLVSDQIRQIEHARLERIEHAPSDRPHAMVRLLARVIGIGIETADMLVQEVLSRNMRDRRAVARYAGLTGSPDESGTKRREKGLARSGNARVRRGMIQLAWRFLMFQKGSALAQWFRARTENARGTRKTMIVALARKLLIALWRLVREGVVPDGVVLRPAQ

SEQ ID NO: 476782 - protein, 455 aa, unidentified
MYQRCCGIDVHKKMIVACLLLISDQGVQKEIQIFSTMLPDLFRLREWLTAQRCEAVAMESTGVYWKCIWNVLEGEMELLLCNAQHIKAVPGRKTDIKDAEWIADLLQHGLLQASFVPPRSQRELRDLTRYRSSLTADRARLVNRIQKTLEDTNIKLASVLSDITGKSSRAILEALLAGEQNPEILAELAHRRVQGKREQLVQALQGTLSAHHRFLLASQLRQLDFFDHQLRELDQEIAHRMGLSSEAPDPDGPDGPPDLPAKEEAAEAPDLPEAAASTPLAVQQAVSKPLSSATALRILDEIPGINERIGAIVVAELGLEMDQFPDEAHLCSWVGLCPAAKISANKRLSTKTGKGNRWLRQALIEAANAAARSKDTFLSAYYQRLRKRMGHKKALVALAHRILIIIYHVLKEQQAYQELGPGHVEEKAIEVAKRRALRTLEHLGFEVTLHETEVA

SEQ ID NO: 476783 - protein, 392 aa, unidentified
MYIVGIDIGKNHHEASIVSPEGKQIGRSLRFATTHKGADSLMSFIFKNIGNSPCVFGMEATGHYWYPIYSFLKAKGYTIYVINPIQSDSLRKMYIRQTKNDSIDSFLIAEVIRFGQFGTTSMADENILAMRQLCRYRDSVISSRTEIKLRIGTIMEQIFPEYEKQFSSLWMSTSMGILEKYLTPENIENAPIDELFEIIKDKSHNRLTKAKAISIKEAAADTFGIKIAQDAFSFQLKQLIDRMNFLDKQIEALDCQILEYYEKFDCYLHTIPGIGMIAAATILAEIGDINRFKSSSALVVFAGIDPTVRQSGEFSSTHNHMSKRGSPYLRHAIFLAATTCSFHNSPLNAYYKKKREQGKHHLTATGAVARKLTTVIYAVLRDGKPYEPKSFC

SEQ ID NO: 476784 - protein, 392 aa, unidentified
MDKAWVGVDAGKEFHWAHALDASGAELLSRRVENDEGSLSALIDEALSMTPDLVWAIDQPGGGAALLLALLWERGQKVLYVPGLVVDRARDAYRGESKTDQRDARLIADQARMRGDFSKLAPQEGALAELQLLLARRRDLVVDQTRAITRLREALLSLFPALERALDLNTKGALVLLTRYQSPAKIRRTGCKRLASYLKGRGVKGADELARKALAAAKTQSVELPAQEVASRICAEIAGEILALKERLQALDKEIASRFFERPEARILSSLPGMGPLLGSEFLVAAGDLSVFESADQLAAYAGLVPAARDSGKRVGNNRRMRGGNKTLKRVFFLSAFSSLRSSPHSRVFYERKRREGKRHTQALIALARRRVNVLWAMLRDGTTFKSPPLRA

SEQ ID NO: 476785 - protein, 312 aa, unidentified
MPDKAEPNYVGLDIAKDQLDYCLTETEEGRCANTADGRAQLIKKLKGLPNARVICEASGGYEKIVGAELLQAGLEVCVVQPSRVRAFAHAEGLLAKTDRIDARLLRRYGQTIKLRLAVPTEPALATLRELLEHRRQLTTQLSEVNGRMGVAGPTLCKLLQRQKIFLEHQIEEVEKMIKEHVDHDPDLRSKSERLQQIKGVGPVLSATILAYVPELGNIESAQLSALIGVAPHPKDSAKCRAPRHIRGGRAQVRHVLYMAAVCAARHNPIFAAFYQRLRANGKPATVCLVAVMRKMVCLMNRLIQNPAFALAP

SEQ ID NO: 476786 - protein, 482 aa, unidentified
MKKRNIYQNQSQELLSLFEAAGSSAKVMCVPMDYAKRDHLVMFCNGHGDILRKPFSVKNTSEGIEHLIDQVTRSCHRRGIKKEHVFLGGEDVNSFAENFVSTLRVKGWLVAGVNAHDAKKQRVNLQASTDRIDLMGIATMLLNCRANCCPAALGIYRNLRTLVRHRRKLVVMLTEVKNRAHGIVDRLFPGFLNENKSGILPFTQSSLYLMENRFSPKQIRRRRRQKLIEILKRFGTSKAEETACKLQQYAATVLHTPDEYIDTLQISLVQHVKHIRCLKESIVLLEKEIAVNLAQTQGAFLTSVRGIGIVLAAGVTAEVGDPNEQKPLNNLVSYSGIIPRVKQTGGLEGKTYTGSVAKRCNRILKDYVVKSGFHLGLHGPEELKIDYKRRDASGQHADFGIGRRYLRMAMSLMRTSQVYLPPRLRKADSTLEERAGYYLMIWPYLREKWKKHGALEAAFTKDRPLGMWRQIVQELYDITLKL

SEQ ID NO: 476787 - protein, 346 aa, unidentified
MTKQTSQATISTIGIDIGKYSFHVIGFDERGAIVLRQKLSRSQVSVRFANLPRCLIGMEACVGSHHLSRRLQSLGHDVRIMPAIYVKPFLKGQKNDFRDAEAIAEAVQRPTMRFVQTKTLEQLDLQALHRLRTRLVRQRTAVINQIRAFLLERGFAVRQGLNPLRQALPEILSKPSDELSPRMIHMIEGLSDDWRHFDGRIDDLTGEIEALVKADDNCQRLMTIPGVGPLTASAMVSAVGDGSAFRRGRDFGAWLGLVPRQMSTGDRTILGGISKRGNKHLRTLFIQGAWVVLMRSKNWHNYSFGSWLEAASKRLHRCVLVVALANKLARIAWSVLNRGRAYDASL

SEQ ID NO: 476788 - protein, 350 aa, unidentified
MMVIVGIDAHKRTHTAVAIDEAGRKLGEKRTTSTTTEANLELLRWADAFGKERRFAVEDCRHLSRRLEADMLAAGEELVRVPPKLMAHARDAARTYGKSDPIDALAVARAAWREPSLPRACLDGPSRDLRLLVDHREDLVRERTSQVNRLRWHLHELDPSWDPAPRLLVRFKHLDALGARLDGLGGTVAWVARDLVARIRELTVAANELERRIVEQVSRLAPALLGLAGVGGLTAAKIVAEVAGVRRFHSKDAFARHNGTAPLPVWSGNLVRHRLSRTGNRQLNAAIHRIAVTQMRIHDGAKLYLGRRIAMGNTKTEAIRALKRQLSDVVYRTLMTDAVSTQVARFGEAA

SEQ ID NO: 476789 - protein, 354 aa, unidentified
MPLKTTSLEAVPTIGIDIGKNTFHLIGLDKMGAIVLRQKLSRNQVDTRLANMPRCLIGMEACVGAHHLSRQLKALGHDARLMPARYVRPYSKGQKNDFRDAEAIAEAVLRPTMKFVAIKTVEQLDLQGLHRVRERLVCQRTSVINQIRAFLLERGIAVRQGLRALRTAMPNVLAMTDKLSPRIIHMIEDLCTDWRYLDARIATVSNEIETLSEQDDGAKRLMTVPGIGPIISTATVAAIGSGDVFSKGRDFGAWLGLVPRQMSTGGRTVLGPISKRGNRYLRMLFVHAARSVLLRPQSWEKHGLKSWIEAAARRLNRFKLAIALANKIARIAWGVLHGGRNFEVRSMRTAPQAG

SEQ ID NO: 476790 - protein, 381 aa, unidentified
MKKDIRFVGLDVHAETISVAVAEPNGQVRSVGTIPNRPEAVAKLMRRLGPAEKLRVCYEAGPTGYVLYWQLTALGVRCEVVAPTLVPVKAGDRVKTDRRDAEKLARSYRSGDLTAVWVPDAAHEALRDLVRAREAAKGDQLRARHRLGKFLLRHGWRPPKGTNAWTGKYLAWIKKDVEFGHEAQNAVLLDYITEVEHASDRIERLERSIEEAAEAAPERMRAVIGALQALRGIAKLSAVTIVAEVGELSRFARPRQLMGYSGVVSSEHSSGGKTHRGAITKTGNSHLRRIVGEAAWSYRHKPSIGWPLKKRQEGLSEEVKKIAWKAQHRLYRRYHRLTAKGKVKQQVATAVARELLGFIWAIGMTVERSVPMGVHAKRSAA

SEQ ID NO: 476791 - protein, 343 aa, unidentified
MYYIGLDVHKKTISYCVKNASGQVLSEGKIGSTRRELDAWVRTLPEPRMMAMEATIFTGWIYDHLLPHAEKVKVAHPLMLRAIAAAKRKNDKIDASKIADCLRCDFLPESYMIPTEMRDRRRFLRYRNLVLRQSVQMKNRISGMLMETGVSYEKLRLHRKGYFDQLMKSNEEVSDSIRPLLKLCREQIDRSILLDRTLLKTLERDPLLSGRLERLRTIPGVGPLTALTWVLEIGDVSRFRSIKQAISYCGLCGEEVRSADKVMRTPISKQRNKHIQSMLVEAARLAPRYSPELALLYDRERQRGDGNRATLAVARKLVAHMVAVERRQSSFVPARELKQTTAA

SEQ ID NO: 476792 - protein, 401 aa, unidentified
MFVGWDWASTTHDVTVLDDAGAVVDRWAVRHTEQDLAAALDRLARLGEPAALPVIIERTSGLVVDRLVAAGHPVVPVHPTAFWAARPRWGASGAKSDAGDSYKLADYLRTDGHRLRRLDRSDPGLQELQALVRLREDHVRARTAASNQLGALLEAHWPGPKAVFCRLASTIALAFLADYPTPQAAARLGEARMASFCRRHSYRGGKPPAVLLARLHSAPTAPVGIPPATLATLVRAQVQLLRSLLATIAELEAAIAKRVACHPRAELLASLPGVGTINLAQLLGEVGPILDRVDSAEHAAAECGAAPVTKASGKTSGVYFRWAANRRARKALTAFAHNSRLVSPWAGRLYADARARGKRNPHATRIVARAWLRVIWACWRQGAPYDPALHTAALRAAALPT

SEQ ID NO: 476793 - protein, 293 aa, unidentified
MIIIGCDFHTRYQEIAWLDTDTGEIHERRLEHTGDETRKFYAAFSGPVRVGIEATGYSQWFERMLRELGHEYWIGDAGAIRASVVRKQKTDRRDAAHILDLLMTNRFPRIWVPTPAERDLRQLVLHRVKLVQLRTKVQNQLQALAMGQGVCRKKKLWSVRGRAELESLPLDRWAQRRRQELLQLLDQLEGSIRELHAAVEQQARQHPEAVLWMTHPGVGPVTSLAFVLTIGPVSRFARSKKVSSYLGLNPGEHSSGGHQQMGPISKQGNSMMRWLLVEAGQTAARRDPALGRM

SEQ ID NO: 476794 - protein, 435 aa, unidentified
MKKLRRNVSGIDIGAKDIFVALEDGPVKSFKTFTEDFKLCANYLKDNNVKSVAMEATGSYWIILYMILENAGFEVWLVDGRETKQVPGRKTDVKDCQWIQQLHSYGLLNRCFTLEEEMKNLRSYNRIREDHIRSSSMHIQHMQKALIEMNIRLKEVISQIHGASGMKIIKAILSGERDKEKLTSLCSKTILKNKRKEVEKSLEGYYTEAGLFALKQAYDSYQFYQHQMSLCDAEIEKQLIKLGGDKKDEDLETKRKPIRHNKPDVKNLGANLIGLHKGYDPTVLEGMTDYSWLKLTAEIGYDLSKWKTEKHFTSWAGLAPGQNNSGKKSKSKKKRNVNQVGQVFKDIAFGLINNKNSAIGEFGRRIRSRKGGTVAIKAMARKLGILYWKLFMEGIDYVKESAENYRKKLRERKQKNLRKLAKELNVQIVEIQVNV

SEQ ID NO: 476795 - protein, 344 aa, unidentified
MKLTTVGIDLAKNVFQVHGIDEHGKVLVKKQLRRDQMATFFVNLPPCLIGMEACGSAHHWARKLQTMGHTVRLMAPQFVKPYVKTNKNDAADAEAICEAVGRPNMRFVPIKNVEQQAVLALHRVRQGFVKARTAQANQIRGLLGEFGLIVPQGIGYIASRVPELIEDAGNELPGSFRVLVQRLLDHLKELGRQVQELEAQIQAWHRSSDLSTRLAQVPGIGPITASALVASIGDAKNFDGGRQLAAWLGLVPRQHSSGGKSNLLGISKRGDSYLRTLLIHGARSVIYRAGQKADPCSWINAVVQRRNKNVAAVALANKNARIVWALLAHDRHYEMGYKKAAEVL

SEQ ID NO: 476796 - protein, 281 aa, unidentified
MTKGHIRKAMQWIKKQKPKLIVLEATGGYEHTLVTELVTAKLPVAVINPRYIRDFAKAKGVLAKTDKIDAAVIAHYAAALQPQVTIVLSKEQFRLRALVLRRRQLVSIRASEKNHKEHIIDKDISSSIQTVTQSLSDEIERIEKLILDIIQSDPDMQDKIQRLTSVPGIGKTTAAMLISDLPELGALNRRQIAAMVGVAPINRDSGQFRGKRMTGSGRDKIRTGLFMAMLSIIRCNSKLKKFYQKLLTNGKAKMIAIIASMRKLLVILNTMIKTEQNWQTV

SEQ ID NO: 476797 - protein, 319 aa, unidentified
MNHTNTNTTWIGIDVSKKELEIHCYDETLKLPSVTANTQIAITKLISKLKECAHPHLVFEATGGYEKLLLALFQAEGIKASRITPSLARNFAKAKGLLAKTDAIDAKVLTDYGIQFNPRLTAPLDPILEEIQALIKYRRHLNDELHRERMHLEHALSKSVADMVKTRLKSIQKQMDQITATTLALKAKSPTLAEAVKLLSGTKGVGENSAISLLVAMPELGKISNKEAASLAGLAPFNRDSGKMRGQRKIYGGRKEIRQALYMAALVGTRFNPILKEFYQRLLAKGKPKKLALIAVMRKLLSYLNALMKKHLQQIEIAC

SEQ ID NO: 476798 - protein, 411 aa, unidentified
MEDVMDVIVDRCCGLDVHKASVSACFRRGHESEVRTFSTTTKALLELSDWLSQGGCTDVAMEATGVYWKPIYNILEDGFNVILVNAQHIKSVPGRKTDVKDSEWIAKLLQHGLLKASYVPCAQFRDLRDLTRSRTKLVQMRTGVANRISKVLEDANIKLGSVASNILGKSCRAMLESIVLGNLDAEALADMSLRKMRSKIPELIDALEGRVTDHHRFMLERLLNEVDYLDSEIELFSRRIDEKMSPFQAELERMDTANGVDKRVAQIVLAEIGVDMNQFPDDKHLCSWAAICPGNNESAGKNKSGKARKGNNWLKSALVQAAWAAVRRRGTYLSAMYHRIARRRGKKRALIAVAREILVSIYHILKDGCTYNELGADHYDKINPDMIKRQMVRRLTSMGYSVTLEPVESAA

SEQ ID NO: 476799 - protein, 388 aa, unidentified
MKKPLLFVGLDVHAQNITIAVALAGEAEARLYGSITHDLHALEKVFAKLRKAHAGAELRVCYEAGPTGFVLARRLAQWKIFCVVVAPSLIPKKSGDRIKTDRRDALKLARLHRAGELTAVHLPDASDEAMRDLCRARTDAVQDLRRGRAQLKAFLLRNGYRYTGKSAWTEAHQRYLRELVLPHPAQRVVLEDAMTAIATAGQRIARLEEQMEALLVSWPMQPVVAALMGMRGFAQVGAMVLVSELGGAWRFAHPRQLMAYLGLVPSENTSDEKRRQGGITKTGNSHARWLLIEAAQHYRLSPKVSKELSLRQQGLSADLKACSWKAQTRLHQRMMQLLARGKQRNKVTVAVARELCGFVWQIFQLMAPRMASVPGANVSTIGSRFGGN

SEQ ID NO: 476800 - protein, 418 aa, unidentified
MKEHNNSRKKSEPTSKRPKTRGPMRRDTKEVLAELVGKLKEKLDPKKVAATSVGEEHQRGELRPNLDRLTVGVDLGDQWSHYCILGLEGETLAEGQLRTTQEDIAEFFQALNAARVVFEVGTHSPWVQEIICGCGHEVLVANPRLMEGSKRRKRKNDRIDANKLARLGRVDPQSLHPMQHRSREVRQDLVVLRARDALVAARTELINATRGLVKSMGSRLPKCSSPSFAQKVEETVPVELRDALLPLVRMAAVLSDCIQGYDEKIEKLGREKYGHTAVLRQVKGVGPITSLAYVLTLENPDRFVKSRDVGPYLGLVPKQEDSGESQPQLGISKAGDTMMRRLLVGSAHYILGPFGPDTDLRRYGLRLCERGGKNAKKRAAVAVARKLAVLLHCLWVSGEVYEPLRQGMSATRIPAAAA

SEQ ID NO: 476801 - protein, 492 aa, unidentified
MFIDRFSAAGCTLLRRILRYCQALRHDSAIRIPNNKVACDGREKQRPDTESEKGTIYVRNAKEGESRKLMSQNQPEIQYAAFLAIDWADQKHVWSLQDANSSTCERGEVDAMPEAVEAWVAQMSQRFAGRPIAVAVEQSRGALVFLLSKYEQLHIFPVPPAMTANLRKAFYSSGAKSDPTDADLLLDLVQRHREKLRRLSPDTEATRLIQNLVEERRKLVDEKSAQSNRLEAHLKIYFPQIPHWFGDVDSPLVCALLERWPTLEALQTARPGTLRSFFREHHCRKEELIESRIRSIREAMPALKDRAVVEAKVAVVKVSVQLIQVLHEGIEGFNRQIQEAAEAHPDFFIFDSLPGAGAVMAPRLLAAFGSQRERYQNAAEVQTLSGIAPVTENSGKSSWVHFRFACSKFLRQSFHEWAALSIPQSQWACAYYELQCRRGKRHHAAVRALAFKWIRIIYRCWKERVAYDEKVYLAALAKHNSPLVAATKAEAL

SEQ ID NO: 476802 - protein, 321 aa, unidentified
MQRILGVDVCKDYLDADTLPSTQKRRFTNDPAGIVELVESARQFGPDRIVFESTGHYQKAAVGALLAASLPAVVVNARQVRDFAKALGILAKTDTIDAAVLARFGQVVPTIVRPLPTPEIQAFQELYDRRGQLVRMVAAEKNHLHATTSAKVIKNIEAHIHYLKKQIKTLEDRMDHFVENSEAFHAKDEILQSVPGFGPHVSRTLLAYLPELGQATRQQIAALVGLAPFNNDSGNTSHTRHIRGGRGKVRLGLYQAAVVAIRHFPQMKDCYVRLKQRGKATRVALIAVARKLLVLANALVRSMKPYDPANSVCPIKPLTAI

SEQ ID NO: 476803 - protein, 338 aa, unidentified
MKIFAALDVGDKATHICVLDSEGAVVWRGVCATDPDVVASTLKRHAAGVERVVLETGPLSAFLYHGLVEREVPVVCICARHAKGALSVRVNKSDVHDAEGLAQLARTGWFKAVHIKGSATHLDRAQLKVREQLLHARLAMANQLRGLLKLFGLRMGKVTTPGKRAERLEALLVQKPELRPILAPLVAGLEALDVQIATSTRSIKARAAADPVVALLMTTPGTGPITALTFKSSIEDPTRFERGEDVGAFAGLAPRRSQSGERDVHGRISKAGDPMLRSALYEAANNLLCRVKRPCHLQTWGKALVATKGAKRARVAVARKLAILLHRLWISGNSFQWA

SEQ ID NO: 476804 - protein, 334 aa, unidentified
MDNVTTVGIDLAKNVFSVHGVDASGTVRVRRTVGRSKLMELVAQLPPCLIGLEACSGAHEWARRFAVFGHTVKLMAPKFVAPYRRGGKNDGNDAEAICEAVSRPNMRFVPVKDLNQQSWLTLHRVRQGFIEERTATLNRIRGLLSEFGVVLPQAAIQVRRAAAQKIDALPVLAAGALRDLLDHVRVLDERIKGYEHQLEQHARTDERAKRIGSLSGVGPLSASAIVASVAEAHEFDNGRQFAAWLGLVPRQYSTGGKTRLGRITCKGDPYLRMLLVMGARSVLQTASRRADHLAKWALAVRDRRGYHRACVAIAAKHARIIWALLTKRQALQLA

SEQ ID NO: 476805 - protein, 456 aa, unidentified
MNDRPTINEGWNNTDEEIAVWVGLDWADRQHSIALYEVGSGKRESYTLKHTAEAFQDWVSGLRAQYGGRKVAVVLEQSRGGVLYALMSCDFIVLYPVNPQSLANYRKAFHTSGAKNDPGDAQLLCEMVRKHPERFRAWVTEDADTRSLRLLVEDRRNLVDEITTLTNRLTSHLKNYYPQALEWAGELNSRQACDFFQRWPTLEALQQTRPASLRKFYLSYGRPRTEVLNERLERIKQTTALVGDRAVVLAGSMMVQALVAQIRPMIIAVEKYDDEIERLFQKHPDRAVFESFAGAGRVLAPRLLAAMGADRDRWQSAAQIQQLSGIAPVTEQSGKHKWVHRRWACPKFLLQTFHEFAKQTIICCDWAKAYYDQQREGGRGHNAAVRALAYKWIRIVFRCWKNRVAYDEDLYVRALQRRGSNLPARTEIVKRARELRRSRRARKSVENLLLNPQLGS

SEQ ID NO: 476806 - protein, 343 aa, unidentified
MQTITAIGLDIAKSVFQVHGVDADGQVVVRRQLKRRYVLAFFQKLPPCLVGIEACASAHHWARELQALGHTAKLMPPAYVKPYVKRHKNDAADAEAICEAVTRANMRFVATKTPEQQSCLTLHRARHLLMRQQTSVINAIRSHLAEFGIVAPVGRNGVEQLLGVVADSNDKRLPEVARACVAALGAQLRVLKVQILEFDRMIRAWHRSSEASMRLDQVPGVGPVLATALVASVADPKAFRSGRDFSAWIGLVPKQNSSGGKERLGNISKRGDRYLRSLFTTGALAVIRYAKIHGTRHRPWLTSLLARRPTKVAAIALANKLARMAWAMMAKGERYKEPAALAA

SEQ ID NO: 476807 - protein, 393 aa, unidentified
MICVGIDVAKDKHDCVILNSEGKILAGVFTIPNNADGFDTLLQKIRSCTSSDDKIKVGLEATGHYSYNILGFLINQGLPTYVINPLHTNLYRKSMSLRKTKTDRVDAKTIATMLMSNVDLKSYTDTAYHNEELKSLTRYRFDKVRERAQLKQSVSRLVTILFPELEKLVPTLHMSSIYALLIEFPGAKQITEAHLTHLKSLLKDASKGRYGRDMATEIRDAAKHSIGSVMPAKSLELRHTIRLIRELDSEIEDIEAAIEAIMEELQSPITTIPGMGFRMGAMILAEIGDFARFDSPDKILAYAGMSPSTYQSGQLSLAGTYSHMEKRGSRYLRYALYNATKYVCHWDTGFAAYLAKKRAEGKHYNVALSHAAKKLVRLIYAMEKSRQPYKRAA

SEQ ID NO: 476808 - protein, 361 aa, unidentified
MKKTTQHLIAEVPSKHSPTELTVGVDLGDVWSHYCTISQNGDVVDRGRFRTNPQGVEKWFKNLAPVRVAMEAGTHSIWISEQLQLLGHEVIVANVRELRAISHSDRKSDQVDAEKLARFARLDPKILRPIAHRTLQQQQALTLIRARDLMVRLRTAAVNAVRGLTKSCGHRMPASTTACFARRGLAMLPAELAPALGPVLEQIAEMTTKIKQYDRQIRQLTQTEYVETQALLKVYGVGPITALTYVLTLGDKQRFQRSRDVGCYLGLRPRRSQSGDRDPQLGITKAGNGYLRMLLIERANHMRRPPGKDSSLRRWGLALAARGGKKAKNKAVVAVARKLAVLLHRIWVTQEPYIPFYAEAA

SEQ ID NO: 476809 - protein, 355 aa, unidentified
MKNQAVQYLAMDVHQATIVASVRNEQGAITMKATVATEAGAILSLVRAVGARVMVAFEEGTQAQWLHDLIGPHVEGVVVCNVRSKSELTNKSDRIDADALSELLRLGALKAVYHGAPSMLTLKELVRNYNAVVEDATRAMLRIKALFRARAIPTSGTSIYRVSDRPGWLDQLTIPGARVRAESLFKQLDLLRELRPKAKRAMIAEARKQSGWKPLRSIPFLGEVRTAQLIAIIATPHRFRTKRSIWPYAGLAVVTRSSADQEFAGGKLRRRNRPPQTRGLNRNHNPMLKSIFKGAATTAAAKPGPLKDIYDACVARGTKPDMARVTLARKIASIALRLWKKGELWDPTKLTMQTT

SEQ ID NO: 476810 - protein, 414 aa, unidentified
MELVYERCCALDVHKRQVTACVHVPDRQGKRTELRAEFQTMTPDLLALRDWLKGLGVSAIAMEATGVYWKPVYYLLEDDFELLLVNAQHVKNVPGRKTDVGDAQWLCQLLEHGLLRASFVPPKPIRELRDLTRYRKSLVWERAREANRLQKLLEDANIKLSDVASDVLGASGRAMLAALCEGNNDPAALAELARGKLRAKLPALETALQGRFSSHHALLLSHLLSHIDYLDQSIDSLSAEIEERLDPFAQQRELLCTIPGVAERTAEVILAELGPDMGRFPSHRHAASWAAICPGNEESAGKRKTGKTRKGDRWLRTALVEAANSAAGRTKDTYLRAQYLRVKRRQGHKKAIVAVAHSILVAAYYILRDQVPYQELGGDFFIRRQDQERLTQRLVRQLERLGQRVTLEPALQGR

SEQ ID NO: 476811 - protein, 407 aa, unidentified
MYNAVGIDVSKGKSTVAVLQPGGVIVRKPFDVVHSISGLKELTDYIISLDGDTKAVLECTGRYHEPILRSLSKADIFVTAVNPHLIKNFGNNTIRKVKSDPADAKKIARYTLDNWADLQEYSSMDNIRTQLKTLNAQLDFFTRQKAAAKTNLISLLDMTYPGVNNLFSSPERSDGSEKWIDYATSFWHVDCVRSSGLKAFTERYKAFCKREGYNFSEARAKTLYENAKELVAVFQKDRSNKNLIEMAINQLRSLTECTIRLKNEMNELASTLPEYSTVMEMCGVGKTLGPQLIAEIGDVSRFTHREAITAYAGVDPGVDESGTRISKSNRASKCGSSRLRKTLFLVMYVLLQTKPDDAVYHFLDKKRAEGKPYNVYMTAGANKFLRIYYGKVKAALAAQANSQADPS

SEQ ID NO: 476812 - protein, 366 aa, unidentified
MQKTSTMRRTANKIFKGRQLTIGMDLGDRWSFYCVLDESGKVILEEKLATTPDAMKQTFARIARSRIAMETGTHSPWVSRLLTQLRHEVIVAHAQKVDLITKSTRKDDRHDAKTLARLARIDPELLGPVRHRSAKAQIHLAVIRARAELVRVRTALINGARGLTKSYGERLPKCGTQQISREFGTGLSTELREVLEPLFREIESLNERIKEYDRRIEKMAKEIYPQTELLKQVKGVGELIALTYVLTIDDPHRFRKSREAGCFVGLQPGRRNSGDSEPQLHISKQGDEYLRTLLVQGAHYILGPFGEDSDLRRWGRKLAERGGKNAKKRAVVAVARKLAVLLHRLWVSGEVYEPLRNTQKVIRAAA

SEQ ID NO: 476813 - protein, 340 aa, unidentified
MKTTTIGIDLAKSVFQVHGVDAAGQVAVRKKLRRAEVLRFFEALPPCLVGMEACATAHYWARQISALGHDVRLMPPSYVKAYVRRQKNDAADAEAICEAVTRPTMRFVPVKSAERQGVLVLHRARELLVRQRTMLINAIRGHCAEFGMIAPQGARRAAELVEQIRQAEARLLPDLARSALLMLADQLDALAAQIHALERRLLAWHRQDQASQRLATIPGVGIITATALAATVVDPSAFRSGREFAAFLGLVPRQNSSGGKDRLGRISKKGDGYLRKLLVVGATSVIRRARTSTSPSALWIKALLERRPARVVTVAMANKTARIAWAVLARGDVYRAPTMA

SEQ ID NO: 476814 - protein, 391 aa, unidentified
MICVGVDVAKDKHDCCIISSDGEFLSDVFTIENTHPGFDLLFQRIKSVAPDLCKVKVGLEATGHYSYNILGYLLDKGLATYVINPLHTNLYRKSLSLRKTKTDKVDARTIATMMLSDVGLKPYSDISYQNEELKSLTRYRFDKVSARGRLKQSVTRLVNILFPELEKLVPTLHMSSVYALLSEYPGAKQIAESHLTRLTNLLETASKGRYRKGRAIEIRDAARQSIGSAMPAKSLELQHTISLIRELDAEINEIEDAIKAIVDGMNTPLLTIPGISYRMGAMILAEIGDFSRFDSPDKLLAYAGLSPSTYQSGQLTSSYAHMEKRGSRYLRYALINATKYVCHWDSTFAAYLAKKRAEGKHYNVAISHAAKKLVRVIFAMQRSGRAYIPAA

SEQ ID NO: 476815 - protein, 377 aa, unidentified
MRPIDNTADTTVYVALELSRAIWLVAVRLPGVEKLVFHRLEAGDTARLLGFVAAHCTRTEASLGASVAVASCFEAGPDGFWLHRLLVANGIDNVIVEPTSILISRRSRRAKTDRLDAQGLLRVLMARHRGDHQICSVLRVPTPEEEDAKRPHRERERLVQERVRIENRIEALLLTQGIRKRPSLRYWDAGMDALRTADGRAMPPLLRAEIDRLKRRLTLTMELIREIEGERSTMLATPPSDDASCKVAALSRIRGVGDTFAAVLTREVFYRHFDNRRQLASYVGIAPIPHQSGAMDRDHGIGRAGNARARTTLIQLAWLWLRYQPDSGLAAWFRERVGALAGRSRRIAIVAMARKLLVTLWRYVETGVLPAGMKLKA

SEQ ID NO: 476816 - protein, 415 aa, unidentified
MEKVYDICCGVDVHKKLIVACLRSGRKNEIRRFGATTRDLLEMASWLNEAKCEMTAMESTASYWKPLYNVLENWGLSVMVVNAHHMKAVPGRKTDVQDAEWIADLLQHGLLKASYIPGKEQRELRELVQYRKSLIEDRARELNRLQKMLEGGNIKLSGTVTQINGKSARNILNFITDGGYFDDAKYDEMLANKDIAHNLKASKEQIIDDLNGVLSPIQRRVMKELLSHLDELNEHIQNLDDDIDRFMKQEDRDAALAIQEIPGIAANSAQVIISVIGNDMSRFPSDRHISKWAGLCPGNNESASKRKSGKTTKGNKMLRTTLVNCAHSAVKVKKSYFSALFARISVHRGKKRAYVAVAHSMLIAIYHVLNDKVAFKDLGADYYNQFNRERKANGMLKKLKALGYEVTIAAVPATA

SEQ ID NO: 476817 - protein, 372 aa, unidentified
MKQSFIYVGLDVDDTQYHGSAFAKHTGVVVDFHCRPTLKGLLRQLEKLRQHFSGCAFRLCYEASYLGYTLQRDLAEQGYHCDVVAPTSIPTPRSKQIKTDRIDAAQLAQFYANGLLTVVSVPEPTQEQDRDLLRTRQHLVEQQTALRKHLQALLRRNGFHYKAQTQSRTYWTLHHSSWLERTIAATSGSLNVNLELLLQHLKGLATILAGYDQQIEELATTPRYEKPVQALICYKGIKQTFALTMITEIGDITRFAHPRQLVAWMGMDIREYSSGGTHHRYGITKHGNRYVRTAFIEANQRGYRTAIISKELKARRAHAVPDCVAIADRCLRRLSKKGNRLLFAGKHPNTVKVACAREMVGFVWESLRKVAA

SEQ ID NO: 476818 - protein, 388 aa, unidentified
MQTVADRPEAPNAIRTDLGAIFVSLELSRSTWLITSLSPDGGEKMSKHAVRGGDVAGLLERFAQLRKKARARTGKVFPFVVIQEAGLDGFWIDRVLRKEGIESHVVDPASITTSRRRRRAKTDRIDGEALVRALLAYKRGEPRVCAMVKAPTPEEEDRRRLCRERKVLIVERVRHVNRVKGLLFSQGISGYEPLRRDRRKRLDTLQTGDGRLLPDHLKAQVRRELDRLELLLDQIKAVEAERDALLAVQQGVAAAPVAMLLNIKGIGPEFAAILWSEGLFRHFDNRRQVASYAGLAPTPWQSGSVDREQGVSKAGNPRLRTTLIQLAWLWLRNQPQSALALWFKERVNRNGGRLKKTTIVALARKLLVALWKYVTAGVVIEGAIMKSA

SEQ ID NO: 476819 - protein, 318 aa, unidentified
MSSAAPTFVGIDVAKAELVIAIHPSGERWTIANEGAGIQTLVQRVRGHAPTLIVLEATGGYERVAVAALAAAQLPLVVANPRQVRDFARATGQLAKTDRIDADILALFAERVRPAPRALPDDAAQALDALLTRRRQVLEMLIAERNRLEHAVPAVRRGITQHIRWLERQLDDVDRDLDDSIQASPVWRAKENLLRSTPGVGPILSRTLIGELPELGTLPRKQIAALVGVAPLARDSGTLKHKRLVWGGRAPVRAALFMAALVGTRCNPVLRAFYRRLLAAGKPKKVALTACMRKLLTILNAMMRTNTTWRHIDHSQTT

SEQ ID NO: 476820 - protein, 348 aa, unidentified
MQVTTIGLDLAKNVFLVHGIDATEKVVVRKQLRRGQLIKFFEPLAPCLIGMEACATAHHWAREFRKFGHDTRLMPPTYVKAYVKRGKNDAADAAAICEAVTRPSMRFVPIKSVEQQSALMLHRTRDLLIRQRTQLINALRAHLAELGLVAAKGHEGLQQLVIAVTESSDERLPNNARFACQAIIAQLHAVQIQINGLDKRVTQAHRANADSKRLEAIPGFGVILSTAVVATMTDPKAFRTGREFAAWIGLVPRQNSTGGKERLGSISKQGDRYLRRLFVLGAISIVRTALTRPDKYPWVTELLGRRPTKVVAVALANKMARVAWAVLARGETYRAPARSSSAAIVAAA

SEQ ID NO: 476821 - protein, 380 aa, unidentified
MRFIGLDVHQKYAEGCEIGPNKEKRRFRIANTRQAWEEFAKTLDSNTRVVMEATSNAFWIHDILSGYPGQIVIANPLKTRAIAEARVKTDALDAQILAQLLAADFIPESWIPNKDEYQLRVLLHHRIRLAKIRTMLKNKIHAALIRNGIQSPWSDLFGKNGRKFLENISLPETEQIIVCSSLKLLDTVQKEMAALEADLCARAKENPNVKLLMGIPGISVLSALTILAEIGPISRFSSPKKLACYAGLVPSVHQSGKTRYTGNITKEGRSTLRWILVQCAQRAIQSKGKLRSFYLRLKEKKGHKIAIVATARKLLHIIWAVLTRQEEYMELTKNLLERKLKSLTKQAQAYVVDMNELLRVIDGIEDVSEKETQSWLFGTG

SEQ ID NO: 476822 - protein, 415 aa, unidentified
MRIVHENVAGLDVHKKVVVAAVIVKQADGNWLEEKHSFGTMTVDLLELSDWLLLHGVIHVAMESTGEYWKPVFNILENNFEVIVVNAQHISKVPGRKTDQSDAQWIAELLQYGLLKASFIPPLGQRELRELTRYRSSFVRERATLVNRVQKVLESANIKLSSVATNVMGVSGRAMLEALIAGNASPEQMAELAKGRMREKREQLTKAMEGRVQAHHRFVLTELLCQIDNIEETITRFDQEIEAYCSPFEEVVELLDTIPGVGREAAEIIVSEIGNDMSRFPTADHLAAWAGVSPGNNESAGKRRSGRTRKGNQALRTVLNQAAHAAAHTKNTYLSAQYHRLAGRRGAKKAIVAVEHSILVIAYHLIERKEPYKELGGDYFDKRNVEATAKRLTKRLERLGYQVSLELQQPVGAPV

SEQ ID NO: 476823 - protein, 351 aa, unidentified
MKTQQTANSKLFIGIDIHKRSWKIHCATDLFCGKSFSMNPEPEQLKAYVSKHFRDYEVSTAYEAGCCGYSAHRAFESYGWFSLVVNPADIHRKGKEKHTKTDKIDAQLIARELKDGRLEGIHIPDVHREELRSLFRRRNDLVKDFRRIKSYIKMQLLYFGIKEPEEFDNDHWSHKYRSWLDAMVFTYPTAKATLESRMRFFRFVDQELRDVSTELRRYCKTHHKKDYMLLRSIPGIGGIVACGILCELGDLRRFNSVKHLAGYVGLAPGVYQSGGNYKTLGITPRAHRLIRSYFVEAAWQAIRADPIMQTYYRKHQGRNVKSIIIKVARKLLSRTLAVIKTETPYAIGVIE

SEQ ID NO: 476824 - protein, 411 aa, unidentified
MVESILKSCAGLDVHKKEIKACIAHGDLDKPPQYEIKTFSTMTSGLRKLKDWLNSYNVTAVAMESTGVYWKPVFNILEDDFDVILSNPYHIKNVPGRKTDVKDSQWIAMLLRNGLVPRSFIPPREIRELRDLTRTRRKLVGNMVAEKNRIQKVLEDANIKLRSVVSKIDGVSSMKIIHALLEKDDLSREEIAEMTHGRLRSKMDLLVEALDGRVTGHHRFLLKMHLDHIEFLADQIQNLDEEIQIRMVPFHVQSSLIQTIPGISNISAASIIAEIGTDMSQFPDEAHLSSWAGICPGNNESAGVKKNSKIRKGDKFLKATLTEVAWAASRSKDSAYSAVYNNIAKRRGRKRALVALGHRILIDVYKTMKFQVPYKDVGAEVVYQRKTKNREQAMIRSLERSGYVVTKVAPA

SEQ ID NO: 476825 - protein, 464 aa, unidentified
MTDKKLWRNRKERKEWARRLQSEDPGLEVVHPHAAGIDVGNGVHYVAVRPDRDPQPVRRFECFTADLHRLADWLRSCGVKTVAMQSTGVYWIPIYEILEERGIQVYLVNARHTKNLPGRKSDVQESQWLLKLHTYGLLNNSFQPPSEIRVLRTYWRQRGEHVHGAATCVQRMQKALTQMNVQLANVISDVSGLTGQTIVRSIVAGEHDPRKLAELSDPRIQASREEVAKSLEGNWRPELLFVLQQEVAMYDTYQQRIAECDQQLQKHLASFADTIPLQPTAEEPQRKKTKPAKNAPRFELRSELQRITGVDLTRIDGIDVMVAQTLVSEVGLDMSRWKTEAHFSSWLGLCPDNRTSGDKVLARGTRRVVNRAATALRMAAVTLMRSRTYLGAQYRRLRTKLGAPKAITAMAHRLARLVYRMLKYGQRYIDKGAEYYEHRYRQQQIEFLRKKAAKLGLQITVAQT

SEQ ID NO: 476826 - protein, 364 aa, unidentified
MNKCHLNTELSSLEGTRSEFNRSKAVIKLGIDVHQDFYVVVEQMEGTNPKPAQRFQKQVFLHWAAKLSKSGSKVHAVYEACGFGFGLQRQLTAQGIHCYVVCPQKLDERNKRVKTDGLDAKALCLKLDRFVQGNREALALVRVPTEAEEQKRALHRQREQLVKARKGLEAQGRSLLVNHGMEPASNWWKGRTFAQLQVPEWMKELLSNSQPILLALEEKIRALTAQLQAAAISKQPRGLGLLSSVVIDREIGSWTRFKNRRQVGSYTGLCPGEYSSGNTRVQSCVTKHGNPRLRAALVETAWRLVRFQPNYKPVLKWRKILAKGALATGAARKKAIVAVARQLAVDLWRIRTGRVAIETLGLIN

SEQ ID NO: 476827 - protein, 343 aa, unidentified
MSNNTRIAVDVAKAVFEVAISDRPGRVSRRERPKRHQFLPYLAQQPPATVVMEACGSAHYWGREIQKLGHHVVLLPPHHVRPYIRRNKTDRTDAKGILEASRNDDIRPVPVKTVNQQILTSLHRLRSGWMLERTARLNTLRGLLRELGVFIPVGSREVVPAVRAAIEDADSNLPDALRAIFMEACREIREIEARMKLVERQLQALSEQLRAVEQLQTIPGVGLLTATAMVGFIGDIRRFPTARHFASYLGLTPREYSSGLKRNLGRISKRGDGYLRTLLIHGARSVLVHARKQQPDRLREWANTLAKTHVQNKVAVALANKLARIVWAVWKNERPFALMAKAS

SEQ ID NO: 476828 - protein, 339 aa, unidentified
MMIAVGVDTHKHQHLAVAVDALGQFLAEVTITATLAGYHELLTWIAALEGEVRVGIEGTGSYGTGLCEYLQDNGITVFEVERPKRRERRTGKSDRLDALLAAKKVLAGDGLSTPRGHGKRVALQMLLVAYRSVISERSRLYNQMQALHVTAPATLRERVGPAKNGAKLAQRLTGMRIRPNASLQENTTLQVLRDIANRIRALDTQAAAYTRQIDALARELAPALMDEPGVGPITAGKLIAFNPARFKSEAAFARANGTAPQPASSGKTVRHRLSRGGDRQINTAIYTIALSRSIHHAPSRTYIQRRVEEGKTKREAMRSLKRYLSRDLYNKLSNTLLTT

SEQ ID NO: 476829 - protein, 327 aa, unidentified
MLYLGIDVSKAKLDCCLLIDPQAPKRKNKSVANSRSGVVELVAWLARHGAPATQVHAVLEGTGVYHEQAALGLYENNVTVSIVNPAQVRSFAQGLAIRTKTDGVDSLVLARYGFLVRPAPWEPPPPEARMLQALLSRREAIAQDLQRERNRQEKAKATDTPVVVRRSIDEAILFLEQQLRQLQQDIDDHIDRHPGLKDDLRLLQSIPAVGPQVGNNMLAVMSTRKFESAEQLAAYLGLVPVERQSGSSVLGRARLSKAGPARIRAILYMAAIVATRHNPHVKAAYERLLARGKSKMSALGAAMRKLVHLCFGVLKTRQIYCLDHAKI

SEQ ID NO: 476830 - protein, 363 aa, unidentified
MSIYGIDLHSDRITVATMVVTEDRVQEKLATFIFKEESYQKFLSSLRSGDYALIENSTNAFWFYDQVAPRIKACFVYDTNDIRSSGNKNDKIDARHLARKLSYYLLMGAKKEDLPTVHIPDAEIRELRGLFTTYRLYNKMKVQTKNRIHSILKQNGICIDRGDIDLKGFEARIEDFQISEVWKFQIRSAYCEFQHIQKRQKEITQMIYLQGNKRFNHEVELLMGIRGFSALTATALMSDVIEVSRFKNAKSFCSYLRATPKVRSSNQTTHVGHVNRQSRPLTCTLLTQSIYQLAQAGEHMERFYARVKVGKSAGKVRIALIRKALVSAYHMLKRNEPYSWVDAELYARKLRSYQRVLRKKIVA

SEQ ID NO: 476831 - protein, 437 aa, unidentified
MEEAGDEPLFCERAAGIDIGKAVVSVTIRVPSDSRRGGRAQETREFGTTRRQLLELADWLRCWGVERAGMESTSDYWKPVYFLLEREGFDCLLYHSSQVKALPGRPKTDKLDSVWLAKVTERGSLAGSFVPPEDIRRLRTHTRYRRRLIQARTAEKQRCEKLLEDAHLKLSSVISDIHGASGRDMLRAIIAGQRNPRALADLARGVMRRKTALLEEALDCSFFTAEHAFVLQMMLDEIDHFTARITVLDEKIAALCEPWERQIAQLGTIPGFGITTARELIAEIGADMSVFPTAGHLCSWARVAPRVTESGGKRKGKSATGRGNPYVGGTLGDATAAATRTPTFLGAKYRRLCRHMPKKKAQGAIMRTQLCIAHALLSDPEAEYRDLGAGYYEQRASTSRQARNHVRSLERLGYKVTINHAPDADPETGELITRTAG

SEQ ID NO: 476832 - protein, 326 aa, unidentified
MVIIGIDVSKTKLDCLWIRDLQAMKIKGKVQANTPTGHQALLAWAMKQTGEDVSGLHFVMEATGVYHETLAYALHDAGAQVSVVNPARVRDFARSLGAQTKTDKRDSVAIARYGMNQSPRLWVPEPVEVRQLKALIARCDAIKQDIQRELNRLEKATASDASEEVRASIETVRSQLEAEKARLESLIEDHIDNHPDLKNDQVLLESIPGVGPVISQHMVAIIRSRSFKQAPQCAAFLGLIPVERQSGTSVYSPPRLSKHGDGRVRAKLYMAAVVATRYNPDIRRQYQRLLKNGKSKMSAIGAAMRKLVHICFGVLKHQTPYRPQPA

SEQ ID NO: 476833 - protein, 417 aa, unidentified
MNSPPETISIQRYIGIDIHKHYLMIGGQNRHQEWTLRPRKVQVSRFRDWAEKNFQPGDAVVIETTGSVWDIYDIVAPLVTRTLVAHARKVRQIAEARVKTDKEDIKRLITLLIADIVPEVWVPPMYVRELRSLISFRWRLTKQITMSKNRLHSVVQRFNLDPPEGGLLTDKNKSWWDRQEFSDLTGFEVERDLEIVKTLEEQKEAIDQKLAELSNTEPWASDMVYLMQIPGFGPIFSMVVLSAIGDIKRFSHPKKLVGYAGLGAGVHHSGQKHQGKSITKEGRKELRWALVEAAWRAVGSDPYWKAQLKRLEKRMHRNKAIVAIARRLLVSIWHILTKREPYRHFDEETIAYKMLIWSWAMDEKSRDGMTPQQFAKYGLLRLGIGQNLERIKRGGALRRIAPTEEILALKPELAPPR

SEQ ID NO: 476834 - protein, 383 aa, unidentified
MWCGVSALNQRESDMNATTAPAKDATVVGVDLAKSVFQLAVANGSWKVVESHRLTRTQFERWFGNRRVDLVVMEACGSAHHWARWLNALGVPVKLLPAAYIRAYVKRNKTDAADACALLEAARCADITPVRIKSIEQQALQGLHRTRSLWQSTRTSRINALRGFCREFGMVIAQGSRLGVEQISRALADPHSAVPALIRRTMQLVVEEIRLLETRISQLERELTLLARQSAACTTLLSIPGVGLLTATAMVAATSGKVQHFRDARHFASWFGLTPKEYSSGSSRHLGRISKRGDRYLRMLLTHGARSVLRAASVAAKTGRTLDGLRRWALAVQGRSNHNKATCALANKLARICYATLRDAQPYGQPAPRLNQKIGRTAFALAT

SEQ ID NO: 476835 - protein, 345 aa, unidentified
MKYYAGLDVSVKETSICIVDQTGKICREVKVTSHPDDLIVVLKDPAWNMERIGLEAGPLSQWLFEGLARAGLPVICIETRHTKAFLKAQPNKSDRNDARGIAQMMRVHLYRAVHVKTLTSQKRRALLTARKLLQDKAIAIENDLRGLLRNFGLKVGVVGSAKFEARIRELVARTLDLVEIVEPLLDARRKLREHFATLHRKLLMIARDDEVCRLLMTIPGVGPVVAVAYTATIDIPQRFKNSKAVGPILGLTPVLNQSGESHRVGRVSLCGDGMMRTLLYDAAQVLLNRVAKWSWLKAWAMSVAKRRGLQKAMVALARRLAVIMHRMWSDGTEFCWSREKLPAGA

SEQ ID NO: 476836 - protein, 443 aa, unidentified
MAGKRKQRLDIVYPHCAGIDVGSEEHWVAVRPDAAEESVRRFGGFSDELRGLADWLEGLGVRQVAMEATGVYWIPLYEVLDARGFEVHLVNARATRQVTGRKSDVLDCQWIWQLMAHGLLRSAFRPADGVCTLRSLVRQRSTKVQDQSRCIAHMQKALTQMNVQLDRVVSDLTGKTGLSILRRMVAGERDPKALAQLRDRRLRADEETVARSLEGNWRREHLFALGQALAQFDFLGAQIKECDAAIAESLERLPAVGTGDVEMSKVMKSPHRSAQQQTALHRALYSMLGVDLTRIPTIAIDTALVLASEIGADLRRFPSSEQFCAWLGLTPPTRISGGKPLPGRAPTVFNRAGQALRQAAVNARRSESFIGASHRARLARMDKSSAVKATAHQLARWIYALLTKGQAYVERGIGAFELERRDRQLQALQRKAAKLGAAVLLPA

SEQ ID NO: 476837 - protein, 321 aa, unidentified
MVKLKKIVGIDVSKLTIDVYDGKKSYQFKNSITGFKQLIKKTSGHYVMEATGSYHVKLASYLFDSNLLISVVNPLIVKRYSQMRLLRAKTDKSDAIMIYEYGQFDELKLWEVPKAYIVEIKQIFTAIDLMLKHRLGYRNQIEAFTQMKIKSKQVFKGLEDQVERLNYAIKELEEAAEKLVLENAGVLYQKLKTIPSIGRKSAIMLIAITNEFKDFENSKQLSSYVGISPRIYQSRTSVNGKGKICKMGMGQMRKILFMGSLTAIRHNLACKEIFNRLVEKGKPKKVALVAVMNKLIKQAFAIGTKLENYVEPKLNLEIKLN

SEQ ID NO: 476838 - protein, 422 aa, unidentified
MLAASEDEEQIIARVAALDIGKSELVCCVRVPAEGSSGTRLQEVSTHSTMTRSLSELANQLVELRVERVVMEATSDYWKPVFYLLEAHGLDPWLVNARDVKHLPGRPKTDVLDAVWLCKVAERQMLRPSFVPPWPIRRLRDLTRYRIDLVGVRTAEKSRVEKLLEDACIKLSVVASDIFGVSGRAMMAALIAGERDPKTLAQLARSRMRTKIGRLEEAFNGHFDEHHRFLLARMLARIDGIDADIAAVDTQIEAYLAPFAAAAARLDEIPGIGPVAAAIIIAEVGVDMSRFPTAGHLCSWAKFSPGISSSAGKTKGTGSTGHGNRYLARVLGETAVVAGRSDTFLGERYRRIARRRGKKRAIVAVGRSILVIAWHLLADGHTRFTDLGSDHYTSHINPDTKKRNHIRQLEALGYTVTLTPAA

SEQ ID NO: 476839 - protein, 457 aa, unidentified
MQTRIIGIDLAVTAKHKAIVLEQSSNRYVSKLLQFHTDPVAIDRVLRAARADAPDELQLVAVLEATGMAWYSVGMYLRRHDVDVYRVNGQKVADLRRVLKRHAKSDRIDARVLARLALTCPESLHRCPFPSAGQMALQRACREAARLTECITASKNRLLATDQFAWLGLSDIIPPYEDAAFWLREHWYNPWQVVEVGEAALANAWRTASPQQPADTRWIPFLVRRAQQVIALYGADDAVPYAQLQASLERAQQRIRTAQADLHTLRLSVVRPLYRQLHPQRHLETLQGVGQDSAAIYVAFIGNILRFPSLRDFRGWSGMIPFSSQSGEAQARGLHITKAGPNLIKATAFLNAEVARLWDPQIAAIYHKQMVVHGKHHTQAVCACATHLLDRIYAILRADRPYQLRDVDGTLLDKRQARLICREQYHVPDEVRRRNNHRARKARKERLVERRYNRRQH

SEQ ID NO: 476840 - protein, 356 aa, unidentified
MADKLIVGIDISKDWLDLCASNAAGVERIANTPEVVAAWLERVGAGLIAFEPTGGYERTLIAAARERGIAFVRVHPNDVIAFRKSRGIKAKTDAIDARLILAFVCDKAARAELRTSLIGDDRLRALAARRRQLADALQAERCRLDAAALPAVRASLEAVIAVLRHSLGVLEAELADAVAAHPQTAELAKLLQTIFGIGPVVAITLIADLPELGLLSAKQIAALVGLAPHTKRSGKTRYRETTGHGRPGVRRVLFNAARTAVRHPSLFKDFYDRLVTDNRRPGKVALTAVMRKILITANAVARDHEPWHGRLAAGTPCRPHAEQTDHRAGRVKAAAARRAVARSASLCVGHVRQFWG

SEQ ID NO: 476841 - protein, 345 aa, unidentified
MELQTIGIDLGKTVFHLVGLNRCGEVVVRKKFSRKQLLHFTANLQVELIGMEACGGAHFLGRALQEQGHAVRLMPAQYVKPYVKTNKSDYIDAEAIAEAVTRPRMRFVPIKSDDQLDLQSLHRVRERWVMRRTAVVNQIRGLLLERGITIRKGRCHVDAALPGILEDASTKLSGALRLLLAQLRLELDHLQTRIDEADAVIQQTAGENEACRRLVAIPGVGPVTATAIIAAIGNGAAFRKGREFSAWLGMVPGEYTTGGKQKLLGISKRGNSYLRRLFVQGARAVLQQSAKQSSGLSAWLTQLTARTHPNVAAVALANKLARMAWAVLAKNEPYRPPVLADAATD

SEQ ID NO: 476842 - protein, 406 aa, unidentified
MRYYIGVDWADAADAVWVEDEPATKILARSVPHTVEGFTEWGRWLDEQRALGVELWAAIEKPDGRVVDFLLDHGVVVFAINPKAVDRARDRFRASASKSDLFDARVLATFLRTDHHHLSPLRPSSETAQELKGLTRDYARQVRQQTRLLNQLTATLKAYYPRALELSEDLKHEWVRAFLHDYPTPAALAALTERQWQRWARGRRLSTERIAALWDVLRAPQLPVPPHVVRVRARLVGAVLEQLAVTVRTVQAYREAITDFFAGMPAATWATSLPGGRSGTTVPTLYAELGDAAGRWDSFRHLQAHAGSVPVTDRSGTYAAVFFRFACNQHLRQASHQFAANSLAHSEWAKAYYDRCRKRGHRHHHALRALAAKWLKILFVLWTRQVPYDETHHLATMARQHLRRAA

SEQ ID NO: 476843 - protein, 400 aa, unidentified
MRYIGLDIGRDFAHVAVVEGSGTARRLPRIAMGDEFRQFTATLGPDDTVALEASTNTWALADLVGRHAGAVVVSNPLRTRAIASAKRKTDDIDAATLAELLAADYLPPVWQPDEATRRLRRLVSHRAGLVRDRTAVRNRVIAVLSRQLLRPPVTDLFGVRGRAWLGSLELPVEERLALDAAVRLDTVLSEQVLAADQAIAAAVVDDPRVRRLLTIPGIGLVIAASILAVVGDIGRFDRPAKLASYLGLDPRVRQSGDRPPMRGHISRAGQAHARGLLCEAAHSAVRSPGPLAGFHARIKARRGGAVATVATARKLAVLVWHLLAKDEDCRFAPEARTAFKHRQLDRLAGRERTRPSQRGATGFSHDRGRARLRGGNDPHRPALCQAIDRVQSHGTSPSGA

SEQ ID NO: 476844 - protein, 350 aa, unidentified
MAMTIVGTNPDAVIGGVDTHAEVHVAAAVNHVGGVLGVESFPTTRIGYRQLVSWLESHGELSLVGVEGTGSYGVGLARYLARAGIAVVEVDRPNRQTRHRKGKSDPVDALSAARAALSGTATGLPKTRDGNVEAIRVLMIARRSAVDSRIETLNQMRHIVFTATPGIRGKFEGLTAISLANTAAALRPREGEDPVRYTTLVTIRALGQRVQYLREETKRLNRLLRPLIRQTAPTLLEVYGVGYDTAAKLLVAAGDNPQRIRSEAAWAHLCGVAPIPASSGKTARHRLNRGGNRQANSALYRIMLSRLRHDQATRDYVARRLSEGKTMGEIGRILKRYIAREVYKHLPRAA

SEQ ID NO: 476845 - protein, 427 aa, unidentified
MEVIHPRCAGIDVSKKDAKVCVRIQGRGRKATSSTVTTWSSMTSSILGLREHLIAQGVTCVVIESTAAYWKPFYFLLDDALNVMLVNARHTRNVPGRKTDVSDAAWLAELGAHGLVRASFVPPEPIRILRDLTRARTTIAQARTKEIGRLETLLEDTGIKLSSVACEITGVSGRAMLEALIAGQRDPAVLADLAKRQLRNKIPALTEALQGRFNDHHAFMVRLYLDRIDAHEADIARLDARIEEAVAPFRAARELLVSIPGWSQVVADVFIAETGADMSVFPTAAHLGSWAGVTPGNNESAGRVKSAKTLPGNHHLKAALGVAALSASRSPKTYFGARFRRIAGRRTTRPGTKKSRRQSAAGQTAIVALEHKMLTCAWHMLVNGTFYQDPGPDYYTRHQPAHTKNKAIKQLRALGYHVTLEPLNDVA

SEQ ID NO: 476846 - protein, 407 aa, unidentified
MEVVYRCCCGIDVHKKVIVACLVNGGEQELREFGTTTSEIKTLANWLTESGCEMIAMESTGVFWKPLYNLFELMDLDAMIVNAAHMKALPGRKTDVKDAEWIADLLRHGLLKASYIPNREQRELREITRYRKSLTEERCREVNRLQKILEGANIKLDSVVKDITGKSARKLLQRIIDDDIPDSDEVSKLVHGRMRPKLEQIVASIEGITTPLQRKLLAQIIDHIDDLNRRIGELDKLVQEYMAEYEAAIEAIDEIPGIARRSAEVILAEIGLDMGRFPSAAHLCSWAGVCPGNYQSAGRRKHGKTTKGNKALKTILTQCAKSAKTVKSSYFFAQYQRISARRGKNRATLALAHSMLIAIYHILKNKTAFHDLGSDYYDSFNRDRKINSYLKRLKALGWEPDAIPSSA

SEQ ID NO: 476847 - protein, 440 aa, unidentified
MAMRKRTDTVFPNAAGIDVGASSHWVAVPPDAAEESVREFGVMTDDLRALADWLLACKVEIVALESTGVYWIPLFEILEQRGLQVWLVDARQMKYVPGRKSDVQDCQWLQRLMSYGLLRAAWRPAGEVCELRAIARLRETLLAEQASWVQRMQKALVQMNIQLTEVLTDVMGMSGQAIIRDIVAGERNPEVLARHRHRRVKASTEEVIRALTGNWRQEHLFVLGQALSMYDDIARHLRECDAQMQVLLGQRAQCAINVGAVPRAGSKARAAFDVRQMLANWAGVDLTRINGLEVSSVMKILTEIGPDLSRFANVKHFCSWLGLCPGTKVSGGKVLSAGTKRSANRVRQALKMAAMTLSHSNSALGAFYRRLCSRMDKPKANTATAHKLARMVYFMLTRGEAFVDQGQQRYEELQRERSIAALKRRATALGFQINPIGAAA

SEQ ID NO: 476848 - protein, 344 aa, unidentified
MEYVGIDLHKRQSQICIVRAGGELIEVTVATTRERFGAALGRRAPGRILLEASTESEWVAQCLEGLGHEVIVADPNYAPMYPERRRRVKTNRRDAQTLAQACRLGAYRPAHRVSAAQRTIRQQLTVRDVLVRTRTRAIAMTGALVRSEGLRVRSGPAEQFRMRVEELPLPASLRATVTPTLTLLATLEREIGEADRAIAAIAATDPMVTRLTSAPGIGPVTAAAYVATLDRADRFAGPHQVESYLGLVPSEASSADYHRRGHITKAGNDRLRWLLVQAAWSVWRSTRAEAQPLRAWAHAVARRRGKCVAVVALARRLAGILFAMWRDESVFNSARLGRRTKSAV

SEQ ID NO: 476849 - protein, 347 aa, unidentified
MKILALDLGKYKTVACEYEAASGAHRFTTVSTTPQALHDLIVEREPDRVVIEICSISGWICDLVRALGIKIQVANTSDDVWRWRKVKQKNDRRDALKAAQLSAVNQLREVHVPEVEMRQWRALIAYRQQLVRRRTKIKNHIRDLLLREGKLLPRAQKAWTQIGIATLEAMAQPLGDLQMRELWRGELAVELAQLKEIQQQIQILEAKLNELGAADARVRLLRTIPGVGPRLAEAIVTLLDDPTRFRNPSEVSAYIGMVPKQLDSGETERSGRITRQGNRLVRSLLVEVAWASLRHNAWARQSYQRISGGKKSRKKIAIVAVGRKLLVRCWAMLRDETPWHWETKVAA

SEQ ID NO: 476850 - protein, 339 aa, unidentified
MNLYAGLDLHSSNTFIGVLDPQFNRIFKKRVSNDLDLILKSLEPFRDRLKGIVVESTYNWYWLVDGLMDSGYACVHLANPCAIKQYEGLKHSDDQHDAFFLAQLLILGILPQGYIYPKETRPVRDLVRKRLFLVQQKTAHILSLQSLLARCCGQRVSSNQLRKVTGHDLRQWLKEEHLVLSGQANLDNIVFLKQQIGRLEEAIQKQVKLSDAFNCLLTVPGIGKILAMTIMLEVGDIRRFATVGNFASYCRCVSTQRLSDGKSKGSGNRKNGNRYLSWAFTEAAQMARRFNSRFRSYFDREAAQTNSILATRALSNKLARVCYYIMRDQVEFREESVSH

SEQ ID NO: 476851 - protein, 364 aa, unidentified
MKSVYHIGMDVHKETVRIAVLKDNSSETAYERTVDNDTGKIVNIILGFKAKGDVVAGYEAGCLGYTLYRSLRKHDIDCRILAPNKVVRSGSDKIKTDKRDAILIARMLKHNEGESIYIPTEADEATRDLLRCREDLKDEIKRAKQQLQKLLLRLGHLYDTDRYWTQRHRDWMKSIEFKYDTQTMAFYQYYHHIEALEARIDRIEEKIVEIAHSPEYSERVQPLRCFKGIDYLIALAIVCEIGDFKRFPNAGAFMAYLGLVPSEFSSGGKRKQGGITKTGNGHLRKLLVEAGWHYRYGGEASQRLQERRKGADEHIIAYADKALCRLHKKYSFLTRAGKSKQLAVTATARELAGFVWGAMNQVYN

SEQ ID NO: 476852 - protein, 367 aa, unidentified
MKKISTVTTKKVEKNASQKLTIGLDLGDRFSWYCVLDEAGEVVLEQKVATTPKAMKEVFGGMPRSRLALETGTHSPWVSRILSELGHEVIVAHARNVRLIGESRKKDDRLDARTLARLVRIDPQLLAPVKHRSAQAQADLMAIRARAGLVRARTSLINTARGLTKSYGERLRGCNPRNMNAEKAQELSPELQAALGPLLGEIESLSERIREYSERIEQIAKQSYPEVARLKQVKGVGTLIALTYVLTLEDAHRFGKSRDVGCYVGLQPGRRNSGQSEPQLHISKEGDPYLRTLLVQGAHHILGPFGADSDLRRWGLKLAERGGKNGKKRAVIAVARKLAVLLHRLWVSGEAYEPLRNQREVALPAAA

SEQ ID NO: 476853 - protein, 408 aa, unidentified
MNAVGIDVSKGKSMVAALRPMGEVALLPQEFLHTEIGLEQMAYAIIALGEDTRVIMEATGRYHEAVAAALHEYGIFVSVLNPLYIKQSGGGSIRKVKTDKADAMKIAKYGLDNWVDLREYTPMGTVRQQLKLCSRQYDLYMKTVVSLQNNLISLTDKTFPGVNELFSSPDRADGHQKWVDFVMTFWHCDCICRVSEKAFTDRYQKWCKRKGYHFSAEKASDIYAGSCGHFTTLPKNDNTKLLITTAAQQLLAGKMTLAALRAEMTRLARQLPEYDTVCAMYGVGETTAAQLMAEIGDVRRFPRRSSIVGFAGVDPAVDQSGKHEAQSTPTTKRGSPHLRKTLYQIVCTYLRKAPADEPVYQFLDKKRAEGKPYFVYMTAAQNKFLRIYYARVKECLAAFDARQDTAQN

SEQ ID NO: 476854 - protein, 372 aa, unidentified
MTRLHAMVGEHAGDDEEPAVRVGIETDRGLWVMALTAAGYEVFAINPLQTSRYRDRHQVSGGKSDAGDAHVLADMVRTDSHQLRQVAADTPAAQAVKVVARAHKTLIWERARHVNRLRHQLLDFFPAAVEAFEDLDAPDALELLAKAPDPVSAAKLTTAQVSAVLKRAGRRNIADRTAVIRSAFRAPQLAQPPQVTAACASVVRALTAVLAALNQQITVMEAQVDAHFLQHPDAEIIMSQPGLGHILGARVLAEFGDDPARYASAKARKNYAATSPITRTSGKKKIVLARHVHNDRLLDALDSQAFCALTASPGARAYYDQHKARGISHHAALRQLANRLTGILHGCLKNRTLYDEDTAWPQADSQHISSAA

SEQ ID NO: 476855 - protein, 355 aa, unidentified
MTSTKYIGMDVHKESISIAVMNSIGKVVMESVIETKASMILQFIDGLRGDLRVTFEEGTSAAWLYDLLKPHVTKLLVCDPRKNKSMREGNQNDKIDARRLAELLRLNHLTSVYHGEHGLRTLKELVRSYLTITKDLARVKSRVKAIFRSWAIPCSGKRVYARCHREEWLGKISEPGVRRRAEFYYQQLDALRALRQEVRRELLVESKKYKAWKRLCEIPAIGSIRAAVLLGILQTPNRFRSKRPLWNYGGLAIEMHSSADHRSVNGQLQRSRKNVLVRGLNRNCNHDLKNLFKGAAAVASSKPGPFQEFYTALVAKGMRPEMARLTLARKIATIVLIVWKRGVSFDAQYLKPQTA

SEQ ID NO: 476856 - protein, 420 aa, unidentified
MFKIFRFNCCGLDVHKTWIYACIGITDSNGRTEYKEKRFSSFSKGLRELDEWLTLYSCDDVCMESSGKYWIPVFNVLEKNHKVTLAHPKYTKPQKGNKTDRKDAKWICDLFMCNMIKPSFIPPPDIRQLRDLLRYHRKLTNMETGEKNRAQNCLTVSNLKLDEVFSDVFGKSALSITKYILDHPGESFDVSPFVHGRCKTPIEEIQAAVDGAISKEQAIKLRQCLEHIDQLEEHKQSIKNEILTITEPYSETLELLRTIPSFDKNPMTAITILSEIGSDVTVFPTAKHLCSWAGCCPRNDQSNQKVKCRRISQAGTYLKPILVQIANALIKSKSHTEFIERYRRLKARRGHKKAIIAICKMLLTAIWNILSKHVPYTNEGYFTSSPNIKKDKVLTTTQALTLLRLRGYTISDDNSHLTAS

SEQ ID NO: 476857 - protein, 431 aa, unidentified
MLKINPLSTLYVGIDVSSKSNYVCALDFFKNKYINSSFANNQPGAEELALKILECLKEHPDITTIVAALESTSVYSIHIANYLSSCEELMRFKPYVFVLNPKCTANYKKSYIGLGKSDPIDAFVIADYARAGNIESEPWRGSQFLALKRLTRHRLHLVECMTREKTYLVSNLYLKFSELQMLEGDDQPFCDIYGATSSSVLMEYFSPEEILDSSEEDLIAFLAKKSRNRIKDISKTADLLKKAARDSYRLDQALYEPLNVSIASSFNCIETFKREIKVIDNAIEKEIKGLNPNAFIILQSIDGIGPVFAGGIIAEIGDITAFHSSDALAKYAGLTWKSNQSGDFDGEDTPMIKAGNRYLRYYLGEAANSMRKHNVEYGTYYRKKYNEVPKHQHKRALALTSRKFVRLVYGLLARNQLYSGVSLDTSIKDSN

SEQ ID NO: 476858 - protein, 429 aa, unidentified
MPIVGGLDIHRKQITFDYLDTATGEVKRGQIAPADRKHVRAWLARFAGRGEVAFAIEGCTGWRYIAEELAAGGLEAHLGEPADTAAARGRKRHAKTDKTDARHLRTLLAEGRLPECWIPPEQILEYRALLETYHDLRAEHTAWVQRIHAVFFHQGAPRLGEGVLRTEQGRAGLRAAAAAHLSPAGQLQVATALDMLAAVEARLGPLRQQLRDAARHLVGAKVLAARLYGAGPVTALALTCWLGGADRFSSSRKAVRFTGLDVTVHSSDRKGPPGRLSRQGPPVLRWAVYEAGKTHARTSAPDHGYYAAVKDRKNGKRAALSEARKIVRQACHILASSATTRSPPPDSPTVPWRPRRGHAGPGQERLQPYSLDGEPPRPAPASRLSAAAGSRHHEPGGRPNKTERPHPAGGDTRSNILSPGQHPAPRAPR

SEQ ID NO: 476859 - protein, 311 aa, unidentified
MGVGRYAEAASPPEAAESLQEGSMRHIGVDLHKLAFTACFLEEDDSQHLATFPLTPEGLAAFRAQLVATDKLALEVGQNAYFFHDQVRDAVGEIQLVSPYQFAVIAKSTKKTDRHDARALARFLKLGCLPTVVMPDDRIRELRQLFTAREAFVRVSRQLKNMGHAALVRNGVTSRKSDFASGVGRRRLGLPQGLRPSDRRILDSVLRQLEAVEAELIELERAIIRAGKNLPGLKRLLQVRGLGLVAAIGVLSEIGDIARFASAKQLVSYSGLATAVHQSGGTERYGHITRQGRKRLRGFMVEAVLSLARFS

SEQ ID NO: 476860 - protein, 339 aa, unidentified
MTEITRVGLDLAKNVFEVHAVNAQEQVVVRRSLRRNQVLTWFAKHPPCLIGIEACGTANHWARELTTLGHTVRLIPPAYAKQYVRRNKNDAADAAAICEAVSRPSMRFVPIKTVEQQADSVTHKARQILIKQRTMAMNSLRSLMAEFGIVVPQGPQHIGKLLAILADPEDTSVAAVARTALNTMSQVLSALEMQIGVLDKDIRVRARTDVTARRLDTIPGFGPILSSAIAAIVTDPRHFDSGRDFAASLGLVPRQDGTGGKVKLGPISKRGNGYLRRLLVNGATAVLNGKNARNDPWRAKMLDGKPRKLAAVALANKMARIAWAVMTRQEDFRPRAVPA

SEQ ID NO: 476861 - protein, 363 aa, unidentified
MATKAMTLVGLDVHARQTHAAILDPVSGELRVSRLRMPAAEVARFLEGLGPRTLAVYEAGPTGFGLARAAGERGVEVRVVAPGSIPKGSGDRVKTDRRDAIRLVRLLAAGELCFAFVPSVADEQFRDLVRAIEDVRGDLMRARHRLGKFLLRRGERYPAAGRAWTGAHRAWLRGLRFEDACSQATFADYLAAVELLTGRRASLLVALEEQIPASSHARVIARLRCFRGIDTLSAAGLCAEIGAFARFAKPTLLSGFLGVVPSERTSDTKRRQGSITKAGPPHARRLLVEAAHHYRHPPRIGPALAARQHGQDPRIIEIAWRAQRRLHARWQHLHHQRRKPAGVVAIACARELAAFCWEAATLD

SEQ ID NO: 476862 - protein, 480 aa, unidentified
MPQLNDKSNRKARRIGFRPVGTRRKARVAKDPTKGLQVANPNAAGIDIGCAEHWVAVPPGRSKEPVRKFGCCTADLEALADWLVECRVDTVVLEATGNYWMVLYDLLEERQLRPVVVNPRYAKNMSGKKGDIPDCQWMQKLHSYGLFANSFRPSESLRALRTYLRQRESLVVAVGQCIQHMQKALTEMNVQLANVISDISGDTGLRIIDALLAGERDPKSLARLRDWRIRAREATIARALEGHFKTEQLFVLEQARLSYAHFQEQILQCEERIQQQMRAIESRLPEGAQPVAPEAAGVNPPAQRGAPRTQATTGSFNLPNELRRIVGVDLTAIDGIGALTAQVVLSEVGTNMNPWPTEKHFASWLGLCPDHRISGGKVLARSTRPVVNRARHALRMAAYTLEHSHSALGAKYRRLKRKLGAPKAIVAMAHHLARLIYRMIKFGQEYSDKGMEAYEAKYREQRLRWLEKQAQELNLQLVAA

SEQ ID NO: 476863 - protein, 424 aa, unidentified
MKVTYQTCCGVDVHKSFLVATIVKTTGGIEPSYQKKRFSTFNNSILEFKQWLLDNHCHDVCMESTGKYWVPVFNLLEDKINVVIANPKWVKAVKGNKDDTKDSKWIGDLFRLGLVKGSYIPCKKVRILREYTRYRYKLVSCRSSEKNRYQNALTVCNVALDSIVSDIFGKSSTSIIDYLLEQSGTSINHEEIASKLLRSLKSKEDAVIESVEGYQMTDAQKYRMRLVRAHMDYITAEINDVDKMIENMISSNPDFENAVQFLCTIPGVKRDSAITIISETGTDMSQFSSSKRLCCWAGLTPGSNESAGKKKSVRITRAGVYLKPALVQCAHAAVKSDKSPYYKKKYESLVKRRGKKRAIIAIARMILTAIYQMLSTGEQWNPSDLYKIDMPEALVEKQKAKAIKQAKKLLQREGILPPDEPLAS

SEQ ID NO: 476864 - protein, 370 aa, unidentified
MKKDTLFVGLDTDKKHIDVAVAEPLPRGEVRYWGRTANTPASVDRLVKKLGQGGRELVVCYEAGPCGYGLYRQLTGKRGVRCLVVAPSMTPQRPGDRVKTNRRDALKLAKLLRAEELTEVWVPDAAHEAMRDLVRARASVVSDLTRCRQHISSFLLRQGIAYIGKPWTNKHRAWLGMLKVEHAAHRLLLVELLSALDQTKARRDRLTDHIRELVPTWSLAWLVEALQALRGYDLINAAVMVAELGDPRRFDKPRQLMGFVGLNVSEASSGETVRRGRLTKTGNKRARKTLIEAAWTYSRPAATTSKPAAARLPAAVQQIADKARHRLSRRYRHLVKRGKLKQVAVAAVARESLGFIWAIAHAAAPRPVQS

SEQ ID NO: 476865 - protein, 363 aa, unidentified
MPMKKPKQHLIAEVPRRDSKVGMTIGIDLGDVWSHYCTLNEDGEVVDRGRFRTSPSGVETWFTDLPPVRIAMEAGTHSIWISEQLQELGHHVIVANVRELRAISHSDRKSDRVDAEKLARYARLDPKILRPIAHRTVAQQEALTLIRARNLIVRLRTAAVNAVRGLAKPCGYRLPASSTLCFAKRCVAVLPPGLALALGPVLDQIAEMTVKIKHYDRAIKRLTEAEYPETQALIKVYGVGQLTALTYVLTLGSKERFQRSRDVGCYLGLRPRRSQSGDRDPQLGITKAGNIYLRSLLVECANHVLGPHGKDSGLRQWGLHLASRGGKQTRNRAIVAVARKLAVLLHRIWVTQEPYVPFHAVAA

SEQ ID NO: 476866 - protein, 341 aa, unidentified
MEHCGIDVHVKSSQVTVVDDEGEVLERVTLPTTRVALGRWFGGRPAMRILLEASGSSPWVSRVLREFGHDVGVVDPRRVRMVAESTLKTDRIDADTLAELARLRMRLRTLVWQRSEASQLQRGHLRVRRALVEARARFIVTIRGLLRSFGVRVASCRADRFVARCEATAMGPELTAIIAPLLAAIQDLNERIAAMDAVVEHVGQGHAAVASFQAIPGVGPVVALGYVLSVEAPSRFRRSRDVPGYLGLRPRLRASGELVRRGGITKEGDSDVRRLLVQAAHAHLRSRTDTALKRWAEGLIPRIGKRKAIVALARKLAVLMHRLWLTGEVYQPFPEEVAKAA

SEQ ID NO: 476867 - protein, 397 aa, unidentified
MYIVGIDIAKRKHEAAVIDGDGAVIIKPFSFTNNCSGYNRLLAMLTKAKLPLDEVSFAMEATGHYWLALFTRLQKEGFRVQVINPVQTNSIRSFYIRQAKTDPRDALLIAEVIRFGHFSESTLHPENIYELRELCRGRHAIVSMQADVKRKVVALLDQVFPEYETVFTNMFGDTSMAILQTCPTPKELSEMPLEELCHLIEVSSRKRFRMAKAQELQELARNSFGFAMAGDVFSTMIRLYAKHLDFLKQQVREMDRKIAEIMDTLDTPITTITGIGPTLGAYILSEIGDISRFSSAAKLAAYAGIDPTMRQSGEYNGVRNRMSKRGSPYLRHAIWLAASSAVLHDPALKLYFQKKRDEGKPYMASVGHACRKMVSIIYAVMRDNKAYTPYIPNEISA

SEQ ID NO: 476868 - protein, 334 aa, unidentified
MENIALIGIDLGKNSFHIHCQDHRGKAVYCKKFTRPKLIEFLASCPATTIAMEACGGSHFMARKLAELGHFPKLISPQFVRPFVKSNKNDFVDAEAICEAASRPSMRFVQPRTESQQAMRALHRVRESLVQDKVKTTNQMHAFLLEFGISVPRGAAVISRLSTILEDNSLPLYLSQLLLKLQQHYHYLVEQIKDLESQLKRKLDEDEVGQRLLSIPCVGTLTASTISTEIGDGKQYASSRDFAAATGLVPRQYSTGGRTTLLGISKRGNKKIRTLLVQCARVFIQKLEHQSGKLADWVRELLCRKSNFVVTCALANKLARIAWALTARQQTYAA

SEQ ID NO: 476869 - protein, 355 aa, unidentified
MTKIKYIGLDVHQASISIAVRDESGKLVMQSVIATRASAILEFLEGLRGTLYVTFEEGTYSTWLHDLLVRRVSKVVVCNPRKNALLKKGNKSDRIDARKLSELLRGGLLSPVYHGENSTRTLQELTRSYMTLTVDTTRVMSRLKAIYRGQAIPYGGKKLYTRKHRQEWLVQLHQPGLLRRAERLYEELDLLQQLRRQAKQELMMESHKHSVCERLRTIPYLGPIRAAVLAARVQTPHRFRTKRQFWAYCGLGLETRSSADYQQLEGQLQRSRKKVLVRGLNVDHNHDLKNIFKGAALSASIFAGPLQDFYQQRINCGIQPEMARLTLARKIAAVALTIWKKGESFDAAKLKTQAA

SEQ ID NO: 476870 - protein, 337 aa, unidentified
MKVNTIGVDLAKNVLQVHGVDEQGKVVLRKQLRRNQVMNFFAQRTPCLVGMEACGSAHDWARRLIKLGYTVKLMAPQFVKPYVKTNKNDAADAEAICEAVRRPNMRFVPVKTEEHQAVLSLHRARQGFVRQRTAQANQIRGLLAEYGVVIPQGIRHIGQCLPEILEDADNALPGLFRQLLRQLGEHLKTLTRLEEMEEQMQQWHGGNEASQKLAAMPGIGAITATALVASVGDARNFSNGRQFAAWLGLVPRQHSSGGKTTLLGISKRGDRYLRTLLIHGGRSVIAAAERRKTSPVEESLTQQRSMAARAGVAEKQECRRGRSRQQECAGDLGVVGA

SEQ ID NO: 476871 - protein, 349 aa, unidentified
MSEKYVAMDVHKASVAIGVRDNKGKYIMESIVETKASTLVEVVKGLSGTIHLTFEEGTQSAWLYDLLRPHVAECVVCNPRQNKLLEAGNKGDRVDVQKLSELLYLGALRPVYHGDHGTRALKELARNYESLVRDRTRVKNRLKAIYRGRGIGCEGDGVYNPSKQAQWLKQLAERGVRQRATSLYGQLESLNAMVAAAQGQMLAESRKHKATSILRSLSTLGPISTAMIIATCDTPHRFRTKRQFWTYCGFAVVTRSSSDHYFEKGELHKRRKPALTRGLNRNYNRRLKQVFKSAATSGSRRGPFKPIYEQLLAKGLKPDLAKLTLARRISAIALAMWKKGERFDPKKLK

SEQ ID NO: 476872 - protein, 353 aa, unidentified
MNSSMDENEVILGVDTHLDTHVGVLISTNGNLLGCLAVTTDTSGYLKLVTWANSFGMLKRAGVEGTGTYGAGLARVLRDHGIEVLEVNRPDRSKRRLQGKSDPTDAESAARSVLSGNATAIAKTQSGVAEAMRVVSVARRSAVRAKTQAINQLRALLVSAPQDIRERLWKTKPGDCAKGCARLRSRSATEFLNILTTSLCLLGKRWLALAEEVEKLDAILENLTRQHARRLREQFGVGPQTAAVLLSTAGDNPERLKSEAALAALCGVSPLPASSGKTVRHRLNRGGNRSANNALWTIAMVRMRGDPKTQSYVARRSAEGLSSKEIQRCLKRYIVRELYPLILADLADSARSC

SEQ ID NO: 476873 - protein, 354 aa, unidentified
MKRSTKYVALDVHQATTLASVREESGRVIARSILPTDGPALTEFFRGMRGAIHVAIEEGTQAQWLHDLLAPHVDRLIVCDRRGQPRQGNKDDRHDADALSEHLRRGGLRAAYHGGGTGAGLKELTRCYQNLVEDTTRVMLRLKAVFRARAIQTPGRAVYRPARRAEWLAQLPPGGARVRAEALWAELDALVALRPKAKTAMLATAAREPGWAVLRTIPCFGPVRVALLLATMQTPWRFRTKRQLWAYAGLAVVTRSSADYVLVDGQAVRRRRAPLTRGLNRNHNRLLKHVFKSAATAARARPGPLQDLHRALVARGLREPLADVTLARKLAALTLRLWKKGERYDPTQLTQQAR

SEQ ID NO: 476874 - protein, 462 aa, unidentified
MRKTRSRKPGKKIVDVTAGMEVLRPHAAGIDVGSAEHYVAVPPGRSEPSVQTFGSFTADLHRMAKWLQACQIASVVMQATGVYWMGLYQVLESYGLEVYVVNAKYTRTLPGRKTDVLECQWLQKLHTYGLLNNSFLPPEEIRALRTYLRQRENLVAAAGTCIQQMQKVLTEMNVQLANVLSDLSGMTGMRILQAILNGQRDPQKLAALADPRVEASRKEIAQSLEGNWREDLLFVLGQVHDLYHTYLQGIAECDRRVEAHLKTFPAKVDATASPLPEAPGTQRLPRRKHIPQTNLREELYRITGVDLTRIDGIQVQTAQVVLSEVGLDMTRWPDEHQFASWLGLAPHHGITGGKVIRRGTKKVLNRAAQALRLAAQSLHRSQSYLGAQYRRFRARKEGPVAITAMAHHLARLIYRLLRYGTQYHDKGVEHYERQYRQTQMKWLKKQAAQFHMQLVPAPGVAK

SEQ ID NO: 476875 - protein, 358 aa, unidentified
MEYGAIDLHKKESQVRIIDQSGAIIDRRITTTRERLTSVFWGRPRARILVEASTESEWVAQHLEGLGHEVIVADPNFGAMYASRGRRIKTDRRDAAVLAVACQQGHYRPVHRRSERQRTVQSMLRVRRELIESRTRAISLARAITRAAGFRIRGGRTEIFLDRLGALELPETMRATLVPLRSAIDILNQELATADERFTTLGADDPVATRLMTMPSVGPITASAFVAALDDATRFDNAAQVTSYLGLVPREYSSGERQHRGHVLRSAHPQVQSLLIQAAWRMMRSRDARTAGLCAWADAIAGRRGKRVAMVALAPRLARILFAMWRDQVDYQPDRIRDRGRRPVRSSHEGEAAQASVT

SEQ ID NO: 476876 - protein, 516 aa, unidentified
MSLCPEADRQGHKPTVITTPAMKTPPSSSAAKRRACNLKKLQRQKKATQTSLPMAVGPSLDELKPIHRRAAGIDIGSAENYGAIPVEGLAPGESPVRVFGVFSAEHDALVEWLRTHQITTVAMEATGIYWVSLYDKLEAAGIEVYLVDPHAVKAVPGRKSDWLDCQWLQKLHTYGLLAKAFRPDAPIRRLRTLTRQRTELVLAGSEHQQHMEKALIAMNLHLHLAVSDIIGETGLRVLRAILDGERDPKQLVKLRDPRCRKSTVAEMEAALTGSYEEEELFVLRQSLEGWEFYQKQMAHCDERIEKALAAIPKAAAAPAGQVPPKPIPAAAPPSKSKRIDSGHNAPTVDFTDALVRICGMNLMKVCGLNILSVLMLIGEIGVDMSRWRSARAFCSWLGLCPGTHISGGRVLSRKTRKVNNRAKTILRMAAWAAGKTDTWIGHFYRRVKARRGAPKAVTATARKLACVIYHLLKYREEFVLLDTTKYQAEAQSHRLRRLQKQAKNMGYDLVQHEEVA

SEQ ID NO: 476877 - protein, 340 aa, unidentified
MKITTLGIDLAKSVFQLHGIDTNGVVVLQKKLRRGAVLNFLSKLEPCLIGMEACATSHHWAREIAALGHEVRLIPPAYVKPYVKRQKNDAADAEAICEAVTRPNMRFVPVKTEEQQGVLVLHRSRDLLMRQRTMILNAIRAHFAEFGIIAAQGARKVAELVIRLTDEGDIGLPETARSAIQALAEQLDGLAQEVRKIERQLLAWHRQNDASLRLETIPGVGLITATALAASVPDPTVFKSGRQFAAYLGLVPRQNSSGGKDRLGHISKMGNGYLRRLLVVGATSVTRRAPTTDNRTGAWVRSLLERKPARVVTVAIANKTARTAWALLAKGESYKATPAI

SEQ ID NO: 476878 - protein, 340 aa, unidentified
MRELYAGSDLHGNNNLVGIIDGEGKKVFKKRLPNDPQLVREVFEPYKEQIVGIVVESTYNWYWMVDALMSEGYRVHLANPAAIQQYSGLKHADDKHDAFWLAEMLRLGILPEGYIYPKEERPLRDLLRKRGQLVRLRTSLILSLQNMLSRNLGVRVRVNDVKGIREDRVSGLLGGDEDLALAGRVSKETIDFLTHQIHQIEGVVEKRVRLKEAYRYLLTLPGVGKILSLTIMLETGPISRFATVGEYASYCRKVPSQWMSNGKKKGCGNSKNGNKYLAWAYSEASDFARRDYPEPRAYYQRKMRKTNAAVAHSALSHKLARAAYYVMRDQVPFRPEKLFG

SEQ ID NO: 476879 - protein, 335 aa, unidentified
MKVIKQNVGIDVSKDTIDVSFSNLTADFRTVAVSTRKFSNAEKGFKQLQDWVNGKKEPDTAVHFTMEATGVYYESLAYFLHERENCFVHVVLPNKARKYAQSLGLKSKTDRMDARVLSQMGLERELRQWLPVSPSLLGLRQLARERDALTRAKTNASNQMHAYKHQGKPNKDSVARSEKHISFLNAQIKQIEKDIKAFVDKDKELKRKMEYLLSIPGVGMVTATTIVAETNGFAAIESIKQLTSYAGLDVKISESGNWKGKSKISKQGNSHIRKAVYMPALSKIRKDKQTKQFYERLKEKKGAGMVAVIAVARKLLGLMYALWKKEEMYKGASEG

SEQ ID NO: 476880 - protein, 341 aa, unidentified
MGSYLGIDAHSKTGLELAALGADDGVLLWRDRCRLDARLLQDAVARAPRPCTIVTEQGELATWLHLTLSGVCDELLVANPRHNRLIATSPDKDDAFDAFTLANLGRGGYLREVFQPPARFAELRLRIRHHYRLTRHVTALKNQIKASYRVHGVPVSGSGVYSGVGRGSWLEPLPGPARLVLQDLYAVLDVAAQRKRAAEGVLARAARRFAPAKRMLAVPQIGPVSAATFVGYLVTPQRFPSRSHVWSYCGFGLTRRKSGHHVEPVRLRSSYNRHLKRTIKSAVERLIPRQADPFAAAYQLRLQRGTLPSRAKLSVARKLIDVLCALWINEEDYDPERIKII

SEQ ID NO: 476881 - protein, 323 aa, unidentified
MSKIKQIIGIDVSKDTLDVYSALHGSKHYSNTPKGFKSICKDFSLDSHFVMEFTGAYHYQLAVYLYEQNLCVSVVNLLVIKRFMHMKLQRNKTDKSDAKMISNYGEEQELTTWKPLPKYIEDSKQLYSGLELYSKQSTALKNQLHSLKSRGLTTGLLIRSLKRQLNSLKAEMYVLETELEKLIKEHQGDLYARIKTIPGIGSKTASLLIVSTDGFKDFESNGQVSSYFGLAPTERSSGSSIRGRSRISKIGNNKVRNHLFMCSFTACKCNPQCKSQYERIVNKGKSKKLALIAVANKLVKQAYGIAKSDLAYDPNYKSVLMKR

SEQ ID NO: 476882 - protein, 343 aa, unidentified
MQVSTIGVDLAKNVFQVHGVDSAGKVVITRQLRRKQVIDFFSKIPACLVGMEACGTAHHWAREVSKLGHTVRLMPPSYVKGYVKRSKNDAADAAAICEAVTRPSMRFVPIKSADQQAFLMLHRTRDLLVRQRTQLINALRAHLAEFGLVAATGREGLAQLAAIITDESNREALPFAMKQALQTIIDQLAALELQIGTLDRAIHAHHRDNDMSSRLETVPGIGVIGATAIASTVTDARDFKTGRDFAAWIGLVPRQHSTGGKERLGGISKQGDRYLRRLLVIGATAVVRQARQHPQKRPWIMRLLAKKPAKLVAVAVANKMARIAWAIMAKGGYYRAPELAVAA

SEQ ID NO: 476883 - protein, 286 aa, unidentified
MDHYAGIDVSLEQSSVCVVDAAGGIVREAKVASEPEALIGFLGGLPRPVARVGLEAGPLSQWLQAALVKAGYDAVLLETRHVKAALSAMIVKTDRKDARGIAQLLRMGWFRPVHGKAAPAQEVRALLVARKQLQAKMRDVELSLRGLLRGFGLKVGEISKGQFATRVRFLVAGHSMLERIAEAMLQAREALRTEFTKLHRAMLAIVREDAVCRRLMTVPGVGALIAVTFTSGVDDPGRFTRSKGVGAHFGLTPRKYQSGETDVTGAVSRVGDAMVRTASMRGRTSC

SEQ ID NO: 476884 - protein, 351 aa, unidentified
MTHLIPIPPKRFIGLDVHKHYLIAFGVDQDLNTVLPAHRVELFNLESWMKKSLSKQDAVALEMTTNTWELYDELSPCTHSVTVVHPQHIALITHAQVMTDKIAAAILARFLAKGLLTPVWVPPVEIRELRALVAQRGKMVRLATQAKNRLHSVLQRHHILPPEGGLFLEDQKEWWSSLPLGKLEKVNLQSDLDTLHFAGTQLTHFETIMNEMSAKNQDVTRLIHLPGFGVILALTVYAAIGDITRFEDAKHLVSYAGLGARIHDSGLTTRTGRITKSGRKDLRFALVEAAQAASRSHPHWKAELARLEPRLGRNKAIVAIARKLLVCPLQKNCRSICAARSGCPKITPICL

SEQ ID NO: 476885 - protein, 355 aa, unidentified
MDSVKYIGMDVHKEATTVAVLNASGKLVMESILETRAATIVQFLQGLRGELHLTFEEGTWAAWLYDLVKPYVTKVVVCNPRKSALLQAGNQSDRIDARKLAELLRAGLLSAVYHGQTGLRTLKEWSRSYLTISKDLTRTMNRLKALYRSLSIPCAGPSLYAPRHRGEWLSKITEAGVRRRAEWFYQQLDGLQRLRQAARHDLLAESRQHGAAKLLCQIPCIAAIRAALWIALIQTPHRFRTQRPLWAYSGLALETHSSGEYRYVQGPLQRSHKPIELRGLHKNHNHDWKAIFKGAAVKASTAGPFHEFYTTLLSKGMNPTMARLTVARKIATITWMVWKKGVCFDAAPLKRQVSV

SEQ ID NO: 476886 - protein, 486 aa, unidentified
MAKRKMSTFERLRRGERLGRRERKALERCLQAEGPELEIVHPHAAGIDVGNKSHFVGIKPGSGEPAVQEFGSWTADLKRMVGWLKSQGVESVAMQSTGVYWIALYEELEQAGFEVYLVNARGTRNLPGRKSDVQECQWLRKLHTYGLLRNSFRPAEEIRALRTLWRLRERHVREAGRAIEQMQKALTTMNVQLANAVSDLSGATGLAIIRGILAGERDPWRLAKLRDRRVEASEAEIAHSLEGNWRDDVLFELQQVLEGYDFLGRQIARCDAELQKYMATLPSREVLPTSPLPSTPAVEAGPAGKKTRPKRKSKNAPSFDLAAELRRTTGVDLLSIDGINVMTAQTILSELGTDLRAFPSESHFSAWLGLAPQREISGGKVIRHQSRRVKNRVANALRMAAEALSHSDSYLGARYRHLRARLGGLKAVKAMARYLACLVHRLFTHGQAWVDRGSAEYERKRKGRELIALQRKASEMGLRLVPVPVS

SEQ ID NO: 476887 - protein, 422 aa, unidentified
MLEQTQDEQEIIERVAALDIGKAELVCCVRVPDPKGGPRRVQEVTTYSTMTRSLQVMVDRLTDLGVTRVVMEATSSYWKPPFYLLEAHGFEVWLVNAKDVKHLPGRPKTDRLDAVWLCKVAERQMLRPSFVPPIPIRRLRDLTRYRMSLVSDQSAEKNRVEKLLEDAQLKLSVVASDIFGVSGRDMMAALIAGQRSPRVLAQMARARMRAKIPQLEEAFVGHFTDHHGFLLAKMLARIDALSVDIADLDTKIEARLAPFADAVARLDEIPGVGATTAAVIIAEVGDDMTRFPTPAHLSSWARFAPGVKESAGRKKGTGATGHGDRYLARVLGEAAVSAARTDTFLGERYRRIARRRGKKKAIVAVGRSILLIVWSLLSDPETRYHDLGPGFYDSHINPERKKRNHIRQLEALGYKVTLQPAA

SEQ ID NO: 476888 - protein, 392 aa, unidentified
MVISVGIDVSKDKHDCFIVSSEGEVLTDVFTIPNTMDGFHCLLQRIRECTTPQDKIKVGLEATGHYSYNLLGFLLDNGLATYVLNPLRTNLYRKSLSLRKTKTDRVDARTIASMLLSDAGLKPYTNTAYYNEELKSLTRYRFDKVKERAKLKSSVSRLVCILFPELEKLVPTLHMASVYALLEVFPGAKQIAAAHLTRLKALLESSSKGRYKRDMALEIRDAARNSIGSRMPAKSLELQHTIRLIRELNAEITEIEEQIQSIMDELHSPITTIPGLGFRMAAMILAEVGDFTRFDSPDKLLAYAGMSPSTYQSGQLKNCYPHMEKRGSRYLRYALYNATKYVCHWDPTFADYLAKKRAEGKHYNVALSHAAKKLVRLIFAMEISGMPYRLAA

SEQ ID NO: 476889 - protein, 360 aa, unidentified
MTVATAENPQQTLVTVGVDTHLDSHVAVALDELGRRLDELHFPTTRAGYARLLAWTAKLGKLERVGVEGAGSFGAGLARFLDESGVEVLEVGRPKRRDQHRSGKSDPIDAELAARAVLAGTAVGQTKGGDGPVEMIRVLRAARRSAVKARAQAAKQLKALLITAPEALRAELRGLSTIKLVRRAARFRPGDQPSDVAAATKFALRSIARRYLELSEEIDELDGQLSRLVTQTAPALVAVLGVGVDTAASLLVAAGEDPKRLKSESAFAHLCGVAPIPASSGKVVRYRLNRQGNRDANRALYVVATERMSRDERTRAYVVRRTEEGKSKREIIRCLKRYIARELYGVLIATVVPKSSFSSP

SEQ ID NO: 476890 - protein, 455 aa, unidentified
MKSKKGSPGFSVVHSHAAGIDIGATFHVVAVSPDCDPAPVRQFQSFTTDLHSLSQWLREVGVTSIAMESTGIYWIPVFEILESDGFEVILVNAREVKQVPGRKTDYNDAQWLQKLHQFGLLRASFRPSEHIASLRAYLRHRERLIEYSAAHIQHMQKALMQMNLQLHHVVSDITGATGMKIIRDIIKGERCAATLATHRDIRCKESERTITAALTGNYRDEHIFTLKQVVELWDFYQDRIRECDTRIEKAMERLNQKKVTPHTPLPKARHRTKQHHEPDFAVRSALYTLTGVDLTQINGFGPYTALRLIGECGDDMSKWATEKHFVSWLSLSPGNKVSGGKILSSKTRRTKNRATTLLRIAAVNVGKTETALGAFYRRLAGRVGKAKAVTATARKMAVLFYSIMKHGRNYVEPGAEYYETQYRNRVLSNLKKRAKRLGYELIANPTPVTMGAEVS

SEQ ID NO: 476891 - protein, 392 aa, unidentified
MEYRLYIGVDVSKESFTVCIKNPNGKTVFQGSFPQSLEGFQDFLNTVNNLSTEPVIVGMESTSIYYLNLFSFLLENGINTVIINPSVIKNFSKLGIRDAKSDRKDASTIAEYLLYAKPELSDKEKLSDLKLLSREKEKLSKEISHLKDEILRCLFNLFPELERNFNVFSKGMLNFLLKFPSARKIRRSKRKTVEYEFNKAFEGRGKKPSFTANDIIELANRSIGIDSVALEEILVTKINMLLTIEEEIDKFDKLISERIEEIQIDKIDIITSIPGIGKSLATSFICEVPEVEMFKDGKSLVAFVGVDPVVRQSGQYIGKHGISKKGNRHLRRIIYLMAINVIRFEGRFKEFYLRLRARGKSYMEAVIAVANKLLRTIYAMLIHRTYYSPNYS

SEQ ID NO: 476892 - protein, 394 aa, unidentified
MATIGIDIGKRQHIAAIQHDGERAARKAILRFSADRAGLADLTAWLARQGEISRAVLESSGHYHLNLAAALQRQGLPVAVVNPLESKYFGKRRLQRTKSDPADARTLATLAMVDEPVVRDVLAGASLREAARFAMALVDELGRVDQKIGRLVEIGFPELEQAYDDPTCVSALAVLRTAPTASVAARTRTATLAHASRPGRGRKIGVKKAEQISALAKDSIAAPELADQIGFQMRLLIAQHDLLEAQIAEAEAHLGTLLDGELVRRLRTIPGVGPAIVATLIAEIGDINRFSDFDKLVAYIGVHPAEKSSGEKGRNPETSWRMSKAGNAYLRTALYRMAVVGIQHNPVIRAHYARKRAQGKSKMNAVGHCMKKALAIVWGVWRSGTDFAAPPSVP

SEQ ID NO: 476893 - protein, 405 aa, unidentified
MEVIYERCCGIDVHKNMVMACMFVKGRKEIRKYGTFTDELKSMATWIREKACEVVAMESTGVYWKPVYNLLEEAGIKTIVVNARDIKNVPGRKSDVKDAEWIGDLVRHGLVKESYIPNREQRELREMTRYRQSLIEERAREINRIQKVLEGANIKLGSVISDVTGKTGLSILKAIVNGITDNEELSKFAKGQIIKKIPLLARALQGSIGKHQRLMLNHQIKHIEFLGEEIDLIDKEVIEKTEASKDKIELLDTIPGIGRRSAERILAEIGTDMKQFRSASHLASWVGLVPKCDKSAGKRLSSRIGKGNKTVKTTLVESACSAIQNTDCFFYARYRKIAARRGGKRAIIAIAHSMLLSIYAILTKKEPFHDLGSDYFYRVDEEKILKRNLQSLKHLGYTITVEKTG

SEQ ID NO: 476894 - protein, 360 aa, unidentified
MPAKNKSTPKATALVTATPAATPVTPHFVGIDVSAKTLDVCITHADKIISQQTLANTAAAHKQLCTQLGKYPQAQVVMEATGVYHLDAALALSNASIPLMIANPKSAANFAKVLLKNGKTDKSDAKLLAQYAQRMTFIPWQRPSKNALQLHQIARRLFQITTLKTAEKNRLHALNSVEHMLDILTQTLLEHVASLEKQAQQLLEAALVLVNADPDLKRKLDLIDSIPGFAVNSAVQILAHLLLMPPTLTAKQWVKMAGLDPRAFQSGTSINRKTRISKTGNKHLRMALYMPALSAKTHNPHIKAYFEHLTVDLHKTPKQALIAVMRKLLHTIHAVIAHNTPFQQGKFYTMPKTHTENVDF

SEQ ID NO: 476895 - protein, 337 aa, unidentified
MKHSPHIIGIDMASEDFTSTAITEPDEIILTNDKVLNSIDGFDYFLDQLSAKGINQNNCVIVIESTGVYGEHLCYFLHEKGYKIAVEPPNKVKKAFQLKQKNDRVDSKQIAEYGYRFFDKLHFWHPREEIMEQIRVLLSTREQLSKQKTSNNNALKALLRKPVQTPLANKMYEENIKRLKGQIKEINGEIEKLIAQNPGINQTVSTLKKIPTVGMLLAANLMVITDGFTQHVNPKSIAAYLGKCPYEHTSGKSVYKKPTSERVGFGRLRKLLYLAAMCGANHIPKFKKYYLRKIAEGKPKRLVINNIANKLLKIICAIVNSGEDYNKNHKSINPAMY

SEQ ID NO: 476896 - protein, 340 aa, unidentified
MPLYGGIDLHANNSVIVLLNEQDEVIYRKRLPNALPTILEQLAPYHTAMEGLVVESTYNWYWLVDGLMEADYRVHLANPAAMQQYSGLKYTDDHSDARWLAHLLRLGVLPEGYIYPKAARAVRDLLRKRAHLVRQHTANVLSVQNIMARNTGARFSVKRIQELTKQELTTLLAEETQVLAVTSSLVVLDCLRQQIKTLEQTVHKRLHHTPSYEQLLTVQGIGTILAQTITLETGAISRFPTVGNYASYCRCVDSTKISNGKRKGTGNVKNGNPYLAWAYMEAAQFAMRFQPEAQRFYQRKLAQSRNNTVLARKAVAHKLSRACYYIMRDLVPFEATKAFG

SEQ ID NO: 476897 - protein, 349 aa, unidentified
MEKYIGLDVHAASCTAAVMDARGKKLGSYVIETNGQALVEFFRTQTGNLHVCMEEGTQAGWLVEILSPHVADAVVAMVADSRGQKSDKHDAFGLAERLRTRAIEKSVYKIVGSFATLRQLVKVHRTIVQDTVRVQNRIRALFRARGVSVVGSRVYAKAEREDSLRQLPASSRAAAEILFEQYDALCQTRDRAHKDLVAESHKHAVTKQLETCPGVGEVRAAQIAAVVVTPDRFRTRQQFWSYCGLGIVMRSSSDWVQAPNGSWTRATLRQTRGLNRNHNSLMKQVFKGAAVSVIRQHPDDPLRKDYERLLAAGTKPNLAQLTLARKIASITLAMWKKKEVYKPAATSSP

SEQ ID NO: 476898 - protein, 326 aa, unidentified
MEIFGIDVSKSKLDCVWLRDPVNLKVKSKVFANTAAGHEALLAWARKQTGVGAGELRCVMEATGIYHESLAHALHAAGVQVVVVNPAQLRDYAKSLGSRTKTDARDALVIARYGTTASLRVWQPEPAEVRRLKALLGRLEAVKQDIQRELNRLEKARITDTSAEVVTSIETVHRQLREEKARLKALIDDHIDQHPGLRQDRTLLESIPGVGPVIAQQMVALLRSRAFASAGQCAAFLGLVPVQHESGSSVRGRPHLSKAGNAALRAKLYMAAIVATRYNPDIRHQYQRLLRQGKCCMSALGAAMRKLVHICFGVLKHQTPYLPQAA

SEQ ID NO: 476899 - protein, 457 aa, unidentified
MRVRWDREQLIGGKPERLVSRSLRVLVWGPDQWNTRIDGGAGLNYYCGIDWAEGHHDVAIVGSDGSLVAKKRIGDDPGGFTALTGMLAEAGDSPEDPIPIAIETPRGLLVAALRASGRPVFAINPMAVARYRERSSVARAKSDHADAMTLANILRVDAHLHRTLPADSELTQAIAVLARAQQDAVWRRSKASNELRSVLREYYPAFLDTFAGKSATNLAKPQARAVLAIALTPADAAKLTKARIATALRRAGRKRGIDELAADILQRLKTPQLRQPELVEKAMGRQALALLAILDAACAGAEELQQAAAEEFHKHPDHPVITSFPGLADLTGARILAEIGDDRARFADDRALKAYAGSAPVTRASGKVISITHRRIKNDRLAAVGWVWATYAAINPGPAREHYRHRRDHGDRHAAALRHLFNKMLGQLYHCLQTRQTFDPVKAFGQPAAAPPEQAAA

SEQ ID NO: 476900 - protein, 330 aa, unidentified
MSVPIETQSAPLKKLQLIGIDVAKQKLDVSVDDNTALTLDNDEESFKSLLQVIPDSGPVCFVMEATGGYERKLVAFLQAREIAVAVVNPKRVRDYANSMGAYAKNDRIDADMIRHYAQTAYDKNRLQLRETLTEAAQRRESLLRRRNQLVGQRAIEKQHLESATDKDTVRSIKRIIKQLDKEIEKIEALIKTDIDADENLKKSMKQLIQVPGVGDVTVLTLLTQLPELGKLSNKEIAALVGLAPYARDSGKKNGRRVIFGGRMHIRSTLYMATLSATRFNKPIRGFYQHLLAQGKLKKVALVACMRKLLTILNSMAKTGNEWNPNFAKHA

SEQ ID NO: 476901 - protein, 355 aa, unidentified
MDSKKYIGMDVHKESISMAVMNGAGKIVMECVIETKASMILQFINGLRGDLQVTFEEGTSAAWLYDLLKPHVTKLVVCDPRKNKSMREGNQSDKIDARRLAELLRLDHLTPVYHGEHGLRTLKELVRTYLTVTKDLTRVMSRVKAIYRSWAIPCTGKQVYARRHRAEWLGKINEPGVHRRAEFYYQQLDALRVVRQEVRKDLLAESKKQKAWKRLCEIPSIGPIRAAVLLGILQTPHRFRTKRPLWNYGGLAIEMHSSADHRRVNGQLQRSRKNVLVRGLNRNCNHDLKNLFKGAAVVASSKPGPFQEFYTALVAKGMRPEMARLTLARKIATIVLMVWKRGVNFDAQHLKPQTA

SEQ ID NO: 476902 - protein, 358 aa, unidentified
MRIIGCDLHARQQTIAMLDTDTGELEEKTLGHEGETVREFYSALSGPILVGIEATGSMQWFVEMMEELGIECRVGDPAKIRKAETRKQKHDRRDARLLLTLLAENRFPTIWMPSTEQRDLRTLLRHRHQWVRLRSRVQHTLQSMALNHGLRRGRSLWSQAGQHALRALPLAPHASERRKALMTLYPRLQESIEELDRQVSEQTQQRPDARRLMTHPGVGPITALATEVFLGDPLRFIDGKAVASYIGMIPSEHSSGDRQRLGAMSKQGNALLRYLWCEAAMHAVERDPELKRFYRRKLVQKGLGKARVAAARKLGIRLWIMMRDQIDYQEFCRRGKAWQESGSVHAGMPDRDSGPAAQ

SEQ ID NO: 476903 - protein, 330 aa, unidentified
MTISVLGIDLAKNTYQLHGVDGVGKAVLKKRISRNELAAYIAGLPPCRIVMEACGGANYWARVFQRSGHQVKLISPQFVKPFVKTNKNDANDAEAIVEAASRPSMNFVPIKQVEQQDIQSIHRVRSRVVKNRTALINEIRGLLLEYGIAIPLGAAKVKRFLCEIIANNKNELTDLSRECMRGLYEELIEIEARQNKTCNRILKIPGVGDLTATALVAAIPDAREFKNGRHMAAWLGLVPRQSSSGDKQTLLGISKRGDRYLRTLLIHGARSALSHYKKTDTLYGRWLFDKKASLSFNKAAVALANKNARIIWSLLSTGEEFNINTKPVAV

SEQ ID NO: 476904 - protein, 410 aa, unidentified
MEVLHTHCAGLDVHKDTVVACVRHMAGGAVKREIKTFKTTTKDLMALSDWLSAEGCTDIAMEATGVYWKPVWHVLSDGEFVLILANAAHVKNVPGRKTDVNDAAWLADLLAHGLIRGSFVPDEQTQEMRDFLRTRKQLVRERSGHIQRIQKTLEDANIKLDSVIANIMGVSGRAMIEALITGETDPAKLASLAHRQIKAPRDDLNEALRGKVTKHHRFMLRLHLQQIDALDAAIAQIDQEVDANVEPFRALIEILSSIPGISALSAKVILAEIGADMSRFPTDAHLISWAGLCPRNDESAGKRRSNRMRKGAPWLKTTLIQCAWAAARKKGCYLQAQFLRLRSRRGAKKAIGAVAASILTAAYHMLKDGTCYQDLGPDHFDRRAKAAQTKRLVARLQNLGFAVQISPLAA

SEQ ID NO: 476905 - protein, 412 aa, unidentified
MEVLHPHCAGLDIHKDTVVACVRHMVDSAVKREVRTFKTTTTDLMALSEWLSAEGCTDVAMEATGIYWKPVWHILADGDFKLILANAAHVKNVPGRKTDVNDATWLADLMAHGLIRGSFVPDEPTQEMRNFLRTRKQFVRERTSHVQRIQKTLEDANIKLDSVITDIMGLSGRRMIEALIVGETDPFALAALAHRRIKASHAELEAALRGRVSDHHRFMLRLLLQHIDAIDAAIGQIDQEVDAHVEPFRTAIQILSSIPGISDLSAEVIVSEIGIDMNRFPTEGHLISWAGLCPRNDESAGKRRSTRMRKGAPWLKTTLIQCAWAAARTKGSYLQAQFQRVRARRGAKKAIGAVAASVLTAAYHMLKNGTLYEDLGSDHFDRRAKGKQILRLVSRIQNLGFAVQITPIGAAE

SEQ ID NO: 476906 - protein, 334 aa, unidentified
MENIALIGIDLGKNSFHIHCQDRRGKAVYRKKFTRPKLIEFLATCPATTIAMEACGGSHFMARKLEELGHSPKLISPQFVRPFVKSNKNDFVDAEAICEAASRPSMRFVQPRTESQQAMRALHRVRESLVQDKVKTTNQMHAFLLEFGISVPRGAAVISRLSTILEDNSLPLYLSQLLLKLQQHYHYLVEQIKDLESQLKRKLDEDEVGQRLLSIPCVGTLTASTISTEIGDGKQYASSRDFAAATGLVPRQYSTGGRTTLLGISKRGNKKIRTLLVQCARVFIQKLEHQSGQLADWVRDLLCRQSNFVVTCALANKLARIAWALTARQQTYVA

SEQ ID NO: 476907 - protein, 403 aa, unidentified
MEHGTTHFGSVDWASEGHAACIVDAQGTALDEFEVAHSHAGLIELCHRFRRAGVQRVAIERPDGPVVDALMAADLEVVVVSTRAVKALRTRYGLAGNKADRSDAFVLADCLRTDGHRWPSLQPDQSQTVALRAAVRTRKDLVATRISTANQLRAHLQLVFPGSVGLFAALDSPICLAFLERFPTAAQAAWLSEKRLAGWLAANAYSGHTAAGELLRRLQSAPAGLHGDAAPRQAAVTLALVRVLRSVLAEIATLEAQIREQLKLHPDGFIFRSLPRSGCVRAAALLAEIGDCRARFPSPESLAALAGAVPSTRRSGKHTAVTFRWACDKKLRDAVIDFAQDSPRGNEWAARLYHQHRARGHSHPHASRVLARAWIHVIWRCWQDRVAYDPVQHRALQALRKAA

SEQ ID NO: 476908 - protein, 348 aa, unidentified
MLSVGIDAHHHLYAMCILDDNGKVVKEHTVEGPVSEVAQWLQKLKKPFAVCYEASLGYGELHDALLPIAKQIQVAHPTNVRMIFQSKRKNDRIDARKLAKCLYMDEVPQVHVPAREVREWRVLIEHRRRLVDKRVATKNGLRALFRSQGIDTLKGSRMWFSPGIAWMRSVEFKSSLTALRRDQLLLELSHFDAMIKLAEKTLDEIAKTHAGITLLRTIPGIGPRTAEAIVAYVDKPERFSSTRKAASYFGLVPCLDESAGSSRYGRITRQGPATVRKLVVEASWRALACSPTIRRYFDRIKDGKKDRTGKALVATARHLVEVMVAMLKSGEEWRESPHPSDIPSKQAA

SEQ ID NO: 476909 - protein, 340 aa, unidentified
MQTKTLFVGIDVSKLTLDIAITLDGKTIEANLKTPNNQAGFKALTSWMKRHARLQECDEIHCCIESTGIYSDAIVDYLQELGGLKVSFINPVQAKAYGRTVLLRTKTDKVDAGLLARYVAAVKPAVTLPIPMEIKELRSLIRHLDYLITRRAQEKGHLESTTDKVVINSVKDILKHYDKQIKKLEKLIKGYLDKRPDLKEKVELLKTIPGIGETTARILLCELHVENNDEKITAKVQIAHAGLAPAQKQSGQSVRGKSMICRTGNARLRRCLYFPAIVASKFNPVITGFYQRLIKRGKHKKVAIVAAMRKLLSIAIGVLNNKVAFDPEWVVKTVKQVKCA

SEQ ID NO: 476910 - protein, 386 aa, unidentified
MQKLNDLSRSLTALEPNGTLIAVIEMSLSSWLVAGIVPGVERQPLKKLAVDERALLKLLHRWREEAEKAGRRIERIAVAFEAGRDGFWLARWLKARGIEAYVIHASSVAVSREHRRAKTDRLDTELLKRSFLGWLRGERDHCKMVEIPTMKDEDAKRPNREHDSLIGERSRIVNRMKAALVRLGIRGFNPKLKRATTRLDGLHTPEGEPIPPNALAELRRDMERRRLVNNQIRQIEEERLERIEQAPCDGAHVMVRLLARVMGVGIETADMLVHEVLSRNMRDRRAVARYAGLTGSPDESGRKRREKGLARSGNTRVRRGMIQLAWRFLLHQKNSALTKWFRSRTENARGTRKPMIVALARKLLIALWRLVREGIVPDGVVFRAAQ

SEQ ID NO: 476911 - protein, 476 aa, unidentified
MATPDEKPDKPTNPDKPTKPNPSRKRSLPVPVPVSAAALDVINPDAAGIDVHSDMHMVCVPADRDANPVRQFGANTADLQEIVAWLKKCRVRTIALESTGVYWIPLFELLESEGFEVNLVEPGQLSRCGARPKTDVLDAQWIQRLHSYGLLRASFRPPDSVLALRAYWRQRQMQVRYAASHVQHMQKALEQMNVKLTEVVSDITGLTGMAIIGAILEGQRDPIQLARLRHERCHHSEEQIALALEGTWRPEHLFELRQAHELYQFHHRQITECDQQVQAELAHFPNRAGAKTHTVKPRKRGRQSNDVRFEATGPLFQALGVDLTLIEGIDVGTALVILAEIGVDVSRFPTEKHFASWLRLCPPQDESNKTKKRRGHRKGTNPVTLALRMCARSLGKTMTPLGLFYRRIRSRIGGLGAVKATAHKLACLVYRMLKYGQEYVKQSMEEYEAKMEANVLKALKRKAAAMGFELSPLPPQ

SEQ ID NO: 476912 - protein, 311 aa, unidentified
MPDDTIGIDISKATLDIHRLSDGKMMSFSNCPAGFKALSKFCAKTAVTRVVYEATGAYHGGLERALGAHLPLVKVNPLQARRFAQAQGVRAKTDAVDAKMLADMGHVFALEPDEPAAEIQHDLKELRSFRSGLIKDRTGIMSRMKTQTLPITCRQSKARLAQVDKQIAEINAEIDRLIHSSDTLAHSMKILRSIPGIGAVCAATILIEMPEIGSMDRKQVASLTGLAPMTRQSGQWRGKSFIQGGRKVVRDALYMPALVAMRHNPDLRAKYQAMINAGKPPKVALTALMRKLIELANALIKANRNWVKKAA

SEQ ID NO: 476913 - protein, 408 aa, unidentified
MDVFHERCAGLDVHKEVIYICVLIGQGHSFQRFKFKFGTFHHQLLEMRQKLVELGVTHVLMESTGVYWMPLYDVLEGFVEIVVGNAQHIMNVPGRKTDESDAEWLAKLLRYGMVKPSFVPERQFRELRQLTRYRRAVVQAQASEQNRVEKHLQIAGVKLSSVASHVFGVSGTKMLNCIAQGTTDPTHLSELALGRLRKKIPQLREAFTGSISKHTQELIATQMEQMKRLECTIAEVELKIDDKVKPYAEILARLDQIPGIDLRCATDILAEIGTDMSPWATHRQIAAMAGLCPGNYISAGKRLKNRSRQGNPYLKSILVQAAASAINTNGSYFQSKFRRLKQRRGHKRALVAIAHAMLVTIYYMIKRDEPYRELGANFVTDYENGRKKNDLVKQLQKLGYSVSLTEIA

SEQ ID NO: 476914 - protein, 426 aa, unidentified
MKKESIRIKEFRQLRKEIRGSKEYLIAGIDVAKEKHNAFFGTATGKTLFKRLVFENSKEGFERLVRQTEAIKVQNNLKKVIFGMEPTSNYHKPLGEYLIKSRHTVVLVSGVAVKRNRELLDGRWDKHDMKDSANVADLVSQGKCQYYEYPSIEVRDLRCLLSLKRHLKKQEQRLKVRIRNSLLAQYFPEMDRYYGSFEPENLAIVRHLLVPSTIAGLEYSKFFKTVATRHKGLRQHKHLYRIWQQAGQSIGCEAGEAAACEAAVLVEQLKQMREEIGYLEQEIESVCYLFSEYEYLLSMPGFGRDVSSKVLAYIGDPFRFENRRQVLRTSGYDLSANRSGKRSHLAIPVISKRGKADLRYALYQAALIASTRNRHFIDYYTETIRGREREKGIKTKMRVKLAAKMLVIAWTLMKKKEPFNPDYLKR

SEQ ID NO: 476915 - protein, 385 aa, unidentified
MFVGYRVGAACSAYPTVVMEAPVFSERTSVGLDVHARSVAAAAVDGVTGELRQARLTPSHEHIRSWVGDLPGPVAVAYEAGPTGFGLSRVLNDSGIRCVVAAPSKLQRPSGDRVKTDARDAIHLARLLRLDEVSAVVVPSVEQEAARDLVRAREDARGDLMRARHRLSKLLLRQGFVYSGGRAWTGTHDTWLRQVGRAELVSPATQMTFESDYEAALMVKARRDRLDAAIATMAADSEFTAMVRRLGCLRGIGTLTGFALAVEIGDWDRFTGKTIGSFVGLTPSEYSSGASRVQGEITKTGNSHVRRLLVEAAWHHRPRYVVGQTIRDRWELAPAAACARGDEGNRRLHGRWMRFNERKKRSVVANVGIARELAGWCWSLAVMDD

SEQ ID NO: 476916 - protein, 322 aa, unidentified
MCKIIGIDISKQTFDVGFNDGSNWHHLVLDNNEKGFKCLLKELSNNDWVVMEASGPYYLKLATFFYGKGYNVCVLNPLIIKRYSQTRLIRAKTDKKDAQIIAEYGAQYRLKQWKPEPTNISKIKQLYTVLELLNKEVHQSERQLEALTATGIMDKDLKSILKGIVSYLTCKRNKVEKQIEEIAQSVYKSTLDRLKSIPGIGTKTAIMLTVITGNFENFETHKQLIAYVGFSPRIYQSGTSVKGKGHICKMGKSQIRKLMYLCSWSAKRCNKDCVDMYERLLEKGKPERVIKIALANKLLKQAFSIAKNKTYYDENFNKKTCF

SEQ ID NO: 476917 - protein, 349 aa, unidentified
MIVVGIDPHKQTHTAVALDAATGPVMAELTVPARTPGFERLVRWARELDAERTFAVEDGRHVSGHLERHLIARGERSVRVPPRMMGESRRTDRVWGKSDPVDATAVGRAALRHPELPEATLAGIEREIGVLVAHREMLINERTDRICKLRWLLHDIDPDLAPPLRTLNRFKTLDRLLMTLGALEPSAQVEVCLDLVARCRVITVRANELERRIAGLVQAHAPALLEIPGCSALTAAKIVAETAQVNRFPSEGHFARYAGTAPIPASSGARHRQRFNRRGNRQLNVAVHRIAITQLRIHEPARDYLMKKRAQGKTKTEAIRALKRHITRVVFKTLTSMDQPTDRLTTVAA

SEQ ID NO: 476918 - protein, 344 aa, unidentified
MDYFAGLDVSVKETSVCIVDDTGKIVRELKVASEPEALLAVLTNPAYRFKRIGLEAGPLSQWLYSALAEADLPVVCVETRHMQAILKAQINKTDRNDARGIAQMMRVGVYRPVHVKTLRSQKLRMLLTHRKLLQSKAIAIENDLRGTLRNFGLKVGIVGTAKFEVRIKELVENLPDLAILVEPLLIVRRVLREQIVVLHRRLLTIVRDDGVCRRLMTTPGVGPVVALTYRATVDVPARFRKSKSVGAVFGLTCSKYQSGEIDRSGRISRCGDEMMRVMLYEAAQSMLRSKKWSWLKAWAMQIARRRGMKKAIVALARRLAVIMHRIWVDGTEFRWTREQAAAAA

SEQ ID NO: 476919 - protein, 429 aa, unidentified
MNFRPIAGIDVGKFFSEMAILSPSNEVIARMKIHHDSNSDVERAIELLKKTEKDFASRPFVVMESTGHYHKILFHSLCKAGFEVSIINPIQTDSIKNIGIRKVKNDKVDARKIALLYRFQELKTTNIPDEDIECLRNLCRQYYKLNDQLTAYKNRLTGIVDQLMLNFKDVFSSIFSKAAIAVLEKYPTPTHILKANRNKLISLIRKNSRKSLNWATAKYELLVSKAREFAPLSINNSSNIAMLSVYISMIKTLEENIEKILKAIRSLIAEDMAKDTPVLALTLELLQSIPGIGLLSAVTILAEIGDFSAFSKPGKLVAYFGIDPSVMQSGEFTGTRNKMSKRGSKLLRRVLFTIALANIRTKRNKQACNPVLLEFYKQKCQSKPKKVALGAVMRKIVCIIFAVLRDRKPYELRSPQEHAQRLAAKHGAA

SEQ ID NO: 476920 - protein, 316 aa, unidentified
MPKQARIVGVDVSKAHLDLADTTSRPPWRIANSADAIAKLIEDLQADPPDLVVLEATGGYETALVIALQAAALPVALINPRQIRDFARATGQLAKTDALDARVIAQFGVAVRPAPLPPIEAGQEAFAGLVARRRQIIDMLVAEKNRLEHADAAVRSWIDQHLAQLKTQLAQVDAAIALAIEASAELRARQAILTSVQGVGLLTAAVLLAELPELGAIGHKQLSALVGVAPLNHDSGTLRGQRHIAGGRASVRCALYMATLVAVRHNPTLKAFYRRLRDAGKRPKVALVAAMRKLLSVLNALVRDNRTWQPLPQDGC

SEQ ID NO: 476921 - protein, 408 aa, unidentified
MNAVGIDVSKGKSMVAALRPMGEVALLPQEFLHTEVGLEQMAYAIVALGEDTRVIMEATGRYHEPIAAALHEYGIYVCVLNPLFIKQSGGGSIRKVKTDKADAMKIAKYGLDNWVDLREYTPMDTVRQQLKLCSRQYNLYMKTVVSLQNNLISLTDKTFPGVNELFSSPERADGHQKWVDFVMTFWHCDCICRVSEKAFTDRYQKWCKRKGYHFSTEKALDLYAGSCGHFTTLPKNDNTKLLITTAAQQLLAGKTTLAALRTEMTRLAKQLPEYDTVRAMYGVGETTAAQLMAEIGDVRRFPRRSSIVGFAGVDPAVDQSGKHSAKSVPTTKRGSPHLRKTLYQIVCTYLKRSPADEPVYQFLDKKRAEGKPYFVYMTAAQNKFLRIYYARVKECLEAFDERQDTVQN

SEQ ID NO: 476922 - protein, 338 aa, unidentified
MEQVITIGLDLAKNVFQVHGIDAAGKVLVRRQLRRGDVLRFFGGLPRCLVGMEACATAHYWARELTKLGHTVRLMPPAYVKPYVKRGKTDVADAEAIAEAVTRPTMRFVAVKTADQQAALMLHKVRDLLVRQRTMLINALRGHLAEFGIIAARGPGGVTAAIISLHEAQDSLPELARVALHGLIDQLRIVRGEIARVEKRIVAWHRASNASRRLATIPGIGPITASAIAAAVPDATLFQSGRQFAAWLGLTPRAHSSGGKERRVGISKQGDGYIRRLLVTGATAVIRLARQGNASKSWAAKLLERKSARLVSVALANKTARIAWAVLARNQSYVAPAM

SEQ ID NO: 476923 - protein, 476 aa, unidentified
MKKGSTKTAKTAKTAKTAKTTKQSPQQLSFDPAILEMLDPNAAGIDVSSVDLWVCVPANRTDQPVRKFGVCTDDLYEIADWLTACGVTSVAMESTGVYWIPLYQVLEERGFAVCLTNARHLKNVSGRPKTDRLDCQWIQRLHSYGFLMASFRPTDAVCRIRSIQRHRASLIQDASRHVQHMQKALHQMNVLLPKVVKDITGVTGMAIIQKILDGEHNPVKLAKLRNPHCKSSEEEIARALKGDYREEHLFVLRQAVNAYRFVHTQLRECDRAIERLLVAIDKQVDATTTPPPPRTKPSQPKRKNQHQFTSDARTLLYECFGTDITELTGIETTNGLELYTEVGADMRPWATDDHLASWLGLSPNAQSSGGKMKSSQTRKVTSRAAQIFRMAAKSASRSKTYIGAFYRRMKARLGAPKAMTATARKIAVIFYHMVKERTPYRDLGEEYYVKQNQDRAFKRLQRQAKQLGYALVEQHA

SEQ ID NO: 476924 - protein, 418 aa, unidentified
MTPLTATVPFVAYVGLDWADAQHEACALGPDARHTATVVQQPEAIREWVEQLRRQFGPGPIAIAVEQQRGALIHALLQYEDLVLFPINPKQLARYREARAPSGAKDDPTDAALLAEFVRNYQATLRAWRPQEPRTRQLERLCEIRRRLVNQRTKIVQQLVDALKQSFPLALELAGSLKGERALALLERWPSHDKLRRAHPDSLRRFWRKFYRQADRVEALVQRARQSPPLTRDTAVIEPFAMLITVLVRQLKVLQQAIGQFDQRIAELLASDPDAELFRSLPGAGAALAPRLKVAFGDDRQRYQHASEVQQYSGIAPITRRSGKSQVVQRRFACPKFLRQTFHEFADQARRFSRWSNAYYRLQRQRGLGHQAAVRSLAFKWIRIIFRLWQTRTPYDEQRYIEQLQRHKSPIVPLLATP

SEQ ID NO: 476925 - protein, 395 aa, unidentified
MQTIIITIGMDVHKETYALCSYLSTSQKFYYEETLKSESKYVVKYIRKSKKEAIRLQMIENHKNNLLLDESEIEVKVICGYEAGPTGFNLKRELEKANIDCRIMAPTTIYKKKGGNRVKTDKQDARNLSKTLFWGAYKEVVPISIEDEATRDYIRMRDDRKSALKKAKQQLKSFILRRNIHYPFKGGTWTQAYRKWLKTIKFDLRIDQVTFDEYLAEVYRLEEAIERFDIKIEELSKNDKYKEDVKRLRCFAGIDTHIALSIVCEVGDFARFKKARDFSSFIGLCPGEQSSGEKTKTTGITKSGNTHLRKLLIESCNSIARTNIYNKSKRLRLRQYDNDVDVIAYADRGSKRIRYKFAKMSNASKKRNVAIVACARELACFIWGMMTNNIYGEIA

SEQ ID NO: 476926 - protein, 309 aa, unidentified
MSIICGVDVSKAWLDAWAAKQYRRFANTPEGVEALFAFCCEHGVELLVMEASGGIEQAAFLALWKLGQPCAIANPRAVRSFADAMGFIEKTDRIDAEMVAGYAAAKGMVATPPPSEDQRRLTALTTRLRQVSADLSVQKQRLHTTSEPTALASLKEAIAFLNRQAKALATHIAALITVDPLWAELDKTIRSVKGLADRTVAVLLADLPEIGTLTNKAITKLVGLAPLANDSGKRTGQRSIRGGRATVRSILFLVADIARKYDADLANFRDRLIAQGKAKMVVRIALARKLLVRLNAKVRDARLDLANAA

SEQ ID NO: 476927 - protein, 261 aa, unidentified
MEKLIRVGMDTSKSVFVLHGVDAAEKVVLRKKLRRQQVIEFFGKLKPTKIGLEACGAAHYWARELEALAHEVVLLPPQYVKPYVKRGKNDAADAEAICEAMSRPTMRFVPVKTAEQQAALMLAGTRDRLIRTRTQLTNAIRGYAAEFGLTAAKGLDKIEPLLARLTAATELPKLAKELFAAHAREYAQLKVEIQKIEAKLMAWHKHNELSRRLVEVPAIGPIGASLVVMKVPDPHAFRSGRDFSAWIGLRMSAGSARSRRS

SEQ ID NO: 476928 - protein, 331 aa, unidentified
MFYLGIDVSKAKLDCCLLLDNTSFKRKDKSIANNHKGFNELLAWIQKQSVALNDVHIIMEATGVYHEQAAYAFHDAGIKLSLANPAYVRHFANGLAIKTKTDCMDSFVLARYGLSAQPQLWTPAPIEARLLQALLNRREAIAQDLQRERNRQEKAEVAVSPDIIQQSIKTSIAFLEQQLKQLQQDIDDHVDKHPKLKQDVKLLETIPAVGERVGNTMLSVLHNHHFESAEQVAAYLGLVPVEYQSGTSVLKRPRLSKTGSASVRATLYMAAVVATKYNPHIKKLYERLLAKGKCKMLAIGAAMRKLVHLCFGVWKNQTPYQEDFLPKNAIK

SEQ ID NO: 476929 - protein, 339 aa, unidentified
MKYIGLDIHPSTTTFVVMDQNAVILKNYTIETNGRLIVNAINQIQGPKKIAFEECELSHWFFSILEKHVDNLIVCNPVANMQFKSKKTDQIDAKKIANLLRGGFLQSVYHDNSDRSKYRLLMSAYEDLVQDLVRVKCRYKSLFRKFGKNITTKKIYKEKEFLKLIRRKDFGFIGKNILDSISFLEQKKQIFTEKIIKENKKFKEIKFLKTIPGIKDIQAAKIVSQVITPYRFKNRYKFFAYCGLIRYTQSSAGKNHGSIKVRGNEILKTVYKMAARNAIKGDNAIKLYYEHKKKSGMSPDKAYNQICRKIAILSLRLWKENIEYSNKEFLKNCLKENIQ

SEQ ID NO: 476930 - protein, 407 aa, unidentified
MGVPASIIKEGIMEPVIGMDVSKGSSVIQAFLGRNEPYGKAKQIYHNEQGFEWLSVLCAELKTRTGAEPVVIMEATGHYHRGVVCYLIQKDIRHIILNPLQSKRAKGMGLRKVKTDEADAWSLAEMFYRGDALPHRIWDESYMELQHATRQHEFVTSLYVQAKLNTRALLDQVIPAYEGVFSDLYSATSLQVLQSCLQGQMDKAEIIEKVLIKYAGRSRSQSWIREKSIRIEEILGKWKEERTSPSQTEALKGMITLLLTLQAQLKQLEQQMEEISVQLPEVDLLKSIPGIGEKLAAAIVAEIGDIKQFRHAKQLVAYAGLDPSVHSSGKFTASSNRITKRGSKRLRRSLYLAVQCGLRQGNNRRLASYYERKKKEGKPYKVTVIACANKLLHHIYAILNRGQPYQT

SEQ ID NO: 476931 - protein, 385 aa, unidentified
MGNQTIIPREYDVFSGLDVDKRSLSVTFTDHNGFLKSLRMPYSVEQLLKHVRKHFPNQKVAFAYEAGPTGYGLYDGIVAQGYPCLIATPSMIPKAPGQRVKTNRLDSRALSESLRGGQLKSIHVPSPVYRELRHLTQLRDVMVSELVGMKQRVKALLLLEGIEFPSAPPGSQWSFLVKDTLRKLACSATVRFKLDQLLDSLEFNEQQVVKTTRAVRRFCQKDPELSQCMKYLMTLPGIGWIVASQLLARIGDWRELKNIRQLGGFLGLVPTEHSTGERTDRGSITRTGDERLRSKLIQASWSAIRQDGELREFYRTVCRKHPRAIASRVAIVAVARKLSVRIAVVLMQQRPYELRQKVHSAPLTQEETSPQGTTRRVPEPGEKNS

SEQ ID NO: 476932 - protein, 349 aa, unidentified
MLYAGLDLSRKRLDVCLLTEEGEIVGEFGVPPDPDGLRGLIKRVGAVPVLGVIESMTGARFVHDRLEQLGWDVRIADAQKVKGLAPLACKTDRIDARVLAVLGHRDLVPEIWLPDPRVRAERELARYRMHLVKHRSMLKNRIHSTLISFGKPCPVSDLFGVAGRNMLAEIALPDPWSTTVEASLQMIDGLEAQIAAINKQLKATAPDHPYVPLLMTAPGIGWVLGFTIAAEIGDIERFSSPSKLVGYSGLCPRVIQSGESDRRGPLTKAGPKYLRWAMLEATMHALRHEAYSERYQQTKRRLGRQRGAKIAQIDIARRLTEAVWHMLTNKQPFSPKTTAAGRAAFRLAA

SEQ ID NO: 476933 - protein, 406 aa, unidentified
MLFVGDDWAEDHHDVEIQDETGRRLAKARLPEGISGMARLHGLVGRFLPEDGDAAGVKIGIETDRGPWVAALVASGYQVYAINALQSARARQSQGVSGAKSDAGDAHVLADLVRTHSHQLPTVAGDSEHAGAVKVLTRMHQTLIWDRTRQVLRLRSSLREFFPAALEAYEDLAFPDVLELLTKAPEPNSAARLTRAQITAALTRAHRRDREAKTTAIMAALAAEHLTQPPLIAAAYGATVRALAALIRTSNEQITALQGQVEACFGQHPDAEIYLSQPGLGLVLGARVLAEFGDDPTRYDGARARKNYAGTSPITRASGKKKVVLARYVRNNRLADALHQQAFSALSGSPGARAYYDALRDRDISYNAALRQLGNRLVGILHGCIKTHTPYDEATAWNQHTQQAAA

SEQ ID NO: 476934 - protein, 414 aa, unidentified
MALRRWVGRAIGVDVHRDFCVVAICEDGEVRTAGRVPSTPEGLTLLAQSLVGSDRVALEVTGSCWEVARILEPHVERVVVVSPDDTGIARARAKTDRLDARALARLLWSGELESVWMPDERCRVLRRRLARREQLVHARSRAKNEIHAVLQRRLQGKPPCSDLFGVKGRRWLASLELPVEERESVDAGIRHLEFLDAEIAAVERLIAQQALEWAEIRRLMTVPGVNLICAATFIAAVGDPRRFLTSRKLVAYLGLDPKVRQSGDAPARSGRISKRGSAAARWALVEAAWSVVLQPGPLHAFSDRTRARRGHGKAIVATARKLAILFWCMLTRGEDYAHQQPSLTKKKLRRLEITAGAPKYANTARGVWSSNVAIRQAERQLAEQAEASYRRMLKDRQAAAPASKVGASVTAERA

SEQ ID NO: 476935 - protein, 383 aa, unidentified
MPDVISTAPADVRLWVSLDVHKLSIVAATLPPVGGQPQVQQIETTRAAVRRFIDRLGGPEGLAVCYEAGPGGFDLLRVLNELGVACDVVAPSLIPVRAGDRIKTDRRDAKKLVRLYRGGQLSFVAPPTPETEGLRDLMRCRDDLRCARTSARHRVSKQLLRHGRIYREGQSQWTKMHRAWVARQRLDDELAHKALEQMLVHLDGLDRQLDALDRELELIARRERWASTVEILTRFKGIATRTALGLIAEIGDFARFSHPRELCAWLGIVPSEYSSGQQRHRGHITKTGNHHARRLLIEAAWSYQHRPRRPGRGPEPDARAWQAQVRLHARYRHLTTERGKRSTIATVAVARELTGFLWAAATNQPLVQEAAADPSLTPEAAAA

SEQ ID NO: 476936 - protein, 346 aa, unidentified
MPVYMGVDFHARVQTISYLTTEDGAIEQVELDHLKDDVRGFYQQFAGEVIVGFETSGYAYWFEEMLEELGHRVWIGDPAEIRRLARRRQKNDRRDANLILELMLRGDFPCLHRQSPESREVLQQLRYRQRLVKMRTMTINTLRFMALSRGVSIRGHLSSQASQERMKSLPLSPVLSQQRDELVSLVQELTLKIARAQQWLEQQARQDAQVRLLMTHPGLGPLTGLCLVHTLSPISRFQNGRRVTGYVGLDPMEDSSADRQRFGSISKQGSRLLRFLLVEAGQVAARQDHDLKQFYRRVQLRRNRPKAKVAVARRLLVRAFIMLRDQIDYAEFLRRGVAARSARNSP

SEQ ID NO: 476937 - protein, 416 aa, unidentified
MEQIFMIKENYIYVGIDLHKETHTAVMIDCYNQKLGEITFPNRPADFPKLVAKVKKCNTDGKTIVFGLENAYGYGRALAVWLIDKGYLVKDVNTAISHRQAKHRGAMYRKSDSDDAEAIALATLNMLDKLPDAYPNDAYWSLGQLVRRRDNIMKQRTRLVNQLHEQLCIAYPSYKSFFNDISRPTALYFWEHYPSRKYLRGKSVEDLRKELVPVSHNRCSTKNCEKILDAAASDKVKNNAYQDARDMVTLSIVSDLQHYDSQLAEVDKMLEQMYKMLGCTLTTIPGVNVITAVKILAEIGDIKRFSNANKLAQFAGIAPLHLSSSGKGKDVATKQGNRRLQATIYFLAIQMVQVSSKGTPRNSVVRAYYEKRKAEGKTSQQALICISRRLISIIYGMLKHGTEYRMPVVENAGEKL

SEQ ID NO: 476938 - protein, 453 aa, unidentified
MKTFYLGIDVSKGYADFVILNENKQCVENNFQMDDTFTGHCLLYERLVEFFNTHPNCLLSAAVESTGGYENNWLNSLLKFQATLNIQSARLNPLGVNANSRANLKRNITDKISAQNVAEFMIAHPEKINYQEQDSFANLRRQWRYINLLTKQSTQLLNQLESLLYIANPELLAYCQDRTPKWVLTLLKKYPTASKLSRAKVKSLSRVPYLSIQRAKELIGGAKQSIASANDDITGQLIVNMVKQIVRLNQTIDAQTKQMAQHCRMDEINLLKTFIGISDYSAIGLMLEIQSIHRFPTVKKLASFFGLHPVFKLSGDGSGGFYMSKKGRKEPRRILFMVAIAAIKHNSLIGSIYKQRLEKGMPRMAAVGYCMHKILRIIYGMLKNETTFDPEIDRKNTIKNIQRRSKTRHDKSRRYMAYDGMAPVSRRQRNKRKERKESQSDDITKNGIIISAP

SEQ ID NO: 476939 - protein, 314 aa, unidentified
MEAIIERCAGIDVHERTVVVCVLKGDLKKKPEKEIETFNTTTTDLLKLLDWIEERGCTQVAMESTGVYWKPVWNVLESGDFEIILANARHIKNLPGRKTDVKDAEWIAQLLRSGLINKSFVPDAHIRDLRDITRYRKKILYELNREKNRIHKILEDCNIKISSYISDIFGDTGRKILNKIINQEEIRMTDLIEISNGRGKASIRKKLGEIKEAVNGKIRNHHLTMIKYSYDHIRFLEEQVVHIEKEIGEYIEPYFEEVEIIDTIPGINKNAASVIIAEIGTDMSYFPTDKHLTSWAGLSPGNCESAGKKKEVKQ

SEQ ID NO: 476940 - protein, 443 aa, unidentified
MKSLPVINPHAAAIDVGSEQLHLSIVGEEPVVFGTFTNEVYRLRDYVKAQGVTTVAMEATGVYWMYVYAVLEAAGFELAVVNGRYVRNLPGRKTDMADCQWLATLHAHGLLRGGFVPPAAIRRLQDYQRLRADHIIGAGSQVQKMQQAFERMNIKFHDVISDLAGVSGLKVVRAILAGERSPEVLLGLCDVQIQNKKRQRVLESLRGTWAAEHLFALGQALAVWEFYQQLLAECDRQIEAVLQELAGPEPEPPADAPTPPQPSVPVKPSGKNAPQIELLHQLLVRICGGRDATALPGIADYLLLQLISETGVDLSAWPTEKQFISWLGLPPGSRQSGKRKGSVKRQRNRAGKLFCTGARSLAQTVDKALGGYYRRLAARKGGMVAMKALARKLAGLYYRVLTQGLEYAEQGLKVYEQKYAESQRRLLAKLAAQQGFKLVSQSA

SEQ ID NO: 476941 - protein, 469 aa, unidentified
MNNAKKKKRKNNGKQHNSLSQLEQINLNAAGIDIGAEEHYVAVPQGRDPEGEDVRHFGAFTVDLLSLANWLKKCKIDTVAMESTSVYWIPLFEILDSQGFDVKLVNPRSIKNAPGRKTDVLDCQWIQQLHTYGLLQGSFRPDDQICELRSYLRQRSMLISYASHHIQHMQKALEQMNIKLNHVITDITGVTGMAIIRAIIAGERNPQKLAQMRNSRCKSSKSTIAKSLQGNWRSEHIFSLQQAVELYDFYKSQITACESRIQQHLETFDDRSDGKPLPKPPFKSGGCRNKFHFDARTYLYQMTGVDLTRIDGIDTPTALTIIGETGIDMSKWPTDKHFSSWLALCSGSKISGGKVLSSKSKPCANRAAYAFRLAAYSLNRSNSALGAFLRRKKSHLGSPKAITATAHKIARIFYNMLKNGAEYVDLGQDYYERCYRDRVITNLKRKAKQFGYNLVNVKEHELLTTRLQN

SEQ ID NO: 476942 - protein, 386 aa, unidentified
MQTLNNLSRSLIALEPASTLIAVIEMSLSSWLVAGIVPGIERQPLKKLAVDESALLRLLHRWREEAEKAGCRIKRIVVAFEAGRDGFWLARWLKARSIEAHVIHAASVAVSREHRRAKTDRLDAELLKRAFLGWLRGERNHCKVVAIPTLKDEDAKRPSRERESLVGEQSRIVNRMKAALIRLGIRGFNPKLKRAAGRLDSLRTPEGEPIPPNTLAELRRDMERRRLISNQIRQIEEARLKHFEQAPNDGPHAMVRLLARVIGVGIETADMLVHEVLSRNMHDRRAIARYAGLTGSPDESGRKRREKGLARSGNGRVRRGMVQLAWRFLTYQKESALAQWYRARMENARGARKPMIVALARKLLIALWRFVWQGVVPDGVVLRPAQ

SEQ ID NO: 476943 - protein, 328 aa, unidentified
MGLISAERPVLRRKLRRSEVLAFFAKLPPTVIGMEACGAAHYWARELRKLGHEVKLMAPQHVKAYVKRNKNDGRDAEGLCEAMSRPTMQFVPVKTEEQQAALMLAGVRQQLIARRTQLSNAIRGYAAEFGLTTAKGLDKIEPLLTRIALDETVPALARELLAIHGQDYARLQIELKAIEVKLMAWHRANACSRRLAQIPGVGPIGATALVMKTPDPRAFRSGRHFAAWLGLTPKDHSTAGKTRLGKITRAGDEMLRSLLVAGATAVIQQVRRGRGRPSAWLLALLKRKPPKLAAVALANKVARIAWKLMTTGESYDGARMPGAQAFAA

SEQ ID NO: 476944 - protein, 424 aa, unidentified
MNLTQNDRLKQVTSDTLIVGVDIGSQTHFCRAFDWRGFELSRRVFKFSNTGTGFLTFLRWTEELMNKTEMKKVIVGCEPTGCYWLTFQKFLQDHDIQLVTVNPFTVNRSMELDDNSPEKSDLKDPKTIALLVKDGRYSISYLPSGVYAEIREAYVCRDQIMKQHVRLSNQIQGWLQKFFPEYFECYAEWDSTSGLMLLKEAPLPQDILKIGAGGINQIWRDAKVRAAGIKRAQTLVEAAQNSVGLEAGEAARLEIWVLVNDYILKAEQLKRLDEYLEEKIKEVPNVEKLLAIKGVGMSTVIGFTAEVGDIGRFTDPKQIQKLAGLEIVKKSSGKKKGQPRISKRGRRKLRRTMYESARALMQWNPAFQDVFLYYRNRTHKPLGSMQAKIAVACKAIRVFYVVLQTGCDFDEEKFRRDIIRPEAA

SEQ ID NO: 476945 - protein, 341 aa, unidentified
MEEYVGLDVSMEETSVCVMDAAGKIVWEGKAATEPGELVRTLRVRAPAMVKVGLETGPLSTWLWHELQEAKVPVVCLDARHAQAALSMRINKTDRNDAAGLAQLVRMGWYREVKVKRLATHVDGALLASRALLVQQRCELENQIRGLLKNFGLKVRATKGRAFGQSVAALANKQPVLREMVLALLAVWSSLRLQIAVLSRRIEQEAMNDPVCRRLMTMSGVGKLTSFAFRAAVDDPARFRHSASVGAYFGMTPRRYASGEIDRMGRISRCGDALMRHYLYEAANVLLTRSRGSNPLKAWGLKIAKRAGWKKARVAVGRKMAVILHRMWRDGTDFGAPKVKA

SEQ ID NO: 476946 - protein, 361 aa, unidentified
MNRTGLAAVTAEATASIPLSGQVKVGVEAAGHYHRPVLDHRWPPGWEVLELNPAQVAEQRRVQGRRRIKTDVIDLEAITDLVLAGYGRSVSDRDVVIGEVSAWAVHRSRRTATRTATKNQLLGQLDRAFPGLTLALPDVLGTKIGRLVAAEFTDPARLAGLGVSRLIRFAATRDLQLRRPVAERLVAVARDALPTRDAVIARRILAADMALLADLDAQIDAAETELGSLLPRSPYATLTSVPGWGVVRVSNYAAALGDPQRWPGPRQIYRASGLSPVQYESAHKRRDGGISREGSVALRRALIDLGIGLWLSEPAAKTYAHGLKDRGKHGGVVACALANRANRIAHALVRDHAVYEPTRWA

SEQ ID NO: 476947 - protein, 330 aa, unidentified
MKHNHVGIDVSAKTFTTIIDHEGERTEAFDLPNDPKGFKKLIRMITKKGFTAQVVLEATGNYSLDLALALHRAKRIEVMVANPRAIALFAGAFLRRSKTDALDANVIVKFSIRMPFAAWKPPEAHCFNLRAISRRIEALTKTATQEKNRLHAATTFDEMTDVVRNDIEVNIRHLERRIGRLREQAREHIAEHPDLERAFLHIISVKGIAEAAGIQILAELSILPKDMDVRQWVAHAGIDPMQFQSGTSVNKPSRISRRGNVHLRRALFLPALVAAQHEPHVTAFYQKLLGRGKTKMQANVAVMRKLLHAIYGMLNHDRDFDGEKFYVLGA

SEQ ID NO: 476948 - protein, 341 aa, unidentified
MEEYIGLDVSMKETSVSIRRAGERIWRGKCASDPRIIAELIRKRAPAVKRVVFETGPLSIWFYHSLRTEGLPAICIDARHAKAALDMATNKTDANDADGLAQLAEVGFFREVRVKGFDSMLTRTLVGARTRLVRITTELSNQIRGVMKTFGLLVPAGKGSIFEKNVRSLLTDQDGLASIVLPMLEAWRGIRIRAAELGRQLVRDARQNQACRILMSIPGIGAITATAFTTAIERPDNFKKSRSVGAWIGLTTRRYQSGEVDYDGHISRRGDAHLRGLLYEAAAVILTRSSTDSTLRTWGLKLRERIGFKRAAVAVARKLAVIMHTMLKTGELFNPNAGAIA

SEQ ID NO: 476949 - protein, 417 aa, unidentified
MSDLIYTIYVGVDWADTEHRVIVLNAAREPLHDWVVPHTGAGLTAFAARLTELTDGDASHVAVALEVPRGPIVDALLERGCHVFSINPKQSDRFRDRFSAAGAKDDRRDARVLADALVTDRGAFRRLASEDPLIVLLRELSRVDDELQQEARRLANQLRAQLHRFYVQPLALCPGADEPWLWALLQLAPTPAAAARLREARLATLLRAHHIRRVTAGELRELLQRPALPVAPGVAEAASSHVALLLPRLQLLQAQRYQCGQQIERLLQRLSEGAGAADPQRQHRDVTILRSLPGVGRTVAATMLAEASQLLAARDYHVLRTQTGVAPITKASGGRRVVRIRSACNRRLRQAVYHWARVSAQVDPLSRAHYTALRHRGHSHPRALRGVADRLLAILIAMLRTGTLYDASCRRTQHLVA

SEQ ID NO: 476950 - protein, 344 aa, unidentified
MKKSNVIGIDLAKNVIQVCKIDKHGELVSNKAMSPSKLKELLAKSVPSIVAMEGCGSCHYWARLARAHGHDVRVISPKKVKAFLQGHKTDANDALAIAVAATQVGMIFSQIKEVEQQSLQTLEKSRKFLEKELTALSNHIRAYLYEYGITMNRGRKSLRETIVVVFDDLDTRLPQCLKSTLRLLWERYQQTATQFEEAEQHKAALVKQLEPCKRLMDLEGIGTVCASMLYANIGDGKEFKNGRQASVYIGLTPKQHSSGGKTYMRGIDKQGGNRELRAALYQGALSVISRLPSEPRTSKEAWLLELIKRAGVKRACIALANKSVRTAWALLATGKSYEPVLLKS

SEQ ID NO: 476951 - protein, 376 aa, unidentified
MREKLRFLGLDVHAETIAVAVAEPNGELRSLGTIANREDSIRKFIKKLGSPEQLRACYEAGPTGFVLYWQLTQLGVDCAVVAPSLVPKKPGDRVKTDRRDALKLARCHRNGDLTAVWVPDAASEALRDLVRQREAAKQDQLRARHRLTKLLLRTGQRPPLGLKAWTERYWRWLAQVHYTQPAQEVTLRDCLNEVEHMSDRIKRLEDAILEVVKLAPQATQELVRGLQALRGIAHISAVTIASELGNISSRFQCARNLMGYSGAFPGEDSSGNRIRRGGITKAGNAHLRRIVVESAWCYRHLPRVGARLRKRQEGIPAEIIEIAWKAQNRLHKRYMKLSMAGKDQRKIMTAVARELLGFIWAIGVKVEQACQQPIAA

SEQ ID NO: 476952 - protein, 375 aa, unidentified
METIYIGVDFHSRQQTICYLKTETGELVISELKHRDKEQVRAFYEQFQGQAIIGLEASGYSPWFETMLEELGCEVWLGDATEIRRRARWRQKSDRRDAELIWDLMAHHEFPRLHRPAVQSREILRMLRYRQKLIKMRTMSKNSLQAIAMQAGLAKGSRLFSTVGQQELQTAPMSAALQWQRDHWLALMQPLNQQLLETMVWFKAQAKGDAVISRLRTHPGIGLLTSLCLLHTLQPVSRFRNQRKVVAYAGLDPMVRSSAERAIYLGISKAGSRLLRYLLVEAVHTAVRHDEDLKRFYQHVAERRGRPKAKVAAARKLLIRAYIMMRDEIDYAEFRRRAVAARLARRGQGPNVPEVLIGQPASAERQAPLTNPPSK

SEQ ID NO: 476953 - protein, 352 aa, unidentified
MTVYIGVDLHVRTQTVCWVDTADGELHEVTLDHERNDVRAFYAQFAAPAVVGVEASGYSLWFHRLLEELGHHLLVGDVLAIRQCARRRQKNDRRDARLLLDLLLHQEFPAIHIPAPASREVLALLRYRHRLVRIRTMLRNGLQAVALSHRLRLGPKLFTAGGLQQFAALPLTGAFAVQRQHSLALLASLAEQVLAVEAQLQDRAQHDPRVLRLRTHPGVGLLTSLAVVHTLEPVSRFDRARRVAAYCGLDPKERSSGDTQRWGHISKQGNRLLRFLLIEAAHTALRGDDDLCRFFFHLQARKNASIAIVAVARKLVLRLYRMLRDEIDYTQFRRRGRDARRAREDTSQAASG

SEQ ID NO: 476954 - protein, 408 aa, unidentified
MTIVGIDVSKGKSMVAAMKPGGELVAAPYEVRHSDIELSRLALNVLCMEPDTRVVMEATGRYHEPVAALLHSEGIFVSILNPLLIKQSGAGSLRKVKSDPKDALKIAKYGLDNWSTLREYTPMEAIRQQLKLCARQCDLYNKSIVMLTNNLISLSDKTFPGVNELFSSPEKADGHLKWVDFYRTFWHCDCINRMSPDTFGERYKKWCKRKGYHFSADAADALYAASCGLYTTLPRDNNARLLVTVAADQLIALRENQSKLEAEMLNFCKQLPEYETVMAMYGVGKSTGPHLMAELGDVRRFLHRSSIVAFAGVDPGVVGSGKMQLSSVTTSKRGSPQLRKALFQVVSTYVKCKPENEAVYQFYTKKRDEGKPFFVCTTAAANKFLRIYYARVKECLNAAESATQVEEG

SEQ ID NO: 476955 - protein, 415 aa, unidentified
MEVLYPHCAGLDVHKRTVVACIAHTDGRGHVTWTTQTWGTTTPDLLALQAWLVTAHVTHVAMEATGAYWKPVYNLLDGVFTTWVVNPAHIKQVPGRKTDIQDAEWIADWLRHGLLTPSFIPDRPQRELRDLTRQRTQWLAERSREVNRVQKVLEGAHIKLSSVVTDVLGVSGRRMLEALVAGTTDPATLAAWADPRLRATPAVLQAALTGAMGAHQRFLLGQLLQHIDELTAHVAALDGEITRRVAPQEATMALLDTIPGIDRRTAEAIVAEVGMDVARFPSADHLAAWAGLAPGQHESAGKRRQAATRKGNPALRDALVLAAWAASHTKTTFLGALYRRWVKRMPAKKAIVALAHRILVIVYHVLTTREPYHELGATYHDARDRTQIVHRAVQRLTRLGYRVTVEPVAPAADSA

SEQ ID NO: 476956 - protein, 451 aa, unidentified
MERPQELEVDDEHEVVERVAAIDVAKATGMVCTRAPHPSVPGKRVTKVFEVRSTTRALTELAEHLLAERVERVVLESTSDYWRPFLYVLQGAGLSVWLVNARQVKNVPGRPKTDKLDSVWLAKLAERQMLSPSFVPEEQMRHVRDLARARFDLVEDRTRVKQRVEKVLEDALVKISSVLSDLHGVSGRAMLEALIAGERDAKALAELAKGRARARLALLAEACDGRFTEHHARLCRMLLDQADDLTRRIAAVTALLDAAIAALEAPHGEVATAALDPSTGEILPASQAYVSAVERISAIPGGGPETARAVIGEIGLDMAVFGTAQRLCSWAKTSPRTVQSGRKTKGAPTGKGNPYLKAALGQMASGASKTDTFLGERYRRLVKRMPKAKALVAVERSLLVVIFHLLSDPNATFTELGSDFHDKRIDRRRRTDHLVHQLEALGHHVTLSPAA

SEQ ID NO: 476957 - protein, 468 aa, unidentified
MALTLGIDVAVRAEHQATLARDGATVWRGRKFWTRLADLERLWADLDLPDPAELTVVVEPTRNAWIVLAEWFRRRGARVVMVPTTQSADLRKYYSKHTKNDRIDSELLARLPLLHPEGLREYSGQGPADSLRRLVKQRSTMVKRRVAVYARLDALVELLGPAWYAVLGSNYGIAALEFLARYADPHAVIRLGRARLTRFLIARSRGAWRDDHAAGLITAARETLALWGTSDGSDGMDFAELAEDIAHEAEQALFLTRQIKQIDERVANLYADADPAGIVASAPGVGAVISAVIAGRIGDPHRFTSLAAIRAYTGLVPKVSQSGVSKVESSITKAGDPLLREMLCTAADQARRVDPQFAAKYQRLMVGDRHHESAICHLATHLVTRIAACMRAGQPYALRDVDGTPITEAEGRAIVTARYKIDPRRRENVRYQRMRERRKQAAGQESQESRCAPTAQPAKTKPTNRQVA

SEQ ID NO: 476958 - protein, 347 aa, unidentified
MRKSITDLSSVTTVGLDLAKHVFQVHGVDASGRVIVVKALRRKDVLAFFAQLPECLVGMEACGSAHHWARELIKLGHDARMMPPAYVKPYVRRQKNDAADAAGICEAVTRPSMRFVGVRTLENQAALMHHKLREMLVAQRTQLINALRGHLAEIGVIAAQGLKNARDLAWVIKAEGDETIPACVRAALAPLVRQLHALDQEIARSDQTIAAMARDDEMARRLMTIPGLGPVTASAMATSVQDVSVFSGPREFAAFLGLTPRQNSSGGKERLGRVSKMGNRYLRKLLVVGAHAVLYHRKPHDDALRSWAKKLMQTKPFKLVAVALANKMARIAFAIMRGKTSYSAAPA

SEQ ID NO: 476959 - protein, 428 aa, unidentified
MKNRNTQKLEAITPGTLIVGVDIAKETQWAQFVNYRGLELRKFLKFKNHKNGFDSILASIEEICKNRRLDNIIVGMEPTGHYWKPLANYLLKNKVNVVMVNPYHTKRAKELDDNSQTKSDKKDALTIARLVRDGRYYEVYMPQDIFAELRVLSNSRISLMKRSNALKNTITAVMDEYFPEIVTVFKHPLKGKAARQILKSCPFPSLILELGIDGVLVEIKKAVKKTVGRKKASQLVKTAKSSIGVGYGLVSVKLKLGLMIEELELLTKQLKQLEKAMEKALTDTGHDELILSIPGTGVVTAASFLGEIGDPMRFDHPRQICKMAGYNLIENSSGKNKSRTVISKRGRKNLRSILYQMAITMVAVNHEMKELYRYLKTRPQNSLKKKQALVVISKKIITVIYNLIKKQTEYRAELVLGEFRKNQIKQAA

SEQ ID NO: 476960 - protein, 418 aa, unidentified
MKHSKAEKIASINKKTLIAALDIGKKVHHGYFRAPSGKDIQPFSFYNSRRGFNKFWQRLCDFKQKQMFEEIIIGFESTGPYAEPICHYLRDKSVKLVQVNPMHTKRIKELTGNSPNKTDKKDPRVIADVISLGHCLTVIVPKGAAAHLRRLTQARERAIERRTAISNQLQHLVFLIFPELVHIIKPSTKTGMYLIKHYSDPNKLLFAGINKVNAIIKKVSRGRLATDRGQQLYDAAKKSVGITQGKESILFEITHLVCNIESENRYVQELEKQMGDYLKKIPYSHSILSITGIGNITAAGLIGEVGDFRKFKSISEVLKLAGLDLYEISSGAHQGCRRISKRGRALMRKLLYFAAINTTRKNGILHAPYQRHLAKGMPNIKALIAIARKLIGIIFALVRDHNCYIADYSSQLVFKKAA

SEQ ID NO: 476961 - protein, 343 aa, unidentified
MKLHVLGIDLGKTVFHLVGLDSTGRVVIRKKCSRTQLLAFTANLEVELIGMESCSGSHFLGRALPEQGHQVRLMPAQYVKPYVQTNKSDFLDAEAIAEAVQRPRMRFVPIKTEEQLDLQALHRVRERWVMRRTAVVNQIGSLLLERGLTWPKGRRYVDQQLPRILEDAELRLSGSFRVLLAQLQLELEQLTARLEQMDGVMQQTAKENEACQRLTEIPGVGPVTATALIAAVGNGSDFQKGRNLAAGMGIVPRECSTGGKQKLLGISKRGHAYLRTLFVQGARSVVQQRHKQAPGLSHWLAQLLARAHQNVVIVALANKMVRMAWAVLCKNERYRAPVLEVTT

SEQ ID NO: 476962 - protein, 346 aa, unidentified
MQYVGIDWAYRHARWCAISEHGELVAEATTPADEDGLLRLIARLGPDVRACVEMMSGAVWVRDCLERAGWRVEVADARKLKGLAPLAAKTDGVDARLLATLAFRDLVPALWVPALSERALSERLKRRAHLIRLRSSAKNRSFGLLSQWGLRLSLQRLREPDAAELLESRGVPEVWRRSVFEAVALVDHLDRRLAPLERELLPLARADRRVQLLDSIPGVAAILGLTLAVEIGEVSRFATARKLVGYSGLTPSVRQSGESSRTGRLSKAGSATLRWAAVEAAQHAWRESNPWHRLYGDVKQRTGKTNAAKSAVARKVLIAAWHVLSREQPFKPHSPVSASSPQPLAA

SEQ ID NO: 476963 - protein, 405 aa, unidentified
MKESIAKEMNDAGSATGLAGVMQALEQASNVYGAYIGLDVHKETIAVAVAECGRGAPEYYGEIAHTPKKVAQLVERLSARYGGEPLLWVYEAGPCGYGLYRQIVETGHDCEVVAPSLIPQKAGERRKTDRRDALGLARLSRAGELTAVWVPAPEQEAIQDLTRAREDMKKLELKARQTLGAFLLRQGKVYAGKSRWTQAHFRWLETVTFDSPVQQIVLQEYIEAVKTAQRQVASLEQQMHAVLPQWSLAPVVEGLMALRGVSLISAMTILAELGDISRFDSPRQLMAYLGLVPSEHSSGPNRRQGGITKAGNGHVRRILTESSWNYRFPARKTRDIEKRAEKTSAAVQAIAWEAQKRLCGRYQHLLRAGKVKQQVTTAVGRELAGFIWAIACEVMGKDHGSRATA

SEQ ID NO: 476964 - protein, 413 aa, unidentified
MRNLLEVCCGIDVHKEILVACMLKGGIEEEPEPIIKEFSTLLSGLDEFKSWLIEHKCHDVAMESTGVYWFPIYNVLESIFYEDGHMNIIVANPHHMKNVPGKKTDIKDSHWIATLLRAGLLAPSYIPPKEIRELRDWTRYRDVLIKELVGHKNRIEKHLQQCGFKLSTILSDIFGMSGYELIRKLCEKGKLTALEVEGCLHGTLRAKSGEVQQAVAGRLSAHDRLFLTNLVQVMEHCRKEIEEAECHITVYAQQYEPTLQLLETIPALQRRASTIIVSELGIDFSMFPTAGHLCKWAGLCPGDNESAKKKKTMRITKGNPRIKSVMVQCAWAATRCKNFFLRDWFYRLRARRGTKKALIAVARKLLAMVWYILTTGENYEETRYEQTKKNQEGRRKQRLKTEAAKLGFKLVPA

SEQ ID NO: 476965 - protein, 429 aa, unidentified
MNLRPIAGIDVGKFFSEMAVLSPSNEVVARMRIHHDSSADVKRAIELLRKMEKDFASRPFVVMESTGHYHKILFHSLCKAGFEVSVTNPIQTDSIKNIGIRKVKNDKVDARKIALLHRFQELKSTNIPNEDIECLRSLCRQYYKLSDELTVYKNRLTGIVDQVMLSFKDVFPSIFSKTATAVLKKYPTPEHILKANKGDLVSLIRDNSRKSTEWSSAKYELLVSKAREFAPLSINNPSNVAMMGVYISMIKTLDENLAIILKAIHRLITEDMAKDTPMLSLTLELLQSIPGIGLLTAATILAEVGDFSAFSKPGKLVAYFGIDPSVMQSGEFIGTRNKMSKRGSKLLRRVLFTIALANIRTKRDKKPCNPVMMEFYKRKCQSKPKKVALGAVMRKLVCIIFAVLRDRKPFELRSPQKHAQMLAAKRIAA

SEQ ID NO: 476966 - protein, 326 aa, unidentified
MTLSHSTDNTFVGIDVGGAGLDVAWHRGGCAHYANRPDAIVALVERLRAGPDVTRIVVEPTGGHEKPLVKALRQAQLPIEIIHTTRFAAYRKLVGVNAKSDTSDARLLASYAAAPDEVRGRKAGYVELPADDTREALAELASRRDQLKHMIHAETCRLGTVRLAKLREAIMGHLATLRDEDKQVHRMMLDLVRQRLDLQRDQRLLKTIKGIGPKSALVFLASVPELGRIDNKAAAALVGVAPFVRKSGTMVAPARIHGGRAAVRSILFMAAVCASKHNPVLRPFYERLIAKGKPPKLALIAILRRLVVFANAVLRSGQPWKGATAA

SEQ ID NO: 476967 - protein, 454 aa, unidentified
MARNGKKKTKKQESLPFIQPDAAGIDIGATEIYVAVPEERDIRPVRKFATFTEDLHALADWLIACQIKTVAMESTGVYWIALFQILERRGLEVCLVNARHVKGVPGRKTDIQDCQWLQYLHSVGLLRGSFRPAQAVCAVRSILRHRDIQLKSASRQVLLMQKALTQMNLQLHNVISDITGVSGLAIIDAILMGEREPSKLSCLCDGRIKASRQVVAKSLVGDYRPEHLFSLQQALESYRHFQNQIAACDEHIEQMLARFDSQEQCAQAPSTKYKAQGNQPTFDVPSEMHRILGVDLSAIPGMSAQGVLTFFCEVGPQITRFASSKHFASWLGLCPDNRISGGKILSSKTRNVRCRLANALRMAATTLYRSRSALGDYFRRLRARLGSPAAITAAAHKLARVLFAMLRDRRSFDPQLLGILNQKHLRRRQNSLRKYAASLGFELVPIQNLAHSVS

SEQ ID NO: 476968 - protein, 364 aa, unidentified
MKKSIKGNEKKERGAVYASVGLDVGDRKSCWVALDETGKVVGRDKVSTRTPELEAWGMSIAPTVIAIEAGPHSPWISRLLSRCGHEVIVGNPAKIPSISRSRSKSDWRDAEQLGRMARFDRTMLHEIRHRSEQAQKDLQVIRSRDATVRARSKLISHVRCTVKAHGQLVERCSTDAFASRARTTIPAELLEIITPVLEAVDQLSRAIHVYDQRIDMLVRGRYPDTKWLMQIKGVGALTALAYMLVLDDASRFGSSRMVGAYLGLTPARDQSGDMDPQKGISKEGDRLMRRLLVQSGHYILGPFGVDCDLRRHGEAIAKRGGKNAKKRAAVAVARKLAVLLHHLWITKDVYVPLFNGMTIEHQAA

SEQ ID NO: 476969 - protein, 355 aa, unidentified
MNGTKYIGMDVHKESISIAVMNSVGKIVMECVIETKASLILQFIDGLRGDLQVTFEEGTSAAWLYDLLKPRVTKLVVCDPRKNKSMREGNQSDKIDARRLAELLRLDHLTPVYHGEHGLRTLKELVRSYLTITKDLARVMSRMKAIYRSWAIPCSGKQVYARCHRVEWLAKISEPGVRRRAEFYYQQLDALRVLRQEVRRDLLAESKKHKAWKQLCEIPSIGPIRAAVLLGILQTPHRFRTKRQLWSYGGLAIEMHSSADHRCVDGQLQRAKKQVLVRGLNRNCNHDLKNLFKGAAVVACSKPGPFAPFYAALVAKGMRPEMARLTLARKIATIVLIVWKKGVCFDAQHLKPQAA

SEQ ID NO: 476970 - protein, 345 aa, unidentified
MESMYYIGLDVHKKTISYCVKDVSGRIHAEGKIPATRFDLDRWMKTLPQPWTVAMEATIFTGWIYDHLRPHAAAVKVAHPLMLRAIAAAKKKNDRIDAKKIADVLRCNFLPECYMAPTAIRERRRTLRYRNLLVRQTVQLKNRISGLLMEAGVSYNKAKLHKVGYFRELLKSNPDIDESLRPLLQLCRETLVRLQKTESALIRSLARDRFLVERVEHLMTIPAVGPITALTWALEVGEVSRFSSIKKAISYCGLCGDEQSSGEHVKRTPISKQRNKHLQWVLVEAAHMAPRLSPELALLYDREKQKGNANRATLAVARKLVAYLVAIDRSQRDFLLVEKENQAAA

SEQ ID NO: 476971 - protein, 448 aa, unidentified
MFIMHYKRLLTFIDGVSSYLSVGLDVGADFTWMSIALPNGSFVGKPFKIIHSDSRSRDLAVTKIKEAQETYSLKSRCFLESTGIYHIPLLCFLRDKGFDCSVINPIITKNSTNINIRKLHNDKFDSKKAALVGLNVSLKTSIIPDDSVVDLRNLVRDYYYFKDLQSAVALKLTAELKVSFPAYAKVFSKITTQSSLKLLSAYPLAKDMLAASKDDIVEIIRSTARFGEAYALRKYNAIIAAAQDAAVFGRALPSNAVRIRLYIDTYQEYQKHLDALLKALHETVDRLQDTLVYDQICLLQSLRGIGFLSAVVLIAEMGDFKLFSSPKKLYAYFGLDPAVKQSGKLNGDKVHMSKRGSSLARRVLHMAALNNVKVDKRSGTPVNPVVYDYYARKCSSKKKPVAMGAVMHKICNIIFAMLRDNKPFEVIPPEEHCRRFAAEHPDKIRKAA

SEQ ID NO: 476972 - protein, 428 aa, unidentified
MSNQELIRRKQYCQIVKEITGSDQYMVVGIDVGKDNHHAFMGTATGKSLFRKLIFENNLEGFSKLLKTSDLIKTRNNLSKVVYGLEPTGNYHKPLARHLIRCNSNVVLVSGEAVNKNRSLLDGRWDKHDTKCAANIADLVSRGRCLYYDSPSPGIIELRSLLSLRKRLKKEDHSFRMRIRNNLLAQYFPELDRFYSACESESLAIVKWCLEPDQIAGMAFEPFFQMVTRTRRGSAQLLRLRKIHQQAIESVGCPMGSAAAFEAQLLVDKLEQVRQQLKDTEAAIKDVALEFDEYRYLLTIPGFGLYISSSVIAAIANPFRFKNRKQLLRMAGYDLCAKRSGKTSDNAVPVISKKGNSNLRYALFQAAKIASARTEIFRNYFAEMLRGRERERGIITKMRVKLAAKMLIIAWTLMKNKEPFDPAYLTIE

SEQ ID NO: 476973 - protein, 450 aa, unidentified
MRTTRLRYEVVAGIDVAKEPAVVCVRLPPAEGRKHRRPHLQAVPATVPAITDLAAELTALGVQMVSMEATSGYWRVWFAVLEEAGLAVQLVSSSQARNLPGRPKTDKEDARQLARMGEMGMLRSSFVPPPEIRALRVCTRHVFDLTADRTRYWQRREKLLEDALCKLSSVVSRLAGHQTARAVIEKMIEGERDPRVLAALGQGKMRNARLPALAQALTGMRFGPEHAHAAASLLRAIGLLEAGLRELQEQVTAHLAAIPASWGVDADGVTGPQAGRAAGAAALPAAERLDEIPGLGREAAAALIAGIGLDMSRFPTPQALVSRAGLTPTARQSGPVKGRGKKGRGSTCAKRIAVLAAYAAANTDTFLGERFRRLSARPGGGGRKKAGCAVARSVLIIVWHLLNDPAARYRDLGPGWHARHTDRSRRARNARRQLEALGYEVVITLREDAA

SEQ ID NO: 476974 - protein, 347 aa, unidentified
MQISTIGLDTSKRLFQVHGVDACDEVVLRKQFRRAQILKFFADLPPCLVGIEACAASHYWAREIVALGHEVRLVPPVRVKAYVKRGAKNDAADAAAICEAVTRRCIRFVPIKTVEQQQALMLHRARQLLIDQRTRLSNAIRAHLAEFGIVAAKGEAGFTALLQVLADAEDARLPPIARQALTFLAEQFGGADQQISQLDREILAWHQGNEDSLRLATVPQFGPIISSALVAKVGDASRFKRARQLPAWIGLVPSQHSTAGVIRLGPITKAGDRYLRKLLVLAAMGMIRRARAGRDVPPWFKELLGKKEPKLAAIALANKLARIAWVILVRKETYKTPRELEAAIAAA

SEQ ID NO: 476975 - protein, 350 aa, unidentified
MIIIGCDYHPGFQQIAFVDTDSGEWNERKLGHREEAEQFYRQLKVRGKKVRVGMEASGHARWFERLLTEVQFELWIGDAAEIRTKRVRKQKTDRQDAELLLRLLIEDRFPRIWVADGENRDLRQLLWHRHRMVQMRTRIMNQLHVLALNEGVRRKKALWRPAGRAQLQSLVLARWASRRRQDLLELLDQLTPKIQELTRALEQEVEKRPVARRLMTHPGVGPLTALAFELVIGTPERFGCGKQIASYVGLVPSEESSGDRRRLGHISKQGNSLLRFLLVEAAQVTVRTDPDWRRRFLHLAMRRERRIAKVAMARKLAVRLYWMWRKEWDYEQMRKYGSHVGEPVHRQGAS

SEQ ID NO: 476976 - protein, 343 aa, unidentified
MSIVTLRIVFVGLDYHASSVQVCVMDKDGKMLVNRKCANDWRAVMAAVHERCGKEVQVQAAIESCCGAADLADELISRGWTVQLAHPGYVARMKHNPDKTDYSDARMLADLQAHGFLPRVWLAPEEVRELRRLVHHRQTLTKERKNLKLRIGATLREARQKAPGNANPWTQAWLAWLESSAELSPNARYITSRRLRRLGALQEELRQVDKRLERQTREDPLVQKLLTIKGIGLVTATTLRAEIGRFDRFRTGKQLARFCGLSPRNASSGPRQADAGLMKAGNNELRALLMETAHRLIRCDERWTALAARLSGRGKAKSLIVAAVANRWVRWLYHQAQPSCLAA

SEQ ID NO: 476977 - protein, 342 aa, unidentified
MQITTIGLDIAKNVFQVHGIDAAEKVVVRKQLRRSQVLAFFKALPPCLVGMEACATAHYWARELTKLGHKVRLMPAKDVKAYVKRNKNDAADAEAICEAVRRPTMRFVRAKSAEQQGRLMLHRARDLVMRQRTQVINALRAHLAELGITAAQGTAGLKELLKIIASDADERLPADAHASLVVLAAELQAMQTLVGSLEKRIMARHRGNEASQRLETIPGIGFIGATAIEATVTDPTAFRSGRDFAAWIGLVPRQDSTGGKQKLGPISKQGDRYLRRILVVGAHAVLRYAKQNPEKYPWLTQLLARRPFKVVAVALANKMARMAWALLAHGGTYRAPKLAAAA

SEQ ID NO: 476978 - protein, 407 aa, unidentified
MGIDIAKRTHYACIVDDRGRVLQKSFSVPQAGNGFELFYQRVLAAMKEHEKSEVIVGIEPTGHYWLNLAYFLEERGIPLVMVNPMHVKRSKELDDNLPTKHDRKDALVIARLVKDGHFSYPRILKGMEAELRVGSTFRSKLTEELGAVKNMIIRWLDRYFPEFVQVFPSFGKMALAALECTPFPSDLYQKQPDEVLSLFRKVEGLKSPQRPKTVRLIEVAAGSIGVTEGLEMARIEIATLVRRYHQLEQDIESITGQLIELVKISAEYEWLSTVPGLGDTTIVDLLAGIGSFSHYQDPRQLIKLAGLTLRENSSGLHKGQKRISKRGRRKLRALLFRVMMPMIRHNEAFRKLHEYYTNRQVNPLRKKQSIVVLCGKLLKVLHGISTKHKPFDAQRMMRDIPGLAEAE

SEQ ID NO: 476979 - protein, 323 aa, unidentified
MSIILSLIAIGVDIAKSSFDAARLAEGKYRHKKFDNTPEGFALFAAWLAGFGGEAPHICMEATGAYSLPLAEYLVEQGLLVSVVNPAKVAAFGKSELSRAKTDKADAKRIARYCLAMRPAPWTPPPPEIRELQTLLRRAEQLQKMERMEQNRLDTADPAVAGSIKAVLTTLEKELKDTQEKIRRHVDGTPGLKSRSGLLESIPGVGKATAAWLLTLLSEHYGFGDAKQAAAHAGLAPVIRQSGQWVGKTRIAKAGDPLLRKALYMPAISAWQHNPAIRAFCERLKANGKSGKAIVCAAMRKLIHIAFAILKSGKPFDPDFKPA

SEQ ID NO: 476980 - protein, 312 aa, unidentified
MSQSSTLFIGMDVHQDSMAVAYVAQAHGAEVTYLGTMGTRPCDIDQLVRQRPSTATHVVVVYEAGPCGSWLSRDRRKKDDDCGVVAPSRIPKKAGDRVQTERRDAVQLARLARSGDLPAVDVPKVDDEAIRALTRAREDPLSDRKDTQCRLNAFWLRHDIRYTGRAHWRPAHLRWLFAVVCPTPAQHIVFQAYVRAVHEHTARLQRLEQERHAQGKSWRVHPVVEALQALRGVPCTVAVTMVAEIGDLTRVDNPRELMKFLGLIPAEYSSGERRQQGSMTTAGPPHARRALVEGAWAYRYPAKVSRHLQLRL

SEQ ID NO: 476981 - protein, 455 aa, unidentified
MYLPDWKWIPIRKELLLMSNKVIFNLDELFISVGIDVGADFSWMSIALPNQQFVGKPYKILHNSIDSLTTAVSKIKEAEELYSLESRIFLESTGIYHYPLFCYLRDKGFNCSVINPIITKNSTNINIRKVHNDRFDSKKAALVGLKPDLKVSLMPSDLALNCRNLCREYYDLMDNRSAYVNKLQGELRMAFPQYLGIFSKVTINTSLTLLETYTSPSAFLKADKQEIIDIIKSTARFGLTYAQNKYNAIIQAATDANQFGYIIDSNIKRIRLYISFIRKYDEEINSILESLHELVDANEDSDFVKQIHLIETFKGAGFLSAVSIMGEIGDFSAFSKPKQLFAYFGLDPAVKQSGKFEGTKVQMSKRGSAIARRVIHTLTLQSISISRNREAKNPVLREYYLKKCDSKPKLVAMGAVSHKVCNMIFAILRDNKPFKIIAPQEHIKQYNSAKCDIAA

SEQ ID NO: 476982 - protein, 464 aa, unidentified
MTEKKLWRNRKERKEWGRRLQSEDPGLEVVHSHAAGIDVGNGMHYVAVRPDRDPQPVRRFECFTADLHCLAEWLQRCGVKTVAMQSTGVYWIPIYEILEERGIQVYLVNARHTKNLPGRKSDVQESQWLLKLHTYGLLNNSFQPPSEIRVLRTYWRQRAEHVHGAATCVQRMQKALTQMNVQLANVISDVSGLTGQAIIRSIIAGEHDPRKLAELSDPRIHASREEVAKSLEGHWRPELLFVLQQEVVMYDTYQQRIAECDQQLQKHLASFADTIPLLPTAEEPKKKKSKPAKNAPRFELRSELQRIAGVDLTRIDGIDVMVAQTLISEVGLEMSRWKTEAHFSSWLGLCPDNRTSGDKVLARGTRRVVNRAATALRMAAVTLMRSRTYLGAQYRRLRTKLGAPKAITAMAHRLARLVYRMLKYGQHYVDKGAEYYEHRYRRQQIEFLKNKATKLGLQITLAQT

SEQ ID NO: 476983 - protein, 342 aa, unidentified
MGYFAGLDVSLDDTALCIVDDAGRIVREARVASEPETLVAFFGACGMTMDRVGLEACSLTAWLHAGLTEAGITAICIEARQAKAAMGAMPNKTDRNDARGIAQIMRTGWYRAVHVKSPSCRSWRALLTARRMVLNKRRDVENGIRALLREVGLKVGAPSRKDFPARVRELAADDPVLMSLTEALLAVIDVMTREVEKLTRRVLDEVRVEPTCRRLMTVPGVGPLTALAFRATIDQPDRFRKSRDVGAHLGLTPRRYQSGETDVQGRISRCGDELARTALYEAAHSLLIRSTKWSALRAWGMSIAKRRGMARARVAVARKLAVILHRMWADGSEFRWGKQAAA

SEQ ID NO: 476984 - protein, 314 aa, unidentified
MKMEKLSYGGIDVSKDRLDVVVLPEGWFFSVSNDTAGWTELVARLRPLAVCAIGLEPSGGYERGIIRALLAARLSVRRINPNKLRQFARARGVLAKNDRLDARLMAEYVAIMPTRAVQRDDAVDRLAEVVTMRRQLCDEHVTVENQTAHLEDAMLRRLSKRRLVRLEADIRLLDKRLAEMVATNAAFARLYELLTSMPGVGPVLAFTLIALLPELGKMGRKQIAALVGLAPYDFDSGKLRGHRSIYGGRMPIRNVLYMAALSASRYNPALKTFSNRLAHANKKSKVIIVAVMRKMITTLNAMLRDNAVWQPQSN

SEQ ID NO: 476985 - protein, 434 aa, unidentified
MKVTRGMRRRSAKLERRARLVTPDTLIAGIDLAEKESMVMFVRARDKVRLGRLRIPTTAAGVRTLARRAGDLQQRHQLPCLVLGMEPCSQYWKILAKGAIGIGLPYAVVQSFVVARARELDDLTRDKTDPRDAALIADLVADLRFTEVQLETGVWAELRLLAEARDQRSVERRSALQEQRALLQLAWPALLEQVTDLSGSHLQATLRLGLSPLEIAGLTLDEFARRLRDEHRDRRFMRWMAERIRTAAGAAADSDELSAAVLRIQLAAERIKAAQRAVEILDRRMQDAFERTGLGWMRGLIHGLGDVNLVNLLALTGDPGRFDDARCLPKLAGSNPTERSSGQSHAPGGIHRRGRKVLRLVAYQAAVGLVQHHADFRQRFLALTQRDHHRLEKKQAYIAVANKLLRTLWAMATSGRAYDSQIALGIVRSEDQAA

SEQ ID NO: 476986 - protein, 415 aa, unidentified
MEVLHACCAGLDVHKDTVVAGMRLAGGGSTKTEVRSFGTTTPDLLALSAWLAEQGCTHIAMEATGVYWRPVWHILSDGDFTLTLANAAHVKNVPGRKTDVADALWLADLLAHGLIRPSFVPEAGTQEMRALLRTRKQLVREQASHVQRMHKTLEDANLKLSSVLTNIMGKSGRAIIEALIAGNTKPDHLLSLVERGVKAAPEKIVSALTGRITDRHRFLLRLHLRQIDALDDALSEIDAEVERGLDPFRQAVSQLRTIPGVSDLTAQVIVSEIGTDMARFPTAGHLISWAGLCPRNDESAGKRRSNRLRHGAPWLKTTLVQCAWAATRKKASYLQAQFQRLRHRRGPKKAVCAVAASILTAAYHMLRDGTFYQDLGADHFRKTTPEAIAARLAAQINRLGFNCIINPAAGEPVSV

SEQ ID NO: 476987 - protein, 362 aa, unidentified
MTYIGIDLHSNRFTAHFLGADNKGETDSYLIDDKLRYTQRFLDELSQDDYVFIEASTNTFAFSDLIKNRVKKVVVVDPYQFRQDMDRGKKTDKIDAKKLAKEGKYHIETGGDFLPEVYIVDEKIRKLRSLFTTYMLVSKEIIMARNRIYSLFKENLKPFTKQQIFEIVRHNLDASGLAEEYKVQVQVLFEILEHLIEKREAIKRRILLLGEHFMADIDILVSISGVSVFIALALIADYGTIGRFQKAKQFSRYLRSTPRSEVSNERRKDGKTHKNGRKLAIKMLLQGLHHSIHESAHMTKFFKRLKKGKGNCKARIAVTRKLFVIMFYMLKKRGYYRHMNKNLHDRKMTEYKKLLDKNQKRD

SEQ ID NO: 476988 - protein, 342 aa, unidentified
MTHSTPNVASASQTPSSLPSSLFVGIDVAKNKFDLARSDSGELLVFSNDPRGIDKIVDLLLGAGPAVVVVEATGGLEQAMVDALLDKGLPVALVNPGRVRHFAIGMGIIAKTDRIDASVLMDFGRRGKSRLAKKRSENQVELDALVTCRRQLVKTRTEQGNIRHATRNKTALKSIDTILKALDRELAALDGKIRTLIDSDDDFKHTDRLLQSVPGVGPVLSATLTAELSELGHSDRREISALVGVAPYNSDSGKFRGKRSIFGGRTAVRSVLYMSALTAIRFNPILRDFAARLRRTGKLEKVIIVACMRKLLTLLNAMIRDNLTWSQLAVVRRIAPIGAGAK

SEQ ID NO: 476989 - protein, 348 aa, unidentified
MAHFVGLDVSVKETSVCVVDDTGKVILEQKVPTEPADIITLLSSLGVSYGRIGIEAGPLSQWLVNALTVAELPVICVETRHMKALLTAQQINKTDRNDARGIAQMMRVGLFKPVHVKTLVAQEQRMLLTSRKLLQRKLLDLESDLRGTLRNFGLKVGVVSGGRYEGRVRELIAGFPRLAAIAEPLLKVRQVMRQQLAVLHKMLLDTVRDDPVCRRLMTAPGVGAVVALTYRATVDQPQRFVHSRAVGAHVGLTPKRYQSGEIDYDGGVSKCGDALLRTMLYEAAQVLLTHGSKWSWLKAWGVRVVQRRGMRRAIVAVARRLAVVLHQMWVDGSEFRWSKDSAAIPTAA

SEQ ID NO: 476990 - protein, 358 aa, unidentified
MQTESKAISFKGQNIYIGIDAHLKNWTITILTENTFFKTFSQDPCAMTLKNYLHRNFPQGTYYSAYEAGFCGFSVHRELVNCGIQNIVVNPADIPTTDKEKKQKEDRRDSKKIAKSLKSGDLTAIYVPDKSVEELRGLVRYRKVLVKEIGRNKNRIKSFLYFNGIAVPVELNSASKYWSGRFTKWLKTIKMDTEYGNFVLQETVENTEYSRGKLLKIDRKFRELRKSGSYSKTLSLLQSIPGIGPIVSITLLTELGDLKRFNNLDKLCSFVGLIPTTNSSGENEKTGPITPRAKKPLRNALVESAWVAIKHDPALNLVFNELCKRMKSNEAIIRIAKKLLGRMRYVMKNETEYVHSIV

SEQ ID NO: 476991 - protein, 315 aa, unidentified
MTITLEEIVGIDVAKDKLDVAVLGQKATTEAFNTPKGIISLVKKMCQLKPRLIVVEATGGYEEEVVLKLFEAGLPVALVSPQRVRQYAKARGLLAKTDKLDAQNLAEYGKNIQPRLFVAKSEAGRRLSAIIGRRRQLADMQKAEKNRLRTAFLEMRGSIQTVIDCLETEIDSLDKEMRKFMKEHENFGEQEKILRSAKSIGPMTAATLLADLPELGKLDRKQIAALVGVAPMNHDSGKKRGYRKTKGGRPEVRSVMYMSALSAIRYNPLIKAQYDQLVKRGKEKKVAITACMRKMLTILNAMMRDQQPFREVSMV

SEQ ID NO: 476992 - protein, 456 aa, unidentified
MGKIERVPEEILDEEREQVLQRVCAIDVAKDSGQVCVRSPSAGGRRKSTIWVVAATTPAVLRLGEQLVEQGIEMVTLESTSDYWRIFFYLLEACGLPVQLVNARDVKNVPGRPKSDKIDAVWLAKLTERGMLRASFVPPRPVRVLRDYTRTRIDLTRDRTRYYQRLEKLLEDALIKVSVVASSMATVSVRDMVDALVAGQRNPAVLAELARGAMRGKRPALVRALTGAFDDHHAELATILLGQIDALTPQIDHLTARIGQLIAELPPATGPGQPAGRPDPTTGAADPATPPTRRGVLHRLADIPGINTEAAQVIVAEIGLDMTRFPTARHLVSWAHLSPRLIQSGPKRRGGKTSRGNPYLKGILGSAAAAAARTDTFLGERYARIVKRRGKGKALVAVARTILVIVWHLLADPDATYHDLGADYHTRHTDTQRKIRNHIRQLEALGLHVTLTPAAA

SEQ ID NO: 476993 - protein, 475 aa, unidentified
MNLKGTKKKNQVSNANIFEQQELLKKIEVVRENLTASTWHELETKGKFDKNAKLSFICDDMLILGCDVGSETHYLRAIDTRGRELSKSAFSFSNNVDGFSKAKEWAVKIAAEYDKKQIVLGLEPTGHYWFCLATWMISNGISVVQVNPYAVKQTKELEDNSQLKDDTKDPKLIANLVKDGNFGMPYLPEQLYADLRRLSMFRDQLNEDRIRSINRLHRELKIYFPEYKEALGKTEGTFSLELLKQAPFPDDLAALKEDGIRQIWHNAKLRGRGYSRAGEILEYAKASVGIREGKETGKLVVQWFVQKILELDAELALIETQINQKCLEIPHTDKVLEICGIGENTLSGMVAEMGDISRFDDVKEIQKLSGLGLVASSSGKHKGETRISHRGRKRLRYWLFQAAKSAVAHAEEFKKLHVYYTTREQNPLKKMQSLIAIACKLLRIIFTILKKGIKYDPRKMLKDIRRESRQESLAA

SEQ ID NO: 476994 - protein, 409 aa, unidentified
MKIAGIDVHKKVLMVVVMDASAPEEKPARRRFVTLPSELQRFRMWLQEQGVEEAVMESTAQYWRSVWLELEPHMRLHLAQAFSNRAPRGRKHDFKDAERLVRRLIADELILSFVPNGEQRIWRSLTRMKVQLTRDRVRLQNQMECLLEEMRIKLSIVVSNLLGASGLRILHALAQGENDPKKLAELGDERLHCAEEQLVDALTGRVQPMHRGMLALQLQRLQLIDQQMAQLNHMIAQAMKSHQDAVIRLAEVPGLGVDSAQQIIAEVGAQASTFSSAAELTAWVGTCPGREESAEQNQSSRSAKGNKYLRRVLNQAAHAAVAKKGCHFQVVFRRLMPRLGYKSAIWAVAHRLCRVVWKILHEGVRFIEQGHEVGPREKKQRAQMLARALRKLGYEVTITPINQLAPKPA

SEQ ID NO: 476995 - protein, 371 aa, unidentified
MKEFTKYVGLDVHKETIAVSVAEANGGEVRYFGEIGNTPEAMEKLVKHLRKGGAELSFCYEAGPCGYGIHRQLSDLGWDCQVVAPSLIPKKAGDRVKTDRRDSLMLARLHRAGELTAVWVPDGAQEALRDLTRAREDMKHLQRQAKQRLLAFLLRHGKRYGGKSNWTQAHYRWLELVKFNHPVQQIVFQEYIDTVKVLSKRVEALDKQIESASKESVFWPVIEGLMALRGVSVLTATTIVAEIGDLRRFASAPQLMAYLGVVPSEHSSGATKSRGGITKTGNGHVRRVLVEAAWTYRHPARKTAILQRRAERTSEVVQEIAWKGQKRMCSRYRLLEARGKLKVQVCTAIARELAGFIWAIGQAIPQPATKL

SEQ ID NO: 476996 - protein, 359 aa, unidentified
MDIRDQAKRHVVGGVDTHKDLHVAAVVDERDRVLGSQSFATTRQGYRQMLAWMGSFGEVQRIGIESTGSYGAGLLRFVQTVGIEVLEVTTPDRHDRRRRGKNDDLDAQNAAHAAFAGQRTVTPRRRDGLVESLRVLSACRKTAVAARRVALQLIQNTIVCAPDGLRDVLRSMTRMQLIRTLAAWRPDLTAYRDVEAAYRITFKSLARRYLELHDEIADLDIMIRAIVDELAPDLVARNSIGHVGAAQLLLAAGDNPDRLRSEASFAALCGTSPVPASSGKTIRHRLNRGGDRHANSALHIIAIGRLRTDPKTKTYVAKRIAEGHSKLEAIRALKRYIAREVFTLIMRRHKAINQTQIAA

SEQ ID NO: 476997 - protein, 373 aa, unidentified
MEQFIKYVGLDVHSKTIAVAVADTGAEEVRFIGEIANTPAAIAKLAKQLTTCGARLSFCYEAGPCGYGIHRQLLSLKHQCQVVAPSLIPKKAGNRVKTDRRDSLMLARLHRAGELTAVWVPDGEHEALRDLTRARSDMKDLERRARQRLLAFLLRHGRRHEGKSHWTQAHFRWLETVKFDHPAQQIVMQEYIDTVVNCGKRVLALDKQIEQATRASVVWPVIEALTALRGVQLLTAATTVAEIGDLTRFASASQLMAYLGLVPSEHSSGERQRRGGITKTGNSEVRRVLVEAAWTYRFPARKTRPLQKRAERCDQKVQAIAWDAQKRLCHRYRHLTDAGKCKVQATTAVARELAGFIWAIGQAVPAPAFKTRQ

SEQ ID NO: 476998 - protein, 357 aa, unidentified
MSKSTTDFSSVIRVGLDLAKHVFQVHAIEAAGAVVVAKAVRRGKLLEFFSALPRCVVAMEACSTAHHWGRALNALGFEVRLIPPAHVKPYVRRSKNDAADAAAICEAAGRPGQRFVGVRSIDNQAQLMRHRTREMLVGQRTQLFNALRGHLAEIGVIAPQGPQHAYTLKELLTDGADGNGEILVPDSVRAALAPLGLLIDELDARIAAIDKELKKQAKADATARRLMTIPGVGPIIASAVLASVQKIDAFGSAREFAAFLGLTPRQNSSGGKERLGHITKMGDRYLRKLLVSGACSVLFRRKGHNDALRHWADQLLTRKSGASKFKLVAVALANKLARVIFAVLTHGGEYEARAIAA

SEQ ID NO: 476999 - protein, 360 aa, unidentified
MDTSKHFFQLHGVNAAEKVVLRKKLRRKEMVAFFKTLAPTVIGIEACGASHHWARILRSFGHEVKLIAPQLVKPYVKRGKNDTADAEALCEAMSRPTMRFVPVKTAEQQAALMMVGLRDRLIRNRTQLSNAIRGYAAEFGFTAARGMAHIDPLLDRIQADENVPVLARELFAAQAEEYAQLQAQIAEVDAKLMAWHKADECSRRLAKIPGVGPIGAALLMMKTPAPEMFRSGRQFAAWIGLTPKDHSTAGKVRLGVITRAGDEALRSVLVVGATAVVQQVRRGGRGSPWIVDLLKRKPPKLAAVALANKMARIAWKLMVTGNSYAAKSAPAALMGRDTGSNSPATALSRCQNLQGNAQAA

SEQ ID NO: 477000 - protein, 345 aa, unidentified
MKIVGCDLHTRYQQIAMLDHETGELVERRLEHESGEARAFYSGLSAPVRVGIEATGHTRWFERMLGELGHELWIGDAAQIRASVVRKQKTDARDAAHLLELLLSNRFPRIWRPSLEERDLRQLVWHRQKLVWMRNAVGNQLHALAMGEGVCRKKKLFTKKGRVELEGLKLGEWASHRRQELLTMIDQLDRSLKELDQAVAKQAEQNPSATLLMTHPGVGPVTSLAFVLTLGPVERFERSKQVVSYLGLNPREHSSGGRQRLGAISKQGNPMMRSLLVEAGHTAARLDAELRQDYQRLKIRRGSGVAKVAIARKLAVRMYWMLRSPASYAQLVRMQGSPWATLVQE

SEQ ID NO: 477001 - protein, 371 aa, unidentified
MVWTAPDGINCARLRSVADLRHRRPSVEQIIRIGMDTSKHVFQLHGMNAAEVPILRKKLRRKEMVAFFEKLAPTVIAIEACGASHHWARLLQSFGHTVKLIPAQLVKPYVKRGKNDAADAEALCEAMSRPTMRFVPVKTSDQQAALMLVGVRDRLIRNRTQLANTIRGHAAEFGLTAAKGMAHLVPLLDRIQADESLPALARELFALQAKEYLQMQAQIKEIDGKLTAWHRADECSQRLAKIPGVGPIGAVLLRMKTPDPELFRSGRQFAAWIGLTPQDHSTAGKTRLGVITRAGDEGLRSVLVVGATAVIKQAQRSGKASPWLAALLKRKSPKLVAVALANKMARIAWKMMVTGETSMANSAPAVVANVA

SEQ ID NO: 477002 - protein, 353 aa, unidentified
MKTKPEEIVVVLGVDTHLDVHVGAVISEAGRLLGTRSVSTSSTGYSDLLNWARSFGALNQAGVEGTGTYGAGLCRFLTDNNVSVLEVNRPDRAKRRLKGKSDLTDAESAARSVLAGTSTAIPKKQSGVCEAMRITSVARRSAVKARTQAINQLRAILVSAPQDVRDKFWKPKALDCVNACSRARSLGDGVLLQTMIIAMKSLAKRWLALTKELKQLDKILEELTSKYALQLRARFGVGPNTAAILLSVAGDNPERLKSEAALASLCGVNPLPASSGKTVRHRLNRGGSRIANNALWTIAMVRMRSDPRTRVYVERRTKEGLTLKEIHRCLKRYIVRELYPLILRDLKEINTDF

SEQ ID NO: 477003 - protein, 313 aa, unidentified
MEVVPIFVGIDVSKARLDMAVRPSGIKESISNDEAGIKALVERLGGIEPTLIVMEATGGFERHAARALACAELPVVVINPRQVRDFAKATGQLAKTDSIDAEVLARFGEVVRPALRPLPDAVSQELRALTARRRQITGMIVAERNRISGASKAIRKRIEAHIRWLAAELERVDTELDQSIRQSPIWREKEDLLKSVPSIGPVISRTLLAELPELGSLNRKQIAALVGVAPFNRDSGTLRGRRTIWGGRATVRAALYMAALVASRRNPVIRDFYTRLRAAGKAPKVALTACMRKLLTILNAMLKHKVRWSPVMA

SEQ ID NO: 477004 - protein, 341 aa, unidentified
MTTNTVQAQPGREIVAGIDTHQDSHHVAVLDTAGRLVADQAFPATTAGFVALLSWIAVFGTLLRIGVEGTSSYGAALTRFLLAQNVSVIEVPPGDAAARRRRGKTDAFDAEAAARRALEERSPRIPKDTTSTVEALRLLSATRNLLVKQQKEITGQVDQFLITAPDALRDLPREGTRKTRMRRLAALPDATTGDVVTDTLTRLLRQHAIRWIALDTDAAALEKQLRVLVELRAPRLLEVYCVAAITAAELLVAVGENGHRIRNEAALAKLFGAAPQPVSSGKTHRHRLSRGGNRQANSALYQIAVVRLSHEQRTRDYRDAHLAAGKTTKDTLRLLKRALCR

SEQ ID NO: 477005 - protein, 409 aa, unidentified
MRYYLGVDWADQEHAVWTLDEGGRKISARTVAHTATGLSEWGRELDEWRAQGIELWAAIERPEGRVVDFLLDHGVVVYPLNPKALDRARDRFRQSGAKSDPFDARVAAEFLRTDHGHLTALQPSSAAAQELKYLTEDCQRLIRQQTRLLNQLTATLKAYYPRALEVAELPTALARAFLTAYPTPDALSRLTERQWQRWARAQHLSASRTAELWSTLLAPQLPVPAHVVRAKARLMQNLLAALDPVLAGVAGYRQTIDDFFAGMPAAPTARTLPVGERGLLVPTLWARLGDAPDRWRSFRHLQAQAGTVPVTERSGKQRSIHFRYACDKTLRYVVDHLAFRSLQRSDWARAYYDQQRTRGHGHRQALRALGAKWLKIIFVMWRDGVAYREEHHLANIARQQLRCSARKTA

SEQ ID NO: 477006 - protein, 314 aa, unidentified
MKTTSQFVGIDISKQRLDVGVYPDGQHWEEANDEAGMIRITKQLSQLKPQLIVVEATGGLQQPLVASLAAASLPVVVVNPRQVRDFAKALGQLAKTDRIDALVLARFAEAVRPELRQLRDEQAQRLSALLARRRQLMEMLIAEKNRLHSALKPLRKPIKTHITWLQRQLKQIDSDLDSTIRASKHWRTQEDIIRSVPGAGQGLARTLIIDLPELGQLNRRQISALVGLAPYNKDSGRVCGKRAIWGGRAAVRSALYMATLTATRCNPVIRDFYQRLRNQGKPFKVAITACMRKLLVTLNTMVKNQTPWHYVDVG

SEQ ID NO: 477007 - protein, 462 aa, unidentified
MPGKEEKETSDKSGRQLEGLPVIRQSVAGIDLGSERHWVWAPTLDRSAREVANFGATTAELIGMAEWLKTRQVESVAMESTGVYWIAPHEVLEAQGLQVLLVDTGQLARVPGRDKKSDPTDCEWIQRLHSCGLLRGSFRPAEAICMLRTLVRDKANLVAERSDWLRRMQKSLDQMNVRVHRAVSDIDGATGMAILRAIANGERDAQKLAKFRDPRCNKTEQEIAEQLRGHWREDHVFSLQQALKMYDAVEERIAAYEKEILRKLGEMEHDGQQGQSPPPLNNTNKAKGIKRRGQESMRQALYRMSGVDITQIDAIAVQTVEVLLSEYGPDLSRFPTEKQFVAHLTLAPRVATSGGKPVKKKKRNSASTRVAAALRMAALSLRHSQTALGSYYRRIAQRRGTDIAVFAAARKLATLIYRLLRWGQPYVDEGVTAYENRHRQLRIGRLTATAKQLGYQLTPLPA

SEQ ID NO: 477008 - protein, 380 aa, unidentified
MRRVSGLDVHKDTVFLCILDEDGVVFQSKYGVLTPELEQMAGVMVEYGVEEAAMESTSIYWMPVWRVLEPYVALRLVNPFFIKQLPGKKSDVKDAEWIATCLQKELIKGSYVPDELIQQLRQYDRRIFDLSKDIVYKLTKLDAALQRCNIRISNYVSTTKGKAYQDVVRLISDGKTDPEELVKHIHGRTVNRIGKDVLVCALSGVVTAADIDTIRQLREEVELARRHKDECQAKMDEICKRYFPKQYANLQTIPGVQARSATAVIAEVGINMDAFQTAAHLVSWAGLKPRNEESAGKIKSRRVTHGNKYLRKTLIECSWAASRTQNCFYNRFSYIQCTVRHKNKMKVQVAIARKMLTAVWYILHDDVPYRDFTPDIVPTE

SEQ ID NO: 477009 - protein, 361 aa, unidentified
MLLRLLGLFQVPFFSSWISSKDKIMKKVVIGMDVSKEKLDFCFQATGEKILKECMVENTTCAIKSSLKNGLKEFSLTKPDVLLCAEYTGQYTYPLGCACEELGIDLWLENPAEIKHRSEVQRGKNDRLDARKIAAYALRFQDKARLFKLPGQNMASLKQLVSERDMYVSDKCKYQGQLTDQKRFMSKENYASKSKRLKRQIKELELSIVEIEQEIERLIQSDATLAHQHELLCSIDGVGKKVAVKMIVETNAFKDFKNARQFCSHAGVAPFRYDSGTSVRSKSKVSHRADKSIKVLLHLAALSVATRKKDGELREYYARKVAEGKNKMSVLNAVRAKLVLRMFAVIKLNKVYEKNYHFALA

SEQ ID NO: 477010 - protein, 442 aa, unidentified
MDDNEVIRHQEFCQLRSAIRGSDRHLIIGIDVAKEKHHAFMGTATGKSLLRKLVFENNLDGFRKLLIHAEAVKVKHALSKSVFGVEPTGNYHKPLGAYLIDRGYDLVFVSGEAAKKNRVLLTGRWDKNDTKCAANIADLISQGKCLFYDRPCAGITELRSLLSLRKRLKKEEHSLRMRIRNSLLAVHFPEMDRFFGSSLSENLSLVYWCLDPRKIAEMDFARFFELVTTRERGIAQYRRLRAIWEQAADSIGCRVERASELEAQLLVEKVFKVQKEIKEVNEWIKDASREFDEFQLLLTIPGFGPYIASVVLAVIADPLRFDNEKQVLKLAGYDLCAKRSGKNSAKARPVISKKGNATLRYGLYQAALVASSRNVHFIEYFTNTLRGRERELGIKTKMRVKLAAKMLVIAWTLMKKKETFNAEYLKPENRIQIHSLQPRATT

SEQ ID NO: 477011 - protein, 347 aa, unidentified
MDQVIIGVDTHKSNHIAVAMNTQGARLGGLTIPTTCQGYLDLEVWGSKFGSIKAFGIEGTGSYGAALSRDLLAKGHTVLDVMRPNRQLRYLHGKSDSLDAESAARSVLNGQATALAKTQIGACEMIRHIKMARDSAVKSRSQAMITLKALIINAPAELRGMLDQIKGPISLIRHIAALRPGKITSPTASAKAAMRAIARRWLNLHEEIHVHGQELERLVREKAPGLMNSHGISTMTAAEMLILVGDNPERIKSEAALAKLCGVCPIPASSGKTNRMRLNRGGNRKANAALYIVAVTRMRGHEATKAYVIKRTAQGKSKREITRCLKRYIVREFYRELCMPNGAKSTH

SEQ ID NO: 477012 - protein, 343 aa, unidentified
MQQQLSVVGIDLAKRVFHVAGMDDKGKIVLRKRLTREALLPFITRLSPVVIGMEACGGAPYWARRFREHGHTVKLIAPQFVKPYVKSNKNDPADAEAICEAMTRPTRRFVPIKEVEQQDLQALHRARERVVKARTALVNEIRGFLGEYGIVLPQSVTKFRSGFLATLEAERAKLTALGQELFGQLYEECGALEKRLAYYTAKLEAISAAHPVCQRLETIPGVGPLTATAMVAAVSDVTHFQHGRQCAAWIGLVPRQHSTGGKPRLLGMSKRGDVYLRTLLIHGARATLRWIGLKTDRRSQWVRGLIDRRGKNKAAVALANKNARIAWVLLKTDAVYIAEDAAA

SEQ ID NO: 477013 - protein, 412 aa, unidentified
MKQIRERVAGLDVHRDTVVACCRVPGIRRDFKTIKRSFHTTSSELANLAEWLLEVGVTTVAMEATGVYWKPVYYSLEGLFEELWLCNAQHVKNVPGRKTDLTDAEWLADVAAHGMVRPSFIPPAEIRAIREMTRYRKTQVDARTQEIQRLEKVLQDAGIKLSSVASGVWSKSSKEIIEAMIAGERDPKVLAQMAKSRMRAKIPQLEEALSGHFGPHHAVVCRQAIEHIDFLDQTIATLTAEIANQLVPFQTAITIITSITGVSRITAEIMVAEMGVDMSRFPTASHLCAWAGVAPASHESAGKRRPYGTRHGSIWLQRALIEAARAAARTKGTYFSAQYSRIARRRGPNRAAVAVAHSILNVTWHLLTTGAFYEDPGADYFLLRHDPAVEAKRLQKRIEALGFEVTIGTAAA

SEQ ID NO: 477014 - protein, 386 aa, unidentified
MTQYAHSTATSGPNYDCTLILAVEISNRSWVVAAQVPGLRQKSAKQQLAPRADALMAAIEGYKRRATAAGMAVDRVIVAYESGGSGFWLARWLQQRGVEVHVMQPSSVPVDRRMRRAKSDRIDADMLLRTLLAWLRGEPRVCSMVPVPDEATEDARRPMREREELIRARVAIVNRIEAVLTVLGAGEYNPLRRDCRERLGQLRTALDQPLPPHARAQIERLLDRLDLVCQQVAALEAQRDQAVEGEAAGQAEQMIQQLARVRGIGVQTATGLVHEAFVRRFRNARALGSYAGLTGTPYSSGGTHREQGISKDGNRRLRATLVELAWMWLRYQPGCALSRWFHDRLGGSRGRLRKVMVVALARKLLIALWRYLQDGTMPQGMELKPA

SEQ ID NO: 477015 - protein, 339 aa, unidentified
MKIVATIGLDIAKQVFQVHGADKSGRPVLRRKLRRGEVARFFSEIPPCLIGIEASGSAHYWARTLGSLGHTVRLMAPQFVKPYVKSQKNDANDAEAICEPVTRPHMRFVPQKSVDQQDLQCLHRVRSRLVANRTQLINQIRGLLAEYGIILPQHPGQVRSGLPAVLEDAENQLTGFGRGLFRSLYDELAQLDEKIADADHRIQIAFQEHPDCRRIAAVEGVGPLIATAIVAAISNGHAFENGRQFSAWLGLVPRQNSSGGKSRLLGITKRGDPYLRTLLIHGARSVVFRAKAKSDKRSLWIMDKQQRLGTTKACVAVANKNARIIWSLIAREQEYRRAA

SEQ ID NO: 477016 - protein, 293 aa, unidentified
MFTFVEDKPIKKKLKRAQLLAFFANYPASLIGIEACGSAHHWARELTKLGHEAILLNTRFVKSFVVGNKNDFNDAAAIFDAVTRPNKRVVNVKTIEQQDVQLMHNIRQGLVGNRTALVNQIRGLLSERGIIIPQGINQVRKQLPLILEDADNDLTGIAREVFGEQYENLRLLDDEIKEQDRRISRLCNNNELSKRFLKVPGVGPMTASIIACDIGDGKGYHSSRDYAASLGVVPRQHSSADKLVYLGISKRGNKYIRTLLIHGARSVLKASSKKKDKLSLWLNGEALIKQLLH

SEQ ID NO: 477017 - protein, 366 aa, unidentified
MKKGSTVAAKRSSNFFQAKLTIGLDLGDRSSWYCVLDEAGNVLAEQRVSTTAKAMREGFSRMAHSRIALETGTHSPWVSRLLSELGHEVIVAHARNVRLIGESRCKDDRLDAQTLARLARIDPQLLCPVKHRSAKAQADLTLIRARAGLVRARTALVNTARGLAKSYGERLRSCNVRNLNPEKAEQLSPQLQTALEPLLAAAESLSERIREYNEQIEALAEQSYPQVALLKQVKGVGTLIALTFLLTLEDAHRFRKSRDVGCYLGLQPGRRNSGQSQPQMHISKEGDPYLRTLLVQGAQHILGPFGPDCDLRRWGLKLAERGGKNGKKRAIIATARKLAVLLHRLWVSGEVYEPLHNSKASMVSAA

SEQ ID NO: 477018 - protein, 373 aa, unidentified
MPPLSTKSDIVSLKVAKPKRKGDLMKVSTYDYSGKKVFVGMDVHKKSYVIAAHCDGVIVKRWTTTPSRSKTAAQLKKYFVGAEIHSAYEAGFSGFSLHRVLVSAGIHNRVVNAASIEVESNNRVKTDKRDAQKIAEQLAAGRLRGIYIPSVEEETRRSLSRGREQVVERRKAIGNQLKMKLHYLGIIIENDRKMSESLVKWAEALQLESEHQFAVNELIDAWRQESKRIRRFDQELTKQASEDQNEAIYRSAPGVGAISARTLSNELGDMTRFDNERQLFSSSGLTPGEHSSGEHIRRGHISRCGSPRIRGILTEVAWRAIREDQSLKKFYTRVSSTRDSKRAIVAVARKMLGRLRHCLKNKVEWKDVIAEVA

SEQ ID NO: 477019 - protein, 331 aa, unidentified
MDNSLYFVGAYIALKKFDAAIRLDGNRYKHKVFANTPEGFTAFHAWLQGFGSHFHILMEATNVYHEDLADYLLVQGLTVSVINPRCMPNFAKSTNMRSKTDKVDARLLADYAYCNAARLRKYAPLATNYRTLKRLMRQLTHLKKIIAKEQVRIQMMMDALCVEISQEIIAGTKALAKELEKKIKELVKEDKVLSRNAQLLQSIPAVGWMSAMYLLSHLGDGSRFRNSKAATTYMGLTPIVKQSGDSLHIVSGISKMGPRDIRDVLYAPAMSYAFGPWKERVYAPFVQRLTANGKAPKEVIVALMRKLVSIAQAVLQHQRPFDSAILVGKAA

SEQ ID NO: 477020 - protein, 416 aa, unidentified
MKPWIEITHYAGFDWARDHHDVVIVDRQGQIVADFRLEHSFTGWQQFRDKVKNYPALAVAIETSQGAAVDQLLQLDCTVYPVNPLSAKSYRERKAPSGNKTDHLDGWSMAEALRTDGQHWKALQPLDPLTQQLQLLCRDEISLIEQRTALVNQIQQALVEYYPAALQAFEDWTHPFCWDFIIQFPTPEKLAAAGRRRWEKFLHTQKLWRPETASKRLEIFQHAGQFCGSAPVTLAKSLLAVSLAKLLNALQLQLDQYRQHIEALFAQHPDHDLFGSLPGAAQTLGPRLLGEVGGHPHRFQDTATLQCVAGTAPVSFQSGQIHRVRVRYQCNKVLRHTVHLWANCCRAVCPWAEVYYRQKRAEGKSHACALRCLGQRLLKILWKMVQTRKPYDADLHAKNQQAHGSWVLKLAPKTSA

SEQ ID NO: 477021 - protein, 300 aa, unidentified
MEHFAGLDVSVKETSVCIVDDVGKMVREVKVASEPEALLPVLANPLYRFKRIGLEAGPLSQWLSSALAEAGLPVICVETRHMRAVLQAQINKTDRNDARGMAQMMRAGLYRPVHVKTLRSQKLRMLLTHRKLLQSKAIAIDNDLRGTLRNFGLKVGVVGASKFEARIRELVEDLPDLGALVEPLLIVRRTLREQIGILHRRLLVIVRQDEVCRRLMTVPGVGPVVALTYRASVDVPARFRSSKAVGAVFGLTPSKYQSGEIDRTGGISRCGDEMMRVMLYEAATSCWCVWRSGRGSRHGR

SEQ ID NO: 477022 - protein, 388 aa, unidentified
MIFVGIDIAKLNHFAAAISSDGEILIEPFQFSNDYDGFYLLLSKLAPLDQHSIIIGLESTAHYGDNLVRFLIFKDFKVCVLNPIKTSSMRKNNVRRTKTDKVDTLVIAKTLMIQDSLRFSTLEDLDYIELKELGRFRQKTLKQRTRLKIQLTSYVDQVFPELQYFFKSGLHQKAVYALLKEAPMPKDIASMHLTHLANLLVKSSHGHFTKDVARELRILAQKSVGLNDSSLSIQITQTIAQIELLDSQLFETELEMANLVTCLHSVLMTIPGIGTVNGGMILGEIGDIHHFSTPGKLLAFAGLDPTVYQSGNFQAKRTRMSKRGSRVLRYALMNAAHNVVKNNVTFKAYYDAKRAEGRTHYNALGHCAGKLVRVIWKMLTDEVEFNLE

SEQ ID NO: 477023 - protein, 426 aa, unidentified
MKLEEKEQEKSIRAWIGIDWADEKHDVSLYDIATEKQEIATIRQSPEALQEWLGQLRRRYEDGYVAVVLEQGRGGLLNALMSCEFLVLYIINPKSLSSFREAFYGSGATSDPVDAELMREMVRQNPSRFRAWRPDDVMTRSLRLLTEGRRNLVNQSTALTNQLTALLKGYYPQALAWVGRLDTAWACDFLGQWPTLQSLQASSRRQILRFYEKHPRASLDLSEQLKQIQNARALTQDEAVLESSALMVQALVSQLRPLLASIAEFDRKIAMIFRKHPDRPIFESFPGAGAALAPRLTAAFGTDRDRFQAAKDMQELAGIAPVTEKSGKKKFVHWRYACPKFMRQTFQEFADHSRRWCKWAKVEYELLRKRGKSHNAAVRALAYKWIRILFRCWKDRKPYQDEIYTKALLLHGSPLASLLAECVENP

SEQ ID NO: 477024 - protein, 383 aa, unidentified
MRIVCGLDVHKYSIYLCILSSTGEIIEKVFGVLTCQLQEMRDLMLTHHVEEAGMESTSVYWIPVWRVLEPHFKLKLINPYFIRQLPGHKSDVKDARWIAECMMKELVRGSFVPPERIQQLRQYDRRIYDLDDEIVRKLAKLDAVVQRCNIRLGNYVSNTDSKSYKSVIDRICEGVTDPKVLVEEIHGRIINRHGKDTIISSLTGCVTECDMDILRQLKAEIDMAGQHKQECMDKMQAVCEREYSAALQNLQTIPGIKMRAATSLIAEIGTDMGHFQTANHLTSWSGLRPRNDQSNKTIKSRCITHGNRYLRRTLIQCAWGASRTQGCFFNRFSYHQTQVRRKNRMKVQVAIARKMLVCAWHILSRNVQYKDFDNRIGTSDENG

SEQ ID NO: 477025 - protein, 364 aa, unidentified
MANQTVHVIGGVDTHKRTHYAAVIDEQGRRLADREFAANSGGYGALLAWMRSHGQIVAIGVESTGSFGATLTRFLLDAGEAVVEVNKPNRQARHMEGKSDRLDAEQIARSVLASTGVATPKSKSGPIEVIRTLRVARASAIRARTQAFNNLFGTMIAAPSPIRDELVDLTKRTFVNQCLQQEPETENLLELIEEPERLVLASVKLTLRDLARRWKILDAEVKALGRQIKALVSHVAPDLVELFGVSSELAGQFLVTVGDNTNRIRNEAAFAKLCGVSPKPASSGRTSGRHRLNRGGDRAANSALYIVAIVRLRHHQPTRDYVERRTAEGLSKREIIRCLKRYIAREVFAALPKPHDPPLAPQAA

SEQ ID NO: 477026 - protein, 351 aa, unidentified
MPHKLNSGIAVIGIDIGENSFHVVGHDKRGAIVLRQKWSRGQVEARLANLSSCLIGMEACVGAHHLSRKLQKLGHDARLMPAKYVRPYSKGQKNDFRDAEAIAEAVQRPTMKFVATKTAEQLDLQALHRVRERLVSQRTGIINQTRAFLLERGVAVRQGLRFLRAELPRILATPCDALSPRMVRVIEDLAVDWRRLDDRIEGLSSEIEALARQDEGCERLMTVPGVGPIISSAMVAAIGTGDAFSKGRDFGAWLGLVPKQISTGDRTILGSISKRGNRYLRALFVQAAWVVLVKVGPKHWERYGLKSWIEAAKKRLHHNVLAIALANKLARMAWSVLAHGRTFEVSKIQAA

SEQ ID NO: 477027 - protein, 402 aa, unidentified
MTADELWAGVDVGKEFHWVCVVDGTGMVVVSRKLVNDEQSVRALVADVDGLAGRVSWTVDLTTVYATLLLTVLADTGKSVRYLAGRQVWQASVTYRGGEAKTDAKDARVIADQSRMRGTDLPVLHPDDDLITELRMLTAHRADLVADRTRTINRLRQQLMAVCPALERVAQLTQDRGWVVLLSRYQRPKAIRQNGVTRLTKILTDAGVRNAHTIAEAAVVAAKTQTVRLPGEQVAAGLVAELAQGVIALDDRIKTTDADIEGRFRNHPLAEVITSMPGIGFRLGAEFLAVVGDPALIGSADQLAAWAGLAPVARDSGKRTGRLHTPKRYSRRLRRVMYMSALTATRCDPASRAYYQRKRDQGKRPIPATICLARRRTNVLYALIRDNRIWQPDSPPIAKTAA

SEQ ID NO: 477028 - protein, 412 aa, unidentified
MEVLYVCCCGIDVHAKMLVACLLKPGKKEVRTFSTMTEDLLRLLDWLTQEGCTHVAIESTGVYWRPVFNILEGGMELMLTNARDAKGYKARKTDVIDAEWLADLLRHGLLKPSFIPPLPIRELRELTRYRESLVREQTALANRIQKLIESANIKLGQVASDALGVSGKLMLRALAAGETDAEKMSHLARRTLKRKQPQLQQALEGRVTPAQRWILGQLLDQYDHVEAALQSVAERIGQEVDSSADPFVPEAVKLLDTVPGIGETVAQIIVAEIGVDMERFPTDHHLASWAGMCPGNNESAGKRKSGKTTKGSRYLRAALVQAAWAASHQQGTYLAAQYKRLVKRMGKKKALVAVGHSMLVRVYHVLQTRTRYQELGGDYFDRRNVAKQRKRLIRQLESLGVKVTVEEIQQAA

SEQ ID NO: 477029 - protein, 313 aa, unidentified
MAAAGRFIGIDVAKRQLDVAERPSGERWAAANDGPGIAAVVERLGTGEAVALIVLEATGGYELPLAAALTAAHLPVVVVNARQVRDFARAVGKLAKTDALDAAVLAHFGEAVRPEVRAVPDELTQTLQSWLARRRQLLEMLLAEEQRRAIAVPTLRPQLQQHIEWLRQQLRALDGELQKLIRQSPVWREQENLLRSVPGVGPMLATTLLADLPELGRLNRQQIAALVGVAPLNRDSGQQRGSRHIWGGRAPVRTALYMATISAVRCNGVIRAFFERLCGAGKPKKVALTACMRKLLTILNAMVHHRTEWAPAA

SEQ ID NO: 477030 - protein, 349 aa, unidentified
MSQNLNSAVAVIGIDIGKNSFHVVGQDDRGAIVLRQKWSRGQIEARLANMPPCLIGMEACVGAHHLSRKLKTLGHDARLMPAKYVRPYSKGQKNDFRDAEAIAEAVQRPTMKFVATKTAEQLDLQALHRVRERLVSQRTGIINQIRAFLLERGIAVRQGLRFLRAELPRILTAPPDVLSPRMVRIIEGLANDWRRIDERIDHLSGEIATLARQDAGCERLMSVPGIGPLISSAMVAAIGTGDAFSKGRDFAAWLGLVPKQISTGDRTILGKISKRGNRYLRVLFVQAAWVVLIKPMSWERYGLKHWIEAARKRLHRNVLAIALANKLARIAWGVLAGSRTFEASKLQTA

SEQ ID NO: 477031 - protein, 337 aa, unidentified
MKYSGIDLHSNNSVVTVTDEGDRVIAEKRLPNDLVKIIGFLQPWREEMFAVVVESTYNWYWLVDGLQEAGFVVKLANTGAIKKYDGLKHSGDEADARQLAHLLRLGILPTGTILPPEHRAVRDLARKRMQLVRSRTSHIIAIENIAARQRGVKISSNQIKKMTADDIDQMSFPADVALAIKSNLAVVTTLSEQIDLLEKRLQEVMDERPEYSLLTSVPGIGRILAAIILLETGTVDRFASVGNFASYARCVDSQHISNGKKKGEGNTKNGNKYLSWAFVEAAYYAQRFCAEAKRFYERKKAKTNTAVATKALAHKLARACYHMLKEQKPFDAGRCFA

SEQ ID NO: 477032 - protein, 337 aa, unidentified
MKYCGIDLHSNNSVVIVSDEEDRIVFSKRLPNDLGQIRAALEPHREDLAGVVIESTYNWYWLVDGLMDTGYQVHLAHPSAIKKYEGLKHSGDFADATYLAHLLRLGLLAEGYVYPREERGVRDLARKRLQLVRYRTAQILAIEGILMRQTGARLKGEAVKRLTAEQVDAFAFAPDVSLAVQANRAVSQTLSQQIEALEKRLQQRVILRPEYRLLKTVPGIGEVLATTIMLETGTISRFTRVGNFSSYCRCVESLKESNGKRKGEGNTRNGNKYLAWAFVEAANFALRCCPQARSFYDRKKSRSNRILALKALAHKLARACYHMLQDHKPFDVHLCFG

SEQ ID NO: 477033 - protein, 327 aa, unidentified
MLHFGIDVSRDKLDCAVVDDHGQRIKRARTCTNDAQGVIELIGWARAVAVEQPRRFVMEATAAYHELAATRLHCAGLVISVVNPAQVRALARGLGMLSKTDLIDALLLAQYARLAEPRQWRPTKPQLQEFGAMLMRLDCLEADLRREQNRREQAAVRCSSDCVLSSIDACIEFLRGQCKAMRKTIDSHIVANEPLSQSITRLRTIPAVGEKTAKRMAAVLGANNFVSAKEAAAFLGLVPIKCESGSSVRGRSRLSKAGNPRVRASLYMAAVVAKKINPDIKDLYDRLCAQGKTKMSALGACMRKLVHLCYGVLKSEHDYVPPQARSS

SEQ ID NO: 477034 - protein, 356 aa, unidentified
MSCDIKYIGMDVHKEAVVIAVLSGSGKLVMESIVETKASSILQFIHGLRGELHVTWEEGTWAAWLYDLLQPQVARVLVCDPRRNALLKEGNKSDKIDARKLADLLRTGMLRPVYHGEHGLRTLRELARSYQTISQDLNRVMNRIKALYRGWGIACGGTQVYAARYREEWLHKIEHAGVRRRAELLYQQLDGLQVLRRTLRSELLAESRKHKAAKLLRQIPCIGPIRAARLLALMQTPHRFRSKRQLWTYSGLGIETRDSAQYCFVRGQLQRAKKPQQIRGLNRNHNHEMKDIFKGAATRASCGVGPLRDFYVALLDKGMKPEMARLTLARKMAAIALTLWKKEERFDAEQLKTQEA

SEQ ID NO: 477035 - protein, 335 aa, unidentified
MQYVGIDYHKRYSVLCATDERGQELKRRRINGNTVAGFAQFFSELGQESKVVMEACWNWGWLYDLLGKIDGIDQVVLAHPYKTRLIAEAQIKTDKIDAQMLAKLLRGDLIAQSHAPSAATRARKHLLRQRLFWVRLRTMLRNRMHAVLDRQHDLERPQLKNFFSRRGQTWLQNVQLPCPEDQPLLEQDLEVAELLEQKIKQLDRLIGQTQSQEEKLLESIPGIGPLFSSVIATEIDGIARFNSPAKLAAYAGVLPTTHASGGRVFNGRLLWQCNKWLRWALIESELERGPVQRLLWRALPMRSRARQKQKRRHNHGSPSDGENNLAVTERATALH

SEQ ID NO: 477036 - protein, 372 aa, unidentified
MNYNTVYVGMDVHKESFTLCAYTIDAEKGSHFQRTEADYKNVLKYLEFLRTVYGNDANFICGYEAGCLGYTLYHQLTEHDVNCVILAPTTMLEQRSKRRIKTDRRDAEIIGKCLAQHNYSPVHIPTATDEETKEFLRMRDDHKLALKKVKQQILAFCLRHNYRYDGNSHWTAAHIKWLKSLNPEALYKEILAEYLLTYTTLSDKVERLDKRIEELASKDEYRESVKKLCCFIGIKTHTALSVLVEVGDFQRFASAQNFASYLGLVPGEDSSGDGQTRLGITKAGNRHVRMLLTEASQCYARGQIGFKSKELKSRQAGNSPQVIAYADKANERLRRRYYKMVLGKSKKHNVAKTAIARELACFMWGMMTEHIA

SEQ ID NO: 477037 - protein, 342 aa, unidentified
MWSVGLDVHQRMSCICILDENGKTIKEFEIIGGWTALIAALGKIKERFAICYEASCGYGYLHDQFRQIASRVVVAHPGETRLIFKSKRKNDRIDARKLATLLFLDQVPAVHVPRLDIRSWRRTIEFRQRLIGRRTQFRNGLRCLLRGHGVELPAGKSLWTIKGQTWIQKLDLPDETALERDMLLDDMRRLAPQIKRVEKILKQRADAHPGVMVLKTIPGVGIRTAEAMVAYIDDAKRFSRNKQIGAYFGLVPCEDTSVKHRLGHITANGPATVRKLLAEAAWQAIRRDASVRARFERIHGGKPDRRKIAIVAIAHYLARVILAMLRTGESWRKQEPENKKVA

SEQ ID NO: 477038 - protein, 408 aa, unidentified
MNPLFVGIDVGSQHNAVYLMKPDGSKHSSFRVQNNRGGAKLLTEKIVSAVQTQGLTDVVIGMEATSIYGDSLVYALREDGKLGQYPKKIHVLNPKQVSKFKESYSDLPKNDDVDAFVIADKLRFGRITKEVYMDDYRYKALQTLTRARFYAVQDLTREKQRFANYLFLKCSGLAQDKDIINTSATTLALMEHFETADDLAYADLDELTAFITKAGRGRFADAEATAKAVQAAARGSYRLPKTVNDSVNQAMSVSIATMRALDGQIKVLDKAIEQQFAIIPNTLTSIPGIGKVYSAGIIAEIGDINRFQSQASVAKFAGLVWTQHQSGEFEAQNTRLIKSGNRFLRYYLLEAANSVRRCDSEFRRYYDLKYKEVNKYQHKRALALTARKLVRLVFRLLKDDRLYKPPEG

SEQ ID NO: 477039 - protein, 418 aa, unidentified
MTIHHTNPATLLVAIDISKHRHEVLIGIPGKKRRRRMTVTNTLEDFRRLSAALASYDLPVRIGFEATGNYHRPLAHHLGQYGFELKLVSSVGLARTREALHNSWDKNDPKDAQVILHMLEIGAVQFFHDPLVVGTVDIQELSKTHEIVSRSKTELWHRILTHYLPLYFPEAERFHRSSRTDWFLAFLEKYPTPTMITTMNRDAFIADAWQVVGKKVSKERLLSDIYATAVDSVGLPVHPNSDAVLMFRLVLAEGRSLVRQRNEIEARAVELLSDLLDYQLLTTIPGIGPINAMTILAEAGDLRRFRHHRQFLKFCGMDLATVQSGMFRGQSRISKYGNARLRRTLWMAGQTAVLKRTNSFRDKFERYISKDRHNAHLRRKAYTAIAAKMARTVHAVVKHGEPYRPFFEGVSPGGRTFL

SEQ ID NO: 477040 - protein, 420 aa, unidentified
MQVLYERCAAIDIGKDIIAVAVRTPGEGPDGRATVKRTFKTFYGVLRECARWLAGHGVTHVAMEATGIYSMPVFHALLEHGAFEVLVCNAGHVKNVPGRKTDLSDAEWLVHLLECGLLRGSFIPPAEIKAVRDVVRYRRKLVEHRTSELQRLGNVLQDAGIKADSVASSVTTKSVRAMVEALIDGERRPAVLADLARGSMRSKIPDLQRALEGRFDDHHALMCRLHLAHLDQLDEMIAALDEQIEAMMQPFCGQRELIASIPGVGVLASAAVISEIGAEPEDWFPSAEHLASWVGLCPGNHESAGKRHHGARRPGNQHLQPVLVECAWAAVRTDGFLREFYRRQVRKFGGFRSPAAKKKAIIAVAHKLIVIIWHVLATGRPYEDLGPDYFTKRIDPAKERDRLVAKLEALGVKVTLEPAA

SEQ ID NO: 477041 - protein, 411 aa, unidentified
MDVVVERCAALDVGKGEVVGCVRTPAASGKRQSELRTFKTFTSGLEQLAEWLTANGVSEVVMEATGQYWKPVWYVLEDCGFDLKLVNARHVKMVPGRKTDLADAAWLAQLLEHGLLRSSFVPPAEIRELRDLTRYRKRLIQTHSAECQRVQKVLEDAGIKLDSVASDVLGVSGRLMLRALVDGERDPEVLAELAKGVLRKKIPILREALRGRFRNHHAIMLRVILDHLDYLESAIQRLDVEIDQVMIPFNQARDRLDTIPGVGKRAAESIIAEIGIDMTRFPTAGHLASWAGMCPGNNITGGKQRSGATRKGNQWLAEILYDCANAARNTKNTYLAAQYWRLRRRMGHRKASVAVGHSILVISWHLLTNNCDYHDLGGDWFARRTDTNKRRDSLIRQLHDLGYGVTLTKVA

SEQ ID NO: 477042 - protein, 341 aa, unidentified
MKNLFIGVDFSKEKVDVAIILADGLAETAARVFNEFKTTVSGYRQLVKWVDQNSCGIDSSLWLFCGENTGDYSKGLCNFLYGKGYDMWLENAKSIKDASGLRRLKSDRADASMIAEYAMRNYDRAIMYEPLSKSLEQLRELFLYRQMVVRHRCSFQVRRGEKILTMEKSPSKTMISQSGRHIVSELNKVIEKINRKIEELIASDDELREIFSIVTSVPGIGPQNAVCLMVYTDNFRRFNYDSRKIACYYGIAPFGKDSGTSVHSDPRVHYMANRQIKAMLTQAALAAVNFNPVMARYYMRLVERGKKKQVALNNIKNKLVHLVTAMVRNRQKFNPDYKILA

SEQ ID NO: 477043 - protein, 355 aa, unidentified
MTTVPHDEVRVTVGVDTHEDIHVAVALDQLGRWLGETSIPTNTGGFARLIDWASDFGVIDRFGVEGTGSWGAGLARWLRAEGLVVVEVDRPKRKHRRHGKSDAIDAEAAARAVLSGEATAVPKTGDGPVEMIRVLRLTRRSAVRNRTMAANQINALVITAPDALRDQLRGMTTRRRVAVAAKFRTGDEPTTVLDATRYALRELARRYQHLTEQITRLDTQLDRLVAETAPELVAKVGVGTHTAAALLVTAGDNPERLAREGSFAHLTGSAPLDASSGKQQRHRLNRGGDRDANCALYQIALTRSSKDDTTKRYIERRIAEGKTKKEAFRCLKRYIAREVHQTLVRTPALQVALDT

SEQ ID NO: 477044 - protein, 366 aa, unidentified
MKKISTMQAFSNEILKEQELTIGVDLGDRWSFYCVLDEAGKIILEQKVATTPEAMKQTFGKIPRSLIALETGTHSPWVSRLLTELGHEVIGAHAQKVELITKSNRKDDRHDARTLARLARIDPELLGPVRHRSAKAQIHLTVIRARAELVSARTALVNAARGLVKSFGERLPKCGTYQVDEKLAEGVSAELRDVLAPLLREVESLNERIKEYDERMEKIAKEVYPEVFLLKQVKGVGTQIALTYVLTIEDPYRFPKSREVGCFLGLRPGRRNSGESEPQKKISKEGDRYLRTMMVQGAHYILGPFGEDSDLRRWGLKLAERGGKNAKKRAVVAVARKLAVLLHRLWVSGEVYEPLRNSQKAMRAVA

SEQ ID NO: 477045 - protein, 416 aa, unidentified
MKLFIGLDVSSQKLDTCFLTDSKEILFEGSLSNDLIGASEIKQRILEYQETFGFYQIVIGMESTSVYSFHPAMFFYLDEDLKLLPVEVTVENPYRIKQYSRMFDQDKTDKIDAQIIADYLRVDLHTLSPIKEEVYVGLQRLTRSRYQLVTQMVEAKQHFLENLTYKCNTLSKELANEDNKTSIFGASIMNLLTEGITLDEFSEMPLEAAVELLQKLGKGRFKNPEQLVKSIQKAVRSSYRLGKVTKNSIDLVLGIIANEIKFLKKQIKEIEKAITALLETIPEAQCLLSVPGLGAVYTAGLIAEIGQIERFDDQSKLAKYAGLTWTKNQSGNSQSENTPLNRSGNRYFRYYLIEATNRVRSTLPEFKEYYQKKRNEVPKHKHKRALVLTGRKFVRLIDALLRNGQFYQPAKVVIEK

SEQ ID NO: 477046 - protein, 404 aa, unidentified
MAKYHVGIDVSKHKHKACIRSLAQDSYSGVFSFDVNRQGFEKFSGTLKKLSQNKEDFVIGIEATGSYGVTLAYFLLSHGYRVVEINPYRANQFRKAQGKKAKTDHIDARSLAALLSLENHKPLSIPDPALDNLRELTRFRTDMIQERTALVNQLHETLTTLYPELDQVLAKLDSPTCLALLIAYPGPEYISRAGEVKVAEILAEVSRGRAGKVEAKALLEAARNTVGVLQRQPALAIKVSILGQRLIALRTAVEKVEKEITRLFKKLPYDPKDFPVGNISSLAALISEIEDIHRFSTLKQFLSHFGWCPQSFQTGNYNREHPRMSHAGNKYVRRLIWMLSIVSIRIVPRYRAYFQRRVAEGKSKMHIIVAVGRKLLSVFYAILKKGIPFDPNWEVNCQFALARH

SEQ ID NO: 477047 - protein, 356 aa, unidentified
MSNYITIGMDLGNRKHTVCALDQTGNVLWRKDVANTPEALKPFFEENAGATVAMETGLCCRWISALAKSCGCDVLVGNARKLAAIWQSKQKNDENDALLIAELARASRRLFHPVELRDDERHEMVQLIELREVAVSQRTQAVNSVRGLCKAHGVFIPKCDASCFHKVAADAIPDGMAWKFKPMLRHLKEVAATIKRYDAMLEEYAQKHFKEEVELLRTVPGVGPITSCAFVALIADPERFGSARDAGAYFGLTPGQDKSGDKDAPKHITKTGSALMRHLLVTAANHILRASSPDTALKRHGERICARGGKVARRKAKTAVARKLAVVMLAMLKSGKAYDDGIAAVKAGAGESTVAA

SEQ ID NO: 477048 - protein, 380 aa, unidentified
MRTVSGLDIHKDSIFMCILDEQGKKTEEKFGVTTREIKRMSSVLHTHYVSDICMESTGIYWIPIWRLLENDFSLHLVNPQFLKQLPGRKSDVKDAQWIATALLKELVRDSFVPDGNIQRLRQYGRRINEINKDLVRCEQRIDMLLQRCNIRLSNYVSRTKNKSYRKVVDALIAGETSADALVKLIHGRTVNRYGKSAVHEALEGCICESDSDLLQQYTQSFDMLQLQKQQCLDAMVRMCNQLYPEAFSFLLTVPGIKLVSAAIIISEIGDNMELFATAAALVSWAGLRPRNDESAGKIKSRQITHGNKYLRKALMECANGAARTKGSVFYFRFWHLKGMKKHHNAIIVAVAREMLTVIWTLLSRHENFDETYHLKKKTAS

SEQ ID NO: 477049 - protein, 370 aa, unidentified
MQNQNTKSVSGNGNNGASVERKSDRVLKLGLDLHYRQVTVAMQEEDGRIKAVGKMGHEAFVSWLEKKRKEGWEIYSCYEAGASGYWLHRRLVEMGVKNLVVVPKAMNQAGQKQKTDRRDAGELCDALDRYLRGNGKALSPVAVPTVEQEEKRALIRYHRQIMADRSRYEARGKGLLCAQGIEVRGRWWQAQGWKELHSDPRLKDWMQEQLEGWRSKLLGAEQQQQKLRRRIEALAPAMLPKGVGAYSAVVLEYEMKGLARFKNARAVSSYTGLCPGIHSSDGRGKEGSINRCGNAVVRWNLVEMVWRLLKWQPHYEPVRQLAAGLVRSKRAKKRLVVKAARQLAIDLWRLRTGQITPQKLGLVMQCNPIK

SEQ ID NO: 477050 - protein, 421 aa, unidentified
MSPDEKEEYARGFPVHVGVDTAKAFHVMVARGPDRKRSAPRRVEVSRQSFDAARQFLTEQFPDTPPEKILVGLEFAGHHGHTFAAFLKTQGYTVVSVLPSITKKHKEDLDNSPLKTDQKDAALICRLVGEGKFVSFTHLDDTFAKLRSLSMQRHRLSVEGVRFRNRLQGLLDVAWPEFADFFTLISAPTALAILRRWPLPADFVAAPWISVRAVVRQASLNHYPLPKLQALRESAATSVGISSAPDARRQEIQDVLTRWDLLARQLKAVDAQIEALVLGYGPARALTTIPELSYVGAAAILSELGALEDYEHHRQILKLAGMNLVGSDSGSFRGRRRQSKRGRPLLRRQLFLLATRWCKKRGLFRAQYEAMLARNGGSKIKAIAALARKLTPLILEVASSESPFDRDKWMRERRLRGATKN

SEQ ID NO: 477051 - protein, 524 aa, unidentified
MEGQDEGARGSRPPAPRDCRYAWAYVFGAVCPARDCGAALILPHANAEAMNLHLAEISQRVAPGAHAVVTLDGAGWHQPGGRLEVPANISLLLLPPHSPQLNPQENVWQYLRQNYLANRVFDSYEAIVHACGDAWNKLTAQPGRIASIATREWALSVNAQCRCWGGRPHGAWCQGWVVTFQQGAVHMKFKRVAIDTSKRVFTLHGVDEQERPVLRLEVRREQVEAFFSKLDSTEVVLEACGGSHHWGRVLSRLGHRVRLIPPQYVKPFVERAKNDRADAEAISDAASRPTMPSVAVRTVDQQASTMILKHREMLVAQRTQAINALRGHAAEFGVIAAKGTAQAAALLNKLASEEAVPAAARAMFVQMGEHIADLDRRVAALDEELLALRKANPVSQLLAEVPGIGPVTAITLALTIEPGNFASGRHLAAWLGLTPKEHSTGGKQRLGRISKAGHERLRQLLVVGATAVVRHAKPGGKSASAWLLQLLERKPRKLVAVALANKMARIVWAMMARGEAYRRRPVAA

SEQ ID NO: 477052 - protein, 367 aa, unidentified
MKKISTVTAKKVEKVVSQKLTIGLDLGDRWSWYCVLDETGEVVLEQKVATTPKAMKEVFGGMARSRMALETGTHSPWVSRVLSELGHEVIVAHARNVRLIGESRKKDDRLDARTLARLVRIDPQLLAPVKHRSAQAQADLMAIRARAGLVRTRTSLINTARGVTKSYGERLRGCNPRNMNPAKVQELSPELQAALGPLLGAIESLSERIVEYNERIEQIAKQSYPEVGRLKQVKGVGTLIALTYVLTLEDAHRFGKSRDVGCYVGLQPGRRNSGQSEPQLHISKEGDRYLRTLLVQGAHHILGPFGADSDLRRWGLKLAERGGKNGKKRAVIAVARKLAVLLHRLWVSGEAYEPLRNQRQVALPAAA

SEQ ID NO: 477053 - protein, 387 aa, unidentified
MKKLLFIGLDVHAKSITIGLAESAGEARVYGTIANDLHALEKVLAKLKKAHPGTELRVCYEAGPTGFVIARRLGQLKVDCLVVAPSLIPVRSGERIKTDRRDALKLARLLRAGELTAVHVPDAADEAMRDLCRARTDAVQDLRRGRAQLKAFLLRNGYRYTGKSAWSEAHRRYLRELVLPHAAQRVVLEDAIQSIGSAEGRIGRLEEQMEALLESWQMRPVVAALMGMRGFALVGAMVLASELGGAWRFEHPAQLMAYLGLVPSESTSSEKRRQGGITKAGNSHARWLLIEAAHHYRLSPKVSKELSVRQRGLGEEVKAVSWKAQTRLHKRTVQLSARGKQKNKVTVAVARELCGFVWHIFVLMRPQMTQAPASPPQLGAGRKKEAV

SEQ ID NO: 477054 - protein, 341 aa, unidentified
MKHYVGLDVSMKETFICVLDDNGEPVWQGKTKSNPEAICRVINKRAPKLIKAGFEAGPLSTWHWHEFKKMGLPVVCLDARHAKAALSMQVNKTDTNDAYGLAQIVRTGWYREVKVKSMESHVIRSLLAVRSQLIRVRTQMSNQLRGILKTFGLIVGPAYGRSLEKRVHELTAGNVMVQDIVNVILDVWKKVCDQIDKLDQELVQFSRTDEVCRRLMSVPGVGPVTAVAFMTAIDNPDRFKRSSSVGAYFGLTPGRYQSGEVDRTGRISKCGDQRVRSYLYEAAGVLLLRVKKWSKLKAWGIRLAARVGFKKAKVAVARKLSIILYRIWIDDSTFQWSEKNA

SEQ ID NO: 477055 - protein, 359 aa, unidentified
MVGIGVGMVVVGVDAHKRTHTLVAVDQVGRKLGERTVASSSDGHLQAVRWAAQWPQPQVTFALEDCRHLTRRLEQDLLRTGHRVVRVPTRLMATARRSGRQPGKSDPIDALAVAQAALREPDLPAAHLDGPTRQVKLLCDYRADLVVERTMLCNRLRWHLHELDPELEVPSRGLRRYKVIDELAAHLAGVDGTVAQIARELLGRCRELTVRINQLERDLRDLVRVLAPGLLAIPGCGVLSAATILGETAGATRFRSRHAFARFNGTAPIPVWSGNTVRVRLNRGGNRTVNWALHMIAVTQARGVGPGQAYVERLLGAGKTRTEALRLLRRRLSDVVFRVLLADEHRQAEPVSASAPQAA

SEQ ID NO: 477056 - protein, 487 aa, unidentified
MDENGGGAGRFVGAFATGDRAEADETAVACDPDRQSGPRCIEVPFFVAPGNGEHAWQCLDYTCGVTVAFTWMEAKMEVIIERCCGLDVHQETVVACVLIGAPGERPRKEIRTFRTMTRDLEALRDWLQELGVTQVGMESTGVYWRPVHAVLEGRFDLIVGNARHVRNVPGRKTDVKDAEWIADLVRHGLIAKSFVPPAPQRELRELLRYRRKLVESQTAERNRLLKLLETANIKLASVASDVFGVSGRAMLKALIEGSASPEAMADLARGQLRRKRDDLVLALEGRMEEHHRFLLATQLRRLEAAEQDIAALDHRIEAKLKPYCVQHALLMQIPGVDWVVAAALIAEIGVDMSVFLSVYHLAAWAGVAPGNHESAGKQKSGRARKGNVHLRTMLVGAAISAARTKGSYLKDKYHRLKARRGALRAALAIAHKILVSAYHMLAKNLPYRDLGEAYLDQISQTRTVANLKRRLERLGYNVTLEPKAVPA

SEQ ID NO: 477057 - protein, 358 aa, unidentified
MNSVGLDVHKTRCVACVKTQEGRILEEFAFQNTPHGHEELITHLKTYPETQVAIESTGNLWIPIYNRLEDEQIHTILTNPKKTRLIAEAKIKTDKLDARILADLLRANLLSASYVPPPEIREQRSIIRERARLTQLRTIIKNRIHTLLDKHAYKSPFTDLFGKHGLEWLAKLELPAGDRILLEVNLEQLSSLNHSIHRLNETIATSAVENPEVKLLMGFTGIDYYSAMFLINEIGPIARFSSPKKLVSYAGLAPSTRQSGNHTTHGPITKEGNSHIRWILIEAAHQAARHDPRLSQFYLRIMKRRGHNRALVAVARKMLVTIYHVLNHHHEYRGLRPELYTNKIRRLERITNSSLQTA

SEQ ID NO: 477058 - protein, 362 aa, unidentified
MVVRPVARSCVQAETEDRALISIGIDTHKATLAVSGVDELGRELGSVTVRNDRTGHRQLRRRAAQRGPDRRFGIEGSGSFGAALAQDLVAAGEIVFEVPATLTDRERRHLHEPGKSDPGDALAIARVLVREQCLRRVARPSLADDLKLLVIARDELVSERARVANRLHADLLVLAPGYGALIPNLVAARHLATVARMLGRHASTRAELARSRLGRLRSIDREVAGLEARLGALVAASGSSLPRLPGVGVIVAAKLLGESGDICQVRSSAALAALAGASPIQASSGQTQRHRLNRGGNRQLNRALHLMALVQARTHPPARSYLERRRAEGKTWREGIRCLIRHLSDVVYRTMLHDLQASETHA

SEQ ID NO: 477059 - protein, 387 aa, unidentified
MELVERAWAGIDAGKGHHHVVVIDGEGRRMLSRRVANDEPDLETLIAAIVDCATEVNWTIDLADGPAALVLALLLGRGQRVWYLPGVAVNRASDGYRGEGKTDAKDAAVIADQGRMRRDLRELRLDDPLIAELRMLTGHRADIAADRTRAINRLRIQLLGVSPALERALDFTNRGPLVLISHFQTPRQLAAAGQSEVYRCLRNQKVRHADRLAATAIRAAATQHTSVVSEATAAELIARLARAVLDLDRQLAELDKQIFLRFEAHRHANVIASMVGIGALLGAEFLAATGGSLDGFASADHLAGYAGLAPAPRDSGRRSGNLHRPKRYNRQLQRVFYTSALISIQTSTASRAFYDRNVRHEALDVRVEVRGLRRPVVAAAGLKLGAA

SEQ ID NO: 477060 - protein, 341 aa, unidentified
MSIATLGIDLGKTSMHVVGLDASGKPVHRKKLTRTALIRFLSNLAPCRVAMESCAGSHDIARKADAMGHDAVLLPAQFVRPYTKGQKNDNSDAEAIAEAATRPTMPTVSIKDATQQEIQFLHRTRQGWIKQRTETANRVRAMLLEFGIVVPQRILNLRRALPGILEDAENGLPDGVRQLVGDHWQQLQELDDKVADITQRVERIPVRDARAARLMSIPGIGPMIATAMVAAVGDGTQFTQGRGLSAWLGLVPQQFTTGGRPRLLGISKRGNRYLRTLLIHGARAVLQQAHRGDDALRRWIQRVNGRVHRNKAAVALANKLARVAWAVLTRGETFRASAAAA

SEQ ID NO: 477061 - protein, 342 aa, unidentified
MNITTIGVDLAKSVFQVHGIDKHGKAVIQKRLRRSKVLEFFVQLPPCLIGMEACSGAHYWARKLREQGHEVKLMAPQFVKPYVKANKTDAADAEAICEAVTRPTMRYVPIKSVDQHAVLSLHRARSGFVKSRTAQANQIRGLLGEFGIVLPQGIVHVARCLPGIIENAENGLPIVFRELLLRLRSHLLELNRQIQELEDQIDAWHKNNEDSQRLAKIPGVGVLTASALVASIGNASYFKNGRELAAWLGLVPRQHSSGGKPLLLGISKRGDAYLRTLMVHGARSAVRVAANKQTPTDSWTNQLSTRRHMNVVSVARANKNARIVWALLAHKRDYDGRYKLAA

SEQ ID NO: 477062 - protein, 344 aa, unidentified
MGEVSTIGLDIAKAVFQVHGVDGAGTVVIRKRISRVKMLEFFADLRPCLVGIEACPSAHHWGRELSGLGHTVKLMPPSYVKAYLKRSKNDANDAAAICEAVTRPSMRFVPIKTKQQQTALMLHRTRQLLVRQRTMLSNALRGHLAELGVVSAKGRNGTAELLRIIADIEDHRVPPVARGILDVLARQYGAIGAEIGSIDKSILAWHRSCDASRRLAEIPGIGPIVATALVAEIGDWKAFASGRNLAAWIGLVPKQHTTGGKDRLGSITKQGNRYLRWLLVIGATAVIRYAQKHGTKNRPWLGRLMERRPAKVAAVALANKIARMAWAIMVHGDRYKEPKLLMAA

SEQ ID NO: 477063 - protein, 315 aa, unidentified
MNTVEQPNQPVHIGIDVAKATLQIDLLGKSRKLPNTKAGHQELLGLLPGNAFIIMESTGSYHIAAQECFQAAGIPVAIVNPVRVKQFAKARGTLAKTDPVDAALLSAFGRALLPHPTPLRNPERVLLGELVNLRETLSAQITLWNNLVEHQQNAAARKLSEAQACAATKAMADVEVRIAKLIKESQTMAPVADVLRKNKGVGAVTVAVLLAEMPELGHLNRREAAALAGVAPCANDSGKHEGKRYIRGGRPRIKRALYLASLSAVRHHATLSPTYKALRASGKPAKVALIAIARKLVVILNAKLKEYYATLAQPI

SEQ ID NO: 477064 - protein, 319 aa, unidentified
MITGMDPHKRPATIEVIDEQAVVLAAGRYGTDKAGYAEMLAAARKFTDRVWAVEGCNGIGRHLAHRLVHDGEIVFDVRPKLSAQVRVFATGNGRKTDPAGAHSVALVALRTPNLVQVRVGEDLVVMGMLADRRDELGRARTQVTGRLHRLLLELLPGGARKFLSARQARSLIATVRPRDLAGKTRRRLAVELAGELEATGKKTRDLDKELTGLVTARGSTLMDLHGTGPSGAARLLADAGDIHRFASRDRFASRNGTAPLDASSGSQARHRLSRAGNRRINRVLHIMAVVQLRHQTKGRAYYDARRAGGMPSMMAMRAH

SEQ ID NO: 477065 - protein, 430 aa, unidentified
MKSNTQNAKIEAITEKTLVLGIDVGSEMHYARAFDYRVIEYSKKPFKFSNTEAGFATFKEWVLDLKERHEKDKVVPGMEPTGHYWFNLGKFLQDNEMKPVLVNPHHVKKAKELDDNNPTKNDRKDPKVIAGLVREGRYMIPYLPEGVYADLRTASNIRFQLQAELTRIQNRISRWFNIYFPEYKTVYGKLDAKSGMLILKAAPLPEDILTLGIDGVNQIWRDAKLRAVGKARAKTLIEAAEHSVGSKEGAVSARMEIRMLLEDYESRNTRLQEVMVLIEELVRKIPMAEKLLEIKGVGIRTVSGFLAEVGDISRFSNPKELQKLAGLALVENSSGKHKGETTISRRGRKRLRYLLFEVAMSLVSKNQEFRELHNYYTTRRLNPLKKMQSLMAIAAKLIRVFYAMLTKGVDYDPKKMVSDIKRPAVYLQAA

SEQ ID NO: 477066 - protein, 409 aa, unidentified
MEVVHERCCGLDVHKETVVACVVVPGAGKPPHKEIRTFNTMTADLLELADWLTTQGVTHVALESTGVYWKAPWNILESSFTLLLVNAQHIKQVPGRKTDVRDCEWIADLLRHGLLRASFVPDLPQRELRELTRYRTTLIRERAAERNRIQKTLEGAGIKLGSVASDVLGRSGRLMIEALVDGSTDAATMADLAKGNLRAKLPQLQRALTGRVRAHQRFLIAHQLAHLDGLGELIEQLSQEIAERLRPFQDKLERLDAISGVGQRTVEVFLAEIGTDVARFPSAAHLASWVGICPGNNESAGKRKSGKTGKGDVWLRTALTEAAQAASHTKDTYLASQYQHIAARRGKKKAIVAVAHSILRIVWHLLDHDCEYVDLGSRFLEERDRQQIERRLVHRLERFGYTVKLEPAA

SEQ ID NO: 477067 - protein, 373 aa, unidentified
MKHCTRYVGLDESKDTIQVAVAEGGSRGEVLEYGSIPNAPDALRKLVRKLGRPRDLNFAYEAGPTGYGTYRELRALGANCVVVAPSKTPKRSGNRIKNDRRDAVNLAKLHRAGELTAVWVPDAETEAMRDLTRAREDATYAQTRARQRLNAFMLRHGRRYPGLSRWTTGHLTWLRKQGFEQPSQQVCLEEYLEAVQEASRRVLRLDAQIRDLVSYWSKASVVKALMSHRGVSLLVASTIVAEIGDMTRFARARDLMGFVGLVPSLDASGLRHRAGAITKTGNAHVRRCLVEAAWAYRHPPRRSVELQRRLEGQPEAVQQIAWKAQLRLCGRYRRLTARGKQYNKVVTAIARELVGFLWAAAKAVNPTTTAVLQ

SEQ ID NO: 477068 - protein, 349 aa, unidentified
MNKHKTIGIDLAKRVFQVCVVDTRRPHVQVNKELKRHQVLDFMRRQPACRVFMEACGGSHYWARQLQALGHTVALISPQFVTPFRKGHKTDANDALAIVEAGLRPDMRFVPLKSVDQQDIQSLHRIRERYLHQRTQLINQVHGLLQEYGVISGRGQKALKQRVWRALEDADNELSMLMRDLLAEQMTELDRLNERIQSLDKRVELMSRATMPCRELLAIEGIGPVVATQLYSALGNGDAFKKGRQASAYLGLTPTQHSSGGTVTFKGIGRTGQPSLKAALIRGAHSVINTVGDKPDAKSRWLRSLVARVGKNKAAVALANKTVRTAWAVLHSGQSYCREFNDGSALMMS

SEQ ID NO: 477069 - protein, 317 aa, unidentified
MEVTSIFVGIDVSKARLDVAIRPTGERESVTNDKAGIKGLVKRLAKIQPTLIVLEATGGFERQIMHALVSAELPVVVVNPRQVRDFAKATGQLAKTDSIDADVLARFAEAVRPALRPLPDAVTLELRALIARRRQILEMIGAENNRLAMASKPVRKRIDAHIRWLEQELERADKDLDRSIQQSPIWRENEELLRSTPSIGPVTSRTLLAELPELGALDRKQISALVGLAPFNRDSGTLKGRRSIWGGRASVRKSLYMAALVATRHNSVIRDFYKRLTAKGKVFKVALVACMRKLLTILNSMIKHKTSWSKTFSLQTT

SEQ ID NO: 477070 - protein, 346 aa, unidentified
MNATTVAVDLAKNAFELAAADRSWKVTEKARLTRAQFARWFDNRTVELVVMEACGSAHHWARTLRARGVEVRLLPAQYVRAYVKRNKTDAADAVALLEAARSSDIKPVAVKSIEQQALQGLHRLRSGWMATRTRRINTLRGFCREFGLEVPVGVVRGLAQMARFIADDHSAIPAMLRTPMRLALDEIRLLEARIEQLERELAQIARHSPACGALTSVPGIGLLTSTAMVAAVGDPRSFCSGRRYSSFLGLTPREYSSGQTRHLGRISKRGDRYIRMLLTHGARSVLRAASVARRAGRKVDRLRAWALAVQDRTNHNKATCALANKLARIAWAVWVKHEKYQAATAN

SEQ ID NO: 477071 - protein, 403 aa, unidentified
MKHVIAFDVSMGKSYMVIYNSAQKCEYEGDILHTRPSFNWLKDKVEEIIQVDGEQPSIVFESTGVYSRPLERFFRESSLPYCLLNPLEAKKQCDSLRIHKTDRSDAHRLALTHFKENRRVETPGDDVHQQLKSLSRLYDELDKELSMTRNRLHKVLQLTFPELDTLFSSKSELFLQIVQLFPHPDLVLAHSKTVIKNKIIHRTRKRLSKLQAEQKAIELLEAARNSYPAVHSMDVVCDQVRLYAQRYLDINEQKEDCITKMMVFAQELEEYPILLSIPGIGPNTAVRLIAEIGNIHRFTTHKQLNAYAGIDIRRFQSGKTFYRDKINKRGNKHLRKLLYLIIQNMIKQRRFGHNHIVNYYDKLKMQPYNKCHKVASIACVNKLLKNIFFLITHHVTYDFRLAA

SEQ ID NO: 477072 - protein, 411 aa, unidentified
MVEVVYERCCGLDIHKQTVVACLLVSGPSTTPHKEIRTFGTMTDDLLQLADWLSVADCTHVAMESTGVYWKPIYNLLEGSFELLLINARHIKQVPGRKTDVRDCEWIADLLRHGLVRGSFVPDRPQRELRELTRYRTSLIRERAAEINRVQKTLEGANIKLSSVATDVLGVSGRQMLAALVNGSDDPAAVADLARGKLRDKLPQLERALRGRVGAHQRFMLAQQLAHLDALDAVIDRLSAEVAERERPFVAAVARLDAIPGVGLRTAETLVAELGVDLRRFPSAAHLASWAGMCPGNDESAGKRRSGKIRHGDQWLRTALIEAAQAAARARRSYLAAQYHRLAARRGRKKALVAVGHTILTIAYYLLTRDAEYRDLGPLHFDQRDPQRLSRRLVRRLEALGYTVTLDRAAA

SEQ ID NO: 477073 - protein, 407 aa, unidentified
MHHEQLDVTGGVDTHGDNHVAAVVDSVGRILGTETFPADLAGYRRLLAWMRRYGHLERVGVEGTGAYGAGLARHLASQDVEVVEVNRPNRQTRRRRGKSDTTDAEAAARAALNGEADGRPKAADGGVEALRALRVARRSALKARTQAGNQIRDLVVTAPDDLRARLRHLDTDARVEICAGFRPGPPADPAEATKRSLRCLARRHRDLSAEIAELDEAIAALCAQINPALLGARGVGADVASGLLVAAGDNPERLRSEASFAALCGSSPVEASSGKITRHRLNRGGNREANNALWRIVMVRLTCDPVTQSYAARRRGEGKTDREIMRCLKRYVAREVYRLITAPPAVPAGPELRIARTAAGISLAVAAEALGTWPTRISQLERSLHHNAELATRYQLWLNERSRPQAA

SEQ ID NO: 477074 - protein, 310 aa, unidentified
MDCYIGIDVSKATLDVASLPNGESWTVTNDDLGLAELTPRLVALTPVLVVLEATGGFEMLAAITLAKVGLPVAVVNPRQVRDFAKAMGQLAKTDALDAGILAEFAQRVRPKPRPLPDEAAQLLDSLLTRRRQIVEMLTAEKNRLGFARGPVKRDINRHIRWLEKRLADVDGDLQDAIDASPLYHAKAALLRSVPGVGPVTTLTLLASLPELGQLSRHQIAALVGVAPLNRDSGTQRGKRMVWGGRAPVRAVLYMAALVGIKHNPVLRQFYERLRTAGKPFKVAVTACMRKLLTILNAMVHQNCRWDPQHP

SEQ ID NO: 477075 - protein, 357 aa, unidentified
MRSSNVKYIGLDVHKEAISIAVLNEAGKLVMESIIETKASTLVQFLDGLRGELHVTLEEGTWAAWLYDVLKPHVRKIVVCNPRRNALLKEGSKSDKVDARKLAELLRSGMLRAVYHGENGLRTLQELARSYQVISKDLNRVMNRLKALYRSRGIPCTGTQVYSRRHREQWLKKILEPGVHRRAELFYQQLDALQVLRRTVRGELLAESRKHQAVKVLREIPFIGPLRAAQLVALMQTPHRFRSKRQLWTYSGLAVETHDSAQYRYVDGQLQRSKKPQQVRGLNQNHNHAMKEIFKSAALSAAGRMGPFQDFYEGLLARGMKAELARVTLARKIAAITLTLWKKGEHFDAKYVKSQAA

SEQ ID NO: 477076 - protein, 342 aa, unidentified
MQISTIGLDIAKNVFQVHAIDAAEKVVARKPLRRNQVIPYFKALPPCLVGMEACASAHHWARELTKLGHEVRLMPAKDVKAYVKRNKNDAADAEAICEAVRRPTMRFVRVKSAEQQGQLMQHRTRDLLMRQRTQLINAMRSHLAELGIVAAQGRDGVKELLDFIAKTSDDRLPVNARASLMVLAAQLQALQTLIGSIEKRILAQHRANKASQRLETIPGIGRLGASTIAAVVTDPKAFRSGRDFAAWIGLVPRQDSTGGKQKLGPISKQGDRYLRRILVVGAHSVLRRARQQPDKYPWITQLLARRPFKVVAVALANKMARIAWALLAKGGTYQAPRLVTAE

SEQ ID NO: 477077 - protein, 313 aa, unidentified
MPNETFIGIDISKEQLDVHVLPKAVHFTCKNDVSGIELLVSRLQEENPVVIIMEASGGHEITLAAELGAAGLPLAIVNPRQVRDFARGIGKLAKTDAIDAFVLARFGETNRPEPQAIPTDEQKQIKELVTRRRQLVALRASEKHRCHAARSTRVKQSIRTVMATIERELEDIDRDIDDLIRNSPVWREKEQLLRTFKGVGPVTAGIVVAKLPELGKVDRQEISCLVGLAPLNKDSGKMRGKRMIAGGRKEVRDALYMAALSAIKHNKLIKPFYERLIKAGKAYKVAIVACMRKILVILNAMVRENQPFQLISP

SEQ ID NO: 477078 - protein, 346 aa, unidentified
MTIVEVDRRITGGVDTHLDVNVAAALDEIGGLLGVESFATTVDGNQALISWLDSFGCVDLVGVEGTGSYGASLTRALARRGVAVVEVDQPNRQRRRQAGKSDPIDAVEAARAAQGGRARGLAKSRTGNVEAIRALSVARRSARSVRVKTMNQIRHLGFTAPDDLRERLDGVSRSQLGAVAASLRPRPGSDPVTFATKTALRVLGRRLLHLDSEMNELDGQLTELVAATAPELLALYGIGTDTAALLLVAAGDNPERLRSEAAWAHLCGVSPIQASSGKTVRHRLNRSGDRQANHALWRIAMVRMSHDGRTRDYVARRLDEGKTKREIMRILKRYIAREVYKNLPRD

SEQ ID NO: 477079 - protein, 321 aa, unidentified
MEHTRFVGLDIHKERISIAVAESGRSCAVEYLGEISNDPVAIGRLCDRLERPSKTLAFCYEAGPCGYGVHRQLISLGHRCDVVAPSLIPTRPGDRVKTNRRDATMLARLHRAGELTPVWVPDADHEAMRDLIRLRSVVRQIVGRARQHLQGFLLRHGRKHGRGTAWRMAYRRWLSTLAFEHPAQQIAFQDYVDAVMDAERRLQRVEEQISGLLPEWNLRPVVDALQAMRGIALITAVVLVAEVGDFTRFANPRQLMAYFGLIPGEQSSGETIRRGGITKTGNAHARRALVEGAWAYRMKARIGRHKVDRIEALPKVVRDIA

SEQ ID NO: 477080 - protein, 297 aa, unidentified
MVIVGCDFHPGWQQVAVFDSGTGEIRELQLRNSEGEAERFYGSLPSPALVGFEACGNTHWFEDMLDRLGHEVWIGDAAEIRASYVRKQKTDKRDAAHILKLLMEGRFPRLWRPSKADRDLRQLLIHRDRLVGVRTRVKNGLHHLMLNKGVQLKRKLWSKTGQKILHEMPLEGWAAQRRTDLLQLLSTLDPQIEELDVAVERAAYANERARLLMTQPGVGPITSLAFVITMGDVTRFPSGKQVSSYLGLIPSEHSSSKRRRLGAISKQGSPFLRMLLVESVQTVCRLDDGFEGCVKTN

SEQ ID NO: 477081 - protein, 343 aa, unidentified
MTKETMIGIDLAKNVFQVHGASMSGQIKFQWKLTRQHFRRFMADQVPAMVVMEACGSAHYWAREMAKLGHEVRLIAPQYVRPFVKRQKNDAADAEAIVIAAQRPEMRFITPKAEEQQARALLFRVRERLVRQRTELVNALRSVLYEFGHPTPPGIGHLKRIEAIIETENSDLPELVRGECRDLLLQISEKTQRIETKTKQIGVLATQTDTARRLQTMPGIGPMSALAVEAFAPPMESFRRGRDFAVWLGLVPRQHSSGGKERLGRISKAGQADIRRLLIVGAMSRLNWLGRKTISEKSWLSRMLARKPRMLVAIALANKMARTIWAMLTKGQDYQNPAEVAAA

SEQ ID NO: 477082 - protein, 339 aa, unidentified
MQIHSVGIDLGKTTFHVVALGAAGKVLVRKKFTQKQLLAYTANMQTSLIGLEACSGAHFLGRALHKQGHDVRLIPAQFVKPFVKSNKNDFIDAEAIAEAVERKNMRFVPIKTDDQLDLQAIHRVRDRLIARRTAVINQLRAFLLERGLVFARTPAKLKAAMADILENAESDLTSRMRNLISGLWSEWKLVEQQIEELNDELERISAADAGCTRIRKIPGIGPVVATAIVAAIGNGAAFSKGREFAAWLGIVPRQYSTGGKAKLFGISKRGNAYLRKILIHGARAAVLHIKRDRAPIGAWLDALDARAHKNVVVVAMANKLARIAWAVLSSGNEYRPVAT

SEQ ID NO: 477083 - protein, 366 aa, unidentified
MKKVSTVAMRGNEIFRELKLTVGLDLGDRASHYCILDEAGNVILEHRLPTTPKGIHEVFSRIPRSRTALETGTHSPWVSRQLTQLGHEVIVAHARNVRLIGESSRKDDQLDARTLARLARIDPGLLGPVRHRSAKAQIHLTVIRARAALVSTRTALVNATRGLTKSYGERLRKCGTGQMNREIAKGLSQELRDALDPLLTEIESLNERIAEYDRRIEQIAKEGYPEVALLKQVKGVGTLIALTYVLTLDDPYRFRRSRDAGCFLGLRPGRRNSGMSEPQMHISKEGDRYLRTLMVQGAHYILGPFGEDSDLRRWGLKLAERGGRNAKKRAVVAVARKLAVLLHKLWVSGEVYEPLRNNHKVVCAVA

SEQ ID NO: 477084 - protein, 487 aa, unidentified
MALVLAAVLALPIVEPTMPRRKPALPTIDPAALALLLMLQPHAAGIDVGAEEMMVCVPEGAVTAADTTTTLPVNVRRFGTFTPDLQAIATWLQQCGVTTVAMEATGVYWIPLYDLLQSKGFKVYLVDPGQTKRAPNRPKTDVHDCQWIQRLHSLGLLSAAFRPDETIRVWRSYQRHRANLIEDAARHIQRLQKAMELMNVKLTEVVSDVTGLTGMSIIRAIVAGQRDPKQLAQLRDRRCKESVATIRKALEGTWQPEHLFALKQSLELYDYYHEQIRVCDQAIEDHLQTMALPQSKPLPPKPRARRRRRDNEATFDARQRLYNVAGVDLTLIEGIESSTAQTVLSEIGLDMSRWPSEKEFGSWLGLAPNPKKSGAKLKSSATRPGVNRAAQALRLAARNLHRSKSALGAFFRRVASRRGIPKAITATAYKLARIIYAMLKHGTEYATQGLQAYETAYRERQVRHLKRLAEELNMELVAKEAVASTKA

SEQ ID NO: 477085 - protein, 354 aa, unidentified
MPQSRTLYVGMDVHKESIAVAYVAQEHGAEVVSLGPIGTRQCDIDKLIRQLQSKSKQLVFVYEAGPCGYWLYRYLTKKGYVCWVVAPSLIPKRAGDRVKTDRRDAIQLARLMRSGDLTPVYVPAVDDEAIRALSRAREDTLRDLKAAKLRLKAFLLRHDIRYTGRANWSPAHLRWLSEVVCPTPAQQIVFQEYVQTVTEQTERLGRLELELHEQIKTWRFAPVVEALQALRGVQFTVAVTTVAELGDLTRFANPRQLMNYLGLTPSEYSSGARRQQGSITKTGNSHARRALVEGAWAYRYPAKVSRHLQLRLEKLPTAIQAISWKAQVRLCTRYRQLMAKGKNANQVVVAIARE

SEQ ID NO: 477086 - protein, 396 aa, unidentified
MTCTDLPLSTPTVARSQDSTVFVALELSRKSWLVGVSAPGDNKISKYTVAAGDGPGLLALLAKLQEKAAQRLGRPVAVVTIQEAGLDGFWLHRLLLSAGYDSQVVDPASIAVDRRQRRRKTDAIDVETLLRTLMAWARGERRVCSMVRAPSPEDEDRRRPSRERAALVAEKTRHTNRIKGLLAGQGIFDFEPLRLAQRERLETMTTGDGRPLPPQLTAEIRRHLARLDAVVRDIAAVEAERDALLAAPAVAEPTAPTAADVLPVPAVLLLTLKGIGPEFASVLCLEAFYRTFANRREIASYAGLTPSPWKSGRIDRDQGISKAGNPRLRTTMLELAWMWIRCQPGSAISRWFVERVGTTRGRVRRIAIVAVARKLLVALWRFVTQGLVPEGAVMKA

SEQ ID NO: 477087 - protein, 341 aa, unidentified
MAVAGGLDLHRGQLTFDYVDTGTGESWRGRISPADRESLRGWLRRFHGVPDVEFAVEGCTGWRYVVEELRRAGITPHLAEPAETAGLRGRKRRAKTDWADARHLRDLLLDGRIPESWIPPGHVLEARALVRLYKDLLEERTSWQQRVHATLFHQGIPVVPKLGTADGQQRLDAAELSAAGRRAVQAGLRQIERLTQEMASLRRELARLSSRQPGCRALRRAHYGIGGLLSVAVWAELGDCRRFSSSDDAVRHTGLDITIYDSDGKRARGHIARQGPPVLRWALYEAALYASRPASPDYAYYCGVRDRIDGQRALLSVARKLARRCYHTLRDLGEDALAPAA

SEQ ID NO: 477088 - protein, 386 aa, unidentified
MEVVVERCCGLDVHQKTVVACTLVGNLSTNRPKKLIKTFGTRTFELQELASWLHEQEISTVMMESTGQYWCPIWNVLEKEGFKLILANPQRIKGIPGRKTDQKDAEWIAQLGRVGLVPQSYVPPTAIQELRSLTRTRTHLIAERTQHKNRIHNILQQGNIKLTGFLSDIYGKTGRKLVDLLLSGEKIEEENILECLHSRVKASSKDIVESLKGTLTKAHRFEMQIHFDIIDCLEEQITELSKEIRIRIAPYQEIIDELIKIPGVKESCVEVILSEIGPDISAFQTQSHLASWAGLCPGSYESGGVRKKAHIGRGNKYLRTALYHAGRAAAHSGSPVFSEFYHRIASRGSKQKAVIATAHKILRVIYRTLESTNKKSYCDGLGLTSQ

SEQ ID NO: 477089 - protein, 337 aa, unidentified
MDHFAGLDISMDETCVCVLDREGVVVHESKTASTAEAIAKELAKAPSCRRIVFETGRMAPVLYHGLSQLGLPVICVESRQAYQALRSLATHKTDRNDARGLAHLARTGFFKPVHVKSLPAHAIRSLIIARKKLVGQRVTLENQIRGLAVVFGVRLPRALTAAFIEKALKASEGVAGLSVALRGLAAARAAVMAAVAAIDADMRRMVRASAACRRLMTIPGVGQLTALAFVAAIDDPSRIRRSRDIGAYLGLVPRRYQSGEVDYVGSISKCGDRRVRTLLYEAANVMLTRYKGQLKLKDWAFAIARRSTMRKARIALARRLAIIMHAMLRDGTEFAIA

SEQ ID NO: 477090 - protein, 341 aa, unidentified
MKVTSIGIDLAKSIFQLHGVDAHGKALFRKKLSRGQLLPFIAQLNPCLIGMEACGAASFWAREFKKMGHDVKLIAPQFVKPFVKSNKNDAADAEAICEALLRPNMRFVTPKSIEQQDIQSLHRVRSRQVAARTALSNELRGLLSEYGVVLPQGITQLRKNLTAMLETAQQQERVTQRGKLLFETMLDELRELDAKIAEMDVRIESIHNGSEASQRLAEIPGVGKLTATAVVAAVGDVKVFKNGREFSAWIGLVPKQHSSGGKEKLLGISKRGDVYLRTLLIHGARASIRFLDRQADSSRKQWLQKLIERRGMNRAVVALANKNARQIWVLLARNEEYRAAA

SEQ ID NO: 477091 - protein, 519 aa, unidentified
MTPNDFYIRSDNKGRGSPTTEIGALPMPWEIEEPEGYVLTPRDKDLHHSVFGLVAIIPRRLAGKIEDILISTTVERRISMKSVQLQQKRSLINGKIIIGIDPAKTKHQAAIIDTHGVQLGKSFSFDVSLDGYTRTLWQKLTQILPTCSCETTVFAIETSCNLWLTLAFYLHHEGYHVLLVSPLTTYHSRPMVNHDFSRTDPKDALLVASNARQGFFDLYEDFPPLGNAMHRLTITYCKLRKELAQNRARLRASLEQLFPELLEIVEPDTQTALYLLKRYLFPRDFLDIDLASEANAILTISRKQFGLQTLLQLQKAARHSVGVLKSQEEAIAERLSVNCWLALIESLSAQMQTAFTALADYAARLPEYTIVRSLKGISDLTAALFLGELRDIHRFAHYKQLEKKAGLNLRLNQSGQYLGARHISHIGSKRLSWLLYTMTEETARWVPEIRAKYLRRQLHRRNHRKSIVASIPQLLKLIMVLVKEHREYQIHPDSVIQMQALEKQYCSLKAQRKTTKQAA

SEQ ID NO: 477092 - protein, 456 aa, unidentified
MGKAKRPGRRREFALVHPNAAAIDIGATMHIAAVGPDCDPEPVRSFGTFTGDLHRLADWFASCGVETVVMESTGVYWIPAYEILDQRGFEVLLVNARDTKHVPGRKTDVNDAQWLQRLHAYGLIRGSFQPKGEIAVLRAYLRQRERLLDYAAAHIQHMQKALTQMNLQIHHVVADITGATGMRIIRAIIAGERNPEVLASYRDPRCHATLETIGAALTGNDREEHIFALGQALELYDIYQAKAAECDVRIKAVLDRLKASIAKPAGKLPPARHKAKSPNAPTFDVRAALHAILGVDLTQIHGLGPGLALKLVGECGTNLAAWPSAKHFTSWLCLAPSNKISGGKLLSSRTRRSGSRAAALLRLAAVTVGRTETALGAFYRRLSARIGKAKAVTATARKIAVLFYNTLRHGMGYVDPGAAYYEERYRQRVLSSLRRRAKALGYVLQQATEPGTAEVS

SEQ ID NO: 477093 - protein, 401 aa, unidentified
MSKKNTRNALDTSLSYAVIGLDLAKADCAVAAVPCSDDELGLIDRMDYESLFEQAEKLEPTLFAMEPCCGYSQISLRLQNMGHEVKVISGHAVKNWIATHKSNQKTDLNDATALAKLALYDHDLQPIRVKNVEECRIASVQAIRIQLRTQATKSLVCFKSLCQCWGIVIRRGSSNTKKMAEAVAAVEKLLGAEVASSLMILRDAYKFTMKQINALDKLLDALVEANEQARTMKTVLGIGTQTAARLAVTTGDIKRFPMPRSYVAYFGLAPRNIITGHSGTPSPSKRGALKPVSSRGQGKVSRRGDRVARSFIIQGAATIYMLYCKDMLPECQLRRWLHEQIKRGKPYGKIIVSLAAKLLRIVWALLTYGEKFDSHKAGVPRSVLAAMEKPLKHDAAAESAA

SEQ ID NO: 477094 - protein, 360 aa, unidentified
MSYTGSSEDPEKEAKDMLYVGGDVHKKTVQVCVLDAEGNRVAQSRIANTPEKVIGYFGGIEQPASVAIEASHNWGVLCDVLGEMGFETHVCHSREAKLIGLARVSTDKVDAYKLATLLRVGLLPEAYVPDSDGRELRALVRGRASLVRSSTGQKNQIHAILRSNWIEHPYSDVFGKAGRKFLESLKLEGGYRAVVDAKLKILDRIKEQTAVLDEEIKHRAHIDMRAMIIDTAPGFGEFRSVMFLAEVGDINRFRSAESFVCYTGLNPREDSSGDRIRRGRITKEGSSWLRWILVEAAHDAVEQDGKIRDLYLRVLEKKGDKVAIVAAARELAVSLYWMLKRMEVYRPSGKKDSLITSEAR

SEQ ID NO: 477095 - protein, 421 aa, unidentified
MNMSKSLFCGCDIASDSNTIWLMLEDGSQPNKLFSVDNNQLGAELFVERIHAIAKEHCVSDILIGTEATSMYDWHLLEYLSESKLTTEFTLKLYRFNAKWIKNFKKSLAPRGKTDPLDSFAIAERLRIGRLPKEYVPDIKYQPLRKLTRFRFHLQQQITREKNFFLANLFLKASAYSSLKPFGSTFSATSLAVINDFFSVDELAAATLEELTNFTLQKGKSHFSHPEEIVNNLKRVARESYRLKPELTPSVNLILASTHNNIRCYKEQVKLVDEAIAENLKAIKHTLDSIPGIGPVYAAGIIAEIGDSNRFPNDSALAQFIGLTWPKYQSGKFQAEETRISKSGNQYLRYYFVEAANSVKRFDATYKAFYEKKYAEATKHHHKRALVLTARKLVRLVWTLLTRQTLYQPGYCSFENLSKIS

SEQ ID NO: 477096 - protein, 355 aa, unidentified
MEYGAIDLHKKESQIRIVTETGEIIDRRIVTTRDRFTATFWGRPRMRILLEASTESEWVAQHLETLDHEVIVADPNYAPMYGQRTRRVKTDRRDVAALTEACQRGIYRVAHRRSARQHAVQSQLNVRQELVQARTRAISLARAITRAAGFRVHSGRTETFLTRLDALDLPIPMKATLVPLRSVIEVLDDELASADDQFAALVANDAVVKRLTTLPSIGPITASAYVAALDDVSRFAGAGQVTSYLGLVPREYSSGERQYRGRILRSAHPHVQSLLVQAAWRLSRSSSPATAGLRTWAQAITRRRGKKVAMVALARRLARILFAMWRDETEYHANRIRATQSDPAAITDRQARAAM

SEQ ID NO: 477097 - protein, 428 aa, unidentified
MAGVVIGIDPHKGSHTAVAVDGTEVVLGKVKVRATVEQVQQLRAWARRWPERAWAVEGSHGLGHLLAQQLLAVGEHVVDVQPKLAARVRLLDTGKVNKNDPNDARSVAIAALRSPDAARVVSDDATTVLKLWAHRHRELSRRRNRMVCQLHSLLCDLVPGGFTGEITAGLAAAALDQIAPHGAAGEARMQLAHDLLEEIRGVDEQRRDVKKRLTKLVAASKTTVTDVYGVGPVVAATVLGYVGDIHRFGSKDAFGAYNATAPIEASSGNRHIYRLSLRGNRQLNHAIHMAAVTQIRYPTTEGRAYYDRKIAAGMPHRSALRALKRKISDAIYRKLTDDTDAHGHSASGGPGGQSGNDSVSSVAGSHPAAPDLRTSHSRTKPQPTTANPKQKRLTSRPAPRSRRTGRSAAGVKMQPRQRPRSGRRQERS

SEQ ID NO: 477098 - protein, 388 aa, unidentified
MQTVADRPEAPTAIRTDLGAIFVSLELSRSTWLITSLWPGGGEKMSKQVVRGGDVAELLERFARLREKARARTGKVFPFVVIQEAGLDGFWIDRALQNEGIESHVVDPASIATSRRRRRAKTDGIDGEALVRALLAYKRGEPRVCAMVKAPTPAEEDRRRLCRERKVLIGERVQHVNRVKGLLFSQGISGYEPLRRDRREQLDTLQTGDGRLLPDHLKAQVCRELDRLELLLEQIKAVEAERDVLLAAQQVAAPAPAAMLLDIKGIGPEFTAILWSEGLFRHFDNRRQVASYAGLAPTPWQSGSVDREQGVSKTGNPRLRTTLIQLAWLWLRHQPQSALTLWFEERVRRNGGRLKKTTIVALARKLLVALWKYVTAGIVIEGAVMKRT

SEQ ID NO: 477099 - protein, 397 aa, unidentified
MNSVGIDISKGRSTIAVMRPFGEVVISPFEVRHTGSELSKLAKQLKSLDGETRVVMEATGNYHASVAKLLHNAGLYVSVINAKLVHGYGNNELRRVKTDRKDAVKLANYGLDRWLTLPRYIPEEDTRLLLKNCYRQYRQYSKVQTVLKNNLISLLDTVFPNANRLFSSPIRGDGSEKWVDFVAEFWHCRCVSEKSERAFTSKYLRWCRKHGYNFREAKAHTIYAEASGHIGVMPKSETTKLLVEQAVAQLRATSTALAALKHEMQSLASMLPEYPVVMDMFGVGPTLGPQLIAEIGDVRRFYSKKALVAYAGLDAPPNDSGDVTGRHKSMSKIGASSLRRTLFLVMSVYLQTAPLDEPVYQFMDRKRAEGKPYRVYMMASANKFLRIYYARAMELYK

SEQ ID NO: 477100 - protein, 346 aa, unidentified
MCSLPVFVGMDYHDSFVRVVVQDTDGSEMGNADRTNHWKAIADFGDRFGRPVRAAIESCCGAADLAEELVSCAGWSVALAHPGYVQRMKQNPDKTDCQDAQLLADLERVGYLPRVWLAPRYIRELRHVVRYRLQLTEQRRATKLRLRALLREQRCHAPEGLNAWTKAWQHWVRQTAELSEQGRWLAEQHLDELARLAIRIHEVEKRLEQLTTNDVEVQRLQQQPGIGPVTAWMIRAEIGHFDRFRTGKQLARFCGLSPRNASSGQRQADAGLIRAANPALRTVLIEAAHRLVQYDPSWQKFAQRLRARGKPGSVVAAAVGNRWMRRLYHEMKTSSGELAIAVGPAR

SEQ ID NO: 477101 - protein, 383 aa, unidentified
MNYSAIDYHKKNSFISTCNEQGERIAEAKICGNDPSAFARYFARLGEGPGKVVVEACWNWSWLHDVLSELEPIEEVVLAHPYKTRVIAEAQIKSDKLDARILSQLLRTKLMARAHVPSKQTRQRRLLLRQRMFWVRLRTMVRNRVHALLARQHGLTLPQRADLFGSGGMKFLRSVQLEGSEAKLLGQDLEVLEQLELQIKQSEKEIRRQMGQEPEVERLQSIPGVGILLSAVIAAEFDGAERFQSNTKLWAYCGLAPSTRSSDSHTWHGPLLFRCNKWLRWAFIEAAWIAIQHSAYFAAIYQRQLTRGKIPNKAIVVVARRLCEIAWKVLREKRSFSAQPPPRQANPFSRSPSRHSGGAYCKQYRLAPSLSIGDRESNPLPCG

SEQ ID NO: 477102 - protein, 381 aa, unidentified
MITIGMDVHVRNSYLHVTDDAGVPLRHGRCHNTMSDLAKFLGPLEPDARQQSEPIQVVLESTTNSRAIQRLLTQYAEEAGVDLTAEVLDARKIRIIAESVCKCDRLDAKVLCELARSNLKLPTCYMPDDEEFALREHLRARTDLVRMRTMFKNRVHAVLHRRGILAPTVTLFTKTGRAYLRQLDLETEGREILDRFLALMDETDRTITNSTASLRELMRRPRWAKQAALLMTMPGIGLITAMTILAELGNLDRFHSRAAVANYAGLVPVCRSSNDKRYSGGITHRGSKHLRAMLVEAAWMAVPRVPVYRAMFDRIAQKKNKLVAVTAVARRMLEDAFTMLKRDEAFRYVGSSVADAPQQVGSVTPTATSSSNSKVASSVAG

SEQ ID NO: 477103 - protein, 416 aa, unidentified
MTTQHSVIVGIDLGDRYSRLCLLDAENGEVIEESRIATSREAFGRRFSGAEPMLVAIETGTHSPWVSRILKDYGHEVLVANARKVRLIYGGVRKTDKVDAEKLARLARLDTRLLSPIEHRGESSQCHLALVHSRDALVGRRTKLVNHVRGTVKAFGARLPKCTAQSFHHKVAEHLPQELVAALGPVLETIGALSERIRGYDRKLEKVADELYPETRLLRQIHGVGALRALAFVLTLEDPSRFAKSRQVGPYLGLVPSTDQSGGSDPQRRISKHGNELRRKLLVNCAHYVLGPFGEDSELRRHGEKIAARGGKNAKKRAVVAVARKLSVLLHRLWVTAEVYEPLYNASRRGYPRQPERAPRHPRRLLGKGDEGGKPSTPRSFPATARWGMAAAICGRPNLKWQRPYPDGSHRAPGRS

SEQ ID NO: 477104 - protein, 355 aa, unidentified
MSRRKMQDFILKSKSVFIGLEDSKTTWVICVRADKEIKHETSMPAKYEVLRSYLRRFPDCDITVVYEAGFKGFGLFDNLVEDGYKCIVIPPHRVAQEKCSRVKNDKTDAKLLAKNLENGDCESCHVPDRERRSDRQVVRTLNAVDKDIRVERNRVRKFLQFHGIDSGIQTDDWRPVHFRSLRNLSLDSMLKMSLDIMLDKLELYWKYQKELRKTLSEITKKERYASAFKIAKSFPGIGELTAIRLVLEFGEDFSRFKSGAAIANFVGLGCCEHSSGESVNRGGITKQGNSLIRSWLIQNAWVAIRKDPALQEFYSRIRQNSGKANKAIVAVARKLIVRLRSCMIRNEEYCIGVIQ

SEQ ID NO: 477105 - protein, 442 aa, unidentified
MQRHPSVQDPAGGAHFIGLDVHKRVVQACVLDAAGTLLREVRFDCTAANLRAFASDQLVAHSQAALEATCHTWAIVDALAEGAAVDVPIVVSNPMRTRAIASAKVKTDRIDARVLAELLRCDYLPRVWQPDAATRTQRRRSSHRAALVAQRTACKNRLHAMLTQRLIVCPHAELFGNKGLQWLQQLELDPEAALVRQAELAILATLQAQLKLLHDAQAHSAWDDPRVKLLMTLPGVDMTVAQTLLAAWGDISRFDCAERASAYLGLAPSTHASADKCYHGAITKHGNSRARWLLVQAAQHLDKHPGPLGVQFKRLAARKNRNIAVVAMARKLACIAYLMLQRNEPYRYALPAPTQNKLARLRVAATGVRRKSGPAARTPRSASPETPQRTTPALGNVLMKEQLPALVPLAPGELRMLDRLGLAQLPAQLDSPSSRPRRRAAH

SEQ ID NO: 477106 - protein, 356 aa, unidentified
MNNVSKLDFTGQQIFIGMDVHKKSWSISILTEHFEHKTFSQPPEVSVLVNYLHRNFPGATYKAVYEAGFSGFWIHDSLREVGVQCIVVNPADVPTKDKERATKTDRIDCRKLARSLRNGELVGIFVPVRTKVEDRSLLRTRRGMVNKQTRCKNQIKSMLALYGIHIPDELAQSHWSRRFINWIDAIRMEKASGNLSLKAHLEELNHLRRIITGLNRSLRALSMTDEYRENVCLLKTVPGISTLTAMTLLTELYSIARFASLDKLASYFGLIPDTNSSGEKDNTTGITKRRNPELRGLIIESAWVAVRKDPALVMAFNRICTHMTKTKAIVRIARKLLNRIRYVLKNQKEYVMAVVQ

SEQ ID NO: 477107 - protein, 409 aa, unidentified
MRYYIGVDWGDEEHAVWVEDEQGQRVSAGMVAHSPVGFSEWGRQLDEWRAQGIGLWAAIERPEGRVVEVLLDHGVRVYPVNPKALDRARDRFRQSGAKDDLFDARVLGGFLRTDHVHLMALEPSSEAAQELKLLTEDYQRQVRTQTRLVNQLTATLKAYYPRALDVAELTTALATAFLQAYPTPATLMTLTERQWQRWATAHHLSAARATELWTSLKAPQLPVPLHVVRAKSRLMQALVTELAAVVAAVGSYRQAIDDFFATLPAAAQARTLPVGEHGVTVPTLWARLGDAPGRWQSFRHLQAQAGMVPVTVRSGKQVVVAFRFACDKQLRYAVDQLAWLSLQRSEWARAYYDEQRARGHRHRRALRALGAKWLKIIFIMWQRHVSYSEEHHLATMARQALRHPEKKIA

SEQ ID NO: 477108 - protein, 429 aa, unidentified
MSYRIAGIDVHKKMLAVVVSDVEIESEYQFERRMFGSSPEQRRSLAAWLLEQEAEEVVMESTAPYWKPVWGALERYWKPLREKREGARRRSGTLHLAQAPSNRGPRGRKKDFPDAERLVKRLVARELTLRFVPDAEQRLWRTVTRRKYQLTRHRVRLQNQLESFLEEAHIKLSSLVSDLLGLSARRMLKALADGETNPAALAALADQRLRATPAQLCDALGACAELSPVYRRLLKMALEELRLIDEQIGQLDQEMANLLSQHQDAVQRLAEVPGLGVDSAQQIIAEVGPTAATFPSEKCLSSWVGACPGDDESAGVNYSHRSPKGNRHMRRLLNQAANAAARTKGSIFEIVYRRSVPRLGHNQAIGTIAHRQCRLIWLILHQGVRYEERGPAVTKRSKQLRTSKMLRQLRSLGYRIEPPNPQPSQAQVQ

SEQ ID NO: 477109 - protein, 394 aa, unidentified
MPQQRKPNDLSRSLIALDMDTTLIAVVELSLSSWLVAGIVPGIERQPLKKLKTDENALLALFNRWRDEAVRSGHKISRIAVAFEAGRDGFWLARWLKARGIEAHVIHASSVAVSREHRRAKTDRLDTELLKRAFVGWLRGERDHCKTAAIPSLREEDAKRPSRERESLVGEQSRLVNRMKATLIRLGIRAFNPKLRYAEQRLETLRTPEGEPIPANTLAELKRDMQRRRFICGQIRSIEQERLERLERTPDAEPHAMVRLLARVTGIGIETADLLVHEVLLRNMRDRRAVARYGGLTGSPDRSGGTNREKGMARSGNARVRRGMIQLAWRFLLFQKDSALVQWYQRRTEHSPKARKTMIVALARKLLIALWRLAREGVVPEGVAMRPGVMNTSY

SEQ ID NO: 477110 - protein, 341 aa, unidentified
MDIVVLGIDLGKNSCSLAGLDASGRVILRRRMRRSSVESFVKGLGHCIVAMEACCGAHHLGRVFVAQGHSVRLMSPEYVRPYVKAQKNDELDAEAIAEAATRPTMRFVTVKSQYQSDVQALHRARERLVSERTALINHLRALLLERGIVAPQGRRKLQEELAVFADEDGIEALSPRIRLLIEDLRSEWRALDERIAAFDVEFVRMAREDEAVRRLTTIPGIGTINATALAAAVGNARAFRRGRDMAAWLGLTPRQMTTGGKPRLLGISKRGNRYLRKNLIHGARAVLPYLVERETPLGRWARGLLARAHKNIVVVALANKLARIAWAVLARGRTYEAAAAV

SEQ ID NO: 477111 - protein, 344 aa, unidentified
MQKYNISFKGQNIFVGIDVHLKTWHVTTLTESGYKYSFAQHADARELFERLNKKYPEAHFKSAYEAGFCGFSVHYALTEHGIENIVVNAADIPTTGKEKAMKTDAVDSEKIAWALKRGELTGIYIKDKRFMDDTNLMRLRQRFIKDLSRQKNRTKHLLYTQGVTYPKRFLNSKTHWSRNFMQWLREEVELLSEEKLTLTLLCEQVENTRKAILKVTREISFDLLISVPGFGLIMAMTMLTEFDNNIMRFPNERKFVAMLGLIPTCHDSGEKKTTGEKTFRGNKQLGPLVVESSWVAIQRDCELASYYSKCCQCMRPPRAIIKVARKLACKAYAVLKNQKAYVQP

SEQ ID NO: 477112 - protein, 367 aa, unidentified
MIVNEVAKNVEKIISIDTAKNSFQVLVVNQKTGKKKNTKVQRSKFVEYILKQGPCLIFMESCSASQHWARLFESFGFTVKLIAAQHVKAFLRNRRVKNDERDAEAIYTCGIQTDTKFVRIKTVEEQTVALLHTLRKAAVSQRVELSNRIRGILAEFGIVVARGKGSFNSEIEAMFNECEKIHDVYLRSAISSLFEDYHRLEQREKELSEKIESLNKDNELVKIALTCPGVGPLTASAIVAEVGDASQFRNGREMATWNGVVPSQHSTGGRSTLGGITKTGNRYLRALLAQCASAVIQNASRHLEQGKDTHLDRFALRLKLNGKPAKKIMIAVANKIIRILWAMLTQRKTFKNKADETSDISAELQLA

SEQ ID NO: 477113 - protein, 340 aa, unidentified
MSLYGGIDLHANNSVIVFINEQDEVIYQKRLPNDLSTILEQLAPYHTEVKGLVVESTYNWYWLVDGLMEADYRVHLANPAAIQQYSGLKYTDDHSDARWLAHLLRLAVLPEGYISPKAERAVRDLLRKRAHLVRQHTANVLSVQNIMARNTGARFSVKRIQELTKQELTTLLAEEPQVLAVTSSLVVLDCLRQQIKMLEKTVHKRLNHTPSYEQLLTVDGIGTILAQTIALETGTISRFPTVGNYASYCRCVDSKKISNGKRKGTGNVKNGNAYLAWAYMEAAQFAMRFQPAAQRFYQRKLAKSRHNTVLARKAVAHKLARACYYIMRDLVPFEATKAFG

SEQ ID NO: 477114 - protein, 341 aa, unidentified
MKFVGADLHKKSITFCVVEEADRQVSVVKRQRIHCCEPEKIERFLKSLGEFQVAVEATIGYDWFAALAEKYAQRVVIAHAGKLRVIAESTRKTDKIDAFILAEFLAHDMIPEAWRPTPRVRSHRTLVRRRHKIQSRITSTKNTMHAILTRYNADRSDLFTVVGWEAAKKLDLLQEERWVLKDLWDELENATERLQRVDARLLDFAARAPAKEREARAVVDTMPGVGLVTIDVVLAELGDWERFRCGDAVVSFAGLDPGVRSSDGVRKDLKLTKAGSPHLRWIMIQLAQRMKRTSPRWKSTFERLSKRIGKKKATCAIARRLLLVIYAMLRDGKAYQLPAVA

SEQ ID NO: 477115 - protein, 449 aa, unidentified
MAWWSGISPGWFPSLRKGGETVKKRKKIDHLSTLCVGLDIGSRKNFITAMNFDSERLIDMQPVPNAVSGGEQLEAMILAVLSDHPEFKYVLVGMESTSFYGVHVANYLSTSDALKPYHTEVFCLNPKEVANYKKSFAGIGKNDGIDSFVVADFIRVGRISIEPWRGAQYLALQRLTRQRKHISECIAREKNYALNNIFLKFSQFALLDSSDKIMSNKFSTTAEAILTEFKTTEEIVNTPLEDLVDFISSHGRGRFADPEEIAKVLQKAARDSYRLDKCLYEPITTSISCSFNCIRAYEKQLKALDKAIAELISGLNPAEYQILRSIPGIGPVYAAGILAEMGSVRCFGSNDSLARYSGIVWRDNDSGEFESEETPMNKAGNRYLRYYLIQAAGSVAQYCPEYAAFYEKKFAEVPKHQRKRALALTARKLIRLIFGLLDKNQLYSPAKSK

SEQ ID NO: 477116 - protein, 412 aa, unidentified
MDVLHPCCAGLDVHKDSVYACVRRIGPGGGVRETVRVFGTMTPDLLRLADWLAAEGATHVAMESTGVYWKPVYYVLGEQFELVLANAQQLKRVPGRKTDTQDCAWIAKLMQHGLIAASFVPPEPQRDLRELCRQRVQLSRQKAAVSNRVQKVLEDANLKLGSVASDVLGKSGRAMLRAIIAGETDPATLAELALGRLRKQLPRLRPALTGRVTEHHRFVLKLFLDEVEVVEEWVRRLEERIEVVLSPFAEAVRRWTTIPGVDRRTAQAVAAEIGTDMSRFPTEGHLSAWAGMCPGNDESAGRRRSGKTPKGSPWLKRALVQAAWAASHTKDTYLSAFYRRLAARRGRKRALVGLGHAILGIMYHMQRTGTDYADLGGDYFERRDTDRLTRRLVRRLESLGLKVTLEPTPQAA

SEQ ID NO: 477117 - protein, 392 aa, unidentified
MYIVGIDIGKNHHEASIVSPEGKQIGPSLRFATTHKGADSLMSFIFKNIGNSPCVFGMEATGHYWYPIYSFLKAKGYTIYVINPIQSDSLRKMYIRQTKNDSIDSFLIAEVIRFGQFSTTSMADENILAMRQLCRYRDSVISSRTEIKLRISTIMEQIFPEYEKQFSSLWLSTSMGILEKYLTPENIQNAPLDELHGIIKDKSHNRLTMDKALSIKEAAADTFGIKIAQEAFSFQLKQLIDRMHFLDQQIEALDCQILGYYKKFDCYLHTIPGIGMIGAATILAEIGDTKRFKSSSALVAFAGIDPTVRQSGEFNSIHNHMSKRGSPYLRHAIFLAATTCSFHNSPLNAYYKKKRDQGKHHLTATGAVARKLTTVIYAVLRDGKPYEPKKFC

SEQ ID NO: 477118 - protein, 342 aa, unidentified
MERRVFYTGIDQHKHSSVFTTVTATGEEVAQVTLPNERPLLRQYFAQLPGPHQAVVEATGRWYWLRDLLVPAGIDLKLAHAKLLKAIAYAKVKTDAVDSRTLAQLLRVDLIPPAHMISDELRGPRDVLRARLQLVERRMRCEHSLGSLLEKFNVAQVERLPPLYQLQARLHAAQVELLDAQIHELEQAVQGDLLDTPAIQRLLWIPGIGRILAFTIYLEIDDIQRFPTVRHCWSYGRLVPGAADSGGKQRHRASKDGNRYLKLAFSHAAVRAVQYFAEVRQWFQRWKRKKPVRIARALVAKELAKSVYVVLRERVEFNQQFKGTPLTKQKQASWPRRASPSV

SEQ ID NO: 477119 - protein, 427 aa, unidentified
MSEEKSKELRVSVDVGCRRHSVAIGWPDGQVLEEFEIAHRPEGFEEFFSRIEKHQKANGCGVAVAMEGYNGYARPLDSLVRSRGYRLYNINNLKLARFKEIFPGAAKKDRIDARKGLELFQLRDHLPLAKEVLQEVTGTPQENEILKRLTRRRRRLVNERVRVVNNLQADLQAVCPGLLEITTEASNRWFLNFLLSADTLPQLARLRKSTLLKIPAVGRKYASLIQEWQKRAHFSEEAQWVGEMIHEDAQRCLELEEKIKALETKIKEVAKNSKIAKILLSIPGFGTVCTSELAGEIGTVERFGKEGGLALYLGLSTLDNSSGNYQGTKQPKHVNTRAKAAMMTALDRHRKYVPESQRYYEKKRSQGKKHNQAIRALGRHLCRIIYKMLTEERPYQIRSKKGDTQARVRSRSSHIGQIRKKKISAKS

SEQ ID NO: 477120 - protein, 430 aa, unidentified
MEQTERNRLEEFRQLRKEIRHSEEYLIVGIDIAKDRHHAFFGTARGKSLLRRLVFNNDHEGFRRLLDQAEAIRVQHGLKKVVYGMEPTANYHKPLGEYLIKLGKTAVLVSGVTVAKNRESLDGRWDKHDDKDSANVADLISQGKCLYYEHPSAELRGLRSLLSLKRRLKKQEQGYRLRIRNHLLAQYFPEMDRDYDRLGAEGLSIVRWCWAASEIAQLDKAPFIERVTSRRIPMKRRRRLEEVWEKAGESIGCDGVPGLDHEAKVLVEGLKQIREMLKQTDQTIEELCKQFPGYAYLLTIPGFGPDVSGKVLGAIGDPERFQNGKQLLKLAGFDLSADRSGKDSDKAIPEISKRGKADLRYALYQAALVASCQNRELMIYYTNKIRGREKEKGIHTKMRVKLAAKLLVIAWTLMKKRESFNPTYLKAELN

SEQ ID NO: 477121 - protein, 342 aa, unidentified
MKLRSYCALDLHHSRTTFEAQTVKGALICRKEVPTERQHLIDLARSVPGPKGVVIEESPMADWAMRVLQPYVAEVIVCDPRRNRLINEDGDKTDAIDPGKLNELYRLGALRPVHHPSRQSMADLRAWVWAYHDQVKLATAAKNKLKAAFRGAGLQYDEGDIYSLRHRMDWLDKLPRRAVRNRVAELYGNVDNLTFRRDRMHAQMIRMASRHPVTRRFLEIPGFGPVRSLTFLVIIDTPFRFSSPQKLWTYAGVGLRRKQSGKSGAKKRPGQQYNRRLKAVAWGATRLALYRSDVNPFQRIYERLCKAGLRESLAELSVARKLIAVPWGMWKSGTEYNPALVT

SEQ ID NO: 477122 - protein, 400 aa, unidentified
MTAAAPTAKRRSSPATRGGPSLNGIMWPRPRITSAGPGRPPESWTVFAFSPTESILASSVPVSPYQLFVGVDIAAATATAAWLVPGGAPTRPSTIEQTPAGFAALERHLLATGHAPGVILVAMEATGSYWITLATTLVQAGFAVSVVNPAQAHHFAKALLKRAKTDAIDAQTLAQLAALLQPTPWAPPPPVWHELQQRLAQRDALQSMQRQVANQLHALEQGPVVVAPVRARMEALIATLADQLAAVDAEIAAALQHDESWAAAARRLQSIPGIGLITAGWLLVATLNFTICDSPEAATAYAGLAPQPRQSGTSVRGRPQIGHTGHARLRTALYLAPLSAAQHNPVIKPFYERLRAAGKPMKVARCAAARKLLHLAWAIGRSGQPFDPAYAQPPSQRVAA

SEQ ID NO: 477123 - protein, 344 aa, unidentified
MQVTTIGLDLAKNVFQVHGVDGNGLVVVRKALRRAQLLLFFKELPPCLVGMEACSSAHYWARELSALGHAVKLMPPSYVKPYVKRGKNDAADAAAICEAVTRPTMRFVAIKSPEQQAVLMLHRARALLMRQRTMTVNALRGHLAEFGLIAAQGAKSLAALIEDVFGSGSSEAHVIPLLARRALAPLMAQVRELATQIKAIDAELRVWHQTNAASKRLMTIPGVGFITATAIAATVTDPSHFRSGRQFAAWLGLVPRQNSSGGKERLGSISKMGDRYLRTLLVVGATSVIRYARGKNAAGAQWINELLARRPVRLVSVALANKTARIIWAVLAHGDTYRAPVTVA

SEQ ID NO: 477124 - protein, 373 aa, unidentified
MRLLVGDDWAEDHHDVEVLDAAGRRLARARLPEGVAGIARLHAIIGELAGEDAEDVQVLVGIETDRGPWVAALVAAGYQVFAVNPLQAARYRERHTVSGAKSDTADAHVLADMVRTDAHQLRPVAGDSAQGEAVKVVTRTHKTLIWERTRHTQRLRHALRDYFPAAVEAFEDLDAADTLELLAKAPDPASAATLTRAQISAALKRARRRDIPAKSERIWTVLRADHLGQPEVVTAAYAASVRALVAVLMVLDARVLAEFGDDPARYACAKARKNYAGTSPITRASGKTKIVAARYVHNDRLIDALMTQAFAALNASPGARAYYDQLRARGATNNAALRQLANRLVGILHGCLKTRTRYDEATAWSHHSKAPAA

SEQ ID NO: 477125 - protein, 339 aa, unidentified
MELYAGSDLHGNNNYLGIIDQQGKERYKKKLPNDPQVILEVLRPFQKELVGIVVESTFNWYWLVDMLMSEGYQVHLANPAAIEQYSGLKHADDKHDAFWLAEMLRLGILPEGYIYPKEDRPIRDLLRKRGHLVRLRTSLILSLQNIISRNYGIQLNANKIKRLRKDEVSPILEGQEDLALSGKVSKETIDFLTHQIVQVENFVQDKVELKEPYKYLQTICGVGKILSLTIMLETGPVERFSKVGNYVSYCRKVPSKWTSNQKTKGKGNKKNGNKYLAWAFSEAAELARRYETPARAYYNKKSAKTNFMVAHTALAHKLARAAYFVMKDQVPFDPTKVFA

SEQ ID NO: 477126 - protein, 394 aa, unidentified
MKLVGIDVGKNSHHFCVMDKETGEFNVAPSSFSNNKEGFDFLINSLKPYSKKSILIGMEDTGHYHVALLKFLLSNGYTVALINPKTTDLTRKMEGGIAKNDKLDTITICDVLDTPERKKQYRITKVDRFDLYEQRQLTRHHHNLKEELNVYCNRLQKSIDLVFPEFNTLFSSKYSIVYMNLLKTFGSAEAIASTDIRTIRKCFEIKGRGNRISLTPEKLKECAKNSIGISSEVETIQIKHLVSQITLIKEQIAEIDKKIEEFSITNNSPILSIPGISHFSGTSILAELGDIGNYSKPSQIIKFAGVAPYHYESSQYNAQHTGITKKGSKYLRKTLYQIILTVINNNPVFKKYYRLKISQGKGHRCAHGHCIRKLLRIIYHLLETGQSFDPALLR

SEQ ID NO: 477127 - protein, 433 aa, unidentified
MNSSHPYDLVIGLDRSDKKADLRLIDTATGQRRSRIIDTAPEALWEWLLELRQQYPQARVGLCLEQPAVHLVAFLESYEWITLYPINPITLQKYREAFVTSRAKDDAKDADYQADLLLTHYAKLKPWAPEDSATRAVQQRVFHRRAVVDERTALTNRLIALLKQYFPQALTFCGEDLWRPLATRFLLKWTSLQAVQKTKPATLKQFYYLQGSRSVKRLEQRLALVAKAVPVTDETALIESFALRVQLLCRQLQLVTRTIADYDRQIAAAYAAHPDHEIFAHLPGAGPVLGPRLLASMGSQRERFAAAGDLQQYTGIAPVTKKSGGSCYIHRRYLCPKFHKQSFHEYAAQSILWSRWAAAYYLQQRRKGCPHQTAVRALAYKWQRVIFRCWHNHTPYQEAIYEAALRKNGSQLVALFDKVELGKSPFKNPVKKS

SEQ ID NO: 477128 - protein, 339 aa, unidentified
MLYIGLDIHSKHISMCVLNEAGQIVKRTRVRMIHQMMQILEGLPDRFEVCYEASCGYGHYHDLFRPLAARVLVAHPGQLRLIFRSKDKNDRKDAERLAKLLYLGEVPTVHVPSIDVRTWRELINCRSQVIAKRTRAKNTIRSLLRSAGQTAPRHPGLWTKQGVAWLRQLPLPTVSQQLRRDLLLEEIETLNRQLRRIEQQLNHQANDSAAVLQLRSIPGVGIRTAEAVAAFVDNPHRFRHAKAVGRYFGLVPRQDQSGNKNQLGHITREGPPVVRRLVAEAAWQALRRSPTVRAYFERTQRGDPQRTKIALVATAHYLIRVMYALLKHGTLWQERVATE

SEQ ID NO: 477129 - protein, 456 aa, unidentified
MSQPKRPGSRTGLSAVHPAAAAIDIGATVHVAAVGPDRDTEPVRTFQTFTDDLHRLADWFARCGIKTVAMESTGVYWIPVFEILEQRGFEVMVVNARDAKHVPGRKTDVSDAEWLQRLHEYGLLRPSFRPQAEIAGLRAYLRQRERLLDYAAVHIQHMQKALMQMNLQLHHVVSDITGVTGMTIIRAIVAGERDPNVLASHRERGCQASVETICQALAGNYREEHVFALSQAIELYDVYQTKVAACDKQIEVILQRLKQSATPPASKLLPPKHRSRPPNAPSFDARAALHAILGVDLTQIHGLGPYLALKLVGECGINLSAWPTAKHFTSWLGLAPHNKISGGKVLSSKTRRTSNRAASLLRLAAVSVGRTDTALGAFYRRLAARAGKAKAVTATARKIAVLFYNTLRHGMSYADPGATYYEERHRRRVLANLQRRAKSLGYVLHQADRDPIQAVS

SEQ ID NO: 477130 - protein, 363 aa, unidentified
MKIVGCDLHARQQSIAMVDTETGEFIERTLVHEGTAVRDFYGALEGRVVVGIEAMGAMQWFLELLEESGIEYRVGHPAKIRAQETRKQKHDRRDAELLLKLLREDRFPEIWMPSGEQRELRTLLRDRDQWVRMRSRVQHSLQAIALNHALRRGRGLWSAAGQQALQALSLPPYTAQRRNELLVLCRQLEKRIQELDKEVEAQAQQRPQSRRLMSHPGVGPVTALATDVFLGDASRFRWGNQVASYIGMIPSERSSGKRQRLGKLSKEGNALLRYLWTEAVMHAVRKDAELKRFYRRKLVQKGMGKARVAAARKLGIRLWIMMRDQIDYLEFCRRGQLRQKGKAHAGMSDLRQWSCNAVTGSTE

SEQ ID NO: 477131 - protein, 322 aa, unidentified
MSGSAVMIGIDVASAHVDVAAIGGELPAALGHVGNDADGHSALADGLARLKPELVLMEATGGYEAALACALQAAGLRVAVVNPRMARDFARAMQRLAKTDRIDAATLAEFAGVLARRPDCARFIRPLSEPEQQDLAALVTRRRQLVSMQLAERQRLRLARPVARPSIEALLEAIARQLDEVEAEMARHVEQHHAQMAKLLQSVAGIGRVAAATLIAELPELGRLNRRQICALVGVAPYANDSGASRGRRRIVGGRFEVRRALYMATLTATRHNAAIRAFYERLVAAGKLKKVALIACMRKLIIHLNALTRDHLNAQNRSIIA

SEQ ID NO: 477132 - protein, 402 aa, unidentified
MTYDYVIGMDACKYFHHACVLDIDGTQVLSKRINQNEQSLRALFSAFSAYDHKVLVVVDQPNNIGRLTVAVAQDIGIDVRYLPGLAMRQLSRIHAGNAKTDIRDAYIIAHAAKNLPESLRSVDRVEEAFLQLKVLNGIDEDLARSYTRLINQIRSALVGCYPQFEQALRGQIIHRKWVLHLLARYGGPTKIKRLGKAKAAAFARRYKARNPEPVLDAIFAAISEQTVTIAGAHYAEMGVAMSAKDALLKLEHRQQIEKEVIKLINDIPHTQFLLSMPGIGPKTAAQILMTAGDMSDFPSAGHLASYAGLSPRTNQSGTSIMSNSLNRAGNKKLKNALWQSSFASIRSHERSRQFYERKRREGKRHNAAVVALARRRLNVLYAMMRNHEHYHDPAPSQEDLAA

SEQ ID NO: 477133 - protein, 485 aa, unidentified
MAERKMSTFERLQQGKLSRKQRRELGRRLHSADAGLQVVHPDAAGIDIGNKSHFVAIPPDRDTTPVREFGSWTADLHEMASWLKENGITTVAMQSTGVYWIPVLEVLEQAGLEVYLVNARGTKNLPGRKTDVQECDWIRKLHTYGLLRNSFRPPEEIRSVRTIWRLRDRLVKDAGRAVQHMQKALTTMNVQLANTISDISGATGQAIIRAIVGGKRDPWQLAELRDRRIAASKEEIAHSLQGHWQEDVIFELRQAVESYDFLQKQMAACDQELIKYMAAIESRGITPKQDLPKDAAPLPCAKRARRSKTRRKNQPGFDLATELERTLGADLTRIDGIDVITAQVILSEIGPDFSAFPDENHFASWLTLAPKRDISGGKVIRHIPAAGRNRVADALRMSAESLSRSDSYLGARYRRLRARLDGPVAVKAMARYLACLVYRIVTKGQAYVDRGAAHYEKKRMERERVALQLRAANLGFKLVPVALSK

SEQ ID NO: 477134 - protein, 335 aa, unidentified
MNQARVHIGVDVGKECLDICYPDGSKEHIGNTKRSRAKLIRKARAMSAIVSFEATGPYEENLADECLAAGVSAVRLDAWKTRKYAESQGMLEKTDAIDCEMIRDFAASLRPEQLRFVRPMSDGYRRLKRATSVRRNLIKAKTLVVNQLENILDKDVRASVSRVIDALERQIEKMDALCTEAIRSDEKMNALAVRFEQVVGVGPVLISTMLSSCPDIGSFTSKGIAKMAGVAPIENKSCTIRKKSKPRRGRRELRSALYMAAVSACHSNHILEPVYKRFTDRGMPRRVALIALARHIAILMNYIAKYPDFNPAADPKKVALLALPKRKPGRPRKNP

SEQ ID NO: 477135 - protein, 269 aa, unidentified
MDVTTVGLDLAKNVFHLVGLNAQGQEKMKKRLSRAQVLKHFANMPACLIGMEACASAHHFARELTKLGHTAKLIPPQYVKAYVRGQKNDTNDARAIAEAVRAPQMRFVMAKTVEQQDLQALARLREGTLRARTALANRLRGLLGEYGIVMPQGVNVLRRALPDLLEDAGHGLSERFRRLLAQGREQLTELDAHVEALTTELKAAAQEDDRARRLQTIPGFGPIVASVFAATLGDGSQYRRGREASAAVGLTPRQHSTGGKSRLLGISKQ

SEQ ID NO: 477136 - protein, 320 aa, unidentified
MEREPQFVGIDVAKARVDVAVRPTGQRWTISYDEADIVELVSHLEDLDPALVVLEASGGLELPLVASLAAAALPVVVVNPRQVRDFARATGTLAKTDALDAAVLAHFADAVRPSLRPLRDEETQVLNSLVARRHQVMTMLISERYRLGTAISAVRPRIESHIAWSEQELDGLDEGLRQTLRSSPVWREKDDLLRSVPGVGEQLSFTLLACLPELGTLDRRQIAALVGVAPFNRDSGTLRGKRFIWGGRARVRAVLYMGALVASRYNPVIRDFYQRLLAAGKPKKVALVACMRKLLVTLNSILKHGSPWRDLSDQVTAPSS

SEQ ID NO: 477137 - protein, 376 aa, unidentified
MNKVRFVGLDVHADTIAVAVAEPDGEVRALGTIPNRPDSIRRLVKRLGPPDRLRMCYEAGPTGYVLYWQLTGLGVPSDVIAPTLVPTKAGDRVKTDRRDAMKLARSYRAGDLTPVWVPDATHEALRDLVRAREAAKKDQLRARHRLGKFLLRTGRRPPLTMKAWTQQHLRWVKTVQYDHAAQEATLQDYLQEIEHVADRIARLEQAIDEAVKSVPERMRAVIAALQALRGVAQVSAVTMVAELGELSRFASARQLMSYTGIVSSEDSSGTRTRRGAITKTGNAHLRRIVVEAAWAYRHRPGLGAAFHKRQATVNPEIKAIAWKAQHRLHTRYRWLMAKGKHKQQVVTAIGRELLGFIWAIAVKVEAQRSDGQATAA

SEQ ID NO: 477138 - protein, 356 aa, unidentified
MKILALDIGKYKSVGCDYEAETGRHSFATVATTPQALHDLLVEREPDRVVIEICSIAGWICDLVRTLGIEIQVANTSDERWSWRKVKQKNDRRDALKAAQLSAVNQLRPVHVPRLEIRQWRALIAYRQQLVRRRTKIKNHTRDLLQREGVILLRGRKAWTQMGMAALQELVKPLSESSLNELWRGELGVELAQLKELQQQIEVVEAKLDELGAADARVRLLRTIPGVGPRLAEAIVTMFDDPRRFGSGREVSAYVGMVPKQFDSGETERSGRITRQGNRLVRSLLVEVAWASLRHNAWARQCYQRIHGGKKSRKKTAIVAVGRKLLVRCWGMLRHQTPWHWGMKTAIPVSSELRVG

SEQ ID NO: 477139 - protein, 394 aa, unidentified
MHKDTHCAVVIDCWMNKLGEINFENRPSRYPAFVEDVRKICGTKEIVFGLEDTRGFGRNLAAYLVGRKFEVKHVNPAYTSTVRLANPIIYKDDSYDAYCVARVLRDMVDTLQDAKHEDIFWTIRQIVKRRDLIVKSNVMNKNQLHSQLAYSYPSYRKFFAMIDSKSALCFWENYPSPEYIWNTTPEEIYHTIKPVHQALKIQRIHEIISMIERDGDTRKDYQPERDFIVRNIVKDIRHNKELISEIDDELRKLIPLTGYKLHTMPGIDLVTEAQIISEIGDINRFPDSDKLARFMGLAPVQFSSAGKGKDQRCRNGNRALNAIFHFLAIQMVAVSASGKPRHPVFREYFEQKVKEGKNKPQALVCVARWLVRIIYGMMKTKTEYRPYEKVDDKN

SEQ ID NO: 477140 - protein, 379 aa, unidentified
MAEYILVGCDLHDRDMVLRIATDKGPVEKRTFPNTHSGRKAMLAELKRRSEAAGGAKVIVVYEAGPHGFVLYDAVCAAGLQCHVLAPTHLAKSPKAARNKSDGRDSRRLLGVLRSWVFANEELHEVWVPDRELRDERELTRVRGDAARGLTRGKTRVQMLLKRYGLRKPESVGESWTRRHWAWLQGLTGPGSPLGPGTRKSLGRLLDEVTWGEGQAKAMEEDVVELARTPRYAEAVRVATEDPGVGVLTAMVFLTEMGDLRRFVNRAAVGSFVGLAPSRDQSGECEGGFGHITHQGPARVRWVLNQSVWMWIRTDPKAQAFVERLVVEHPKYGKQIAVVALMRRRAVRLWHRCREAQVRSGSFGPAGVREVVALGSVRP

SEQ ID NO: 477141 - protein, 349 aa, unidentified
MLADEADYVIGVDTHRDQHTLAIVVAPTGAVLAQTVVRASVGGYADAFRFAARHAHGVRVWAVEGAGHYGAGLDRYLADRGEAVLEVGRHARVERRLRGKDDPLDAIRAARAGLAATTLTLPRSGERQEALGVLLLARRSAVDVRRVALVQLRSVIVTAPESLREELRRLSVTKLIQRCSRFRRSGSRTPDELAVVLALRALARRIEAATEEADELEREIRQHVHALVPELLDEPGVGPIVAAQLIVTWSHKDRVRSEAAFARLAGVAPLPASSGQTVRHRLSRGGDRQLNRALHTVALHRRQHDPATRDYIARRVAEGKSSREATRVLKRYLARHLYRVMQNATPLTT

SEQ ID NO: 477142 - protein, 395 aa, unidentified
MFIVGIDVAKRSHEVCMITSDGQTVQRPFSIRNNCTGYNLMLEKIRKHTNIKSQIVFAMESTAHYWLALFTRLRKDGYHVILLNPIQTSAMRDMFIRKIKTDAKDSFIIAELIRFGRYAESNVAQDRLLALKELCRNRFYLVDMAGDLKRKLIALIDRVFPEYEAQFDTIFCKSSVAVLKKYPTPQKLSNAHLDKLTELLWNSSNGHFGEWKARELRELARNSFGVEDCDGAYSTLILLMLDQIQSLSGKADALEKEISRLFQSFDTTVTTIPGVGPIIGAVILSEVGDISRFSSADKLAAYIGVDPSVNQSGEFQAAHAHMSKRGSPYLRRCIWMASQVAVQRDSMFRAYYEKKAAEGLKYMTIIGHVTRKMTAVVFAILRDHKVYEPVLPTAA

SEQ ID NO: 477143 - protein, 343 aa, unidentified
MHISSVGIDLGKTTFHLVALDEHSKVVIRKKFSRKQLLTYTANLQSSLIGVEACSGAHFIGARLRDQGHQVRLIPAQFVKPFVKSNKNDFIDAEAIAEAVSRQNMRFVPIKTDDQLDLQALHRVRDRLVHRRTAVINQIRGFLLERGITFAKGPANLRNRMPDIVEDADANLTPRMRTLLDRLWQEWKQLESGIETASDEIEQIASEDEACQRLRQIPGVGPLVSTATVAAIGNGAAFRKGREFAAWLGLVPRQYSTGGKTRLYGISKRGNTYLRRMFIHGARAVLMRVKYDTAGLGQWVHQLEARTTRNKVIVAVANKLARIAWAVLFKGEAYRHAAVCAQA

SEQ ID NO: 477144 - protein, 340 aa, unidentified
MMMSSFVGVDLHRNNFTYCIRENGEEKKIGKCEISELKGFASLLGKDTAMAVEATGNTFMFCRFLKAHVGRLVVVNPSQFKVISTSTKKTDKHDAKILAEFLEKDMLPEVRMKDDLQAKISSLTQTREKLVQLRTVLKNKVNNLLAANFIVLKREELSTETGLRKALSFHFDPITDTELFVVVEQIRSLNQSIEKLDKAIEDHGNKMDGFSNLKSIKGIGTKGAAILLATIGNIHDFRSSKQLAAYIGIVPRVSNSNDTVCHGRITKNGSKIARTTLVQCALIAKRYSPYLNAFHESVKSRRGGAKANIALARKFLDIVYKTLKNNWMFEDFTQFKLVKN

SEQ ID NO: 477145 - protein, 438 aa, unidentified
MSNKVIFNLDDLFISVGIDVGADFSWMSIALPNQQFVGKPYKILHSSIDSLTIVVSKIKEAEELYSLESRIFLESTGIYHYPLFCYLRDKGFNCSVINPIITKNSTNINIRKVHNERFDSKKAALVGLKPDLKVSLMPSDLALNCRNLCREYYDLMDNRSAYVNKLQGELRMAFPQYLGIFSKVTINTSLTLLETYTSPSAFLEADKQEIINIIKSTARFGLTYAQNKYNAIIQAATDANQFGYIIDSNIKRIRLYISFIRKYDEEINNILESLHELVDANEDADFVKQIHLIETFKGAGFLSAVSIMGEIGDFSAFSKPKQLFAYFGLDPAVKQSGKFEGTKVQMSKRGSAIARRVIHTLTLQCISISRNGEAKNPVLREYYLKKCDSKPKLVAMGAVSHKVCNMIFAILRDNKPFEIITPQEHIKQYNAAKCDIAA

SEQ ID NO: 477146 - protein, 482 aa, unidentified
MATRKRSTYERLQPGPLNRQQRRELGRKIAAADPGLAVVHPDAAGIDIGNASHFVAIPPDREPVPIREFGAWTAALQEMAQWLTAHGIRTVALQATGVYWIAVQDVLEQAGLEVYLVNARGTKTLPGRKSDVQECEWLRKLHTYGLLRNSFRPPAEIRAIRTLWRQRDRWVQEAARAIQHMQKALTTMNVQLANTISDLSGVTGQAILRAIVAGTRDPGALAKLRDCRIAASEAELAASLQGTWREDVLFELRQTLEAYDFYQAQLAACERELAKYTAAVATRELPPPPPPPAGAAPLSPGKAARRATSRRKPQPGFDLAAELHRTMGVDLTRIDGINVLTTQVVFSEIGPDFSAFPSENHFASWLTLAPRHDISGGKVLRHVPAAGRNRVANALRMAAQSLVRSDSYLGARYRRLRARLDGPVAVKAMARYLACLIYRLVTKGQAYVDRGAAHYERKRQERERQALERRASNLGLKLVPAA

SEQ ID NO: 477147 - protein, 430 aa, unidentified
MKSNTQNAKIEAITEKTLVLGIDVGSEMHYARAFDYRGIEYSKKPFKFSNTEAGFVTFKEWILDLKERHEKDKVIPGMEPTGHYWFNLGKFLQDNEMKPVLVNPHHVKKSKELDDNNPTKNDRKDPKVIAGLVREGRYMIPYLPDGVYADLRTASNIRFQLQAELTRIQNRISRWFNIYFPEYKTVYGKPDAKSGMLILKAAPLPEDILTLGIDGVNQIWRDAKLRAVGKARAKTLIEAAKHSVGSKEGAVSARMEIRMLLEDYESRNIRLQEVMALIEGLVKQIPMAEKLLEIKGVGIRTVSGFLAEVGDISRFNNPKELQKLAGLALVENSSGKHKGETTISRRGRKRLRYLLFEVAMSLVAKNPEFRELHNYYTTRRLNPLKKMQSLMAIAAKLIRVFYAMLTKGVDYDPKKMVSDIKRPAVYIQAA

SEQ ID NO: 477148 - protein, 366 aa, unidentified
MKKNSTVATRRKQNFSAKKLTIGMDLGDRFSYYCVLDEAGEVLIEQNLPTTKAAIQQVFGRMPRSRVALETGSHSPWISRLLTQLGHEVIVAHARNVRLIGESSRKDDRLDARMLARLARLDPRLLSPVRHRSAKAQIDLTVIRARAALVGARTALVNAARGLAKSYGERLRKCGTQQVNPDLAAGLSAELRAALEPLLAEVASLNQRIAEYDRRIEQIATKEHPEVALLKQVKGVGTLIALTYVLTVDDPHRFRRSRDAGCYLGLRPGRRNSGKSEPQLHISKEGDRYLRTLLVQGAHYILGPFGQDSDLRRWGLKLAERGGKNAKKRAVVAVARKLAVLLHKLWVSGEVYEPLRNNHRVVSAVA

SEQ ID NO: 477149 - protein, 419 aa, unidentified
MSFKILKFNCCGLDVHKTWIYACIGITDSNNRTEYKQARFSSFTKGLNELCDWLAKYNCKDVCMESTGKYWIPVFNILEQHNLWVTLSHPKYTKPMKGNKTDRKDAKWICDLYMCGMVKPSFIPPADIRELRDLVRYRFKLTCMITGEKNRAQNCLTVSNLKLDDVFSDVFGKSSRSITEQILKHPGETFDVTPFVDGRCKTPIEEIQAAVDGAISKEQAVKLRQCLDHIDELNKHISEVEQEILRLSDKYEVALNLIRTVPGFNKNPLTAIQVLSEIGGDMSVFPTAKHLVSWAGCCPRNDQSNQKIKSTRISRAGSYFKPVLVQVANALIKSKKHLEFTNRYKRIKARRGHKKAIIAICRMILTAIWHILSDLKPYTPEGFLESRPVKEEKVLSISQALNLLKQRGYIIKDEPLSVS

SEQ ID NO: 477150 - protein, 504 aa, unidentified
MTTPPWELAFRLVKPLRKSVSPFGGDLCFGWLGSPRLYLYKPLGCVSALWKWIPAGKDKTMKYQKVLMMLESIPYLSVGLDVGADFTWMSIMLPNGILTGKPFKIIHSDPDSRELAVAKIKEAQETYSLESRCFLESTGIYHIPLLYFLRDKGFDCSVINPIITKNSTNMNVRKLHNDKFDSKKAAKVGLDASLKTSIIPDDEVIDLRNLVRDYYYFKDLQSAVVLKLTAELKVSFPAYRKVFSKVTTQTSLKLLEAYPLAADMLAAPKDILVETIRKTARFGEKYAVSKYDAIRAAAKDAAVFGRALQSSALRIRLYIKTYREYQEHLDNILEDLHKAVDKLEGTPVYDRIFLLQTLRGVGFLSAAVLIAEMGSFDLFSSPKKLYAYFGLDPAVKQSGKFNGDKVHMSKRGSSLARRILHMVAINNLKVDKRTKTPVNPVIHGYYTDKCKSKKKNVAVGAVMHKICNIIFAMLRDNKPFEIITPQEHCERYLAAHPDKVRNAA

SEQ ID NO: 477151 - protein, 408 aa, unidentified
MKTLHQRCAGLDVHKQEVVACLRLVTQGRVHREVRRFPTTTRGLLELAAWLEAARCTIVAMEATGVYWKPVWHLLDGSFELVLANAAHIKGVPGRKSDVNDATWIADLLAHGLIRASFVPPQPIQELRDLTRTRKQLSREIVRHTQRLQAVLEEANVKLASVITDILGASGRRILKAMITGETDPSHLAELGSRRLGCSRDTLVEALDGRVRDHHRFLLDQHLKTIEQMEETVAVFDARLEAALAPFRDTVERLRQVPGLSTTAAEVLIAEIGLDMSRFPTAGHLLSWAGLVPALDESAGKRRSTRVTKGAPWLKPVLVQCAWAAANKKNSYFEAQFLRLKGRRGPKKAAVAVAASILTTVYHMLRDGTCYQDLGPNYFARRNPARTARKLADRIRSLGYIVEIRSAA

SEQ ID NO: 477152 - protein, 346 aa, unidentified
MHYIGMDSHISTLDFAVVNESGQLVKAHRVATSVNGFMEFVKTVPTPRTIYMEEGTLAAWALETCVSFREKLVITDAKKNHWIGSSGQKGDSIDALKLAQLARGGYIKEIHHPVGQRRRFRELMIAYHDTVRSTTRIKNKIKAKFRQNGIQCTGATVYSEKHREEWKGKLPQEATLLLILDGLWRQLEQSEQTEKELLVAARAQAKQYPEIKHFEAIPGIGFIHAATISAMLETPHRFADKKKVWMYAGLGIMTKSSSGKVYSEKLSTDYNRLLKYTLKQAAEVATQTKDNPFRRKYLDMTLLHGIAPHRAKLTIARDMLVTMWAMWRKGEKYSPEIREKAACKQG

SEQ ID NO: 477153 - protein, 342 aa, unidentified
MYYIGLDVHKKTISYCVKDASGQVHQEGKVGATRREVDSWIKTLPQPRTMAMEATIFTGWIYDHLLPHAQQVKVAHPLMLRAIAAAKKKNDRIDAGKIADCLRCDFLPECHMASTQIRDRRRTLRYRHLLVRQMVQMKNRISGLLMETGVSYNKQRLHKVGYFRELLSTNEDVHESIRPLLKLSRDTVVRLQKTEYALVSSLQRDPLLADRVKRLRTVPGVGPITALAWALEIGEVARFRSIRQAISYCGLCGEEKSSADKVMRTPLSKQRNKHIQRVLGEAAKLAPRQDHDLALVYETAKQKGNANRATLAVARKMVAYLLAVDREERDFVPAENYQRAAA

SEQ ID NO: 477154 - protein, 341 aa, unidentified
MNHVAIDLGGLQSQVCTRLPDGTIVEERKVLTRKLTELVTTWPQSRIILETCSEAFHIADAAKARGHDVRVVPATLVRTLGVGARGVKNDQRDARVLSEVSCRIELPSVHVPSTLARELKSLCGSREALVETRTKLINNARGWIRTQLWQVRKGATGSFAARVRALAKTLKQVLPEHVERQLVVIETVHEQVKLADKQVQRIACEHPICRRLMTVPGVGPVTAVRFVAALDDAARFSNAHALESYVGLTPGENSSSERQRRTGITKAGPTELRRALVQAAWSAFRTQPSAPMVVWATQIAARRGKFIAVVALARKMAGILFALWRDGTIYRPAEAARSTSA

SEQ ID NO: 477155 - protein, 403 aa, unidentified
MSTVFAGLDWASQNHVVCVIDEHAGVRLQLEVAHDAPGLAELMRRLRAVGAHAIAIERPSGLLVDALMEAGFAVVTIHPNVVKATRPRYRSHGGKSDASDAFLLADLLRTDGHRFKPLQAQSDDIRALRALVRGRDDLVATRVQLANQLRSLLQSFWSGAAEIFAEVDSPIALDFIQRYPTPESARRLGPKRMAAFCAQHGYSGRRSSEELLERLHQAPQVPLGEMEVEAKGELALALARTLARVVEQLRLLSSRIEHHVASHDDGRILMSFPRAGRICAAQILAELGSVRERFDSDEHLAAEAGVAPVTYASGKSKAVTFRWACNHRLRSALTCLADNSRHASGWAAAVYARAKARGCDHPHAIRILARAWLRVIWRAWTDRQPYDPARHGGLQILLKTTGG

SEQ ID NO: 477156 - protein, 408 aa, unidentified
MESQIIFGIDVSSKSSTVCVVNDRIKQGESFRISNDSFGYQKLYEQLNQYLITPLVVFEATGVYSLSLQAFLEDYHIKYLKLNPLKAKKLMDNNLRHNKTDKVDAYRLALIQFNAPQKLRDPQPREYHELQNASRYYEELTRSIVTTKNQLHRNLQSTFPQIEEILSHPSGRIYWALVSLFPHAGYVLEKNETQVTQMLNSISGIGQQRARYLTTRLYAFAREAYPYDSKDSIIVRAIQRNISNLFSLQQERDYVINYMEKLAKAVNARALSIYLSIPGVARITAVRLVAELGDLRRFSTSAQIDAFVGIDPGRYQSGEKDSSLGITEHGNHIARKILYRVITQMETVKATQPCHITDYYDKKKRSSNSQGYKKIAIASVHKLIRTMFALIKHDQLYDYNIATKNKRL

SEQ ID NO: 477157 - protein, 341 aa, unidentified
MAEYIGLDVSMKETAVSIRSEGKRIWRGKCASDPKIIAELVRKRAPAVERIVFETGPLSVWFWHALTAEGLPAICIDARHAAKALDMAPNKTDANDADGLAQLAEVGFYREVRVKGFDSMLTRTLVAARVRLVRITVELSNQIRGLMKTFGLVVPAGRGSVFEKNVRDLLADEAALARIVLPLLESWRGLRQRATELSRQLIGEARHSKACQILMSIPGIGSITATSFMAAIEDPANFRKSRAVGAWLGLTTRRYQSGEVDYDGHISRRGDKHLRGLLYEAAVTVLTRSQADSGLREWGLKLRERIGFKRAAVAVARKLAVIMHTMLKSGELFDPAIGAAA

SEQ ID NO: 477158 - protein, 341 aa, unidentified
MKSQVAGLDLHKSQSYITVMDGNGQILGEESLESSAESILNYLGRFGKPEVVFEATRNWYWLYEALQRKGYKVTMAHPKKTKAIGEAKIKTDKIDSHTLAHLKRADLIPESYLAPLETRERRELLRHRVFLVRERAKVKSKVRTLLSKLNLNCPYSDVLGKEAIGWLKERREEMPQVFTGKLDDLLQLGGNLSTIIQVVEKKVENKAADDRIVKLLVTIPGIGEFSAMVIKAEIGTIYRFPDADHLASYCGLVPSVSSSGNYTHRGKITKEGNRWLRWILVEAAGKLKKKSPHFKDFYYRILSKKTKQVARVATARKLAVAIYYMWKREEPFKEPEPRSTG

SEQ ID NO: 477159 - protein, 313 aa, unidentified
MTQTNTTTAGIDTSKAKLDIAVHNRTERWQVANALPGWRALAANLAKAGVTRVGIEATGGYERGVVEHLRAASFIVLVLQPIQVKAFGRVHLRRAKNDALDAVLIAACAATLNQPQIAPDPRLAELAGHLTFLEQLEEDIARFKTRLEHIDEPRLRRIVVSDITRLKQRRAAQIRDIAKHLRAYGDLARRLDLVLSIPGIGERTALALIIRMPELGRVSREQAAALAGLAPFDDDSGKYRGQRHIAGGRGRLRRSLFAAALPAAFRWNNALIILYARLVAGGKTLIACARKLLIYANTVVQRGTPWTERPAAL

SEQ ID NO: 477160 - protein, 291 aa, unidentified
MSQNLNSAVAVIGIDIGKNSFHVVGLDDRGAIVLRQKWSRGQIEARLANLPPCLIGMEACVGAHHLSRKLKALGHDARLMPAKYVRPYSKGQKNDFRDAEAIAEAVQRPTMKFVATKTVEQLDLQALHRVRERLVSQRTGIINQIRAFLLERGVAIRQGLRFLRAELPRILATSPDVLSARMVRVIRDLAEDWRRLDERIDQLSSEIAVLARQDPGCERLMSVPGIGPIISSAMVAAIGTGEAFSKGRDFAAWLGLIPKQISTGDRTILGKISKRGNRYLRVLFVQAAWSC

SEQ ID NO: 477161 - protein, 353 aa, unidentified
MRRPKDRLIAGFDLHSNNVMIGVINQDGQRVMHRKVGCDLDQVVGLLKPLKPQLQSMAVESTFNWYWLVDGLRARGYPIDLANPAKIEQYSGLKHADDKDDAYHLAELQRLNILPQAHVYDPQLRPVRDLLRRRTNLVHQRTALLLSFKSLYARTTGQALDLGEAKKMEPKEALKLYEHPANQLIAQVQAEHIQALDKSVSRIEKAVLGCAREIPIYEKLLTIPGIGRILGMTITMEVGDVKRFQTDGDFASYCRLVDAKRLSNGKCKADNNRKCGNKYLAWAFVEAANFARRYNEHCRRWYDRKAAKTSKVIATKALGCKLAKAAWHVMAGQCDYDPKRMFPELATQTMKPS

SEQ ID NO: 477162 - protein, 402 aa, unidentified
MNCVGIDVSKGKSTIAVMRPFGEVVVSPFEVCHTASELSELARLLKSLDGETRVVMESTGNYHAPVAWLLHGAGLYVSVVNAMLVHDYGNNSLRRGKTDKKDAVKLANYGLDHWLTLPRYVPEEDARLMLKTCYRQYQQYSKVQTMLKNNLISLLDTAFPDANRLFTSPPRADGSEKWVDFVAAFWHCECVCGLSKKAFTTKYQKWCRKHGYNFSEDKALDIYVSACGRFGVMPKTKTAKLLVEQAISQLKATSAALATLKQEMQSLAASLPEYPVVMGMFGVGPTLGPQLIAEIGDVRRFHSKKALVAFAGIDAPPYQSGQIDVRSRSISKRGSASLRRTLFLVMGVLLQCAPMDEPVYQFMNKKRSEGKPYRVYMMASANKFLRIYYASVKAYLDSLEHN

SEQ ID NO: 477163 - protein, 337 aa, unidentified
MEVYAGLDLHSTNTYVAMIDEENKVLYKQRHRNEVPAILSALDPFKKDIQGVVVESTYNWYWLVDGLMDAGYRVHLANVSAIKQYEGLKQVDDKRSSLWLANLLRLNILPTGYIYPKEERPTRDLLRKRLQFVRQRTSQVLSVKNILARNLGIRMKTYDIKKLKVSEVKALFPDKEMQVAVTSSVGLIQHFQEEIDRIEVIITKKFKIRKEFARLLTVPGIGQILGLTIMLEVGHIDRFPTVGDYSSYCRCIRSIRTSNGKVTGYGNSRNGNKYLSWAYIEAAHFARRYHEPIRSFYERKMARTNKIVAIKAVSHKLARASYYVMRDGVDYDQARFA

SEQ ID NO: 477164 - protein, 349 aa, unidentified
MHSTTVAVDLAKNVFELAVADSEGKIGERLRLNRARFSSFFVHRAPCRVLMEACGSAHYWARWIGAHGHAVQLLPAQYVRQYVRRNKTDRADAAALIEAARCAAIRTVPAKSLEQQQVLVLHRLRSQWMSTRHRYLNTLRGLLREFGIAVPLGVRVARTRIAHYLAQPPQELPAAIRPLLAQMLSEVKELEHHIEQIERDLTALTRADPVVQQLRQIPGIGLLSSTAIRAAVGDVERFPCARSFASWLGLTPREYSSGERRRLGGISKRGDVYLRTLLVHGARSALLAAHRQQRTGRPLDHLRQWALQCERERGHNVATVALANRLARIVWATWKHARAFDGNWACAAQ

SEQ ID NO: 477165 - protein, 421 aa, unidentified
MTRRIAGIDIHKNVLMVVVATVLEKEIDGGMEQQIEYEGRRFGSGTQERGHLVAWLREHQAEEVVMESTAQYWKPVWMDLELHFPKLHLAQAHSNKAPKGRKNDFADARRLTRRMAAGELILSFVPDAEQRTWRTMTRGKQQLVRDRVRLQNQTEALLEEMRIKLSGVVSDLFGVSGRRILEALAGGETHPEKLADLGDDRLKCGREALVDALTGHSESMHLQILKLSMERLKLLDRQIEALEQMAAGALKKHAAAVTRLAGVPGFGVDSAQQVIAEVGSDAKSFPGAGELASWVGTIPGSDVSAEQNHSSRSPKGNKFLRRIFTQAAQAAVKTKGCHFQNVFRRLVPKLGYKGAIWAIAHRLCRLAWKILHDGVSYIEQAAETTPQAKKRRAQRLTQALRRLGFQVALTPIAPKAEVAQG

SEQ ID NO: 477166 - protein, 330 aa, unidentified
MKKYDDVIGIDVSKLTLDAHIYKRGLHRVFSNTPKGYKALILWIDKYLGGQFYFLCFENTGHYSRNLSVYLSENIIDYVEENPLAIKRSTGIVRGKTDRLDAGMIARYAWLHKKELVLSTPKEQDIQELGRLLSFREQLVRDRTGKMSSLKEAQSLLSSPSTDSCCKIITKTIHYLTKQIEALEDRMKVLMNKEESLKKNFELLNTLKGVGLVLSCQLLYHTNNFKRFNSWRQFSSYCGVAPFEHSSGTSIKRRNRIHHIGDRKMKTLLTLASVSAIQCDKELKYYYKKKVAEGKPKMVALNNVRNKILSRAFAVVKRGTPYVPMQQFAA

SEQ ID NO: 477167 - protein, 353 aa, unidentified
MTSTKYIGMDVHKESISIAVRNDAGKMVMECVIETKANIILDFIHGLRGELQVTFEEGTWATWLYDLLKPHVTKLVVCDPRKNSRQGNKNDRIDARELADRLYMNKLNSVYHGGAGVRTLKELARSYLTISKDLARVMTRVKAIYRSWGIPCAGKQVYAPRHRAEWLAKITEVGVLRRAEFYYQQLDALRSLRHEVRRALLAESKKHKATKLLCQIPSIGPIRAALLIALIQTPHRFRTKRPLWKYSGFAIETHSSADYRSVKGQLHKSKKQVSVRGLNRDCNHDLKNLFKSAATIASVKPGPFQEFYATLLAKGMRPEMARLTLARKMATIVWIVWKRGVSFDAKYLKPQTA

SEQ ID NO: 477168 - protein, 347 aa, unidentified
MLTVYLHKQRKDMEFEFFIGSDVSKNELDFAVRKGKQLLFHVEIVNEPAAINAFLKELSKQPGFDLSKAVFCMEHTGIYNNHLLVCLHKKKANICLEAATHIKKSLGNIRGKNDKVDSIRIAEYAYEKREKLRMWAPKREIVQQLSHLAATRSRLIKVKKILKTPLKEAGPFVKKSIATQNLKVCNGTLNAIEIDLKKAEKEINKIISLDPELNRLFNIITSVCSIGGVIATQVLISTNEFKDIDDAKQFACMGGMAPFTEESGIFKGKGRVSHMANKKIKTLFHMAALVAIQYDPELKLFFERKVNRDKKNKMSVLNAVRNKLILRIFACVNQNRKYEKNYARLVA

SEQ ID NO: 477169 - protein, 426 aa, unidentified
MTNAHSIPDNAVLIAIDIAKARNDVLIEITGQKRRRRMVVQNTRAEHDRFIDLLRSFERPVVAGFEATGNYHRAVAWRLLDAGFETRLISSMALARTREAIHNGWDKNDPKDAQVILHMLRTGLSQYYQDPLAAGISDIQELSKTHEMVSKAKTETLHRILTHYLPLYFPEIERFRQNSRSEWFFAFLEQFPTPASIVALDKEAFVSAAWDVVGRKVSKARLIADIYETARESIALPIPIDSQAVVMFRMVLAEIRSLIRQRDAIEAKAEDLLGGQRDYEALKQVPGIGPINALTILAEAGDLRRFGHHRQFLKFCGLDLSTHQSGAFRGQTKLSKFGNARLRRTLWMAAQVAIRQKENSFREKYERYVAKDRNNADLKRKAFTAVTAKMARVVHAVIKSGNQYRPFFEGSAPSGRTLLCKGRGGA

SEQ ID NO: 477170 - protein, 423 aa, unidentified
MKFKAQEKQNQLIEKITAKHLVVGIDIAQQTHVARAVNFRGIAIGNPLSFSNDEEGFHNLLRWVQSLQASHTLTNNIVGMEPTGHYWLNLSKWLSDHQFEVVLVNPHLVKKNKENRDNTPSKSDKKDALVIADMVKNGYYSFIRSTPEEFEELRVYLSNRDSVVTRLVSAKNQIHRFVDIVFPELRQVFKNLMCTGSLATLRLFPTPEELRKLQPREIIEGWKSLMKRHSGERKARALIAPASSSVGSRQATNAYKLHLKQLLDEYDLACQQLSIVEAEIIAVLDRIPFAKSMLAVKGISAISLAGILGEAGDLSGFVHGNALLRHAGLNLAEASSGKWTGQMKISKRGRSRLRRFIFMMAMSLIANNPEFKAIHTYNVQVKKMKKMRSLMKLCGKLARILVGMARSNEAYNPHKTMSTQLAA

SEQ ID NO: 477171 - protein, 343 aa, unidentified
MQTITTIGLDIAKSAFQVHGVDAGGQVVIRRQLRRRHVLAFFQKLPPCLVGIEACASSYHWSRELQALGHTVRLMPPAYVKPYVKRQKNDSTDAEAICEAVTRPNMRFVPTKTVEQQSCLMLHRARHLFIRQQTAVINSIRAYLAEFGIIAPVGRRGVEQLLEVVADRADHRLPEIARACVAALGSQLRALKAQILEFDRRIIAWHRSSATSKRLDAIPGVGPALATALVASVADARAFRSGRNFSAWVGLVPKQNSSGGKDRLGSISKQGDRYLRSLFTAGALAVIRYAKIHGTRHRPWLTGLLVRRPAKVAAIALANKLARMAWAMMARGEHYNEPAALAA

SEQ ID NO: 477172 - protein, 408 aa, unidentified
MEILYSRCAGLDVHKETVMVCVLTPGAGAEPRKQVRQYQTTTAQLRQLAAWLQQCGVTHAAMEATGVYWKPVFNVLEPACELILVNARQVRQVPGRKTDKADCEWLASLLRHGLLQASFVPPRAVRELRDLCRMRASLVRECVQIGNRLRKVLEDANIKLDSVASDALGISGRDMIRALIEGEQDPAALAQLARGRLRSKKAALEEALEGQVREHHRFLMGQWMKLLRALEEQVAEVAREIERRMEGFAWAAELLMSVPGVDRTAACALIGEIGADMSRFPSSRHLASWAGLCPGNRQSAGHNRSGRSHRGNPWIKALAVQIAWAASRSKNTYCAALYRRLAPHRGKKRALIAVANSLLQAVWFILTRRQSYRDLGGDYFEQLHRERTTQTLVRRLERIGYRVALEPA

SEQ ID NO: 477173 - protein, 358 aa, unidentified
MNRKTGMNAGQIIGTIDGMQVVGLDIAKLVFQMHTVNMATGEIVNVQIRRAKVLERFANRVPCLIGIEACGGAHHWARALRALGHEVRLLHAQAVRPFVSGNKTDAADARAIWLAVQQPGTKCVGVKSLAQQATLTLHRQRELLMKMHTMQTNALRGLLYEFGAVFAQGSRALLGAVEAALESLSNKLPQMVADSLHEQVLRIKALGVDIAAIEKRLALQLRQDADMRRIAEIPGVGVLTATAAIATMGDPRAFGSAREFCAWLGLVPKQWGTGGRVRLQGISKRGDAYVRTLLIHGARSVLTHAKEPGPWLEQIQARRPANVVIVAQAAKMARAIWAVTARQQDYQRGYRSVRPQAA

SEQ ID NO: 477174 - protein, 410 aa, unidentified
MHHKLKYLYIGIDLHKRHHTAVMMTCFHEKRDEIQFENKPSAFPKFLQQVEKMAKREGLTPVFGLEDVGGYGRGLAMFLNENKYEVKSVNPALTISIRRSSPNNKKTDAWDAECVARILISNLDTLPTANPHDLYYAISQLVTRRENIVSVVTGIKLQLHQLLGYHYPSYKKFFSQVDGKTALAFWLKYPSPSCLSGVNVDELANFLYKKSNRYMSTKKAEDILSLVQQDGDTSKDYQEANDFLVRNVVQDLIIREHQLRQIDTALAKHLALLDYKLETMHGISTVTAAELIAEIGDISRFSSADKLANFAGIAPVQHSSGNKQKSKKSKLGNRSLYDIFYNLAIRQLGVSRAKKPNHPVYHAYHERKLAEGKTKWQAIICVMRKLVKVIYSMMKNKTEYKMPVLTEQAA

SEQ ID NO: 477175 - protein, 355 aa, unidentified
MTSTKYIGMDVHKESISMAVRNAAGKLVMECVIETKANMILQFFDGLRGELQVTFEEGTWAAWLYDLLKPHVHQVLVCNPRRNALLKEGSKSDKVDARKLADLLRTGMLRGVYHGEHGLRTLRELARTYQTLSQDLNRVMNRLKALYRGWGIACGGTQVYAPRYREEWLGKIEQVGVRRRAELLYEQLDGLQVLRRKLRPELLAESRKHKAAKLLRQIPAIGPIRAARLLALMQTPHRFRSKRQLWNYSGLGIETRDSAQYRFVRGQLQRAKKPQQIRGLNRNHNHEMKDIFKGAATRASCGMGPLRDFYVALLDKGMKPEMARLTLARKIAAIALTLWKKEEGFDAEQLKTQAA

SEQ ID NO: 477176 - protein, 404 aa, unidentified
MYNAVGIDVSKGKSTIAVLQPGGTVIRKPFDVSHTSQNLNELADYLSSLDGTTKIVMECTGRYHEPMVKVLSEAGLFVSIVNPHLIKNFGNNSLRKVKSDPADARKIARYTLDNWTELRQYSGMDNTRTQLKTLNSQFSFFMKQKVAAKANLIALLDNTYPGVNKLFDSPTREDGSEKWVDYAYSFWHADCVRKIGLKAFTERYKSFCKKHHYIFQQDKPEKLFNASKELVAVFPKEKTYKLLIQQSIQQLNLASEHVERLRREMNELASTLPEYSTVMGIYGVGKTYGPQLIAEIGDVSRFTHREALTAFAGVDPGVDESGQHKSKSNRASKVGSARLRKTLFQIMTTLLQNAPEADPVYRFLDKKWSQGKPYYVYMTAGANKFLRIYYGKVKECLRNLEQTE

SEQ ID NO: 477177 - protein, 405 aa, unidentified
MKFVYERCCGIDVHKKLIVACFRNGKKAELRQFDTLTRSLKELGNWLVENGCQMVAMESTSSYWKPIYNILELLNLNVIVVNAHHMKNVPGRKTDAKDAEWIAELLQHGLLKPSYIPNKEQRELREIVRYRKSMIEERSRELNRLEKVLEGANIKLSSFVSDLSGISSRKLLEQSLDGQVNEENIGDLIHSSMRSKKAELLDALDGIFSSTQKMLVRAILDHIDDMSRRIKELDDVIDQQMKGYEDAIKKIDEISGVGKRSAEVIVSEMGVDMSRFPTDAHLSSWAGLCPGNNQSAGKRKSSKTNKGNKHLKSILIQCAKSAKKDGKSFFHAQYQRLVVRRGANRATVAVAHSMIIAIYHMLKDKVSFKDLGSGYYTKFNPESKANYYLKKLQELGMSVPVSLPA

SEQ ID NO: 477178 - protein, 355 aa, unidentified
MSSEKYIGLDVHQATISVAVMDSKGRIVMESILETKAATILEFFAGLRGTLSVTFEEGTWAAWLYDLLKPHVAKLVVCNPRKNALLKHGNKSDRVDARKLAELLRLDSLKPVYHGETSVRTLRELARSYLTVVKDLTRVMSRLKALYRSWAIPCAGRDVYYTRHRSQWLAKIPQVGVRRRAEQLYQQLDMLQHLRQQARRELLAESRRHMITAKLRQIPALGPIRSALAVALIQTPHRFRSKRQLWTYSGLGLETRDSAEYCYVKGQLRRRKKQVSIRGLNKDHNHDLKGLFKGAATRASVQPGPFQEFYQRSLAKGIQPTMARLTLAGKIAAITLTLWKKGENFNPEKLKSQAS

SEQ ID NO: 477179 - protein, 426 aa, unidentified
MLAGCDGVRGKGCGLLFIGDDWAEGHHDVVVQDEAGQTLARRRLPEGADGIARFHELVASCWGEDGEPDPAQVVVVIETGRGPWVKALAASGYRVYPVNPKQGARHKETVAVSGKKDDFFDAGCLADMGRTRRHQVRELAADSDIAEAVKIAARAHQKLVWERTRHLLRMRSALREYFPAALEACAALSLSGPDALELLGRAPDPASAAKLTVPQITAALKRAGRRGDLTQRARDIQAALRAPHLAQPAVIAEAYAASVQAAAAVITALNEQVKVMEAKVSEFFRRHPDAGIYLSQPGIGDITGARILGEFGDAPGRYASAKARKNYAGTSPLTIESGKKRAVHARYIRNRHLIDALHAQALSALTASPGARAYYDELRARDIDHDDALRRLASRLTGILHGCVKTGCGYDEAIAWSHRASASQAA

SEQ ID NO: 477180 - protein, 349 aa, unidentified
MNLYQTQHQFYCGIDLHANKMYACVVDQAGNKRLHQNFHTRDTDTFLEKIKPFTHKPNNFVVGCESTFNWYWLCDLCEDRRIPFVLGHALYLKAIHGGKVKNDKIDSEKLAYLLRGGNFAVAYSYPQAWRATRDLLRRRTHFVRRRGQTLTHIANVHHQYNLPPTKKLQYASNREGVADSFTDPAVRFSIETDLAMLGDYDRTIRDLERFLEQSAKVHDANNFFRLQTIPGVGRIIAMTLLYEIHDIRRFHSVGRFLSYSRLVRGEHSSNGKSYGSPGKKIGNPYLKWAFSEAVPLFKRQSPQARAYCDRIEKKHGKARANSLLAVKLGRAVYSMLRQGRVFEINRIIR

SEQ ID NO: 477181 - protein, 338 aa, unidentified
MELYAGIDLHSNNSVVTVLDEQDRTVYAKRLPNDLGSIVVALRACAGEVRGVAVESTFNWYWLVDGLQAAGFTVHLVNTAAVKQYDGLKHGGDFSDARHLAHLLRLGILPVGYIYPREERAVRDLLRKRSQLVRERSSQILSIENLIARNLGARVSGNEVKRWDAKCIDAMELLDEQKQAVKANLVVMNCIDGQVVQLERRILAKVKLREDFKALKTVSGIGEILALTIALETGDIGRFAGPGNFASYARMVDSRRESNGKKKGVGNAKCGNKHLAWAFIEAAHFAVRYDAAIKRWYQKKCASNLSVVAIKAVAHKLARACYHVIKDGTPFDAAKAFG

SEQ ID NO: 477182 - protein, 428 aa, unidentified
MKYNTQNAKIESITEKTLIVGIDVGSETHYARAFDWRNYEYSKKPLEFSNNEAGFVTFKVWMEELAEKYGKDVVIPGMEPTGHYWFNLGAYLQDNGMKPVHVNPHHVKKSKELDDNNPNKNDRKDPKTIAALVNEGRFSYPYIPTGVYAEIRSLSNLRLQAQEEITRIKNRIARWFSIYFPEIKDVYKNPGAVSGLMILKVAPLPKDIVKLGVDGVNQIWRDAKLRAAGLKRAKTLVTAAEHSIGSQEACDSARIELKILLSDYEIYHQREEELMELIEEKLSEVPYIDKLLEIKGIGMKTVSGFVAEVGDIKRFDNPKQLQKLAGYAIVECSSGKHKGESHISYRGRKRLRYVLYEAAISLIARNTEFKEIHRYYQTRGKNSLKKMQSVIAVACKALRIFYAILTKGVTYDGAKMLQDIKRPQLKVA

SEQ ID NO: 477183 - protein, 419 aa, unidentified
MKPWTEITHYAGFDWARDHHDVVIVDRQGQIVADFRLEHSLAGWQEFADKIKDYPALAVAIETSQGTAVDQLLQRDCTVYPVNPLSAKSYRERKAPSGNKTDHLDGWSLAEALRTEGQQWKALHPLDALTQQLQLLCRDEISLIEQRTALVNQLQQALVEYYPAALQAFEDWTEPFCWDFVIQFPTPEKLALAGRRRWEKFLHTQKLWRPETASKRLEIFQHARQFCGSAPVTLAKSLLAVSLAKLLKALQLQLDQYRQQIEALFKQHPDHDLFGSLPGAAQTLAPRLLGEIGGPAHRFEDTATLQCVAGTAPVRFQSGQIHRVRIRYQCNKVLRHTVHLWAQCCLRVAPWAEVYYQQKRAEGKSHACALRCLGQRLLKILWKMIQTRKPYDADLHARHQKQHGSWVLALMKTQAKAGQ

SEQ ID NO: 477184 - protein, 322 aa, unidentified
MAMLSFCGVDVSKDRLDVIVLPEQQCSSVGNDAAGWSQLIEWLRGFSISAIGLEASGGYERGIMRALLAAGMSVRQINPFKLRQFAKASGVLAKNDRLDARMIASFVAVMPTHPVQRRAPAVERLAEMVTVRRQLSDEKIAAENASRMLENPMLQRLSRRRIARLAADIAEIDERLVEIVLSDASLAERYRLLTSMPGVGAVLACTLIALLPELGQLSRTKIAALIGVAPYDFESGKLKGKRCIWGGRTPVRNVLYMAALSASNWNPTLKAFHDRLAATGKKPKVVIVAVMRKMITMLNAMVRDNIVWADRYGVRHSVPNAR

SEQ ID NO: 477185 - protein, 435 aa, unidentified
MCYVDDIRLEQFRQLKKEIRGSEEYLIIGIDVAKEKHRAFFGTAQGKTLLKNVVFDNTIEGFEKLDAYVDRIKVQYSLRKVVFGIEPTADYHKPLAEHLLKCGLMVVLVGGAAVKNNRQLLNGRWDKNDDKDSANIADLIAQGKCMFYEYPLMTLQNVRVLNAVKRRLKKREHGISAYIRNHILAQYFPELDTYYGSSETLAVVRECLDPSAIAGMEYDDFCRTVAPGKMTLARERRVGAIWRTAVNSVGCTMGEAAFHEAQIAVDSLNQVRQEIKAIEDKLENACLEFPEYTYLLSIPGFGPDVSAKVLGAIGDPHRFTSGKQVLRLAGLDLCAKRSGKTSNRATPIISKQGKADLRCALYQAAFIASIKSTDFMPYFTNKLVGRAKEKGIGTKMRVKLAAKLLIIAWTLMKKKECFDSKYLKLEKRVERKAAA

SEQ ID NO: 477186 - protein, 367 aa, unidentified
MQNTIVHYEGAASLEAAATKVKPSGARIKIGLDVHARLYVAVAQYDHLLPKAALRLGPGEFVPWVKALLGRGHSVHVVYEACGFGFSLYRQLIAAGAHCYVIAPRKLDEERSRVKTDRRDATTLCQRLSRYLEGNTGELAVLRVPSEVEEQARHVSPQRGQLVHHRQKLQAQGRSLLISHALPAPAHWWKEQTFSRLGRHLPAWITTGLQTARPALLSLQQQIDTLTSELEASAPSILPRGVGKLTSVVLTREICDWHRFNNRRAISSYTGLCPGERSSGNKRVPGSVTKRGNPRVRAALVECAWRMVRFQPQYPPVQKRLAILSKGSRALGAVRKKAIVAVARRLAVDLWRLHTGRCTAEQLGLTI

SEQ ID NO: 477187 - protein, 348 aa, unidentified
MTLVGCDRHSRKQQVAVLDTTTGEVLEQELVHDGDAVERFYRALRPPVTIGIETTGYTQWFHALMHRLGHTVLVGEAGKIRAMVVRKTKTDRRDARHLLDLLKHDRFPTVWMPDPETRDLRALVAHRVRLVRMRTMVKNGLQAIALNQRLALRSALWTQRGLSQLRALALQPHTRRRRDDSLELLTWLTSRIDQLDEQIARVVDADSRARRLLTHPGVGPLTALTTVLVLGPIERFPDGKHVVSYVGLAPAINASADKHHLGKITKQGNALLRWVLGQAAPLAARADDDLRRRYFAVLQRRGRPKAKVALARKLLVRLYVMLRDQVDYDEFRRRGRLARAPHTAVAVT

SEQ ID NO: 477188 - protein, 339 aa, unidentified
MTVKTVGLDLAKDVFQIHGISAAGRKIFNKKIKRPKLLAFFEALPRCVVGMEACGSAHYWGRELSRLGHDVRLMPAAYVKPNVKRGKTDAADAEAICEAVRRPTMRFVEVKSEDQQAILALHRTRDLAVRQRTQLANMIRSLLREFGHVLRSGIEAVIAFAKRHLEGERPDMPDLASGILGTVCYQFLGVHERVEGYSKMIEKHALLDAGARRLMRMPGVGPITASAIVATIGNAKQFRTGRDLAAWLGLTPLTKSSGGKEKLGKITKKGDRYIRKLLITGMTSRALMGRKHPERIDIWSARILAEKPFRLATVAMANKSARIIWAILTKQQEYRQPTA

SEQ ID NO: 477189 - protein, 349 aa, unidentified
MRRTRFTSHPERLRAPATSPSAHSQDREIELSDTKTRNCAIGIDVSKPTLDAHALPAEDRASFDNSPEGHDRLIAWARALRPERIVLEASGGYETAVAAALAHAGLPVVVVNPVQVRRFAQALGVHAKTDRIDARVLAQFAQAIRPEIRPLQDELTVELDALVARRRQLQDMLVAEGHRRTRAKGAVRKNIDAHIAWLERQVKHVDGDISKLIQSSPIWREKEDILCSIQGVGKVTISSVLGGLPELGTLSRQAIAALVGLAPFARDSGSWRGKRFTGGGRADVRRALYMAALVASRHNPALRVFYQRLLARGKPKKLALVATMRKLLTIMNSMLRTKTRWDERRFSAA

SEQ ID NO: 477190 - protein, 426 aa, unidentified
MPNCLFIGVDVALKGNQFCVMNFDQHVYFNLKFPNNPEGNNMVIDKIKDIEDKFFFEKIIIVMESTGMYSFHPACYLSSNEYLNNFHTEVYQINACDFDKYKKSFHDLEKEDGIDAYILADYARVGRTKSLYPFRGSQYIALQRLTRQRYHICKELIREKTYVMTNLYLSFSGLLSLNKNELPFSNMFGATSSAILEEFISPDQIAESSIEELMDFISSKGKNHTKNPESKVTALQKAIRSSYRLDQTAYEPINIAIASSINTIKFHQEQLKNIDKSILNTVLGLDSNVYNILLSIRGIGKVYAAGIMAEIGNIDRFPHNSKLAKYAGLYWKRNQSGEFDSQDKKSSKKSNKYLRYYLVEAAASCVRQGFPFIKDFYSIKYKEVTKHQHKRALVLSARKLERLIFGLLRKNQYYKPLNSVQNSKNI

SEQ ID NO: 477191 - protein, 421 aa, unidentified
MTRLPTEEFAAFIGIDWADAKHDICLQAAGTAKRECSILDHQPEAIDEWVSTLRTRFKGQPIAICLELNKGPIVSALRQHDFLVLFPVNPLTLARYREAFTPSQAKDDPTDAELQLELLLKHRDKLKPLQPQSSTMRALEQLVASRRRLVDDKVRLTNRLTSTLKNYFPHALQWFQDKDTTIFCDFLTQWPTLKAAQLARRSTLERFFRDHHVRYTEVIHQRLHAIKSATPLTTDEGVITPNALLVQALVTQLRALLHAIEEFDKAIAQRAQSHPDFPLFDALPGAGAVFAPRLLVAFGEQRDRYASADELQKYAGIAPVTERSGNKAWIHWRLQGPPFLRQTFVEWAAESTRHSFWARAYYQQQRNKGASHQAAVRALAFKWIRILFRCWQTRTPYNEAIYLNALERRGSPLLHNLAHTA

SEQ ID NO: 477192 - protein, 365 aa, unidentified
MTSLVGLTNVRDFPVPRHASAKIEVCVHVQPTRKGEVMGDVTTIGIDLAKNSFSVHGVDATGAVVLRKTVSRARLLEVLMSQPPCVVGLEACSGAHEWARRLQRFGHCVKLMAPRFVAPYRKNGKNDGNDAEAICEAVSRPSMRFVPIKTVEQQAVLCLHRVRQGFIEERTATINRLRGLLAEFGVVLAQSTAAVRREAEAVLERLPPHAARALRDLLEHVRLLDARVRDYEHSIEAHAREDQAAQLALKRQGVGPITASAIAASVGDAREFKNGRQFAAWLGLVPRQHSTGGKQRLGHITARGDPYLRTLLVMGARSVLQRAVGKDDPLSPWALAVRARRGYHRACVAVAAKNARVVWATLSRA

SEQ ID NO: 477193 - protein, 360 aa, unidentified
MQTEITKDSFNGQSFYVGIDYHKKSWKVTILGEQYEHKTMSQDPDPGILAAYLKRNFPGANYHAVYEAGFSGFESCRKLNQLGVNCIVIHPADVPTSLKEKLQKTDTADSRKLARSLRSNEFEAVHIPDPGLEADRALVRQRFRLVKDVSRTKNRVKSLLFQFGIQVPDRFTSAQTRHWSKVYINWLKELTIDQQSLKQVVDNYIKIGESQRNDLLMLNKQVRGLSQIERYRNNYKLLLSVPGIGLMTAMTFLVQLGDVGRFERFDDLCNYIGLVPKMYGSGEKMQVGKMIHRGRKELKIMLIEASWEAIRKDPALMLKFNELSKRMHKNKAIVRIARKILSRIRFVLHNQQPYELSVVK

SEQ ID NO: 477194 - protein, 407 aa, unidentified
MEVIHPRCAGLDVHKETVVACVRIAGNGAPLQEVHTFATTTSGLLTLADWLGSFGVEQVVMEATGVYWKPVWHVLEGHFELLLANAAHVKNLPGRKTDVNDAMWLADLLAHGLIRASFVPPVAVQELRTLTRTRKQFVRERSAHVQRIEKVLEDANLKLGVVLSDIMGLSGRAVLQAIIDGHDDPEHLAALVSVRVKATRSEVREALRGHVSPHHRFMLKLHLDHIKTLDAAITTIEQEVGVGLEPFRAAARLLTTMPGLSAVSAHVVVAEIGIDMSRFATPGHLLSWACLCPRNDESAGKRRSTRLRRGGNWLKTTLVQAAWAAVRVKGSYLQAQFHRLRARRGAKKAIIAVAASMLTAAWHMLRDGTEWQDLGAAHFDHADARKTANRLIRRLQQIGYVVTATPA

SEQ ID NO: 477195 - protein, 343 aa, unidentified
MYYIGLDVHKRTISYCVKDAAGKIHQEGKIGSTRRELDAWVKTLPQPRMIAMEATIFTGWIYDHLLPHAEKVKDTHPLMLRAIAAAKRKNDKIDGSKIADCLRCDFLPECYMTSTEIRDRRRTLRYRGLLVKQMVQMKNRVSGLLLEKGVTHTKQRLHKVGYFAELMSSNEEIDQSIRPLLKLSREHIVRAQKLEYALVSSLERDPLLTERLKRLRTVPGVGPITALTWALEIGDVSRFRSIKQAISYCGLCGAERSSADKVARMPISKQRNKHIQHVLVEAAKLAPRQNHELALIYEKEIERGNRNRATLAVARKIVAYLLAVERKKQDFVPAEKFGGTVAA

SEQ ID NO: 477196 - protein, 446 aa, unidentified
MDVVFPRCAGLDVHKKSITACRLVPDPTGQEAEGLAELREFGTMTLELLALADWLTEASITHVAMESTGEYWTPVYNLLEGTFTVFLVNAAHVKNVPGRKTDKADARWLAKLMRFGLLQASFIPPQGQRDVRDLTRYRTKLVQERVREVNRLQGVLERANIKLASVASDIMGVSGRAMLEALIAGKADPATMADLAKRRMRAKLPLLEQALTGVVRDHHRQLLAMQLAHIDFLDEQIAALNTTIETALRALDADAQPSPPSVPGAPARRAPALADSAPLTFTHAVELLDTIPGIDQRGAEVIVTEIGIDMSRFETAPRLAAWAGVAPGNDESAGKQRSGKTRKGNRALRAILTQLAHAAVRTKGTYLSALYQRLAARRGKQRAIIAVAHSIMKSIFYMLSRNVPYHELGANYFDARRRHYTVDRLARRIEHLGYRVHLEPVTAPAA

SEQ ID NO: 477197 - protein, 370 aa, unidentified
MAQSRTLFIGMDVHKDSSAVAYVAPDHGAEVTYLGALGTRQCDIDQLVRNMPSKATHLLCVYEAGPCGYWLYRSLTQKGYACWGVAPSLIPHKPGDRVKTDRRDAWQLARLARAGALTVVYVPQVEEEAIRALARAREDAISDRKDATVRPQAFVLRQDSRDVGRANGGPAPLRWLSAVVCPPPAQHIVFQAYGHAVQEPPERLQRLEQALQAQVKSWRLHPVVEALQALRGVPCPVAVTMVAAIGDLTRVDTPRELMTFLGLTPAEYSSGERRQQGAMTNAGNTHARRALGEGAWASRSPAKVSRPLQLRLEKLPKVIQDIRWKAPGRLGQRSRRLVSRGKPAHVVTVAIARELVGCMWASAKQVPVTA

SEQ ID NO: 477198 - protein, 397 aa, unidentified
MYIVGIDIAKRKHEAAVIDGEGTVIIKPFSFTNNCSGYNRLLAMLAKAKLPLDEVSFAMEATGHYWLALFTRLQKEGFRVQVINPVQTNSIRSFYIRQAKTDPRDALLIAEVIRFGHFSESTLHPENIYELRELCRGRHAIVSMQADVKRKVVALLDQVFPEYETAFTNLFSDTSMAILQTCPTPKELSEMPLEELCHLIEVSSHKRFRMAKAQELQVLARNSFGFAMAGDVFSTMIRLYAKHLDFLKQQVREMDCKIAEIMDTLDTPITTITGIGPTLGAYILSEIGDISRFSSAAKLAAYAGIDPTMRQSGEYNGVRNRMSKRGSPYLRHAIWLAASSAVLHDPALKLYFQKKRDEGKPYMASVGHACRKMVSIIYAVMRDNKAYTPYIPNEISA

SEQ ID NO: 477199 - protein, 342 aa, unidentified
MEISTIGIDLSKTTFHLIGLSPRGDIVLRKKLSRKQLLTYTATRKPMLIGMEACAGAHYLARALRDQGHDARLMPAQYVKPYVKTNKNDYLDAEAIAEAVQRPTMRFVPIKNDEQLDLQALHRVRDRWVARRTAVMNQIRGFLLERGIAIRKGPSYLVTQLQVIFTEGDSSFSGRLLHLIRELKHEWDELERKIEEASAELARIAKKDDGCHRLMEVPGFGPIVSTALVAAIGNGISFRKGRDLAAWLGLVPRQHSTGGKTRLLGISKLGNEYLRRMMLHGARSVVMQMERKPSALGEWLTRLSERRHRNVTVVALANKMARIAWAILSKGTHYSAPAFVAA

SEQ ID NO: 477200 - protein, 342 aa, unidentified
MNIAVVGVDLGKNSCSLVAVDDKGAVVKRRRMRRESIAVFTAKLAPCIIAMEACCGAHHLARRLKSQGHDLRLISPEYVRPYVKAQKNDDRDAEAIAEAATRPTMRFVEVKSEEQLDMQTLHRARDRLVSERTALINQIRAILWERGIVLPQGRRPLERELARRLDEGLALGDRMLVLIEEMRAEWRSLDQRIAAFDTEFAAQAKQDDRVRRLLSVPGIGVMNATALVAAIGNGEAFKRGRDLAAWLGLVPKQRTTGGKPKLGAITKRGNRYLRKLLIHGARAALPWLVRGQTALGAWLRRLLARAHTNTVVVALANKLARIAWATLQRNQDYDANMAAKAA

SEQ ID NO: 477201 - protein, 306 aa, unidentified
MHKKIVVAAIIVPDPAGGWYKETRTFGTMTIDLLALSDWLTSQGVTHVAMESTGEYWKPVFNILEANFEVLLVNAQHVKAVPGRKTDVKDAEWLAELLKHGLLRASFVPPEGQRDLRELTRYRTTFVRERATLVNRVHKALESANIKLTSVATDAMGVSGRAILAELIQGQATPEQMADLAKGRLRTKRDDLTKALEGRVKPHHRFVLTELLCQIDNLDEALARFDEQIQEYCRPFEEAVQHLDTITGVARTTAEIIVAEIGTDMSRFPSADHLSAWGAWHPATTRVRANAARARCGPVIKRCVPR

SEQ ID NO: 477202 - protein, 354 aa, unidentified
MNTTQVFEKRKIAVAIGIDLAKDHCDVVAYNADNKICFTKANWAYPHLMEWLANAQPAVVLMESCKGCHVRARDIADLGHDTRLVKGADVKALRNVCQKNDIRDADYIARLLYVPGTKFVFVKNQRQQSLQFLQNEYKSIQELRIQVGNQIHAGLEEFGCPGPKSKKFIQSRMMAHLEKNAEPIPDEVMSSFLRRREMWLNLFEQEEEAKKRMEEIAKTDDDAQRIMTVPGVGAQTAVGMLVHIGGDIGRFKNSGQFAASIGLVPKQNSTGGNTTLNGITKCGPKRLRANLVQCGQVILMHADKLKGNFGDWVRKLRDSGKKRGVIVCAIAAKIARIVYRLMKDKVDYTPVPSR

SEQ ID NO: 477203 - protein, 439 aa, unidentified
MPTPSLLLLDPSAAAIDVGSEQLHVSIAGGPPKVFGTTTGELYALRDYFLAQGVRSVAMEATGIYWLCPYEVLEKGGLEVVVVNGKYVKNLPGRKTDISDCQWQATLHAHGLLKSGFVPPAHIRRLQDYLRLRSDHIVMAGSHEQHMQKALERMNLKIHDVISDLTGMSGLKMVQAIIAGQRNPVALLALCDPQVQKNKAGLLRPALEGNWKDEHLFALRQAHELWQFYQKKIAECDQVIAEVLKAMAGPEDPGNPAPPANKRGGVNSPQIAGLHGMLWRLCGSKDPTQLPGVADYVLLQLLSEVGTDLAKPWKTEKHFTAWLGLAPGSRQSGKRRGSQRRSRNRAGRLFCVIARSVGRSVDKALGGFYRRLKGRKGGLVANLALARKLAELFWRLMVHGISYVEQGLKKYEARVAQTEQGLLQKLARKYNMVLQPKTA

SEQ ID NO: 477204 - protein, 344 aa, unidentified
MDNHTQYSGFAGVDLAKKVMQIHFVTGDGEITDKQVKRAEFLDFFRNRGKCLIGMEACGSSQDWARKLEAMGHEVHLMSPKAVKPFVSGQKNDHNDAIGIYKAMFNGVRRVPVKSTEIRDLQTLRRIRSQVTKDKVKEINHVRGLLAEYGIVMGKSITAFNKGIFSALESLKERGDVSPLVAEELQTTVESIKTKIERQKRLDREIEQLARGCKNYENFLKTPGVGPFTAAMLCVLLCDPAIFANGRQFAAYIGLAPRSRGSGGKNFIIGIPSKFNCDSESRAVFVECAQAIARCKNKSLWVEEILRRKPKKVALIAIASKLARQVWAMANKGESFKQMAVLTA

SEQ ID NO: 477205 - protein, 429 aa, unidentified
MTRISAGVDVSKNRSTVCIIDQDGKVIMRPFLVWHSTEELDFLADTLKRLNGEVRVIMESTSIYQYPIALHLKEKGIFISIVNAYKVKKFANTDFRGGKTDKKDSRTIASYGISYWDKLVEWQIPKDTYFNLDLLNRTYMNAKKHRQIILQELQHYIDCAMPGMDKELHSLNLNTKKDFMLDFVEKFWHRDKIVNMTEAEFTEVFTAWAKEKGYRPGKGKAAKIYAIAKSCIPYYPANPTVKTILQCIVDKLSGVNRTLVTIVTQMIEEAKKLPEYQIVREMPGVGDPLAARFFGSAGDIRRFKNSKALVAYAGIDSPPDESGDFSSTHRHITKKGSKVFRDTGYEIMMALRAQKRTWEKVRKNPDVYDYMLRKEAEGKPPKVAKIAALNKFLRIIYARIKELYDNMALAERAKTKTRSKTRAKTKVTA

SEQ ID NO: 477206 - protein, 341 aa, unidentified
MKIRSIGIDLGKTTFHLVALGERGKILLKKKLSRKQLLALTANLPASLIGLEACSGSHFLARALREQGHDARLIPAQFVKPFVKSNKNDFLDAEAIAEAVDRENMRFVPIKTDDQLDLQALHRVRERLVSRRTSVINQVRAFLLERGVTFRKGPAMLRRQMPEILENADEQLSTRIRGLLAMLWQEWKELERQIESLNSDIEGTCRDDAACQRLQQIPGVGPLIASAVVAAIGNGAAFRKGRDFSAWLGLIPKQYSTGGKAKLLGISKRGNPYLRKMFIHGARAAVLRLRREGTLIGKWMDGLEARAPRNVLIVAMANKLARITWAGLSSGESYRPATLAA

SEQ ID NO: 477207 - protein, 436 aa, unidentified
MDDVEDEPLFAERVAGIDIGKAAIMVTIRVPSDTRRGRRQQETREFRAVLKDLLALAGWLGCWGVTRVGMEATGDYWKPVYFLLAREGFDCVLYHASQVKVLPGRPKTDRLDSVWLAKITERGQLPGSFVPPEDIRRLRTHTRYRRHLIQARTAEKERCEKLLEDAHLKLSSVIRDIHGVSGRDMLTAIIAGQRDPHVLAQLARGRMRIKIRELEEALDCSFFTEQHAFILQMMLANIDYLTRQVDELSAKIQALCEPYARQIAQLDGIPGFGVITAQDIIAETGADMTVFPTAGHLCSWARQAPQVSQSAGKRKGKNATGRGNPYIGAALGEAAIGAGRTQTFLGAKYRRLVRHMPKKKAQGAIMRTQLVICHALISDPDAACEDLGTDYYERRQDIRRRARNHVRSLERLGYMVTIEPLSPDPGTGELPTTQAS

SEQ ID NO: 477208 - protein, 348 aa, unidentified
MKKSTTISVDLAKSVFEIAVSDHPGRVRERHRLSRAGFQRFLAQQQPTTVLLEACGSAHHWGRELQSLGHRPLLLPPHEVRRYVRRNKTDRADAKGMLEAYRNEDIQPVPVKTTGQQALMALHRTRSAWLATRTARINLARGLLREFGVAIPLGPHNVLPRIAALLADPPDELPAPVRPLLEALAAEIHDLEPRIRSVELQLRTLARDTATVGRLMTIPGVGLLTATALVAFVGNASRFHSGRRFASYLGLTPKEHSSALRRRLGAISKCGDTYLRTLLTHGARAVLRAAVVSAGHGKPLDRLRAWAVQLQHKRGHNKATIALANKLARIAWAVWVHDEPFREVPTTA

SEQ ID NO: 477209 - protein, 310 aa, unidentified
METKVFVGVDVSKDSLDVAIGPGKEIITFTNDQKGVDALIKKLSRICPELIVLESTGGYERLATSSLVEAKLPVVIVNPRQVRDFAKSAGILAKTDAIDARVITRFAAAVKPDIRQLKDRETSELTALVTRRRQIVEMIVAENNRLKLANKRNEKDIKDHIRWLEKRIDKIESDIGKMIKNSPIWRCKDDILQSVPGIGPTTSAILICDLPELGFLSQKKIAMLAGLAPLNCDSGKFKGRRRIWGGRAAVRSGLYMATLAAIRCNPAIKGFYKRLTAAGKCHKVAATACMRKLLIIVNAMLRDQTLWEQN

SEQ ID NO: 477210 - protein, 429 aa, unidentified
MIMGFTKPIEHFNLQRKKVITMNTLYVGIDVSSKSNVVYLMLPNGDKHSNFSVANSHTGSSQLVKRILSVLTSHSLDTVLIGLEATSVYGDNLVYFLREDATLAPFNRKIHVLNPKQVNKFKESYNDLPKNDWIDSFVIADCLRFGRINKEVYIGDYRYKALQNLTRARYFAVSNLIKEKQRFMNILFKKYSTMTQEKVFSDTFSTTALAVYDEFESAEALANMDLHELTDFIMEKGKNRFPDPDAVAKAIQKAARSSYRLPKTMNDSVNQVLSISITSMKALESQIKEFDKAIKAQMELLPNVLISIPGIGPVYSAGIMAEIGEIDRFNSQAALAKYAGLAWKQHQSGGFEAEVTRLIPSGNRFLKYYLCEAAFSLVRCDKEYSDFYHLKYKEVNKYQHKRALALTARKFVRLVFTRLKDNRLYRPAE

SEQ ID NO: 477211 - protein, 338 aa, unidentified
MALYCGIDLHSTNCWITIIDEDRKVVQESKFGNDLAAIMVFFEPYRTELEGIAVESTFNWYWLVDGLMDAGYRLHLTNTCAIKQYDGLKYTDDRHDARWLAHLLSLGILPEGYIYPKQERAVRDLLRRRAFLVHKRTSFLLSMRGAFECRTGMRTTSNDIKKWTPADVEQHIADPLEALGVTCLLKPMATLSEQVKILEKEALKRGNLRAEFSGLKTVWGIGKVLGLTITYEVGDIGRFAKVGNFASYCRLVKSNRLSNGKPKGSGNSKNGNPYLSWAFSEAAHFAVRHHEPAKRFVQRKRAKTNGIVAIRALAHKLARASYYVMKDKVDFDPDKMLQ

SEQ ID NO: 477212 - protein, 361 aa, unidentified
MSSITTFVGLDYHQDSVQVCVLDAQGKQLLNRSVSNDANVIQRVATQHGTPTRVAIEACCGAADLAEELATRRGLPVELAHPGYVARLKRSPDKTDLGDAQLLADLARVNYLPRVWLAPEATRQLRRLVRHRTQLVRRRTDVKLRMRALLRENRLRCPDARAWTKAWLAWLTEQAKLSTSDRWLMEDHLAELRSLTERIAAVEQKIATATSDDPVVAQLLNLSGVGLVTAATLRAEIGRFERFDTGKQLARFCGVTPRNASSGARQADAGLIQAGNPELRKVLIELAHRLIRMLDPKWGQLAAGMLQRGKPKNVVVAAVANRWVRWLHHELRKETTIKSESTSARARQKGAAPSIFTVAST

SEQ ID NO: 477213 - protein, 391 aa, unidentified
MIFVGIDVAKDKHDCFITNTEGESLFKPFTISNNLNGFNELYLKIESVMEDVSKVKVGLEATGHYSYNLLGYLLDKGFPTYVINPLHTNLYRKSLSLRQTKTDKVDSRTIASMMMSDVNLKSYSDTSYHNEELKSLTRYRFDKVKERSALKVSLARLVCILFPELEKLVPTLHIASVYALLYEFPGAKHVASAHLTRLTNLLETASKGRYRKDVAITFRNAARNSIGSNMPAKSLELKHTIKLIQELDAEISEIENEIQSIMDEINSPILSIPGISYKMGAMIIAEIGDFSRFDSPDKILAYAGLSPTTYQSGQLDSSHSRMEKRGSRYLRYALFNATKYVCLWDPTFASYLSKKRAEGKHYNVAISHAAKKLVRVIFQLEKSGKQYIKAI

SEQ ID NO: 477214 - protein, 330 aa, unidentified
MNWIGVDVGKVHCQICEISSTGEIWEARVPTQAERLKAAFQARPQARVLVESSTESEWVARILEGLGHDVVVADPNYAPMYSHRSRRIKTDRRDARALAEACRVGAYRAAHRTSDPRRHVRALIAVRENLVRTRTRWILLTRALLRREGFRTRSGHAESFVERVLELQLSADLKDEVESLLELLGPLNDQIDDVDAQLARLATTDPAARRLMTMPGVGPIVALAFVATVDRVDRFTSAHQLESYLGLVPREWSSSETQRRGPITKTGNKRTRWLLCPNSPRRDAEAESANDATALGVGRPDWPTTQRSRRRSCGRATRRRHSVRDVARRH

SEQ ID NO: 477215 - protein, 528 aa, unidentified
MMYATMTSSSGSDHRWHDGKRLHLLAALLRKRPLTKIGAPMPCCMTANTQPAPRSSRREPIRQAARGGGDFRLRHFSFGSANYEAAAQPGLPRAVFRYVQPSTHSEGVMLLANTTRLYVGTDISERVNRTRFYDARGGEVGGRVESQNDLPGSSGLAGEALSRAALCDAKEILWGLEATNLFWWHLATFLTTHPDLLAAGLKCYTFNPRQVKKFKESYPDIGKDDWTDAMVIADRLRFGRLPAECYLDERYQPLQRLTRYRRHLVTQLVREKQLALGYVYLKLSAYSLEKPLSDTFGAASQELLEGYLTPDEIVATPIEDLAALLKEHSRGRVADPEEVARVVKQAANRSYQLPKGMVEPVNLILSSSLTTVRALKGQLKPIEKAIATELAAVPAQTLATIPGLGPVFTAGIVSEIGDVGRFEREESLAKFCGLTWRRHQSGEFEGEQRPLTKTGNAYLRYYMVEAANSVRTSCPEFGSYYNKKFKEATRHKHRRALVLTARKLVRLVHSMLRSGRIYQPPGTRRIPL

SEQ ID NO: 477216 - protein, 400 aa, unidentified
MISVGIDVSKGKSTVCILKPYGEIVSKPFNITHTHKDLSELSSMLFRLNDEVKIVMEATGIYHLPILTYLQEKGFFVSVINPYLMKSYRNESLRKAKTDKIDSRIIANYGIDHWFKMKEFQTSGEIYEELKLLGQQYQHYMKLHLLSLAELTHLLDLTMPGIKNLLASWNETNRKDKRSDFVERFWHYDVITSMSEQEFTEEYILWAKEKKYVPSQEKAKVIYTLAQESIPTLPSETSSVKMLVTEAVRVLKEVDATLGLILSRMQEIAKTLPEYSVVREMGGVGNTLAPKLIAEIGDVRRFRNGKALVAFAGIDPPPYESGQFVGCNRKISKRGSASLRKVGYETMRSLKMRSRPEDPVYRYVVKKESEGKSKKSAKIAGLNKFLRIYYARVTELYKNI

SEQ ID NO: 477217 - protein, 370 aa, unidentified
MQIRSFVGLDVHKATISISIADEGRSGLVRFVGVIPNTAEDVAKMARRLSRHGELDFCYEASGCGYGIYRQLTELGHRCTVAAPSLIPRKPGERIKTDRRDSEKLAILHRSGDLTPVWVPDATHEALRDLVRARVDASMHLMRARQQLLAFLLRHGRTYATGKHWTQRHRAWLASQTFQQEVHRIVFQDYVETVWTAQERRDALIERIAAMVASWSLGPLVEALRGLRGIDLISAATFIASTGDLSRFQSPRLLMGYLGLVPSEHSSGGTIRRGGITKTGNREARRMLVEAAWSYQYPARVAKEKAEILVRLPKDVRDIAWKAQTRLCARYRKMIARGKKPTVVVAAIARELAGFIWAIGHEMRITMAAG

SEQ ID NO: 477218 - protein, 425 aa, unidentified
MPYRIAGIDVHKKMLAVVVSDVEIDNEYQFERRKFGGNPEQLRLLAAWLLEQEAEEVVMESTAQYWKPVWEVLERYWKPTCEKRAGARRKSGKLHLAQALSNRGRRGRKRDFPDAERLVKRLVAQELTLSFVPDAEQRLWRTVTRKKYQLRCDRIRLQNQLESLLEEAHIKLSSLVSDLLGLSAQRMLKAIAEGETNPATLAALADKHLRATPEQLCDALGACTQLHPVYRRLLKLGLEELRLIDDQIGQLDREMASLLSAHQDAVQRLAEIPGLGADSAQQIIAEVGATAATFPSEKCLSSWVGACPGDDETAGVNRSHRSPKGNRQMRRILNQAANAAARTKGSIFEIVYRRSVPRLGHNQAIGVIAHRQCRLIWLILHQGVRYQERGPAVTKRSKQLRTWRMIRQLRSLGYRIEPPTPQPQP

SEQ ID NO: 477219 - protein, 335 aa, unidentified
METVYFLGIDISKKTFQTGLTLDGINMVEKEVENDPRAIKLYFQGLKEKFRFSNRQLIVCLEHTGIYGLPLLHYLTKNKIKVCVEPALQIKQSQGMTRGKSDLVDARRIAQYAYKNRHELRFWAPQRTSIQKLQALLVLRERLVKIKGQIERPVNETREFIEESIQRIIHRSCQNSINALTKDIIKVEKEIQKLVEKDSQINEQFQWAVSVPGIGKITALNIIISTGEFQRISETKKFACYAGVAPFEHTSGSSIRGKTRISKIANMTLKKLLHLAAMSAIQCSPELKAFYQRKVAAGKNKMSVINAVRNKLISRVFSCVKDKRMYQKDYKHALV

SEQ ID NO: 477220 - protein, 351 aa, unidentified
MVYIGVDLHRKKSQIAAIDEDGRLVLNRKVRTGPGEMHQLIDELRPQPIQVAFEATFGWGWFADLLSELGIEAHMAHPLATKAISSARVKNDAVDAKTLAHLLRTNLLPEGWIAPPAVREARRLVRMRAALVRVRAKLKAQVHALLGEHGVQPDVVDLFSNKGRQLLRELQMPAISRSRLKACLRLIDELSLEIVIAEREIYQTIQEDERVERLLPIPGIGPIIAATILSEIGDITRFSSPDKLCAWAGLTPSEHSSVDNVRRGHISKQGSRWLRWVMVEAAVHAFRDVELRQLFIRIAHRRGAKIARVAVARRLLTLVYYALRSKTGCRSYPISSNPKVEARSMAVTASH

SEQ ID NO: 477221 - protein, 389 aa, unidentified
MFYLGIDIGKNTHVASLIDSRKKVLFKAFSFSNSIDGAESLICKLEPFKNQLEIGMEATGHYWLSLYSYLSEKNFTVHVINPIQTDGWRQGIEIRKRKTDIIDSLLIADLLRYGDFVETSLSNEDYLSLRNLSRFRSYLISSIGDLKRKTIALLDQVFPEYASSFSNIFGKTSKEILANFSSPSDFEDINSEDLQSFLDNVTMKKFAARKLEELSKKASKSFGINFCMDSFSLQIKMLIGQISFIQNQVLDVEKEIKSLLEKLNSPITTIPGIGAVNAATILGEIGDIKRFSNPSKLVAYAGLDSTVYQSGKFESTSNHMTKRGSPYLRRALFQSALRAEFCDPVFSDYYQKKITEGKHHLVATNAVARKLVHTIFAVLTKDEPYQVQS

SEQ ID NO: 477222 - protein, 347 aa, unidentified
MQFYTTQHPFYCGIDLHARTMYLCILDQAGETLLHRNMTATPEALLKAIAPYREQIVLAAECMFTWYWLADLCAEHGIPFVLGHALYMKAIHGGKAKNDKIDAHKIAVLLRGGMLPQAYVYPAEMRATRDLLRRRMHLARKRGELLAHVQNTNSQYNLPAIGKKIAYKANRDGVAERFADPAVQKSIEVDLALITYYDALLRDVELSIVKTAKHHDANTLYLLQTVPGIGKILSLVLLYEIHDIARFPRVQDFASYCRLVKCAKESAGKRSGTSGTKIGNAHLKWAFSEAAVLFFRDNPAGQKLLTRLEKKHSKGKALTILAHTLARAIYDMLKRQTAFDLETFLHA

SEQ ID NO: 477223 - protein, 309 aa, unidentified
MDTGSYIGIDVAKGTLDVAVDGGAQWQVDNDRRGRERLAHQLSRRSPALVVVEATGRWGRQVAAALAAAGVPVAVVNPRQVRRFAQAGGHLAKTDRLDARVIARFGWAMQPRLWTPPTPEEERLEALLTRREQLLKMLVAERQRLEEAPAVVQGLIAGLVEELEQRLAVLERLLDEAIAEAPVLAEQERLLRSVPAVGPQTARTLLVQLPELGTLDRRELAALAGVAPFNQDSGRHRGKRRIWGGRAGVRRTLYMAALVATRFNPAVRPMYQRLLAAGKPKKLALLACTRKLLTILASVARRQTAWYPA

SEQ ID NO: 477224 - protein, 350 aa, unidentified
MENIALIGIDLGKNSFHIHCQDHRGKAVYRKKFTRPKLIEFLATCPATTIAMEACGGSHFMARKLEELGHFPKLISPQFVRPFVKSNKNDFVDAEAICEAASRPSMRFVQPRTESQQAMRALHRVRESTVQDKVKTTNQMHAFLLEFGISVPRGAAVISRLSTLLEDSSLPLYLSQLLLKLQQHYHYLVEQIKDLESQLKRKLDEDEVGQRLLSIPCVGTLTASTISTEIGDGKQYASSRDFAAATGLVPRQYSTGGRTTLLGISKRGNKRSELCWFSVRYSYKTGTPVWQVGRLGQGVVVSEKQLCRHLCSGKQAGQNSTGTDGATANLRSIKAEIHQFKQSFIWFCEY

SEQ ID NO: 477225 - protein, 346 aa, unidentified
MEYITMDVHKKYTWARVENTQGDRLYESRLAHSHGTIKNFVSRWTAGSPVAVETVGNWYWVVDEIEAGGGKPQLVNARLAKLMMGMVNKSDKLDAKGMNRLQRTGTLPTVWIPPSSVRDARELPRTRMVLSKQRTQLKNRVHATLGKYGFVVEEVSDAFGKKGRQIVAQLMAKLPPHTEQALGRVLDQLDHVCANLKWIEEKMMEVFAPCPQTTWLKTLPGVGDILAVVIWTEIGTIERFGRAEQLASYCGLVARENSSGGKIRFGAVRRDVNVYLKWAFVEAANSALLNAERCGYHHIRRLYQRIKPRRGHGKAKVAVARHLSEASFWMLKKGDSYREPMSSTQR

SEQ ID NO: 477226 - protein, 366 aa, unidentified
MEQNTTARQSLTNRMFVGLDLASKISTYHVLDASGETVCTGTVRTQRADLERTFAPFVPAVIAMETGSVSRVADEVLSSQGHTVVVGNPRRIAAIFSNVKKCDKVDAAMLAELVRVSPRLLSPIQHRTATAHGGLTLIRARDANVRARATQINLVRGMAKSYEFQLPSCDAENFTRVVRPLVDQTEFGQMLAPTLDVIAAQTVAIAQFDAKIKAYSDKHVPQAKQLAAIPGVGPLTAMAFALTVDDPHRFPNYRAVGAYLGLVPRRDQSGDVDKRLPITKCGDPLTRRLLVQCGQVILQERTKPTDLKRFGERLMGTVGSRRKRAVVAVARKLAVHMWTIMRSGKDYDPNHLKKKEQGRENHPALA

SEQ ID NO: 477227 - protein, 387 aa, unidentified
MSQTAAALIPTPVAYGSTLVLAIEVSNKSWVLAAQVPGLPHTKAKRTIHPEAGALLAAIAGYRARAAATGHTIERVIAVYEAGWSGFWLARWLIRHGVEVYVVQPSSVPVDRRMRRAKSDGIDAELLLRTLLAWLRGEPRVCSMVPVPDEADEDARRCVRERTELISERVGLTNRIGAVLATLGVTDYNPLLRSRCRRLAELRTGLGEPLPANAHAKIKRLLARLELVLTQIAELERERDAVVETEASDKAGKMIQQLISLRGIGVQSATVLVREAFVRRFANGKALGSYAGLASSPYNSGGINREQGIGKGGNRRVRTVMVELAWLWTRYQPSAAQVCWFRERIGPTGRRVRKIMVVALARKLLIALWRFVIDGVVPEGAVLKPAA

SEQ ID NO: 477228 - protein, 315 aa, unidentified
MHDVPCFIGLDVAKAQLDIAIRPSGERWAVPHDAGDIMTLVERLQALHPALIVLEATGGWERAVTSALATAGLPVVVVNPRQVRDFARATGQLAKTDALDARALAHFADVIRPTPRPLPDAQTQEWRALLGRRQQLVVMRTAEQNRLTGPSTRLITDIEAHITWLNASLATLDNDLEILLRASPVWRANDDLLQSAPGIGPVCARTLLLELPELGTLNRQQIAALVGVAPLNCDSGTLRGRRTIWGGRAHVRTVLYMGTLVATRYNPRIKAFSQRLLAAGKLKKVALTACMHKFLTILNAMLKHRTPWQTQEIQG

SEQ ID NO: 477229 - protein, 358 aa, unidentified
MTTQCAIDFHARSQTIRWMTEGDGEIHSAFLNHETDDVRAFYASLPGPVIVGLESHGYTGWFEQMLSELGITVRIGDAARIRACKTRKQKNDNRDADLIFELMTTERFPEIYRPTPESRKVLQQLRFRHNLVRARTRIANSLVAIALSCGAVRRFSVLTTKGRRRMAALKMSEEQAWQRDRWFEILDGLELVIKEVERKLKAEATKDPQVSRLMTQKGVGVLTGLALVHVLGPPDRFATSRKVAAYVGLDPVESQSAERRHIGRISKQGSRLLRFLLVEAAQTAARCDPELKAVYQRLRRKKTHATAKVAIARRLLVRSWILLRDQIDIDEFRRRGRARCGVKPGQPEETHGLSMPVL

SEQ ID NO: 477230 - protein, 436 aa, unidentified
MFVGHRFRTDPDELDTLWARLPKDAERIEVVMEPTRNAWVALAAWFRRHRATVVMVPPEQSADLRDYYNKHTKTDRLDSKVLARLPLLHPEGLHREDSLGPGDELKRAVKIRSGLVHRRTACMARLDALLEILGPAWIAALGSDMTLTALRFLARYANPVQVKRLGKARLAAFFRRSSRQAWADERADAVIEAAATTLRLWGADGGELDFDALAADIAAEARLALTLTDQINGFDKRIGALYDKADPAGIVRSVPGAGRVCAPQILGRLGDPTRFANLAAVRSFAGLVPAADSSGQADGHRGPTKAGDSCLREALFIAADHARKVDPTLAVRYQRLMLAGKHHDSAVCTLAAVLLTRIAACLRAGTHYLLRDTDGRVLTEAQGRAIVAERYTVPPEVRAARRKVTPHRHPRRNERNERAKTGVATRSKASPVPQPA

SEQ ID NO: 477231 - protein, 262 aa, unidentified
MKITTVGIDLAKNVFAIHGVNEHGRTVLKKVLKRDQVAAFFANLPACLIGMEACASAHYWARKLQGMGHTVRLIAPQFVKPYVKSNKNDAADAEAICEAVARPNMRFVPIKNVEQQAVLAQHRARQGFIKARTAQANQIRGLLAEFGFIIPQGIANIAKRVPELLEDATNELPGSFRLLVQRLMEHLKELDHQADEIEAQIVTWHRDNELSRKLAEVPGIGPITASALVATVSDAKNFDNARQMAAWIGLVPRQNSSGVRAD

SEQ ID NO: 477232 - protein, 421 aa, unidentified
MKRESQEEFAAFVGLDWADAKHDVCLQATGTERREFLILEHRPEAIDAWVHTLRTRFNGQPVAVCLELNKGPIVSALRQYDFLVLFPVNPLTVAKYREAFTPSRAKDDPTDAELQVELLLKHRDKLTPLAPQSAMMRTLAQLVEHRRRLVGDKVRLTNRLTSALKNYFPHVLQWFPDKDTVLFCDFLSRWPTLKAAQLARRTTLEAFFRAHHVRAAEVIASRIQAIKSALALTTDDGVITPNALLVQALIAQLRVTLQAIADFDTAIAQRAQEHPDFPLFDALPGAGAVFAPRLLVAFGEQRERFTSAEDLQKYAGIAPVTERSGKKSWVHWRLQCPTFLRQTFVEWAAESTRHSFWAQVYYQQQREKGKAHQAAVRALAFKWIRILYRCWQDRTPYDASVYLQALKRRSAPFLHNLASGS

SEQ ID NO: 477233 - protein, 329 aa, unidentified
MFVGLDLHKNYLQTAVMDDQGRLLSQEKIPNRDENIEEFASKRLRDSHAEIVIESSSTWYHVYELLSRNQNCHVVLSNPVKTKAIASAKVKTDKVDALTLANLLRTGYIPESYIPPRHIMDLREMVRYRTSLVRMRVEAKNKIHAILLQNGTRITEKPFTIGFVEELRKLGDYRIDGYLSVISSLSQQIQTVSSTIKREATEDESTRLLMTIPGVGYFSALLIQSELGDVNRFPDSHHLCSYAGLTPSTHSSGGVTYHGSITRSGSRYLRWILTECAKAHIRTRRDSQLTRFYTRLAKRRGGSKATVAAASKLLRIVYWVLKEKRPYHG

SEQ ID NO: 477234 - protein, 426 aa, unidentified
MKSTQNEKISQIKFSTLVVGIDVAKETHYARAFDFRGIELSKLLKFSNTAEGYEKLEEWMQNICQQHNKTEIIVGLEPTGHYWFTLGDYLKSQGHKLAMVNPFHVKRTKELDDNSPSKNDRKDPKTIAMLVKDGRYREVYIPEDVYQELREAVTERDRLVQRMNTISNQVTRWLDIHFPEFNTIFKDWRGQAAIQVLRNYPTPDKIVAAGAEKIEETWKSTMKRTAGLKRAQELVRAAGKSIGRRTGLIAAEASLQNLLNEYDLYSQQYQQLEQLMLELLQQVPHGEKLLEIKGVGLVTAATFVGEVGDIRRFQDPRQIQKLAGLNLVENSSGKHKGKSKISRRGRKRLRHSLFMAMITILATNPEFRQLHQRNLKRETNPLNKMQSIVALCGKLIRVFYALLRTGNDYSAEKMLGDIKQSMKTAA

SEQ ID NO: 477235 - protein, 386 aa, unidentified
MPQHNDLSRSLLALDQASTLIAVIEMSQSSWLVAAIVPGIARHPLKKINPDETMLLGLLRRWQDEAAQAGRTITRIAVAYEAGRDGFWLARWLRARGIEAYVIHPTSIPVSREHRRAKTDRLDTALLKRAFLGWLRGEPDHCSMVPIPTLDEEDAKRPSRERETLVGERTRLVNRIKGTLVRLGVRGFQPTLRTAPERLEAVRTPEGAALPPNTLAELRRDMARLRFVRDQIKEIEQTRIEQLEQAPAAGPQAMVRRLARVIGVGVETADMLVHEVLARNLRDRRAVARYAGLTGAPDESGAKRRERGLAKVGNARVRRGMLQLAWRFLLFQKESALAQWYRARTADARGSTRKTLIVALARKLLIALWRMVTTGEVPAGLVVRAA

SEQ ID NO: 477236 - protein, 310 aa, unidentified
MDNIIVGIDVSKDRLDVALRPSGEVFAVGRNAAGLEQLAARLRELSPYLVALEATGGFETIAAAALAAAGLPVVVVNPAQIRAFATAIGQRAKTDPIDAAVIAHFAEATKPAPRPLPDEQTRLLADLVARRRQIVEMMAAEGQRERRLTDKRLRKSIARLRKAMEKELAELDGEIDDRVRGSPVWAEKEDLLASVPGVGPVIARTLIAELPELGNLNRKEIAALAGLAPFTRQSGQWRGKSFIGGGRVAVRSILFMGALVAIRHNPVLKAFFNRLIVAGKPKMVALIAVARKLLTILNAILRDNRPWQIA

SEQ ID NO: 477237 - protein, 352 aa, unidentified
MEQFIGCDAHKEFSVFVAVNEKGQAGEALRVTHDREVYREFLARLPAQSTIAVEATGHYAWLVDEMEALGHHPRLANPFEAKRRMGLTHKTDKLDAKGLAILLRNGTLPEVWIPPRELRDQRELLRLRMFLVRMRTRVKNRIHGTLARHNAQVKGVTDPFGAEGRRLLEARLPDLPRHTREAVVQELSALDFLDAQIESAEHRLDAIMAVSVETDLLKTLPGVGKILSLVMMLEIGRVDRFPTAAHLASYAGLVPRVHSSGGHTRLGRICANVNHNLKWAFVEAANAVVLHQRSLAGTHVVRLYKRIKRKNYQKAVVAVARHLAEAAYWVLTKLEEYREPQAKRQALSSTHG

SEQ ID NO: 477238 - protein, 365 aa, unidentified
MPSTNFQHSTDFTGLDFYVGIDMHKKSWVITVRALNLQVDRFTQPPSPENLLSHLKKRFPNGIFHSAYEAGFCGTHFHHQLCLLGIENIIVHPADIPSTDKQKKNKTDLHDSHSIAHYLEKGLLHGIHVLSEEQQQLRALFRLRQSKVRDVTRINNKLKSYLAFMGIKIPRNNTNNQLTNKIICWLNSLELSTSAGTITLRQYLRDLKYHRDQLLEVTKKLKQQILRFYHQQYECLLSVPGIGPIVAMALLAEIGNFNRFKNPDEYCSYLGLIPWENSSGEFMATKGLQPRCNKYLRPLLVETSWAAIRHAPELLAYYRKHAVKNNKHAIIKVARKVALIAKAVALKLQYYSSDHKATLSCSIEE

SEQ ID NO: 477239 - protein, 345 aa, unidentified
METMYYIGLDVHKKTINYCVKDGSGRIYAEGSIPATRLTLDMWMKTLPRPWTVAMEATIFTAWIYDHLQPHAASVKVAHPLMLRAIAVAKKKNDRIDAKKIADCLRCDFLPECYMASTEIRERRRTLRYRNLLVRQAVQMKNKIAVLLMEAGVSYNKQKLHKVGYFRELLATNQDIDEGLKPLLRLCRETVVRLGKTESALVRSLERDSLLVERVERLMTIPAVGPITALTWALEVGDVQRFSSIKKAISYCGLCGAERSSANITMRTPLSKQRNKHLQTVLIEAAKMAPRNSPELAMVYEQEKQKGNANRATLAVARKMVAYLIAVDRRQKGFLVVENKNRTAA

SEQ ID NO: 477240 - protein, 402 aa, unidentified
MNCVGIDVSKGKSMIAVMRPFGEVVVSPFEVRHTANELSELAGLLKSLDGETRVVMESTGNYHAPVAWLLHDAGLYVSVVNAMLVHDYGNNSLRRAKTDKKDAVKLANYGLDHWLTLPRYVPDEDTRLMLKTCYRQYQQYSKVQTMLKNNLISLLDTAFPDANRLFTSPPRADGSEKWVDFVATFWHCECVCGLSKKAFTAKYQKWCRKHGYNFSQDKALDIYASACGRFGVMPKTNTAKLLVEQAISQLRATSATLAALKQEMQSLAASLPEYPVVMGMFGVGPVLGPQLMAEIGDVRRFHSKKALVAFAGIDAPPYQSGQMDIRSRSISKRGSSSLRRTLFLVMSVILQRAPMNEPIYQFMNKKRSEGKPYRVYMMASANKFLRIYYASVKAYLDSLGHD

SEQ ID NO: 477241 - protein, 424 aa, unidentified
MKRHPDVEFAAFAGIDWSDTKHDICLQAANSEEREWAVVPHRPAAIDAWASALRQRFGGQPVAVCLELAKGPLVYALQKYDFLVLFPVHPATLAKYREAFAPSHAKADPTDAQLALELLLRYRVKLKALTPQSVPMRMLLRLVEQRRRLVGDQNRISNRLTDALKQYFPDVLVWFPDRDTPLFCDFLTRWPTLKQLKRARRATLQSFFHDHHVRSPSRIEERLRAIKSATPLTDDPAVLRPNQLLVLALVEQLRVTLQAIESFDAEIATLSETLPDYALFRALPGAGAILAPRLLAAFGEQRERYQSAAEIQRYTGIAPVTESSGKKHWVHWRLQCPSFLRQTFVEWAGATIPRSFWAAAYYRQQRDKGCSHQAAVRALAFKWIRILYRCWQTRTPYDESTYLNALKRRGSPLLASIATTAKNT

SEQ ID NO: 477242 - protein, 342 aa, unidentified
MKNTIVIAADIAKDIFEYVKFKNDRQIGKIRCCKRNQFAKLLTGPETFTLVMETCSGAQHWARLARKYGHKVILIPPKVVSPYRQGQKTDANDAMAIYEASRRHQLKASVQKTVEQQGLSALESVRSHYQDRKKSLGNAMRGHLAEFGIVMPKGYKSLRRQMPLILEDAENGLPMSARQAINEYWEDWQLANNKVLRLEKEKLKELNKIAPAKELLKVEGLGPVTTSGLLCVLGDGSAFKRAKEAAAFIGTSPKQHSSGGKEVIIGISKTTGHKKLRAALIQGARSVILRLAAKGEPSSEKERWLAQLIERQGENRAAVALANKNVRIAWALLAHNRQYIAA

SEQ ID NO: 477243 - protein, 324 aa, unidentified
MHRGCAGKGVAELTVDSSPEAISEQLQLQHEPIERVGLEAGALSEWIYAGLVDAGWPAICVETRHMHAVLAARINKTDRNDARGIAQMMRVGLFKAVHVKTPASRHRRLLLTSRKLLQRKIYDIENDLRGSLRTFGLKIGMVASSKFEARVRELVDRHPIIATIIEPLLEARAVLRAQFAKLHRMLLELVRADPVCRRLMSAPGVGPVVALTFRTCVDNPARFSRSKCVGAHYGLTPRVYQSGEVNRTGRISRCGGVMLRSSLYEAALVILTGRTRWNPLKAWGIAIARRRGIQRAMVAVARKLAIILHRMWRSDTDFRWTAAA

SEQ ID NO: 477244 - protein, 429 aa, unidentified
MNCTQNKKIEQVKETTMIVGIDVGSEKHYFRAFNWRGIELTRKPVAFSNSMEGFNSFYNTIVELMQKSELEEALVGIEPTGHYWFDLGQFMGEKDIKFVMVNPHHVHKTKELDDNSPSKNDRKDPRVIAGLVRDGRYFYSYMPTGAYAELRNASNRRFVLVEEQTRAKNRLQKWIAVYFPEYKGIYTHIDAKGGMLVLKKAPTPEEIVRLGVEGIIKIWKDAKLRGNGHKKAMLILAAAMRSIGLKAGLTEARMEIQDLIEDYEVQTKRLERVNDLIKGLCQQVRYADKLLEIKGIGITTVAGFIAEVGDITRFDSTKELQKLAGLELVADSSGKHNGKTKISKRGRKRLRYLLFEAAISVVGKNEEFKEIHRYYTTREKNPLKKMQSLIVVACKLIRVFHAILTKGIRYDASKMLKDIRHPGEQLKAA

SEQ ID NO: 477245 - protein, 412 aa, unidentified
MEVLYPCCCGLDVHKKSITACVLWAEAKGKVRKEKRRFETFTRELLALADWLRACGVTHVAMESTGVYWKPVWNILEGQFEVLLVNAQHIKAVPGRKTDQKDSEWIADLLQHGLLRGSFVPPKPLRELRDLTRYRVSLAQECNRIANRVQKVLEDANIKLASVASDPLGASGRAILKALLAGEEDAERLAEMSKGLLRNKLPEMRLALEGRVTEHHRFLLRELLDHQEFVERKMAEVEAEIERRMRPFEAEVERLDTIPGVDRVTAWSLIAEVGVRMEQFPSAAHLASWAGLCPGSFESAGKRLSGKTRKGSASLRRCLCQVGSVASHMRDNYLSAQYRRLAARRGGKRAILAVAHTVLVMAYHILQRKQNYQELGADYFDRLNADAIRRSLVRRLEKLGHKVILEPLAQPA

SEQ ID NO: 477246 - protein, 317 aa, unidentified
MEPAAGFVGIDVAKAFLDVAVRPAGTHERLPNDEAGIARLVERLRAAPPELVVLEATGGLEAPVVAALAAAGLAVAVVNPRQVRDFAKAVGQLAKTDALDARVLARFAEVVRPAPRPLPDAAAQALSALLTRRRQVIAMLVAEQQRLPSTPPALRPRIEAHLAWLRHERDDLDRELRHQVRQSPAWRADDELLQSVPGVGPVLATTLIAELPELGRLDRKQVAALVGVAPLTCESGILRGRRIVWGGRAQVRAALWMGTLVAVQRNPAIRAFYQRLVAAGKPKKVALTACMHKLLTILNARLRHRTRWQPSPQALAP

SEQ ID NO: 477247 - protein, 352 aa, unidentified
MQRTTRKEISYVGKEVYVGMDVHKKTYSVTVICEENIVKRDTMRADPEVVVRYLLNHFEGAKIHSVYEAGFCGFGLHRKLVASGIDNIVVNPASIEVATNDKVKTDKRDSRKQAEQMFRGSLSGIYIPTEAEESARVLTRTREQIVEQRARVATQIKSKLNYFGLIPFDDKRTVTESYLKELEEKEFSEELSYGLKLFSAQWRFLTEQLKEIGTKLEVQAKRDSSVEKIYRSVPGIGPISSRVLSNELGNLQRFSNERRLFSFTGLTPSEHSSGESVHKGRISRQGSSRIRKYLVEIAWRAIEKDPALKEIFERIAKTRGKKRAIVAIARKLIGRIRACFHQGSLYQLGVMA

SEQ ID NO: 477248 - protein, 344 aa, unidentified
MDEYDGRQFVGIDLHRRRSVIVRMTEAGEQLGVARIDNDPVALGEQIAKAGESPEVVLEATYGWYWAADVLAEAGAGVHLAHPLGVKAFAHRRVKNDVRDASDLADLLRMGRLPEAYVAPPEVRELRELVRHRAKLVALRAGLKAQVHSVLAKEGMTVRASDVFGVFGRAQLDKLPLGAPYRARVNSLLRLIDAYTFEIDTVSTRLEAQLADKPGYQALLTIPGVGPVLAGIFYAEIGQVRRFRTAKHLCSWAGLTPRHYESDTTVRRGSITKQGSTLVRWAAIEAVQKLSPDTGWLVSNRARLTERRGRNVATVATARKLLTLVYYGLRDGHIRALEQAETAA

SEQ ID NO: 477249 - protein, 433 aa, unidentified
MHEAEDEPLFAERAAGVDIAKAGIEVTVRVPSETRRGGRQQDTRSFRTTRKDLLALADWLRVWGVAKIGMESTGDYWKPVLFLLESEGFDCVLYHAAQVKALPGRPKTDKLDSAWLAKITERGALPGCFVPPEEIRRLRTHTRYRRHLTQARTAEKSRVEKLLEDAHLKLSSVISDIHGVSGRAMLEAIAAGERNPGTLAQLARGTMRGKIARLVEALDCSFVTEEHAAVLTMMLSTIDYYTAQIGELTAKIAVLCQPYEQQIAQLDAVPGTGVITGQDIIAEIGTDMTVFPTAAHLVSWAKWCPQVAQSGGRRKGANASGRGNRYLSAALGEAAVNAGRTQTFPGAKYRRLVRRMPKKKALVATGNSLLAIYYALLSDPAAAYTDLGADYYERRANIRRQARNHVRGLERLGYKVTIEPADPTTAAPGEPAA

SEQ ID NO: 477250 - protein, 419 aa, unidentified
MRQNKTKKLGKVNGNTLIAAIDIGKKMNYGYFRAPDGRDVKPFAFYNLRDGFEEFWTKLIGFQKGHNLEEIVVGFESTGPYAEPMLHFLKNKEVTLVQTNPMHTKRLKELTGNSPNKTDEKDPKVIADIIALGHALTLVIPEGPAAELRRLSQARERAIKTRTAMGNQLQHLLFVVFPEFLWTMKHMKSKSVLYLVENCPTPESIIAMGIEALCEILRKTSRGKLGQERAKQLFEAAQKSIGISEGKESILLEINHLVLNIRNEDRFIENLGNQMKHNLKEVPYSHSILSIKGIGEVTAAGLIGEVGDFRKFSTISEMMKLAGLDLYEISSGRRKGQRRISKRGRSYLRKILFFAAINMVKEEGILHAHYKEMLGRGMPKIKALIAMCRKVLRIAFAIVRDNSVYVSNHQHSLGSKLAA

SEQ ID NO: 477251 - protein, 374 aa, unidentified
MKWLAPPRSVVAFSAPQPLDALRGATQEASHGQYRDRRGQESIAGRHLCESGELIERRITTGAAHFTDLLGERPHARILLEACTESEWVARCLESLGHEVIVADPNYAPMYGMRQRRIKTDRRDALALAEACRLGAYRPVHRVSEAQHLVRAQLTAREVLVRTRSRCICVVRALLRQEGLRVRTGKADTFGLRVSALEVPEPVNQVLGPLLATLLALNDQIDAAGDHLEDMTRTDPRVRRLCTLPGVGPITAAAFVAALDTAGRFEGPHQVQSYLGLVPREYSSGERHQRGRLTKSGNGRGRWLLVEAAWRILRLRRPETRVLWSWAERIAARRGRKTAAVALARRLAGILYAMLRDQKPFDPRRFAAATEVAA

SEQ ID NO: 477252 - protein, 307 aa, unidentified
MAKQEITFPQVVKVGCGLDVHKDLITATIQKSNDKQETREYNAYTSSLKSLRDWCKKEKVTHVAMESTGVYWKPVFNILEEDFEVILVNARHVKNVPGHKTDKKDSRWLSKLLLSGLLKGSFIPPVDIRDLRDLTRYKKKVTAQAASEKNRIIKILEDANIKLSSVLSKVDGAVGTKIINSLIEGKTDVDYLAKFYHGKMKVSKSEFKLALEGRITKHHQFMLQLHKDSIADKERLIERIDAEIDEAVKAYQVEVDLMQSIPGVGKDSAISIIGEIGVDMGRFPDETHLSSWAGMSPGNNETGGKKK

SEQ ID NO: 477253 - protein, 423 aa, unidentified
MENTAARKRKQVPEGYLIIGVDPHKKRHAAVAITQDFTTRDKFKFDNTREGLETVLRRARIEMVKSGCRGVMFAIETGGHYWRNVAYFLDEQGIPFRFINQFTLKRRREGKDLNRRKNDYRDSEVAAQLLCTGEFTESKIPQGVYAELRTAHNAYRRLVKERTRITNLLKGLLDALFPEFTQVFKDPCGLTALSVLSACAIPGVIAGMMEDEFVAAIEAKHQGRLMRKKLRVLHYSARTSIGINAGAWSVSSEISFLVEKLELIRQHIRLIERPLVSLVDETEEGKYLLSIRGLNYIAVAGLLAELGCFKAYRSAKQMIKMAGSNPTESESAGKKGTHTPMSKQGRPVLRYCAWTSVIPMLRLNPDFRAWAKQRRERPAHANPLNGREVVGAALNRLLRLAFAMVKNQTYYQVSKPELTLVAV

SEQ ID NO: 477254 - protein, 316 aa, unidentified
MSASPLFVGIDVAKAELMVALGPSRDLVAIPNDESGIRQVLEQLQTASPSLIVLEATGGYETAVVAALAAAGLPVVVANPRQVRAFAKAMGILAKTDNIDAHVLALFAERVHPPIRPLPDEALRMLDALLTRRRQLIEMLVAERNRLAHALPPVEKSLKQHIRWLERRLADVDSDLDQAIQQSPVWRAKEDLLRSVPGVGPVVSRTLLADLPELGALNRKQIAALVGVAPLAKDSGTMRGKRMVWGGRAPVRAVLYMGALIASRHNPVIRDFYQRLVAAGKPKKVALTACMRKLLVILNTMVRNNTRWGERYALSA

SEQ ID NO: 477255 - protein, 324 aa, unidentified
MTTYIGIDVAKDTLSVAVPKLNASWKLAEYSNSPDGIRSLINQLPEQAHCVLEATGSYSVLVTYMLTQAGVTVSVINPKQSHHFAKMHLSVTKTDPQDAILLSEYGRVIQPPVYQMSNDSLLLLRQKRTLLRQYQKQRVALLNVFESFQPLPLKDATVQQSLQQMIAHFQVAIGQLKAEINQVCQADFADQYKRLRSVKGISHVIATALIETTNGFRDFTSAKALAKFVGVAPVIYQSGKVGKTKGINRSGDSHLRGQLYMASLSAIRYNKPCRECYQRLKAAGKVTNVALMAVINKLLRQAYAVVKFNEDYDPNYQPILRSIA

SEQ ID NO: 477256 - protein, 488 aa, unidentified
MSTAAKQPAKNGSDAQRSAPKRKARGSHCQQGKGNQRRSKLTITNPDAAGIDVGSQVHYVAVPEGRAQTSVRSFGAYTAQLDELVQWLKDCGIKTVAMESTGVYWIALFQKLEEAGFEVLLVDARQAKHVPGRKSDVQDCQWLQQLHTYGLLRAAFRPEDAICRLRTLQRHRKNLIEYAAMWIQHMQKALNEMNLHLHHVLRDISGYSGLAILDAILAGERDPSKLASLAHYRVQKSKTQIEAALRGDYRPELLFVLSQSLQNYRQIQQQIAQCDLSIEQQLAKIADCANPNQDCASAQQGQDAAGCNAPKRKPKDALECSLAAHLKRILGVDLTTIPGLDVVAILTLVSEIGVNMTKWRNAKAFVSWLGLSPNNKISGQRVLSSRTRKVVNRAATTLRLAAMVLGKTNTPLGSFYRRKRAQFGAPKAMTATARKLGCLIYHLIKKGQGYQELDLHTYELKYQDQILNSLRKRAHSFGFHLVELPKAA

SEQ ID NO: 477257 - protein, 343 aa, unidentified
MQTVTTIGLDIAKSVFQVHGVDAAGQVVIRRQLKRRYVLAFFQKLPPCLIGIEACASSHHWSRELQALGHTVRLMPPAYVKPYVKRQKNDATDAEAICEAVTRANMRFVVTKTPEQQSGLVLHRARHLFIRQQTAVINAIRAHLAEFGIIAPVGRHGVEELLNVVADPNDKRVPEIARACLLAFGAQLRRLKEQILEFDRMIRAWHRSSETSRRLDDCPGVGPVLATALVATVADPKSFRSGRNFSAWIGLVPKQHSSGGKNRLGSISKQGDRYLRGLFVAGALAVIRYAKIHGTKHRPWLTALLARRPTKVAAIALANKIARMAWAMMAKGERYKEPIALAA

SEQ ID NO: 477258 - protein, 432 aa, unidentified
MDNRLQVGIDFSQKRADFCLLFPDGRPLESHVAVDNSSPGYSLAKRLLLDALDSHSFDGVDVSGEATGYLWLPFFLQLAADPELELHDLKLYLLNPRWVKWFKKCFAQDHKTDERDPFYIAERTRTRRPDVIWSADTGVLALRFYTRLRFHLVQSLAREKCYFSTFLFLKASSYRRLKPFSDVFGVTSRLVLTQQPSLDELAELPVEDLAMHLHEMSGHHLRDPFNNARKLKRVSQESFPLDDQLALPVQRILDLTLEHIHFLESQVEQVNRWIATERQMHPSIAQLSTIPGVGPVFSSGNGAEIGNTQRFLQGHKWDKKHKRYRPRNLRDAEDAVAKIAGLWWPRASSGDFEAQDRRMAKTGNRYLRYYLIQAANKMRQHIPEYAEFYARKYQEASKHHHKRALVLTARKSVGLVVGLLHRNEPYRSQEHR

SEQ ID NO: 477259 - protein, 449 aa, unidentified
MSKSGKLIGLPIVNARAAGIDIGSRIQVASVPPELSDDPVRTFQSFTADIEQMANWLVSIGITTVAMESTGVYWIPVYEILEAHGLTAVLANARDCKAVPGRKSDVNDAQWLQRLHACGLLRASFQPAREIAALRAYMRIRDRHLEYASAHMQHMQKALTLMNLQLHHVISDISGVTGLKIIRAIVAGEQDPDILASMRDVRCRESLRTIRSALVGNYQPEHVFALSQALALFDAYQARIADCDKQIENSLQVLNADRPQLETPLPAPRTKTKQANAPKFDVRSMLYQLTGTDLTLIHGIGPSIALSLVAECGTDMSKWPTEKHFASWLCLSPGCKISGGKVLSARTRKSSSRLASQLRLAASNVGRTETALGAFYRRLAARIGKAKAVTATARKLAILFYRTMRFGMRYEDPGVDQYEQRYRERVVKQLQRRAAHFGFSLQPTEAGVS

SEQ ID NO: 477260 - protein, 350 aa, unidentified
MQIIGCDYHPGFQQIAFVDSETGECGERRLEHTDEAEQFYRELHQRRVQVRVGMEASGHGRWFERLMAELGFELWIGDAAAIRTRRVRKHKTDRQDAELLLRLLMEDRFPRICVPSWENRDVRQLLWHRHRLVQMRTRVVNQLHAVALNEGLRRKKALWRPAGRVQLESLALAPWASRRRQDLLQLLDGLQPAIADLTAAIEQEAAKRPEALRLMSHPGVGALTALAFVLIIGEPERFANGKKLSSYLGLVPSEESSGDRRRLGHISKQGNALLRFLLVEAAQATVRSDPDWRRQFLHLAMRRERRIAKVAMARKLAVRLFWMWRNGWDYAQMEKLGSRAGQPGTAVDVR

SEQ ID NO: 477261 - protein, 346 aa, unidentified
MTATPTAPTYHLFVGVDIAAASFAASWTTGGQPRERAQTFAQTPDGYHAFQTALTQTGITPRATLVVLEATGSYWITLAVTLHQAGYAVSVVNPAHAHAFAHSLPRRAKTDALDAQLLAQFACERQPPRWTPPEQVYHELRQRLLVRDSLLAMRQQARNQRHALGQWPVHIAGALDQLDAVIADLDARIATLEGELATVLRDGAWAASATLLGTIPGIGLVTSAWLLVATLNFAACASAEGAAAYAGLVPLAHESGTSVRGRASIGHGGHARLRTALYMASLTAARFNPVIRAQYERLRAAGKPPKVARCAAARKLLHLAFAVVTKQRPFDPAYRMAGAGVGEPAA

SEQ ID NO: 477262 - protein, 335 aa, unidentified
MQSYGIDLAKEKFDVSFFDLTSKKVSNQPSHKVVKNNLKSIGRFLETLPSDAVLVAEHTGVYGDTLLKCCMDCNVKIAFVDGYVIHRYRATPDRAKTDVLDCALLREFGERYPDKLKYKTFPEEALYELRQLARHREMLVEQRKQLITADKSEDCRPVRSLVVKRSMDRIKEMLDTEIAETEKEMLKVINGHDSIHHNYELVKSVDGVGLITAVELLVKTENFTKITTARQYSAYAGTAPYEKSSGKMDKGAHISKIGNRRSKTLLYICAESARLHNKEIKLYYERRTLIDKKPRHYVLNAIANKLLRIIFTLVEKGEYYDANFIRQDPRVVKYN

SEQ ID NO: 477263 - protein, 368 aa, unidentified
MNEYKLKAAPTAVSKEGNSQKEAKANRIAIGVDAHLKSYQAARKIDNGAVGVAQTFRSKEALLLYVEKQREQAKEVVVVYEAGPLGYTLYRQLKAMGLECLVCAPRSGEQKRKRRKNNAIDARSLTSELANYLNGNEQALQKVRVPTEAQEQARVESRQHDALVEQRKRIGAMGNSLLLSQGYGSWSNWWRPKAFERLSQGVAPWIEKHLRRWVGVLRELDQQIQQAKAELTKQYQGARPKGMGAPSLAQLNAEVLDWNLYSSGRKIGCLAGMVPSEWSTGEGQRLGSITKVGVPAIRRIITEMVWRMILFQPEYKAVQKWREVLEGSNRGLKKKAVVAIGRQLMVDIWRLQTGRISTQELGLIMIEA

SEQ ID NO: 477264 - protein, 340 aa, unidentified
MEIVYPRVAGIDVGKKIVAVAVRTPGDRPGQRHQQLRKFKTFYPVLREMVGWLVAQGVTQVAMEATGVYWKPVFHALCEAEQLEVLLVNARHVKNVPGRKTDAKDAEWLAELCEVGLLRGSFIPPAEIAAVRELTRYRKKLTQARTSELQRLCKVLEDGGVKLDSVASSITTVSARAMVEALIAGERDARVLADLARGVMRKKIPDLAMALQGRFGAHHALLARMHLEHVDQLSGMIQRLDGEIDQVVAPFAEQVGLLRTIPGIGERTAQVLIGEIGVDMSRFPTADHLASWAGLCPGNNESAGKHHRARTRKGNREVREALVEAAWAAGRHDRQAAHHP

SEQ ID NO: 477265 - protein, 341 aa, unidentified
MEIDVLGIDLAKQIFQLHGADRRGRVVHRSKVSRSSFFEAVRALNPKLVVMEACSTAHHWRRRFQSVGIEVRPISPQYVAPFVKTNKNDRNDAEAIVEAASRPTMRFVTIKSVEQQDIQAAHRMRAILLRHRTALINQIRGLLGERGLAIARSPEAFRRAIPELLRTSADELTSFCQTLLTELLQHMRAIEERVHLIEASIQTFMKKSALCRKIAEIPGIGPITATAVVAAVGDARQFRNGRHLSAWLGLVPRQYSSGGKPRLHGISRRGDTYLRTLLIHGARAVLRYAPKKTDPQSIWLQELMARRGHNCAAVALANRNARIIQALLSSEATYMTRSAAT

SEQ ID NO: 477266 - protein, 343 aa, unidentified
MGVFAALDLSQGQTAICVVDHDGAILAEAKVPTCPDAIVAWLAARFDDLERVGMETGPLAVWLWNALTERWVPILCLDARHANGVLKMMPNKTDHRDARGLAQIVRTGWFKAVQIKSHAAYVNRALLTAREALVGMRVRLENEIRGLLKTFGIMFGKRVGGFRRRAEDIIARELAVAPELLPIFEALMQARHDILARIAALDSRTRAIAKRHAIVRLLMTAPGVGPITTLAVVAAFDDAARFRRSSSAGAYLGLTPIRYESGEISRNGRVSKRGNKFTRKCLFEAANAILNRNLGGSRLRSWARAIAERTGPRKAKVALARKLAVTLHAMWRTKASIRETIMA

SEQ ID NO: 477267 - protein, 424 aa, unidentified
MHSRIPFQSTGRLSCKHGAGHFVRCTLLFGCVIGFIAPYLLGAPRGDAVLQPDRSRRAVGVDGSSPNSRKIMACRGRRSHSQERDAMHTDDCPQVQPPTFAGLDVAKDKLDLHLWPLGLDASFENTPAGIDALIQQLARQPVQLIVIEATGRYERRAALALMEADFEVAVVNPRQPRDFAKASGQLAKTDAIDARILAQFGAVIGPRASEKPSQNQMILDELVARRRQLVQMITMENNRLEHAMHKPIAQAIRRMVKSLNKQLDQVEQQILDLIDRNDDWRDRFALLKTVPGVGDATAATLIAELPELGQLNRQQIAALVGVAPMNRDSGQQRGQRHITGGRASVRKVLYMAALTARSYNPIIKAFAQRLAAAGKRFKVVMTACMRKLLTMLNTMVRNKETWNPEYATCPNNAETQTVNPAINA

SEQ ID NO: 477268 - protein, 348 aa, unidentified
MDTIGVDLHKRETQLCIGQADGSITEQRIVTSRERFTAVLGHRPPARILVEASTESEWVACHLESLGHEVIVADPNYAPMYATRARRVKTDRRDARTLMEACRAGTYRPAHRLSAARRHVRAELAVRDAVVRTRTRYVALAKALVRRDGLRVPSSAAERVGAHLAALAGSPPLAAELAPLLTLLPPLNATIAAADQRLAELERTDPSVALLMTAPGIGAVTASALVATIDDVQRFASAHQFEAYLGVVPGERSSGELRRIGPITKAGNRRARWLLVEAAWRILRSKDPASAPLRAWARPIAARRGPRIAAVALARRLAGILYAMWRDSVPYDARKVRRPRRAPGGPAS

SEQ ID NO: 477269 - protein, 412 aa, unidentified
MDVLVERCAGLDVHRDSVMATVRLPAKRRRQREQHTRGFPSTLGGLEALADWLEGFGVTLVGMEATGIYWRTVFDALEPRFRCWLLNARHLRNVPGRKSDVIDSAWICQLVEHGLVRPSFVPPLEIRRLRDLTRLRKTQIEERTRTIQRLEKVLQDAGIKLTSVASQAYSVSARAILEALLAGVTEPAQLAELARGRMRAKIPQLQEALRSRFDLAHHGVLVASLLSQLDSLELSIANLDQRIVHQTQPLAELVELVCTIPGVGPRTGQVLIAECGIDMSVFPSVGHFASWAGICPGINSSAGKRFSGKTRRGSKWLRQALSESAQAAARTKGTYLASHYAQIRGRRGTHKAIGAIRHDILVAYYHIVRDRLPYRELGPDWLARRYSPEHRARRLLRQIEALGFNVTIEAAA

SEQ ID NO: 477270 - protein, 400 aa, unidentified
MLSIGIDVSKGKSTVCGMKPGGEIVYTPFEVQHTREGMSELVSLLRGSGEEVRVVLESTGSYHCPVVAALLENGIFVSVVNSLRMKRFCSQSIRRVKTDQIDAMQIALYGLAYWQKLQPTRLPENTYRELQLLARQYYQMTSLLIKAKVDFNALCDQVLPGMQELMSDHAGRHKLSDFVLRYHHTAHILKMGETRFRKDYCKWAEKKGYRNHERMAALIFATAQNGIPVLPDAPSTQIVITEAIRVLHTVEASRDAILTQMQALAKTLPEYSLVREMPCIGDTLAPRLIAEIGDVRRFHSKRALIAYAGIDAPPYQSGKFCANNRHISKRGNRYLRKTGYEVMQSYVMHKPANDPIFTFIEKKRSEGKSGKLAMVAGLNKFLRVYYGKVTELYRSLPAIE

SEQ ID NO: 477271 - protein, 437 aa, unidentified
MSDQKSVEIRVSVDVGYRRHSVAIGLPDGEVLEEFEIAHRPEGFAEFFSRIEKHQKVRDCEVAVAMEGFNGCARPLDAMVRRRGYRLYNINNLKLARFKEIFPGAAKSDRIDARKGLELFQLSDHLPLAKEVLQEVKGTPRENEVLKRLTRRRRRLVDERVRVISNLQTDMQAVCAGLLEITKNAGNQWFLNFLLSAPTLSQLARLRPATVQKIPAVGRKYASLIKDWQKRAHFSEEVEWVSEMIQEDAKRCLELDEKIKALRAKIKEVAKDSKIAKTLLSIPGFGTICTAELAGEIGTIERFSKEGSLALYLGMSTLDNSSGKYQGSKQPKHVNTRAKAAMMVALDRHRKYVPESQRYYEKKRSEGKKHNQAIRALGRHLCRIIYKLLKEEREYEIRPEKGNTKTKVSARSLIKRQIRKPKISDKGKNNKIYHQGA

SEQ ID NO: 477272 - protein, 458 aa, unidentified
MMEQALAQRNRSLNLNSGRSRQALTITHPNAAGIDIGSASHYVAVPPDRDEQPVREFKSFTADLHHLADWLDACGVDTVAMESTGVYWIPLYELLDARGFTVLLVNARHVKNVSGRKSDVLDCQWLQQLMSYGLLRGAFRPGDEVCVLRALSRQREMLLKSQARHVQHMQKALTQMNIQLANVISDVAGETGQKILRAIVAGERDGKTLAAMKNARIRASVDEIAKSLQGNWRSEHLFALKQALALFDFYATQLTECDCAIEQQLQRLHVHDGEPTTAKKRGRARNAPKFDLRAHLFKMCGVDLTRIDGIDVTTALAVISEVGADMSKFPTVKHFTSWLTLCPGTKITGGKLISGKTRRSANRAAQALRLAAAALRTSQSALGAYFRRLCARMDKPKAVTAAAHKLARLIYTMLTKGEEYTDQGQDYYEERYRERVLRQLSKRAEKLGMRLVASEQPA

SEQ ID NO: 477273 - protein, 353 aa, unidentified
MDRYVGLDAHAETCTLAVVGPSGRRLISKVVETNGQTLIEAIRGIPGRVHLCLEEGTQSGWLHEILEPEVSEIVVVSPPETRGAKDDLRDAWSRAEELRTGAIRTRVYKAPKHWAGLRSAATTYRMATQDVVRVKNRLKAVLRGRGILADAAVYEETSRGKWLKELPAAGHRPAAEWLGRELDELVPLREEAEGWLLKEAKTHPIIKILSTAPGMGPLRSAQLAAIVVTPHRFRTRRQFWSYSGLAIVTRSSSDWVQGQNGKWARGEVRQTRGLNRKRQPVLKAIFKGAATTVIAQLPDHPLHVDYERMLQSGIKPNLAKLTLARRIAAIVLSMWKREEVYDPGRHKPVIVKS

SEQ ID NO: 477274 - protein, 348 aa, unidentified
MLRITLTGQVQKRPVYAGLDYHQSFVQVCVMDASGAVLSNHRCANTAKAVREAVERCGVIVSAAIEACCGAADLAEELVAAGWQVSLAHATYVHKLKQSPDKTDWSDARLLADLLRVGYLPKVWLPPRELRQLRHVVRHRQQLAERRRATKLRVTALLRSERIEFTGSRWTKSWIHSVRHCADLGEQGLWVVTELLNEIVHLQHQLDRTAARLEELTKDDPFVKQLRGYHGIGLITAVTLKAELGTMSRFRSGKQLSRFCALSPRNASSGTKQADAGVIQAGNRELRRVLIETAHRLMRCDERWAQLGASLKARGKPGNVAAVAVANRWMRWLYHQLQPLAVSLTASV

SEQ ID NO: 477275 - protein, 407 aa, unidentified
MEVIHPRCAGLDVHKRTVVACVRIASDSPPSQEVRTFDTTTSGLLALADWLESCDVKHVGMEATGVYWKPVWHVLEGHFELILANAAHVKNVPGRKTDVNDAMWLADLLAHGLIRASFVPPVAVQELRTLTRTRKQFVRERSAHVLRIDKVLEDANLKLGVVLTDIMGKSGRAVLQAIVDGHTDPEHLAGCVNSRVKASRAEVLEALRGRISAHHRFMFKLHLSHIDALDQAIADIEKEVGLGLEPFRQAAKLLSTMPGLSEVAANVVVAEIGIDMARFATPGHLLSWACMCPRNDESAGKRRSTRLRRGGVWLKTTLIQSAWAAIRVKGGYLQAQFHRLRARRGPKKAIVAVAASMLTAIWHMLRDGTEWQDLGAAHFDRADAAKTANRLIRRLQQIGYAVQVTPA

SEQ ID NO: 477276 - protein, 311 aa, unidentified
MTNNSIGIDISKDFLDAHRQCDGAAARFPNTSRGFRALSTWLGEDMPSLVVFEATGPYHGHFERTFSGKLPLVKVNPLQARRFAQACGTRVKTDAVDARMLAKLGSSLALEPDQPLDEKQYELKELFSSKGSLMKDRTRLINRLQTLNLALVKRQTKARIDQITRQLKVLQQDINTRVQDCPNRARANTILRSIPGIGEVAAAAILIEMPEIGTLDKKRAASLTGLAPMTRQSGKWRGKATIQGGRKHLRDALYMPALVAARHNPDMRDKYRALINLGKPQKVALTAIMRKLIELANTLVKADREWVQNNT

SEQ ID NO: 477277 - protein, 425 aa, unidentified
METPASVPEVVAWIGLDWADQRHEIRLRAAGSEGTESFTVEQKPEVLHAWVGQLRARFPQGKIAVALEQSRGAVIYALMNYDFLLLYPIPPKTLARYREAFATSGAKSDPSDAGLLLELVYTHADRLRAWQPDDALTRQLRLLVEHRRKTVGDRTRLTNRLTALLKTYFPQALEWAGDLRQPAACEFLRAWPTLEAVQRARRGEVKDFYDHHRRLSTQERADLFRQIDQAQPLTRDAALVEASALMAQGLAEQLSAATARLEEELEKLFSQHADHDLFDGLPGAGEALAPRLVTAFGSDRNRYESAEDVQKFSGIAPVQKTSGKTAVVQWRRACPKFLRQTFHEFADASRKKSLWAQAYYEQQRKRGEDHHAAIRSLAFKWIRILYRCWKDRAPYNEQVYLRSLKRHRSPLWLAIMSLSTREAHG

SEQ ID NO: 477278 - protein, 337 aa, unidentified
MSVYVGIDVHRKRSQVAVVTEDGKVQLNKNTVNGAEPVLRLIGDLPPGTPVAFEAAFGWSWLAELLEGYGFEAHLVHPLRCKAIASARLKNDKVDAAILAQLLRADLLPEAWIAPPAVRQLRALLRHRAGLVRLRTQQQNRIHAVVADFGYDRSGSYLSGPGRGWLAGLELPAVSRELVTDALAVIDGLVPLIERIDGELRQHAKADPRVKVLTELPGVGQFTALVMLAEIGDITRFPSARKLASWAGLTPTVRGSDLHVRHGHISKQGSAWLRWVMNQAAQTAKRSPEFAATYSGIAKRRGKKIATIAISRKLLTRAWHLLSEMQAAGADEPPRRS

SEQ ID NO: 477279 - protein, 341 aa, unidentified
MSAYVGIDVHRRRSQIAVMDERGRTAVNRNVPNGRESLLGVFGDLPVGTPVAFEAAFGWGWLLELLQDHGFEPHMAHPLQCKAIASARLKNDKVDAATLAHLLRADLLPEAWIAPPEIRQQRAVLRHRAQLVRLRTLLRNRIHAVLADHGCDKAGDTRNRWSSPGRQWLHELPLPTASRTVIADLLETMDALQQVIDRLDAYVAEQAKADPRVKALTALPGIGRLTALLVLAEVGDVNRFGSARKLVSWAGLTPTVRGSDRTVRYGHISKQGDPWLRWIMCEAAHTAKRSPDYIDAYARIAHRRGKKVATIAIARKLLARAWHVLREAEETARAEEACPTA

SEQ ID NO: 477280 - protein, 339 aa, unidentified
MELYCAIDLHSNNSHVAIIDDQHKRVFCRKLANDPKLIENAFAPYRDRIRGIVIESTFNWYWLADLLMEKGYPVHLANPCGIQKYSGLKHADDKHDAFWLAQMLALKILPEGYIYPKQERPLRDLLRKRSHLVRIRTSLILSLQNIVMRNHGIKIRSNDLKKLTQDPVAELLKDQQELALAGSASKETIDFLTRQIQRIEAAVRRKALSKEPFSKLLTLPGVGDILAMTILLETGPIDRFKAVGHYVSYCRKVSSRWTSNEKNKGKGNTKNGNRYLSWAFSEAADHARQTHEPSRNFYNRKLNQTNASVAHNALAHKLARAGYYIIRDHVEFQEGKMFR

SEQ ID NO: 477281 - protein, 421 aa, unidentified
MKVLRAKRLRMVRESTLIATVDIGIANNTGYCTTLDGRSIKSFSFDNTKQGFEKFWYMTVASKNRFGCDEVLVGYESTGPYAEPLVHYLAHKQVKIVQVNPMHTKKMKEVNDNSPLKTDDKDPRVIADIIRLGRALTIVVPEGDAASLRRLNNARERHVGEQTALLNQLQQLVFLIFPEFKTVLKNMKGKTAQYILKRYTTPERIGTLSKEALGEEMRKRSMGKFGIKEAESLIGLARETVGIKEGIAGIFMDIRHILMQLEAEGQFISEIEGEMRTTLERIPYSGRLLSIKGLGTVSVAGLIGEVGEFSKFSTQSEIMKLAGLDLYEISSGKRKGQRRISKRGRSLLRKILFYAAIQMIRKNGIMYDYYVRLTGRGMERMRALIAVSRKLLRIIHAIVRDNRDYVGQYQTPERRVLKEAA

SEQ ID NO: 477282 - protein, 340 aa, unidentified
MAMFAGLDVGFKRTAVCVIDGAGVVVWRGVVDTHPEMIAAALQRCRRELEKVGLESGSLSPWLARELAALGLPVVCMDARRAADAVKARRVKTDKADALALAEMLRTGWYSAVHVKSEESHRLKALLGARDQLVRTKRALGNQVRGLLRPFGIRLPSRQGTKKFDAAAHEAVRHDPVLSASVTALLEALAAVESQIARLDDRLKELARRSEVCWRLMSVPGVGPIVALAFMAAIEDVGRFRRMRDIGVYLGLTPKRYQSGETDVVLGISRQGDAMARHYLYEAANVLLTTVRRASPLKSWGLKLLKRRGPKRARVAVARKLAALLGRIWKDGTHFDAVPA

SEQ ID NO: 477283 - protein, 310 aa, unidentified
METKTYAGIDVAKDHLDVAIMPSREKMQYSNDEGGIDKLVKRLKNLSIKLIVMEPTGGFEAPAAAALTAEGMSVAVVNARQVREYAKATGRLAKTDGIDALVMAEFAASIKPPARPLRDEETEEIKAMVSRRRQLLEMLTAEKNRMAMARKHLKPHILAHIKWLKKEVEGLDSDLRKRIEDSPVWRVKDNLLQSIPGVGKVLSATLLAELPELGNLNRRQIAALVGVAPFNRDSGHMKGKRSVWGGRAPIRAVLYMATLAGTRYNPVIKEFYQRLVQRGKAKKVALVACMRRLLTIMNAILKHQRAWQYA

SEQ ID NO: 477284 - protein, 320 aa, unidentified
MDAVLGIDIAKAKFAAALLRPDGKIRHKSCANTPTGFVDLAVWLQRQGVTHVHATLEATGTYGEALATWLHDAGHIVSVVNPSVIHAYARTQLARSKTDRIDAELIARFTASHQPAPWTPPALEIRQLQALVRRLDALQGMRTQELNRLASGVTVAEVRASIEAVVANLDAQIAHVHQLIRDHLDRHPGLRAQRELLTTIPGIGEATAAVLIAELFDKRYASARQAAAFAGLVPRLVESGTLRGRSRLSKIGPGRLRKALFMPAVAALRWNPTIRAVRARLHAAGKPPMVIIGAAMRKLIHLAYGVLKSGRAYEPTCAHP

SEQ ID NO: 477285 - protein, 349 aa, unidentified
MKPTSQMTLDVYFRQCVGIDISKDKFTACLYMYDRASDVGCCTKSIDFDNTKSGFNQMVRWSRKEAVKSHPLTYLMEPTGVYYEHLAYHLHKIGQTVYVVLPNKARKFCESEGIKTKTDAMDARCLALMGCVSRKLKPWSPPAAIYRELRQMTRFHADLCEVRTSVTNRMEALNHMEGIAKSVHKNCKKLLKEIDTLMEKNGKAIMKKVAEDKELLARVKRIATAKGLREPTIVCVIAETEGFHYIENRKQLVGYAGLDVKAKQSGKDDPRHCISKKGNAHIRAALYMPALVAVRYNRQIKAAYGRICQKHPNEKMIGVAAAMRRLLLLIYTLWKNGEEYDETRGTMPL

SEQ ID NO: 477286 - protein, 401 aa, unidentified
MEGPIVSIDVSNGNSHYMCFIKNNKRFGKVKKIDHDIEGFKRLLEDIQKLEAETNEKVCAVFEATGVYTKPLERFLSKNSIKTYIINPLESARKRKEEIHNKKTDKLDPISISKVYYDKEEMMELKKKDETYNWLRKKNRLYEDQLNHLRKYKVTFQNQLSICFPGYLDLFRDGYSDIPMTILKKYPHPDLLKNKKAETVARYLEKNTCHTHKVSLEYALKIIGFAKKTYPGCEKDDVEVEIFKILLDKVIETQRECEKTLNEMITVASTLEEYRYISSIDGIGPNLAARIIAEIGDIEEFKSREALVAYAGLDPHIYQSGDQDGKHLKISKKGNKYLRCLLFLAVGCSIRGAKDNPVNRFYQKKKQQSNPLNSKAAKTACTAKLLKIIYGICKNKTTYKR

SEQ ID NO: 477287 - protein, 324 aa, unidentified
MIDGILGIDVCKNTLDVSISSYTKVRTKSFTNSPDGWRHLLDWLIAQKIQRVHACLESTGRYSLGIACALYEADHVVSIINPAQIRDFVRTKLGRNKTDGVDASHIREYCELFKPSPWVPPSEAHRRLGELQTIRSGIVAGLTEWKNRKNSGIVDGEAQALADATISHFTSQLGAVDKAIALTIDNDRDLQSKRDLLLSISGVGETLAGVVLAELPGPDVLRSSAEVVAYAGLNPRQHQSGTSIDRATRISKIGNAVLRAALYMPALSAMRYNSAIVALVARLKSRGRLKPKQIVVAAMRKLLVLCFGVLKTGRPFDAAIAMGG

SEQ ID NO: 477288 - protein, 407 aa, unidentified
MLFVGDDWAEDHHDVEVQDETGRRLVKARLPEGLAGVTRLHELVGAYLDEDADPTEVVVGIETDRGPWVSALVAAGYQVIAVNPMAAARFRERYSTSGAKSDAGDAHALADMVRIDRHQLRAVAGDSDLTEAVKIVARSHQTLVWDRTRQVQRLRATLIESFPAAVAVFEDLDAADSLELLAKAPTPALARRLTIAQISAVLKRARRRDIAEKSRKIRAGFQAAQLPVRPLTAAAHGAVVRAQTTLIATLNTEIGLLGEQVDAHFGQHPDAEILLSQPGLGPILAARVLAEFGDDPTRYTHAKARKNYAGTSPITRASGKKTVVTARYARNDRLATALHQQAFSSLKASPGARAYYDQLRARGTGHHAALRQLANRLVGILHGCLKTHTPYREATAWPHTVTLDTAA

SEQ ID NO: 477289 - protein, 388 aa, unidentified
MLDTDHFSPAAIRVDLGAIFVSLELSRKRWVVTSVSPGLGEKMSRHGVDGGDWAGLLALFERLREKALRRTGVEFGIVCIQEAGLDGFWLHRVLEAAGVESWVVDPASVAVDRRRRRAKSDRIDGEALLRTLMAWRRGEPRVCSIVRPPSPQAEDGRQPHRERQRLMSERTQHSNRIKGLLYAQGVSGYDPLLKRRRRELEALTTGDGRPLPDQLKRQVLRELDRLELVLEQLKAVEAERDELLAPAEAGSARAPGASLMRLKGIAEERAAVIGGELLWRSFENRRQVAAYAGLVGSPFQSGDTDHEQGLSKAGNKRLRHTMVELAWSWLQHQPASELSLWFHQRLGARPDRRRKKTLICALARKLLIALWRLETQGVVPKGAVFKAA

SEQ ID NO: 477290 - protein, 328 aa, unidentified
MKVLGLDLRGEIVLRRKLSRRQLLLFTANRSSMLIGIEACGGAHFLGRALREQGHEVRLMPAQYVKPHLKTNKNDYLDAEAIAEAVQRPTMRFVPIKTDEQLDLQALHRVRDRWVARRTAVMNQMRGFLLERGMTVRKGPSHLMAQLQEVLCEGGAFFSARLRGLLHELKQEWDELDRRIEQANDELQHIARENDACHRLMEVPSFGPLVSTALVAAIGDGVTFRKGRDLSAWIGLVPRQHSTGGKTNLLGISKRGNPYLRRMFLHGARSVVAQAERNPPALSTWLANLAGRTHRNVVVVALANKMARIAWAILSKGIRYRVSELVVA

SEQ ID NO: 477291 - protein, 483 aa, unidentified
MKSKPEEQNKRATNHPTQHQWHEMNRKQRREITRQIQSEDLSLEVIHPDAGGIDICNESHYVAVPPGRDNQSVRRFGCTTAQLKAMAAWLKQCRIRTVAMQSTGVYWVAVYDILEQAGLEVYLVNARDTKNLPGRKSDVQESQWLMKLHTYGLLRNSFRPSQEIREMRTYWRQRNDLVQSAGRHILRMQKALTQMNIQLANVLTDISGTTGQAIIKAILAGERNPHKLAEFRDPRVKASEEQIAQSLEGNWQEDLLFVLKQEHKGYEFCHKQMAECDRQLKQYLQQREDRSHGAPLPEEKRKGRLKKKKGNAPQFDLREGLFRMTGTDLTRIDGIDVMTATTIISEAGWDMSKWKTEDHFVSWLRLCPDNRISGNKVIGKGRLPTNNPITIALKMAATTLRLSKTYLGAQFRRLRTRLEAPIAIKAMAAKLARLVYRMLRYGMKYVDQGAAVYELRHRELQIKRLKAKAQKLGYRVTPIPAAA

SEQ ID NO: 477292 - protein, 407 aa, unidentified
MLFIGDDWAEDHHDVEIQDEQGRVLRRARLPQGMAGITEFGELIGRFLPEDGQAADVMVCIETDRGPWVNALIAAGYRVFGVDPKQAHRHREILSSSGAKSDKGDAHGLADMIRTRRHQLREAGGDSEIAEAVKVVVRAHQTMIWERTRHMLRLRAALREYFPAILVVCDAVDLSLTSRPLLALLGRAPTPELARKLTVRQILPMLKGYRNKDAKAAQIQQILRGEHLGQPPVVTRAYAASVRSSVAVLTVFVEELTHLETEVKAHFGQHPDAEIILSQPGLGPILGARVLAEFGDAPGSYRSSKDRKNYAGTSPITRQSGKMRIVAARYIHNNRLVDALHGQASCAILHDPDVRGYYDQLRARGTKHNAALRQIANRLVGVLHGCLNARTRYDRNTAWTHRHPAAA

SEQ ID NO: 477293 - protein, 402 aa, unidentified
MNCVGIDVSKGKSMIAVMRPFGEVVVSPFEVRHTANELSELAGLLKSLDGETRVVMESTGNYHAPVAWLLHDAGLYVTVVNAMLVHDYGNNSLRRAKTDKKDAVKLANYGLDHWLTLPRYIPEEDTRLMLKICYRQYQQYSKVQTMLKNNLISLLDTTFPDANRLFTSPPRADGSEKWVDFVATFWHCECVCGRSEKAFTTQYQKWCRKHGYNFSEDKALDIYASACRHFGVIPKTDTAKLLVEQAISQLQTTSSALAALKQEMQSLAASLPEYPVVMGMFGVGPTLGPQLLAEIGDVRRFHSKKALVAFAGIDAPPYQSGQIDVRSRSISKRGSASLRRTLFLVMSVILQCAPIDEPVYQFMDKKRSEGKPYRVYMMASANKFLRIYYASVKAYLESLEHD

SEQ ID NO: 477294 - protein, 437 aa, unidentified
MDEVTDEPLYRDRACGIDIGKAGMVATIRVPSDKDPARRAAETRTFGTTRREVLALADWLRSWQVPAVVMEATGDYWKGPFYRLEAEGFECVLADAKQVKHLPGRPKRDPADSRWLAACFERGAIRPCFVATPEFRVIRLHTRYRRDLTEERTREKQRAEKLLESAALKPSSVLTDLHGVTGRDVMGHLIAGERNPKVLAQLARGKARRKISELEAALEGAEFFTAEHAALLAAMLARIDRVSEEIARLTEVIERLLAPYEEELQQAESMPGWGRRAAQDTLAETGADMSRFPSGGHLASWAGRTPLDNQSGKRNGKARSKKGNRYLGAVTGETAVAAGRTQTREGTRYRRLARRRGKAKAQVAVGNTQLNVYHKLLSSPGTRYEDLGPDYYDRQASTRRQLAHHVGKLAALGFEVTLCRIPDPEPGSAGPGQTQAA

SEQ ID NO: 477295 - protein, 338 aa, unidentified
MKLYAGIDLHSSNNYIGVINENDERLYQKRLPNQLNDVLDALTPYKEDLESVVIESTYNWYWLVDGLNENGYKVNLANPTAIQQYNGLKHTDDKSDSFFLAHLKRLGILPEGYIYPKEERHVRDALRRRLLFVRHRTSHILSLQSAVTRNLGTKMSAREVKRLKESDASKLFSDPFLALTTKNNISTIRFLGDKIKEIEKEVLSHTKLKPEFDKLLTIPGIGKILGLTIMLEVGDIGRFPTVGKYSSYCRAVKSEKLSNSKKKGEGNRKNGNKYLAWAYVEAANFAKRYSPEAQSFYKRKKAKRNGLVAIKALSNKLARASYYIMRDKVSYNAEKLFR

SEQ ID NO: 477296 - protein, 317 aa, unidentified
MDVAFNSFVGIDIAKRTLDVHVLPERKSFKQQNDSKGRQQLREKLPPPGECLIVVEATGGYERALVAELIDAGYHVAVVNPRQARDFAKACGNLAKTDRIDATVLARFGEAVEPRTQAKIPEKQLELQGLVARRRQLVELRAAEMNRREHAGSKFVHKSLQETIDLLTKQIRRFEKQIAALVQSDDEWRQKAQIVQSVPGVGPQVSACLVADVPELGQMNRQQIAALVGVAPFNCDSGQFRGRRCIRGGRISVRCALYMATVTARRINPLIRAFADRLAALGKKPKVILTACMRKLLVILNTMVKNKTHWNLAIPTT

SEQ ID NO: 477297 - protein, 356 aa, unidentified
MLQKLNSEIAVIGIDIGKNSFHIVGQDQRGAIVLRQKWSRGQVESRLANLLPCLIGMEACVGAHHLSRKLTALGHDARLMPGKYVRPYSKGQKNDYRDAEAIAEAVQRPTMKFVATKTAEQLDLQAMHRVRERLVGQRTGVINQIRAFLLERGIAVRQGLRFLRAELPGILATRTDVLSPRILRIVEDLMGDWHRLDERIEGLSGEIETLARQDQGCARLMSVPGIGPIISSAMVAAIGSGDAFSKGRDFGAWLGLVPKQMSTGDRTILGSISKRGNRYLRALFVQAAWVMLVKLGPKQCDRYGLKSWIEAAKKRLHHNVLAIALANKLARIAWAVLHNGRAFECVRTNETASQPA

SEQ ID NO: 477298 - protein, 385 aa, unidentified
MLAHPTQPQAAARCQANTLFVSLELSKVRWLVTVSAPASDKLSRYDVPGGDGQALLKRLARLQAAASERTGAPVAIVVIQEAGLDGFWIHRLLVRNGIDSHVVDPASIAVNRRHRRAKTDRIDGVKLVRTLMAWMRGERQVCSMVQPPSPEDEDRRRLTRERARLLKERIQHTNRIKGLLCGQGIPDYDPLHRDRRARLVALTTGDGHSLPERLKTEIGRELDRLEVVVSHLAAVERERDALMAQTIAADPCAAPAALARLRGIGPELASLLWLEALFRPFDNRRQIAAYAGLTPSPWQSGGIDREQGIAKSGNPRLRRAMIELAWFWVRHQPGSALSRWFVERVGTARGRVRRIAIVALARKLLVALWRYVTQGVVPEGAVLKA

SEQ ID NO: 477299 - protein, 346 aa, unidentified
MRPNLFNDQDHVLSQCVGIDVSKKSLMATMCMFSLAEEAHYSKAIEFSNTKAGFNQLVKWSRKETCKGVPLRYVMEATGVYHEDLANHLAKIGCVVIVLMPNKAREFAYWEGMITKNDIVDSRVLALVGCVKRRIRQWQPQTPIYHELRTMTRFSQDAKKLRTELKNHLEALIHGHDTEKSVIKHYESRMAALNKRIEMNQKNMEKKVASDKALSKKVANIITAPSLGFLSVVTVIAETNGFALVQNRKQLASYAGFDVIDKQSGPVEHKSRISKKGNSRIRSILYMPAVQCPLHNRHLKKVYDRIVGKHPDSKMIAVTAVERRLLLLIYTLWKSDKPYSDDFNKE

SEQ ID NO: 477300 - protein, 341 aa, unidentified
MKKYAGLDVSLKAVSICICDDAGHVLWQGEVINEPEIVATVLARRAPNLVCAVLETGSCGIHLYRGLEAQGVPIVCICARHAKGVLKCKINKNDANDAEGLAQLARTGWYREVYVKSSDAHVIRAHLLARKQVAKARRDFENQIRALLRTFGLKVGTVTKVQFEARIRRLLESVPALALPVDQLLLARRSLLISQDALEAEAKRMAKADQRCEVLQTMPGVGPLTALAFVSSMDDAKRFTKSSSVGAYLGLTPRSYQSGDVAWTGRISKNGDGVARAMLYEAANSLMVRVKANLPLKIWALNLAERIGGKKARVALARKMAVILHRMLSDGTVYQASLGTT

SEQ ID NO: 477301 - protein, 412 aa, unidentified
MLFVGDDWAEDHHDVEIVDEAGRLLARRRLPEGLQGVTRLHALIAEQMPDDWADLEPGAATGRVKVGIETDRGPWVGALVAAGYEVFGINPLSVARYRERHSTSGAKSDAADAHLLAEIVRLDRAHHRPVAADSAEAEAIKLTARTHQSLIWDRTRHVLRLRSTLREYFPVALQAFPDLDAPDALELLGRAPDPDQAARLSHTTITAALRKARRRHLEDRAHELQRLLRTQGLRQPPVLQDAYAAVVASEVAVIATLNVQIERLGAVVGEYFGRHRDAEIYTSLPGLGVILAARILGEFGDDPDRYADAKARKNYAGTSPITKASGTKKVVLARYARNRRLGDALQQWAFCSLRGSPGAAAYYQQLRARNIGHQAALRQLANRLVGILHGCIKTHTSYDENTAWAHIQTSAA

SEQ ID NO: 477302 - protein, 400 aa, unidentified
MTSVAEKYSHVIGVDTHAKTHTFTIVDAPTGAVLETVTFPTSQNGLVRAVSWVERHSPPTRLLVVEGVGSYGALLAEQAINAGIEVVEAGVISKADKRGRGKTDQFDSVRIAKSVLGVDTSKLRWPRFDAGIRDGLHVLVVARESQTGEKTRCVNQLTALIRTHDLDLAAPKALTSAQIRLIAAWRARNEALHLNLARDEASRLARRIIELETSLKHNYTQLEQIIRATQFCVLLDAPGVGPVSAAIIITTLGTHHRVHTEAGFASLAGVNPIPASSGNTENHRLNRGGDRRLNKALTTIITTRMTHHQPTRDYVGKRARQGKTRRAIKRILKRYLARQIWRLLNQIPASHPMIAKPADPVKSQDRPRAVPRGTRSDLDTSLNQRIIKGGTTPDTPENPI

SEQ ID NO: 477303 - protein, 344 aa, unidentified
MDIKVVGIDLAKNIFQVCVWKQDGTVAWNRKVTRNKLLHTIRQFPETTLIAMEACGTAHHWARQFMTLGHDVILIPAQHVKPLVGNQKNDANDALAICEDAFRPGIHPVPVKSIEQQDIKSLRCVRSRLVEQRTATANQVRCLAAEYGVSFPVGIRNLKHKLPECLEDADNGLSFVLRRLLQGLYDDIVLLDRDIEYLTDEITNLCKVQPRYKALLTIPGFGPIVAATFMSEAGTGEQFHNGRQLSAWCGLVPKQASSGGKQSLRKITKSGNSELRMMLIHGARAVGRFCNKRQDTLCCWFNSLVKRQGKAKAIVALANKIARIGWRILVGNDDFKLSLAFRSA

SEQ ID NO: 477304 - protein, 342 aa, unidentified
MQITTIGLDIAKNVFQVHGIDAAETVVVRKRLRRSQVLAFFKALPPCLIGMEACATAHYWARELAKLGHKVRLMPAKDVKAYVKRNKNDAADAEAICEAVRRPTMRFVQVKSAEQQGQLMQHRTRDLVMRQRTQLINALRAHLAELGIVAAKGDKGVKELLTIVADEKDTRLPIDARASVIVLAAQLQAVQALIGSIEKRIKAQHRSNEASKRLETIPGIGVIGATAITATVVDPTVFRSGRDFAAWIGLVPRQDSTGGKQKLGPISKQGDRYVRRILVVGAHSVLRRAKENPEKYPWLTQLLARRPFKVVAVALANKMARMAWALLAHGGTYRAPELAAAE

SEQ ID NO: 477305 - protein, 347 aa, unidentified
MEKIIRIGMDTSKYVFELHGVNAAEQTVLRKRLRRDQMWAFFARLAPTVIALEACGGSHHWARVLQAQGHEVKLIAPQLVKPYVKRGKNDAADAQALCEAMSRPTMRFVAVKSAEQQAALMLIGIRERLIEKRTQLTNAIRGYATEFGLVAAKGLDKIDPLLARIEADQTLPALARELFAAQAREYAHLQAQIKEIEDKLMLWHRANETSRRLAEIPGIGPVGAAMLTMKTPHAKAFRSGRHFAAWIGLTPRDHSTAGKLRLGGITRAGDETLRSVLVVGATAVVQHARRKKGRTASPWLGALLEHKAPKLAAVALANKNARIAWKLMTTGQSYDARRALPAPSPTA

SEQ ID NO: 477306 - protein, 323 aa, unidentified
MQGKVLSEPNAMLAVYAGIDVCKEWLDVYVHPVGQSFRVTNDGCGLRRLKRQLQSLAVRRVIMEATSKYHRAAQRSLHEAGLHVAVVNPLRARLFAEACGQLAKTDKIDARLLALMGVALDPSETAPASLAIELLQEMVGARSAASAERTALINRLATFKSPFLRAELNRRLKALQSHIVRLEAEIGRLISADPVLARRYTILISVPGIGPATAATLLAGLLEMGTLNAKQAAMLTGLAPVAHDSGPHVGRRAIKGGRKGVRNALYMAALSASRYNNDLAVFASRLRNAGKPAKIVLVAVMRKLVVMANALITQDRTWSPIAP

SEQ ID NO: 477307 - protein, 351 aa, unidentified
MKEHFIAFDVHCEFCEMAAITHTGREVCRERCETTIPALASALEGVRRPRVLTFEEGPLADWLSRNLRPYVDRLIVCEPRRNALIAKDGDKDDPIDVGKLAQLLRGGYLKEVHQPQSLDRSLLKQHVSFYHDRVRERVRQGHQLVAQFRRHGVFASIGDLVDAEGGRPFWRQLPQRKTLLFDLQCLLEVYRLLCLQEEQVRAELIRLARREEPVRRFTALPGIGWVRALAFYVYVDTPARFPSKESLWRYCGIGLERRHSGMGRCQVRLSKSGNRRLKDVLLGAAKSAIASGDNPFADKYHNWNQQEGLHPSTARRNVARMIASTMRSLWVNGSAYDPERVCGAGRVSSAA

SEQ ID NO: 477308 - protein, 337 aa, unidentified
MDRRYVGIDLHRRRSVIYAMDAAGERLFCERISNDALPLLEVVSAAGETAEVVVEATYGWYWAVDLMRDAGFSVHLAHPSGNDWGNRRVKNDERDARDLADLLRLGRLAEAWIAPPAVREARELVRYRAKLVQLRSGLKAQVHAVMAKEGVLPGVTDMFGPAGQRLLDELELADAYLVRVESLRDLIVVYDRHVATLECRIHELLRDDRGYQTIQKLDGVGRTIAAIFVTEIGDIGRFRSPEALCSWAGLTPRHRESDTKVVRGKITKQGSKLVRWAALEAIVRYHGGPPLREHFHRIADRRGINKARIATARRLMTLVYYGLRDGEIRCLKQRAAA

SEQ ID NO: 477309 - protein, 322 aa, unidentified
MTSVTDTPMPYLGVDVSKEKLDLAIEGQADVFTFDNDAAGITQLIQRMGQLHPALIVVEATGGYERTLLNAALEASLPIARVQPGRVRHFAKAQGLLAKSDGIDAHLLAVYARCLQPAVSEKRSKNQLELDALLVLRRQLIDARTAHTNQMQMADNSFVRATLAKLLRQINDRIKQVEKRIAALIDSDDDLAGRRDLLLSVPGVGKTTAATLAAQLPELGRIDRCQISALVGVAPYNRDSGKSFGKRSIFAGRAAVRSVLYMATLTAIRCNPAIRNFAQRLKQNGKLPKVVITACMRKLLTMLNAMARDNSHWSPKCHLQNA

SEQ ID NO: 477310 - protein, 425 aa, unidentified
MPYQIAGIDVHKKMLAVVVADVEIDGDFHFKRQKVGTTPADLRRLVDWLVEHEVEEVVMESTAQYWRPVWEALEQHWRPRRRARDAAPPLAGTLHLAQAQSNRGPGGRKKDFPDAERLVKRLVAQELTLSFVPDTEQRLWRTVMRRKYQITRNRVQLHNRLEALLEEAHIKVSSIVSDLLGVSARRMLQALAEGETDPAALAALAASRLRATPAQLCDAFEACPTLHPVYRRLLKLTLEELRVIEDHLGQLDQQMADLLAAHHDAVQRLAEVPGLGGDCAQQIIAEVGATAATFPSPKHLASWMGACPGNEESAGVNYSHRCPKGNRQMRRVLNQAANAAVKAKGTIFAVVYRRIVPRLGHAQAIGAITHRLCRLIWKILHERVRYEERGPAVSVEAKKVRARKMIRELRGLGYRVELVAPSSTV

SEQ ID NO: 477311 - protein, 347 aa, unidentified
MLADELDYVVGVDPHRDAHALAVVYAATGGVSFGAEVSASERGYAQALRLAEREAPGRRAWAIEGTGSYGAGLARFLAAHGERVLEVGRTKRERRSHPKTDALDAQQAARSVLGEAKHAAPRAAGEREALRALMVARAGALAAKKAGLCQLRALLVTCPEPLRSELRSLTLARLLRRLALVRPNRHHEAEMRGALIALRALARRVQALTAEERELKREIQALVARLAPALLDEPGVGPVAAAQVLISWSHRGRFRSEAAFARLAGAAPIAASSGLVLRHRLDPGGDRQLNRALHTIVVSRRKHDPATIAYVERRRAEGKSVRETIRCLKRYLARHLFRLLETGPMAA

SEQ ID NO: 477312 - protein, 328 aa, unidentified
MTDTTSTGDGRRSVVIGVDTHKYVHVAVAIDEHGARLDELSVGADTLGYRALHEWATNLGRVRTCGIEGTGSYGAGLTRLLRRAGERVVEVNRADRRSRHHNGKSDPLDAESAARSILNGTAAAIPKNAEGSSEMIRQIKVARDSARKARSATMVALKGLVVTAPSELRESLGELSDTNLLERCASYRITEMNSVTISAKYSLRSLARRWRDLNNEVKSHDSHLQELTQHLSPTLCTSFGVGPDIAAEMLVVFGDNPERIHSEAAFAKICGACPIPASSGITHRHRHANAALHRGVIVRMHHHEPTRAYVIRKTEEGLTKRDIIRCLK

SEQ ID NO: 477313 - protein, 396 aa, unidentified
MTTIGIDIGGQSHVVARCRDGQARADREILRVSQSRAGFTVLDAWLARQPEPVTLVTMESSGHYWMPLASHLRRHDIPVAVVNPLAAKYFARSRLARTKSDPADARSLAEMAMRDTPDARDPLAGVELRQAARFAMTLVTEQAKVCQRLIRLVELGFPELGEMFDDPTCRIAREVLRLAPTARTATRRRTSTLANANMGPGHRRLGTAKAERLQAAAADSIAVPELDAEVAFEVGLLLDQYDLLERQIADADRRVAGLLDGETARRLQTIPGVGPSIVATLLAEIGDIGRFDDFDQLLAYAGIHPAERSSGTKGANPETAWHMSKAGNAHLRAAAYRMAVVGVRHNPVIAAHYARKRAAGKSKMNALGHCMRKALSIVWGVWRNGTDFDPNWGVGT

SEQ ID NO: 477314 - protein, 344 aa, unidentified
MEQVYYVGLDIHKKIIAFCSKQADGTIVAEGKIDASRKALKQWAESIPGPWIGAMEATIFTGWVYDFLKPYARQLQVGNPLMMKAITAAKKKNDKLDARTIADLVRCNLLPCCYMASEEMRDLRRVLRYRNLLVRQAVRMKNRMATLLMETGQEYNKKKLHGAKYFRGLLEKIQDVPESFKEILQMSRGALELFESCQKRLLKELVNNEVLRERVQRLMSIQGVGEVTALSWALEIGDVQRFTSIRKASSYCGLCSAQVESGGKITRMPPSKQRNKHLQSVLIEAAKLAPLYNQELADVYNKEQQRGNNHNQATITVARKLVAFLLAVDKSGKAFIKKAEQQAA

SEQ ID NO: 477315 - protein, 343 aa, unidentified
MIYIGMDVSSKEFVVHAIDQRQQKVFEGRVAPSRAGLRKLVGDLGVGPKLFVFEAGNQMKWIALWLMRQEDVRIHVVHPNEIKWINESSGKTDKVDARKLAQLARGNLLPRAVHVVEGKTRELRELVSAREQLQSKRVALINTVRGYMKQEGVSLPEKFFGRPDWKSALEAKPLGSTQKVILKSFMDGINALEHSEAEITEKMIEIEDGRCELLETIPAIGKIASRVLVSALDDAGRFDNKRCVANYGGLAPTIYQSGNTTNLGRINRDGRQEVRKVLLQCAHTIQRMISHDASPIREFFERIEKRRGKKRAVVATARKLLTIAYGVLKSGVPYDPMRLRAFA

SEQ ID NO: 477316 - protein, 462 aa, unidentified
MNNFYLGIDVSKGYSDFVLLDQKKQLQGESFQLDDTFGGHQQLYVYLSGFFVAHPDASLYAAVESTGGFENNWYRVLSQYREQFPELHVSRINPYGVHMHGKADLKRIKTDSISARTIAEYLVVHPEEVSYQEEDYYASVRRQWTLLRLLIKQKVQLVNQLEAILYIANTELLSHCRDGIRLWMLRLLKRYPTAPHLAKARVETLLKIPYMKQELADELIQGAKTSVASSVDDVTADTIRCLVDEIMGKLKVIALRKKRMEENCSIPEVALLCTFPGIATYSAIGIMIEIGAVSRFAGVKQLACYFGVHPVFSQSGDKTGNFHMSKKGRKEPRQILFTITKFAIVHNPLIKEIYAAHLQKGMSKMAAIGALMHKILRIIYGMLKHNQPFNPDIDRRNRSRSEEVRTTSTQRKKLKLRPVNLKAPVSRRQNKIRKEQELTQKDNNTLCTGSRSGSLHFPVTKT

SEQ ID NO: 477317 - protein, 349 aa, unidentified
MTQFNRIGLDTSKAVFTLHCVDEAGKPLLRVNLRRAQLIPFFKKHASTVVAMEACGGSHHWARKLIALGHEVRLIPAQYVKPYLKRGKNDRNDAEAICEAAGRPGMRFVLAKTEDQQAQAMVMKVRSTLIDQRTQLINALRGHAAEFGVIAAKGISKVLPLLTAIAAETTIPAIAREMMALLGQQIDHLNNQIATLEARFAAMHQANALSQMLATAPGIGPVIALTFAIEVDVSAFETGRHLAAWLGLTPQEHSTGGKQRMGGISRAGNERLRSLLVEGAMSVITAVETRGSKLATPWLLAMLARRPKKVVAVALANKMARMIWAMMTRREAYRRPAAAGAGCRPAVVS

SEQ ID NO: 477318 - protein, 351 aa, unidentified
MKTQTTAVPKLFIGMDIHKKSWTVHFKTDLFDHKTVTMSSSVESLTGYVEKNFKGYAINCCYEAGCCGYWIARALMEKGWEVKVVNPADVPRNNKQDWQKTDRIDSRNLCKHLSDGNLKGIFIPGEQQEQLRALFRRRIHLARSLRSIKNHIKSQLLYFGIKMPEQFDNPNWSREMKTWIGSIGWKYSSAAESMKSRLKQLEFMWYEELHISNELRAYCRKHYKKDYYLYKSVPGIGGITAAAMIAELGDIRRFNRLDELAAIVGLVPGIYQSSDNKINLGLTKRSNHQLRSLLVEASWVAVREDMALQQYYRKHAHKEPNKAIIKVAHKLLSKMRAVIMSGIPYQIGLIK

SEQ ID NO: 477319 - protein, 344 aa, unidentified
MKVTTVGLDLAKNVFQVHGIDSTGKVIVRRSLRRRQMMPYFDKLEPCLIGIEACGTSHFWSRELQALGHEVKLMPPIYVKPYVKRGKTDAADAAAICEAVTRPTMRFVAIKSAEQQSVLALHRTRDLLVGQRTQLVNMIRSQLAELGIVLAKGIHHALRLVDQLVEGVVPDIPPLAFKIVTALAEQIRELQARVAMIEGEIKTWFRGNELAKRLATIPGIGFITASALAASVTDPHRFTSARQFAASLGLTPKADSSAGKDRMGRISKMGDRYLRRLLVIGMTSQLQSARRKPDAYPWVAGLLASKPNKLVAVAMANKAARIAWVVMTRGEVYRAHRPTTEGTA

SEQ ID NO: 477320 - protein, 311 aa, unidentified
MVDKVTEAAVVGGVDTHKDLHVAAVVDQNNKVLGTQYFSTTRQGYRQMLAWMTSFGTLKRIGVECTGTYGSGLLRYFQNAGLEVLEVTAPDRMERRKRGKSDTIDAECAAHAAFSGIRTVTPKTRDGMIESLRVLKTCRKTAISARRVALQIIHSNIISAPDELREQLRNMTRMQLIRTLGSWRPDASEYRNVTNVYRISLKSLARRYLELHDEIADLDVMIAAIVDELAPELIKRNAIGYESASQLLITAGDNPQRLRSESGFAALCGVSPVPVSSGKTNRYRLNRGGDRAANRGLTLSGTKTHVKGFWS

SEQ ID NO: 477321 - protein, 347 aa, unidentified
MRFYTKQHKYYCGIDLHTKKMYLCVLDGTGAIVLHRNIKTDREVFLKTIEPFREDMVVAVECMFTWYWIADLCVEENIPFILGHALYMKAIHGGKAKNDKIDSHKIGALLRGGMIPMAYVYPAKMRATRDLLRRRNHLMRKRAELYAHMQNTRTQYNLPDFLGCIAKPQNRQGIVERFADPSVQKMMETDLAVIEAYDPIIAKMERDIVRMADQHDPVAYALLKSIPGVGRILGLVILYEIEDINRFPTVQDFASYCRLVKSIKESNGKKYGSSGKKIGNAHLKWAFGEAAALFLKGNAPGKTYYEKLANKHSKGKALSILAHKLGRAVYFMLKNKKPFDQDKFLGL

SEQ ID NO: 477322 - protein, 425 aa, unidentified
MHSKWNNKINQVTENTLVVGMDIAKRIHYACFVDERGRVIEKAFAVHQSKEGFENLYEKICQMMKEAKKTEVIIGIEPTGHYWMNLAYFLDQYGIPLVMVNPMHVKRSKELDDNLPTKNDKKDALVIARLLKDGRFSYPRILKEVEAELRIGSTLRLKLTEDLASIKNRIIRWLDRYFPEFTQVFPSFGKMALTALERTPMPQDIQGKTAEELVFFYRQVGGMRAPQLPKAKLLIEKASNSIGLTEGQKMAKHEIATLLRQFRLLETEIEAVNDQLTELAKTTMEYDLLASVPGLGDATIVDLLSEVGSFSLYENPRQLIKLAGLTLRENSSGQHKGQKHISKRGRKRLRHILFKVIVPLIRHNLAFKQLHEYYTTRNQNPLRGKQSMVVLCGKLLKILHGICKKKVYFNEQLMMKDLYCLGEAA

SEQ ID NO: 477323 - protein, 482 aa, unidentified
MKPKPQEKTKKATDHPTERHWREMNRKQRRETMRKIQSEDLRLEVVHPDAGGIDIGNESHYVAVPPSRDSQPVRRFGCTTAELKAMADWLKQCGIRTVAMQSTGVYWIAVYDILEQAGLEVYLVNARETKNLPGRKSDVQESQWLMKLHTYGLLRNSFRPSQEIRRMRTYWRQRNDLVRAAGRHIQRMQKALTQMNIQLANVLSDVSGVTGQAIIKAILTGERHPHKLAAFRDCRVKASEEEIARSLEGNWQEDLLFVLKQEQAGYEFCQKQMAECDRQIEQYLQQREDRSRGASLPEEKRKERLKKKKGNKPQFDLRAELFRISGTDLTRIDGIDVMTAMTILSEAGWDMSKWKTEHHFVSWLRLCPDNKVSGDKVIGKGRLPTNNRVTIALKMAASTLWASNTYLGAQFRRLKTKLGAAVATKAMAAKLARLVYRMLRYGMPYVDRGAEFYQAQHRQLQIKYLKWKATSLGFQIIQVPAA

SEQ ID NO: 477324 - protein, 345 aa, unidentified
MPIVGGLDIHRKQITFDYLDTVTGQVQRGQISPADREHLRAWLARFAGREDVAFAAEGCTGWRYVAEELAAAGITAHLAEPADTAFARGRKRHAKTDKTDCRHLRMLLAEGRLPECWIPPGHILECRALLETYHDLRAEHTAWVQRIHAVLFHQGAPALGEGTLRTEQGLAALRAVSADCLSPAGQLQVATALDMADMLETRLHELRHQLLDAARHLAGAKVLAERLYGVGPVTALAMTCWLGGAGRFSSSRQAVRFAGLDVTVHSSDRKGRPGRLSRQGPPVLRWAVYEAGKTHARSSAPDHAYYAQVKDRCNSKRAALSEARKILRQACHILAELGDDALSAA

SEQ ID NO: 477325 - protein, 348 aa, unidentified
MAHFVGLDVSVKETSVCVVDAAGTVILEQKVTTEPADIITLLTSLGVSFCRIGIEAGPLSQWLVNALTAADLPVICVETRHMKALLTAQQINKTDRNDARGIAQMMRVGLFKPVHVKTLVAQEQRMLLTSRKLLQRKLLDLESDLRGTLRNFGLKIGAVSGSRYEARVRELVAGFPRLAAIAEPLLNVRRVMRQQFAVLHKMLLDTVRGDPVCRRLMTAPGVGAVVALTYRATVDQPQRFAHSRAVGAHVGLTPKRYQSGETDYDGGVSKCGDALLRTMLYEAAQVLLTHGSKWSWLKAWGMRVAQRRGIRRAIVAVARRLAVVLHRMWVDGSEFRWNKASAAVPTAA

SEQ ID NO: 477326 - protein, 502 aa, unidentified
MVQCQKKVKYSLNQSKGKNRGKDQPKNPPKTKRKKTNRKRFTNLDRINPDAAGIDIASTEHWVCIPPERTGDNVRKFGTFTCDLRSISQWLKSHKVKTIAMESTGIYWIPLFQRLEQDGFEVLLVNARHVKNVPGRTKSDNMDCQWIQKLHTFGLLQGSFRPTDEVCKLRSFLRHRDNLIAMASKHTQHMQKALWQMNILLTNVISDITGATGLKIINAILAGQRDPMLLAKLKNSRIKARIKTIAKALEGDYRDEQLFILHQSLDMYRYTHQQMERCDQQVRDLLDRWDKVTDSKTKVLPPSTSCHVKPRDNEPSYNVRNYLYEILGVDLTQISGLQASSVQTILAEVGTDMTKWLSEKHFSSWLGLCPAPDISGGKILKNKTKKVQSRAAKTFRLAARSCANSNSAIGAFYRRMRYRIGPSKAITATAHKLAVIFYIMLRDKADFTELGVDYYEKQHQERMKKNLERKAKSLGLKLIPIDENETTAEIRTQKKATEVSSS

SEQ ID NO: 477327 - protein, 316 aa, unidentified
MKSPQPFVGIDVSAKRLDVAVLPAGTHFTVAHTDEGIASLVRRLQELGPQIVVLEATGGYEIPVAYAMSEVSLPVVIMNPKVLRHFAKSTGKLAKTDKLDARVLAHFAQAIRPPVRPLKDPEQAELATLMSRRRQLRDMIVMEENRRRTSTPKVRGNIEQHLAYLRQLLKDLDREIHDAIRRTPLWHEKSAILQSFNGVGPKVSASLIADLSELGTARGAQISALAGLAPMNRDSGQWRGKRTIQGGRPAVRQALYMAALVASRRNPVIREFYQRLRQAGKPAKVALTACMRKILVILNAMLKNRTYWNPQLPLAA

SEQ ID NO: 477328 - protein, 372 aa, unidentified
MSQSSTLYVGMDVHKESIAVAYVAKDHDAAVISLGTFGTRQCDIDALIRKLQSKAKHLVFVYEAGPCGYWLYRYLTKKDYVCWVVAPSLIPKKAGDRVKTDRRDAMQLARLMRSGDLTPVYVPAVDDEAIRDLSRAREDTLRDLKAAKLRLKAFLLRHDIRYTGRANWSPAHLRWLSEVVCPTPAQQIVFQEYVQTVTEQSERLGRLELELHEQVHTWRLGPVVEAFQALRGVQFTVAVTTVAELGDLTRFENPRQLMNYLGLTPSEYSSGARRQQGSITKTGNTHARRALVEGAWAYRYPAKVSRHLQLRLEKLPTAIQAISWKAQVRLCKRYRQLMAKGKNANQVVVAIARELSAFMWAIAKQVAGLPKA

SEQ ID NO: 477329 - protein, 412 aa, unidentified
MKEALRRVGIDWGSEAHQVCRIDGKAKPTQRAFPHTSEGLRALVAFVAEGDIEPEQIAIAIEVNHGAVVEALLARGLRVYSTNPKVLDRLRDRFSPAGAKDDRRDAFVLASCVESDAHAFRRIEPGNEANSRLQGATRLREELTSDLRANANRLWNELREYRPALLTLCPGADEPWLWVLIEKAPSPAAGAKLTRARIGAVLKQHRIRRVTPEEVRTVLRGDVLSLRSVYIESHMARVLILIERLKLAQAQITTIEKQIETALAERVKSEEQTERRDLTILLSLPGVGPITVATALGESGDAFERRDYNALRSLSGAAPITKQSGGTRYVVMRRTCQPRLRVALHISALQAIRIDPKFRDLYLRARARGHTVGRAIRTIVDRLLFLAVQLLRKNELYNLDLRQLAPEVAAAS

SEQ ID NO: 477330 - protein, 365 aa, unidentified
MPSVSHLAPTYLGLDVHKDTISVAILAPDRDGPEVDRIPHDEASVRRLVGRLGDPRWLRACYEAGPTGYDLARLLHRMHVCCEVIAPSLIPKAPGDKVKTDRRDCRRLARLHRAGELVAIRVPTVQEEAVRDLCRARADMVIDRTRARHRLGMFLLRHGRVWRGGNAWTLTHERWLLAQRFEEPALAATYAHYRAVLDARDAQLEAIGADLAGWYDRAPFADAVARLAAYRGITRLGALTLASEVGDWRRFPRAAAFAGFCGLVPSEYSSGTTTRRGHITKCGNAHLRAQLVESAWAYQHRPAVGADLRGRQQGLDPLVVARAWAAQLRLCGRFRRLAARKDSKNLVVTAIARELTGFLWAEMAA

SEQ ID NO: 477331 - protein, 397 aa, unidentified
MFYVGVDVSKDSFNFCIVEQNKSVLKQGSFPMCMEGFSSFISVISPFSPCTVVFESSGRYHIPLAIFLSTKGFSVSVVNPKTIHSFIKFFSANNPSKSDKKDAFYIAVFSASQPELISKHFSDSSLPSVKFLARELEKIKQEIATCKTQIKYCLSVLFPEAEKNFNVFSSTFLSILKVFPSSSQISQAGIEGIRNCIVKTKGRNPSFSAKDVVATARSSIGISNEGMETALVYYIEKLEFLLAQAKKIGASFVREVERFFSREVEIVSSVPGISVTLACRFIAEVGNIERFDNWKKVVKYAGTDPVVKESGKWRVECGISKQGNPHLRNVLFQMAVGVVKWCQVFRDYFNHKFSQFGSYKKAMIAVVNKLIRVLFAMISRGQSFKHPDHAPASISHS

SEQ ID NO: 477332 - protein, 341 aa, unidentified
MNITTIGIDLAKSVFQVHGTDERGKAVLTKVLRRSQMMPFFTQRAPCLIGMEACGSAHFWARKLTALGHTVKLMAPQFVKPYVKSNKNDARDAEAICEAVGRANMRFVAIKTPEQQALLALHRARQGLVRARTAQGNQIRGLLAELGCVIPKGRRHLESHIRAILEDAENGLSGMSRELFARLLEHLRYLDEQVQALEAQIKAWHREDAASRRLEEIPGIGPLTASALVASIGDARNFKNGRQLSAWLGLVPRQHSSGGKSTLLGISKRGDVYLRTLLIHGARSALQRQSSERWGAALAERRNKNLAAVALANKNARIVWALLAHGRDFQADYRRLRSQAA

SEQ ID NO: 477333 - protein, 290 aa, unidentified
MAATEVFVGIDVSRDSLEIATRPTGDCWHVGNDPAGISALVARLRAVGPGLIVLEATGGLEVAVLAALGSVGLPVVAVNPRQVRNFAKAIGKLAKTDALDAQVLAHFAEAVRPAVRPLPDAATRELSALVTRRRQLVEMLTAEENRRKTAASAIRVDIQEHIAWLRKRLHGVDRELGQAIRSSSLWREQEDVLRSVPGIGPVVSATLLADLPELGTLGRKQIAALVGLAPLNRDSGTLRGKRTIWGGRATVRAALYMGALVGRQPGPVCHVHPSGGSWQNQEAGVDGLHA

SEQ ID NO: 477334 - protein, 348 aa, unidentified
MEHYAGIDVSLEYASICIVDGSGKIVGEAKVATAPAALIGWFGALGLSVARIGLEAGPLSQWLYAAMKQAGLAVELLETRHVHDAFKAMPVKSDRNDARGIAQLMRLGWFRPVHCKSLAAQELRAVLTARKLVQAKLRDIENSLRGILRGFGLKVGRTTAKSFAGRIRELVAGQANLETIAQALLAVHAVLLREFNGFDKRVRAMARAHGQARLLMTTPAVGPIVALTYASAIDDPARFKSSKQTGAHFGLTPKKYQSGATDVTGRISKIGDAAVREALYQAAHVMLTKPVKGCPRLKSWAMRIARRAGMRKAKVALARKLAVIMHRMLADNKRFDPAAGATSVAAVA

SEQ ID NO: 477335 - protein, 345 aa, unidentified
MEQQRQYVGIDLHRRRSVIVRRSSEGETLEVTKVDNDDLLAFEQAVMAAGERPEVVLEACYGWYWATDLLDELGCKIHLAHPLGNNWGNRRVKNDTRDAEDLADLLRLGRLAEAWIAPPEVRELRELVRYRAKLVSLRTNCKLQAYSVLAKEGVAVPMTDLFGVSGTELLETCRLSTAYRTRVESLRDLIEVFDREIAKLETDLRHELRGQLGYEAIQAIPGIGPLFASVFVAEIGDVTRFRSPAQLSSWAGLTPKHHESDLTVRRGPITKQGSRLVRWAAVEAAQRQATGTKLRADFLRIAAHHGDTVGGRKIARVAVARKIVTLVYYGLRDGTIRSKAIVKAA

SEQ ID NO: 477336 - protein, 469 aa, unidentified
MDLLKLPIYTFYCEFLDMEERFMKKVFIGIDVGKFKNSISIIDTEGNPIIKKGLSIENDYYGFARLEEQIDLIINNYGFTYDDCIAGVESTGHYWFNLRDYLKDIGIETVMIKTDSVKHRRALEEGQKGKNDTLDARVIASCLRNGNYVYIRENERELRSLQKLTRMRNDISDDLVALKNKIHRCIDICNPVFFKIFENLNSKTGVALIKLYPSPEDIINVDLDNIKRELGEIVDKPNMRMVSLYKEECEIWGRLIKEPSYAEKVEMVAYIDKFLLQNKSKEHLDKQIKEIAKNIIPLYSEFEQIKGMPLIQLISVLSEMGDIRNFKNTRAILAFLGLSLKGNASGKYIGERKINKAGSRIVRKHLFNIMDSLVKHNEYFRIAYCYYKSYNHKNPTKKRSMQIAVMCKFVRVMYGMLKHNTNFDYKEMLKGYYFGDCNMKVFKEEFEGEKRTKKIENYKLAYSIFVNYS

SEQ ID NO: 477337 - protein, 391 aa, unidentified
MPMYFVGIDISKYKHDCCIISAADQQIVSKFTVKNDKDGFEHLLTTLNSLSNPEDIKIGFESTAHYALNLELFLENAHHSFMEVNPVLIKEYKKSTTLRRTKTDSVDCESIARWLMTVEYKPHSKGFYHSYSLKSLTRLRDRLIRQRSFYLVKITNVLDHTFPEFKPFFNERLSKTAIYLLENYGSAEKMAHMNSASYDKLRCASRGKFSIQQFLRLKELAANTVGVNNSIFDIELNSLLTLYNSLCKEIKTLEAEITKLIEEVHPHYMSIPGIGPISAAVIYAEYGDISNFSNPGQMLAFAGIEPGINDSGTESHGGRMVKHGSSQLRYVLLNACLPLIRFDITFATYYAKKRAEGKKHRVAITHVAKKLIRVIYALERQDVDFNAQKLR

SEQ ID NO: 477338 - protein, 399 aa, unidentified
MLAVGIDISKSKSVAAILNQDGSMHTSPFEFHHTQPELDAFIKYILNSNQSATILMENTGHYHYPVLKAFREAGLPVCMVNAYQIKKFGDMDLRKAKTDKKDAVRIARYALEKSYSLVPYTSMEQKYEDLRFLARQYNQRMLTLKTNKVFLLNLLDETMPGITNILPLTTRTPETSLSVLFINRFKSYDRIKKMGKSRFLDAFEKIARKSRNRQTKTYGLAIYEAALRNITTRGENEYTLAAQDQCLELVCESQKAADSIILKMQTLAETLPEYAVLRSMAGVGNRLGPLILAEIGDIRRFHSGKALNAYAGNDAPPYQSGIFESHNRHISKRGNAALRKYCFEVMQALKLTRPQDDPVYLFLLKKEQEGKPYNVAKMAGVNKFLRIYYARAMETLKQQ

SEQ ID NO: 477339 - protein, 456 aa, unidentified
MMPRKKVKSKNDRTLPMVHPNAAAIDVGSTLLMAAVRADRTSEPVRSFGTFTTDLHRLAAWFAECGVETVAMESTSVYWIPIYELLDARGFTVFLVNARDAKHVPGRKTDVSDAQWLQRLHSYGLLRASFRPKGHFIELRAYVRQRERLPEYAASHIQHMQKALTEMNLQLHHVVADITGATGLRIIRAILSGEHDPKVLARLRDYRCHSSTKTIEKALTGNYRAEHLFALEQALALYDAYHEKVLACDIRIEAVLKELSIGRGHKCDALPSSRRRTDQVNGLAFDARLALFALLGKDITRVDGFGPYLALKLVAECGDDLLAWPSAKHFTSWLGLAPNNKISGGRVLSSRTRRTGSRAAALLRLAAVTVGRTDTALGAFYRRLSARIGKAKAVTATARKIAALFYNAVRHGMEYVDPGASFYDIRYRQRVVENLHRRAKTFGFVLQPIELASAVS

SEQ ID NO: 477340 - protein, 345 aa, unidentified
MELHTIGIDLGKTVFHLVGLNLRGEVAVRKKFSRTQLLRFTANIHVGLIGMEACGGSHFLGRALRGQRHEVRLIPAQYVKPYVKTNKSDYIDAEAIAEAVARPTMRFVPIKTDDQLDMQSLHRVRERWVMRRTAVINQIRGLLLERGITLRKGRHHVHAALPLILEDADANLSGAVRLLLAQLKLDLDQLSVRIDEADAVIQKTAHENEACRRLVAIPGIGPVTATALIAAIGNGGAFHKGREFAAWMGVVPREHSTGGQQKLLGISKRGNSYLRRLFVQGARAVMQQRTKQSSGLSAWLAQLTSRTHRNVAAVALANKLARIAWAVLAKNEHYRPPVLADVAAA

SEQ ID NO: 477341 - protein, 346 aa, unidentified
MGKSITDLSSVTTVGLDLAKHVFQVHGVDALGRVVVAKAIRRNKLLEFFASLPPCLVGLEASGSAHHWARELIKLGHDARMMPPAYVKPYIRRQKNDAADAAAICEAVTRPSMRFVGVRSLENQATLMRHRAREMLVSQRTQLMNGLRGHLTEVGVIAAQGPRHARDLAGLIEACDETIPIEVCEALAELVHQLHRLDEAIARLDRTIAKMARKDETAHRLMSIPGFGPITASAMAATIQDASSFAGPREFAAFLGLTPKQNSSGGKQRLGRISKMGNRKLRKLLVVGAHAVLFHRKRHTDALRMWAKRLIEKKPFKLVAVALANKMARIAFAIRRGKTTYRENAA

SEQ ID NO: 477342 - protein, 436 aa, unidentified
MEEVEDEPLFAERVAGIDIGKAMIMVTVRVPGDSGSGRRQQETREFRTVRKDLLALADWLRSWQVTKIGMEATGDYWKPVYFLLEREGFCCDLYHASQVKALPGRPKTDKLDSAWLAKITERGSLASSFVPPEDIRRLRTHTRYRRHLTQARTSEMQRCEKLLEDAHLKLSSVISDIHGKAGRNMLTAIIAGERNPKVLAQMALTRMRAKIPQLEEALDCSFFTGQHAFILAMMLANIDHLTAQISELTAKIGVLCQPYEHQIAQLDAIPGYGVITAQDIIGEIGTDMTVFPTAGHLCSWARRAPQVRESGGKRKGKNATGRGNPYLGAALGEAAVNAGRTQTFLGTKYRRLVRHMPKRKAQGAISRTQLVITHALLSDPEAVYEDLGTDYYERRANIRREVRSHARAIERRGYRVILEPLEPGLDPDILPVTKAS

SEQ ID NO: 477343 - protein, 470 aa, unidentified
MQPGLSRKNVMSRKRQQPQKIVRSDVLQQINPDAAGIDIHLEEHWVSVPEGRDEQPVRKFGTFTEDLCAIADWLAACAVKTVAMEATSVYWIPLYEVLEERGFEVCLVNAHTTKNVTGRKTDLLDCQWLQQLQTYGLLQPSFRPPADIVSLRCYVRHRDTLLRYRSMHIQHMQKALELMNLKLSSVVTDITGATGMQIIRAILEGERDPQVLAHLRDHRCHKSTADIAKALTGNYQPEHLFLLRQSLELYDVYTDKLAACDAAIEAEYAVFEVQVDALEASAPLPQPQSIRRRQANHPSYDLHACLKRLTEVDLTDVPGLDVLLVQEIISEIGLDMNAWPTDKQFASWLGLAPNNKVSGGKVKSRHSKPIQSRANLAFRLAARSVARMQSALGAFYRRLRAKHGAPKAITATARKIAVIVYHMLKEKKPYHDPGATYYEERFRERKFRSLQRQAKQFGWCLLPDSHPVVS

SEQ ID NO: 477344 - protein, 407 aa, unidentified
MLICGIDIGKFRHEACIINETGRQLAKTLSFTNTVDGGEKLLEYFKQNNPDNQVIVVGMEATGHYYLSLYCFLFDQGYQVHAINPIQSDAIRNLFLRKTKNDAKDSFLIAETIRIGRFSSTPLADEDILSMRQLCRHRIDLVDYIADQKRKIIGVMDRVFPEYQHMFSDMFGKTSTELLHKAVTPEELLAIDTIELCELLKKHSRGRFGEAKAEELRSAAKRSFGITIGTSAFAMQLRQLLEIIALLEKQLLELEEEITQYLRKMDTYITTCPGIGDVLGAIILSEIGDISRFSQPKNLVAFVGVDPSVSQSGEFIGTQSKMSKRGSPHLRRAIFLAANVAAFRDPVLSAYYQKKRAEGKHHYTAIGAVSRKLICIIYAVLRDNKPFAIITPEQHKQNYQSSRPAAA

SEQ ID NO: 477345 - protein, 409 aa, unidentified
MDQLIERCCGLDVHRDTVAACVRVPGPNGKQRHEVRPFGTTAVELLALRDWLEAHGVTHVAMESTGVYWKPVFYVLEEAFTCLLVNAAHIKQVPGRKTDVKDCMWIAQCLEHGLLRGSFVPPAAIREIRDLTRHRKVLIQERTRAANRVHKLLEDAGIKLASVATNILGVSGRAMLEALGHGTTDAEGLADLARGKLRKKLPALRQALAGRFRPHHAFLVSQLLAHVDYLDEAIATVSEEVEGRLAPFAAQLTQLDTIPGINKRTAEVIIAELGVDMSCFPSDRHLASWAGICPGNNESAGKHKSGKTRKGNRWLRMTLIEAAAAATRTKDSALQARYRRVMRHRGHKKAVVAVAHAMLRAVYHLLAEGTTYREPGADYYDRRHTHRVTRRAIQLLERQGYRVVLEPAA

SEQ ID NO: 477346 - protein, 341 aa, unidentified
MSEAFIIGIDLAKRVFQIHGADAAGKVLYRRKLSRPQFNKFLNEHPSCIFAMEACASAHHWGREALAAGHEVRLVPARYVKPFVKRHKSDVVDAEAITEAAMRPSMRFVPVKAPEQQAQAMLFRTRELFVRQRTQLINSLRGYLAEFGIVLRLRIRNADILKREVEEQAHKLPDEAKRLAERLLAQIETISAEVEGLDHSIKMHAKTSEETRLMQTMPGVGPMSAIAISAFCPPAKNFRTGRDFAAWLGLVPRQHSTGGKERLGRITKMGQKDVRRLLIIGAMSVINSIERWKRCAEPWLAHMLETRPRMVVAVALANRMARRLWAMLMTGQIYRIRGAVA

SEQ ID NO: 477347 - protein, 469 aa, unidentified
MPSAGLQGILHKICPPKDQYVRKKTYWFFCDTVKVEGKHCCKKPAFSKAHGELQLAFYLCQYEQIDYCHLCNIRNGLNTDLSLAKKTKVKGKQLKIIIKYMETKESNPINFLYVGVDVHKDQHTAVATNCFGQALLEKEINNSKEEFEKLVKGVKTLAEAKNLKVIFGLEDTSAYGQRLARHLCQENFPVKVVSPVLVDRERRKLTHPEKSDSQDALGVAKALISKIGTLPNFSISKTNEITKELKDLVIDREFLVKEQTRIKNQLHRLFHKAYNSEYRLKFKNPFAVRALRYWLKNPVPAELKESLVLKNQIKRKVRRLKDIRKEVMEIEEEMNILLNQMNQKLETLNGCGLVSASSVLAEIKNIDRFQSSSSLAKYGGLCPKEKSSGKSIKHIKTKSGNRRLNKAIHRIALAQIGRQGNVYGKEYFKKKIAEGKNKAQALCCLKRRIINIIFAMLKHKTAYDYAARC

SEQ ID NO: 477348 - protein, 451 aa, unidentified
MSACTGVTSHRGRSSSPGEERRHAVAIGGAYEWFVGIDWATQAHQVAVLNGHGHQVAERSVTHAGGAIGEFVDWLGQVTGGEPERVAVAIEIPRGAVVETLVERGCHVYAVNPKQLDRFRDRYTVAGAKDDRRDAFVLGAALRTDPGAFRRIRLDDPVVIELREYSRMDEELREELARLANRLREQLHRFFPQMLALVPAADEPWLWALLEAVPSPPAGGRVRRAQIAKVLRAHRIRRVDADAVRAALATAPLPVAPGTAEAARAHVALLVPRLRLAHEQRLRCGRQIDALLTRLGDPGPSSGPPGPPSDVRILRSLVGVGTRVAATMFAEAAQLLGDRDYHALRAHAGIAPVTRQSGKRQQVVMRYACNRRLREAIYHWARVSVQHDARSAGLYAGARRRGHTHGRALRGVGDRLLRILVAMLKSRTVYDPEFVRQPVADVLPLAAEVAP

SEQ ID NO: 477349 - protein, 415 aa, unidentified
MALKIVYKICCGIDVHKTFVVACIASTNAKGVTTYESHRFSTYTKGLRDLLQWLLARNCKDVCMESTGKYWIPIYNILENDCTIVLAHPKYVKAIRGKKTDKKDAKWIADLFKHDLVAGSFMPPADIRQLRDLMRYRFKLTCFRSSEKNRLQNCLTVSNIQLGNVVSDTFGKSAQAILDKLLENPADTSFDLEPLVFKSLKKKLPELRDAIDGFITPEQAGKLKVIKGHFEDLESRKAELEELILALAAPYQQELAILQTAPGISSTFTAIGIISEIGANMEAFPSAKHLCSWAGLTPTNNESAGKKKSVRVSKAGCYIKPLLVQCANAVVTSKKHPEIRNRYLRLKKRRGHKKAIIAIARMLLTALYHMLKNGKNYNAKLYKKSDLPPVEREITVEQAILIARNQGYKIKSATV

SEQ ID NO: 477350 - protein, 331 aa, unidentified
MFNCIGLDISKKLIAVHIPINKANIEIENSLKGIKGLYSKLNKLYKKEFDDLVFIFEPTGNYSFTLTKFCNEKYIKCFLINPKQFSNFSKALGQRNKTDLIDAQVLSQSISLAKEEAIKVPYIDTIVEELKELISYYKFTSKSTSKLINQLESIMVKDGSKYMINDLKKSLKVSKNKEIEILTKIKDIINSDEKLLKGYNNIKSLSGIGEVGAIVLLHLFIKYPKANQRQIVSLSGLDPIEKTSGTSVHKKSKISKAGSRVYRGSLFMGVLTAIRYDDNFKLFFERLKAKGKHTTAVQIAVMRKMIIIAHSLYKNDKQYDSEFYKKSCSCL

SEQ ID NO: 477351 - protein, 427 aa, unidentified
MRFIGLDVHRDFCEVAISEGGKARRAGRVASRPAELELFARSLGSDDRVVLEATGNALAIARIIEPHVGEVVLAHARKVRAIAEAKVKTDAIDACTLAELLAADLVPRVWLGDERTRLLRRLVSRRRQLVKQSTRTKNEISAVLLRTLQGRPPVSDVFGKAGRVWLAALELGLDERETVDAGLRQLDFLRAELTQVDRAIAEQALGSVEIRRLMTIPGVDVTTAATLMAAIGDVSRFPSPRHLAGYLGLDPKLRQSGVAKPRHGRISKEGSAAARHALVEAAWSSAKAPGPLRAFAERTAARRGRHIAAVAVARKLAVLAWHLLSRGEDYAYQRPSVVRRKLRRLELKTGAPRAKRQAGAAPLWGSRAQDDLERELARQAELAYRRLVADWKRTRPRDGAGATPGRASSRPSERQAARQETAPPPAL

SEQ ID NO: 477352 - protein, 359 aa, unidentified
MAVIEEQERRIVGGVDTHKDLHVAAVVDEQDRVLGTRSFATTRQGYRQMLAWMRSFGELRRIGIESTGSYGAGLWRFMQQAKVPVLEVTTPDNQDRRRRGKNDDLDAQNAAHAAFAGQRTVTPRSRDGMIESLRILMACRKTAVSARRVALQMIQNTIVCAPDGLRDQLRSLTRMQLVRTLASWRPDLTAYRDLDSAYRIGLKSLARRYLELHDEIADLDAMIAAIVDELAPNLVARNSIGHVGAAQLLLTAGDNPERLRSESSFASLCGVSPVPASSGKTVRHRLNRGGDRAANSALHIIAIGRLRTDPKTKDYVARRIAEGHSKLDAIRALKRYLAREVFTLITQRRREINATQIAA

SEQ ID NO: 477353 - protein, 449 aa, unidentified
MMEPQEIEDGEYEQILERVAAVDVAKASGMVCTRVPREDQPGKRRTRVWQVDAATSAILELADHLVGEGIEKVTLESTSDYWRIWFYLLESAGLSVQLVRAQDVKQAPGRPKSDKLDAVWLAKLTERGMLRPSFVPPVEIRQLRDYTRLRTDLTRERTRHYCRLEKLLEDALIKVSAVASKLDTLSVRDMLEALIGGERDPQVLAGLARGRMRAKHDRLVQALTGKFDDHHAELARMLLDQVDALSAQIGKLTTRIEELIAAIPAAQGVDADGTTGPTAGLGARAPVLPAVDRLDEVTGIGREAAQAIVAEVGLHMSVFPTPAHLVSWAKISPRTVQSGARSRAGRTGKGNPYLKGILGEAAAAAVRTDTFLGERYRRLARRRGKLKALVAVARSILVIVWHLLADRTTRYHDLGVGYYTSRIDKNRKTRNHIRQLEALGYTVTLAQAA

SEQ ID NO: 477354 - protein, 338 aa, unidentified
MTILTVGIDLAKNVFAVHGVNKAGKAELIRPAVPRDKLHELIASLAPCVIGMEACSGAHHWARLFQAAGHTVRLIAPKFVTPYRMTGKRGKNDAADAAAICEAIQRPHMRFVPLKNLDQQSRLMVHRARQGFVEQRTATLNRIRGLLSEFGIVLPLKAATVRRRACECLEDLPGYANTVVGDLLSEVTRLDERVAQYDAHIQAMAKDDARARQLMQLSGVGATTATCLLAMIGNGHDFDCGRQFAAWLGLAPGQYSSGGKTRLGRITKAGDAYLRSLLVLGAKALLAAAKNKTDAISRWAVALAERRGYWRAVVAIAAKNARMAWAVLRRGEAFALPA

SEQ ID NO: 477355 - protein, 367 aa, unidentified
MRAAELRPRSDDIIVGIDLAAREHQAVIVGADGRRLTRFRVPHSRDGIAELLRRSRAKSWQATGRVLAFEATGHVWQALAAILEERGERYVVVNPLAVFRLREARRMDRTKTDLTDAEQIAELARTGMVTSTRPLHGPYLALRRSWGEYVRVRFEAARLKSLLRQQLFGLFPELLEVWSRVDKAARSVAPDERLEAAALEARRIVARYDLLEAQLAEVQGEVEALLGEIEEARWLATIPGLGFASVAGIIAHTGPIGRYRHGRQLVKLAGTNPTRNETGERTGGYQAMSHRGRAGLRQVAYMATISCLAHNVRLRAHYDRLVSRPERPLAKMTALGACMNKLLLWAFAVMSKRRAFELDHEWKECAA

SEQ ID NO: 477356 - protein, 355 aa, unidentified
MTIVGCDFHPSWQQIAALDVETGEITERRLMNGNGEAERFYQALPAPSLIGIEACGNSQWLIELWQRLGHEVWVGDAAQIRASYVRKQKTDRRDAAHILKLLVENRFPRLWTPNAEQRDLRQLLIHRHKLVSLRTRVKGGLQHLALNRGLQKKNKLWSAAGQKVLCELQLDPWAACRREDLLGLLASMNQLIGKLDTAVERAAQENSQARLLMTQPGVGPITSLAFVLTLGDVSRFKRGKQVASYLGLIPRERSSGGKQRLGAINKQGNMFMRTLLVESAQTVTRLARIIRDFADKRSLLCYKHVDETMFEAHSEASSCLTIAQHSVGCSQEFFASRWWLNVISGRAVPMVELCC

SEQ ID NO: 477357 - protein, 413 aa, unidentified
MEKIREKAAGIDIGAQKVFVAVEGQEVKSFYTFTEDFEKLCEYLLKSGIETVAMEATGVYWNILYEMLEETGIDVWLVDGRQTKQVPGRKTDVKDCQWIQQLHSYGLLKRCFVAEADIKELRIYQRLREDHIRSASMHINHMQKALTEMNIRLKEVLSQVHGVSGLAIIKAILNGERDKDRLLNLCHQSILKTKKEEVLKALNGRYTKSGLFALRQAFDSYCFYQQQIEQCDHMLQETLKRISGGKEQKVKNQRKPIRHNRPDIDNLGGMMMKIFDGKDATTLSGITDYSWMQLLSETGTDLSRWPTEKHYTSWLGLAPCKDTSGKMKRRKRKMGRPKAGQIFRQIAHSLLNSKRIALGAFGRRLNARKGPYIAIKAVARKLAETYWRIMVKGMEYVELGVKKYEEQILQQKQ

SEQ ID NO: 477358 - protein, 342 aa, unidentified
MEKVSIIGLDLAKRSFQAHGALAEGGVAFRKKLSREKVLAFFAEQPRCVVAMEACGSAHHWGRAIRDLGHEVRLIPPAYVKPFVKRQKNDAADAEAIAEAASRPTMRFVAVKTQEQQGRAMLFRTRDLLVRQRTQLINALRGHLSEHGVVAAQGPANVKVLAEAVEDQGTSLPLLVVELARVFLDQIEGLSKRISELEKVTVHEAACGETTRRLQTMPGVGPITALAIETFAPPMDVFKRGRDFAAWLGLVPRQHSTGGKQVLGKISKMGQRDIRRLLIIGAMAVVRSALRKGAPEGSWLQRMLARKPKMLVAIALANKMARSIWAMLAKAENFRVPVVAAF

SEQ ID NO: 477359 - protein, 330 aa, unidentified
MEHIAIDWGGRESQICVRSADEQIVESRRVRTARLGEYLALRPPSRVIIETCTQAFSIADQARACGHDVRVVPSTLAPALGVGERRTKTDRRDAEALSRASCRLDLRSVHIPSVEARERKAICASRDALLRARTLLINSVRAWLRSDGRTVRATPENLPSRVRTSCVGRPSHVEALLTTLDALNTQLGAADRELRLLARNDELCRRLMTVPGVGPVTAVRFKAALDDISRFTNAHAVESYLGLVPGEHSSSSSQHRLGITKAGPRALRACLVQAAWAARRSKREPLMAQWSREVEKRRGKHVAVVALARKLAGILFAVWRDGTEYDQQRA

SEQ ID NO: 477360 - protein, 423 aa, unidentified
MGYRIAGIDVHKKMLAVVVTDIAIEGEYDFERRQFGASPDELRRLADWLIEQKVQEVVMESTAQYWRPVWQTLERYWKAACRSWEGAGPMSGSLLLAHAQSNRGPRGRKKDFVDAERLVKRLVAQELVLSFVPDSEQRLWRTVVRRRYQLTCDRVRLQNQLESLLEEAHLKLSSLVSDLLGASARRMLNALAEGETSPVALAALADRRLHATQQQLCDALGTSTELNGVYRRLIKMALEELQLIERHMDELDHEIADLLNQHQDAVQRLAEVPGLGVDSAHQIIAEVGATAATFPSEKHLASWIGVCPGEEESAGISTSNRSPKGNRFMRRLLNQAANAAVKAKGSIFEIVFRRLLPRLGFKQAIWAIAHRLSRLIWKILHQGVRYEERGPAVSQKSRAARTTKMIKELRSLGYRVEPTGNPA

SEQ ID NO: 477361 - protein, 341 aa, unidentified
MNHYAGIDVSLKYSSVCVVDASGKIVREDTVASEPEALIAWFSELGFEVTRIGLEAGPQSQWLYAAMRQAGLTVELLETRHVRDAFKAMPVKTDRKDAQGIAQLMRLGWFRPVHCKSIAAQEIRAILSARKLVQSKLRDIEMSLRGTLRGFGLKVGRTTPNSFAARIKELVEGHPTLQVIATSLLAVHAVLLREFKVFEKRLRGMVRQDERARLLMSTPGVGVLVALTYVSAIDDPGRFTSSKRAGAHFGLTPKKYQSGETDITGRISKIGDKGVRTALYEAAHIILTKPVKGSALKSWAARLAKRAGMNKAKVALARKLAVIMHRMLVNRTPFNPAAAAA

SEQ ID NO: 477362 - protein, 348 aa, unidentified
MTVYIGVDFHARQQTVSYLTTEEGEIHQLVLVHEKPAEVRAFYAQFASQQVVVGFESSGYAAWFEELLEELGCEIWIGHAADIRRFARRRQKNDRRDADLILDLLVAGDFPRIHRYTAASREVLQQLRYRQKLVKMRTMVVNGLLFMASSRGVTLRSQLQSKRGQARMRALALPAPLAQQRDELCQLLLELSTKIATVQAWLEARAEQDVRVQRLRTQYGIGPLTGLCLTATLECPERFANGRKVTAYAGLDPTEDSSAERRRMGAISKQGSRLLRFYLVEAGQVAMRKDADLARAYKRVLLRGGHAKAKVAIGRRLLIRAFIMLRDEIDFAEFQRRGVAARSSRGTA

SEQ ID NO: 477363 - protein, 477 aa, unidentified
MARTSALNRKQRKALARQLRSDDPGLEVMHPHAAGIDVGNSAHYVAVRPDRDPNSVRRFECFTADLHRLADWLQQCGVTTVAMQSTGVYWIPLYEILDARGLEVYLVNARHTRNLPGRKSDVQESQWLLKRHTYGLLRNSFHPPADIRVVRTFWRQRGDHVQAVSTCIQRMQKALTQMNIQLANVISDLSGWTGQRIVRAILDGERDPQKLATLRHPGIHATQDTIAKSLEGTWQPDLLFVLQQEVAMYDAYQQRIVECDQQLEQHLKQFADKAADTVPADEPSSTTSHARLRSGPKRRRKAGSHTPQFDLGHELHRISGVDLTRIDGIDVGVAQTLISEVGLDMTRWKSEAHFASWLGLCPDNRISGDRVLRRGTRHVVNRAATALRLAATTLLRSQSYLGAQYRRLRARLGAPKAITAMAHKLARLVYRMLTWGQEYVDKGLQYYEDRHREQQVQLLKKKAAKLGLQIAEPTAAA

SEQ ID NO: 477364 - protein, 318 aa, unidentified
MTVPHVCVGIDVSKAQLDVALRPEGRFAVSNDETGLTQLIEHLHRVAPVRVVLEATGGLEIPLVGALAAAGLPVVVVNPRQVRDFAKATGKLAKTDALDAQTLARFAEVIQPALRPLPDEHTQTLAALVTRRRQLVEMLIAEKNRLRQAPKPIRPNLQAHIAWLEQALQQADTDLAEAIRHSPVWRENEALLRSAPGVGPVLSTTLLATVPELGTLAHKQLSALVGVAPLNRDSGTLRGRRTVWGGRAQVRAVLYMGAIVAARFNPVIRAFYQRLRAAGKAKKVALTACMHKLLVILNAMLKHRTPWRQGTEPAQAGV

SEQ ID NO: 477365 - protein, 435 aa, unidentified
MDEVTDEPLYRDRVCGIDIGKAELYATIRVPSDNDPARRAAETRGFATTKRGVLALADWLRCWQVPAVVMEATGDYWKGPFYRLEAGGFECVLADARQVKNLPGRPKRDPSDSAWLAACFERGAVTSCFVAAPEFRLIRLHTRYRRDLTDERTREKNRAEKLLESAAIKLSSVLTDLHGVTGRDIMDHLIAGERSPKALAQLARARARRKITELEAALEGAEFFTGEHAALLKAMLDRIDRINAEIAELSQVIERLLAPFEEQLAQAESMPGWGRRSAEDALAETGADMSRFPTGAHLASWAGRTPLDHQSGKRKGRSRSRKGNRYLAAVTGETAVAAGKTQTREGARYRRLARRRGKPKAQVALGNTQMRVYHKLLSSPGMRYADLGPDYYECQASTRRQIAHHVGKLGALGFEVTLCRLPEPAQDNSATAPAA

SEQ ID NO: 477366 - protein, 371 aa, unidentified
MKHNSIFIGMDVHKNSIDIAIAESGRTGQVRHYGKINGTLAALNKAVGKLVGKGDRAHFVYEAGPCGYQIYRHLTARGFDCAVVAPSMIPKQSGNRIKNDRRDSLMLARLHRAGELTAVYVPLPEDEAIRDLSRAREDAKSDEKRSKQRLLAFLLRSGHRYSGRSPWSQAHMRWLADIKMAHLSQQIVLQEYIDTINQCTLRLQRLTDQIRQLLPQWRLFPVVQALQSLRGVSLIVAVTTVAEIGDFKRFQNPEELMGFLGLVPSDKSSGEKIKHGSITKAGNSHVRRMLVEAAWAYRFRARVSRALLKRQEDLPHPICEIAWKAQLRLCARYRHFWAKGKAKPVIVTAIARELCGFIWAIAIKTDIPVAI

SEQ ID NO: 477367 - protein, 391 aa, unidentified
MINIGIDVGKFKHCASVMDDKTGEIVIKPFFFNNDQKGFNLFYSKTKQYIHRKHSVGMEDTGHYMINLTDFLLDKKFTVKFINPRSTCLRRKELGMSAKNDRKDSILIAEMLSEKKFWRSVTRTTQETDKLREITRLYHQLQEQQNEDMNRLQRALDIVFPEVNKLSWTRYSKAYMQFLAKYPTAASIASEDIRNLRNALKTDGRGRQCKLTAEDIKEAAKCSVGEDNIAVALEVQSIIAIISTRKQQIENLENKIEEFSLKLNSPIISIPGISHITGMTIIAEIGDIHDFSDAAHLISYAGMEPLVHQSGKYDAAHMPISKHGSRYLRKALYQAVFTVCKYCPTFNAYYTKKRNQGKTYRCAQGHCVRKLLRVIYKLLANNTVFDENLVR

SEQ ID NO: 477368 - protein, 422 aa, unidentified
MNYKQNEKINQVKESTLVVGIDIGSTKQYARAFDWRGIELGKVFTFSNSREGFESFKAWMQHLQDKYKKLDAIVGIEPTGHYWFDLGAYLEDEGILLVMVNPYAVKQTKELDDNSQSKNDRKDPKVIAKLVTEGRYSAPYTPDGVYADLRIMVANRKRLIREMTQIKNRFARWFAIYFPEYTDVFGDYEAQSSMLLLKKVCTPEAIVELGAEKINQIWRDAKLRAVGMKRATTLCETAKRSIGLKKGSSAARYEMKLLLEDYEYKKAQLDAVMEEIEKLCRKIPESEQMLAIKGIGVITVAGFLAEVGDVRRFESPRQIQKLAGLSLRENSSGKHKGQTTISKRGRSKLRAVLFNAAIPLIAKNPEFKSLHEYYTTRANNPLKKKQSVIAISCKLIRVFYAILANGVTYDAQKMLSDIHRQP

SEQ ID NO: 477369 - protein, 320 aa, unidentified
MNETLSETVVELKFVGIDVSKEALDVGFDPPSMVERFGNDEAGIVALRQRLKAFTPTLIVMEATGGFETHAATELAGAGMAVAVINPRQARDFAKASGELAKTDAVDARMLALFARAIRPAARPLKDETVRELDGLVTRRRQLIDMRTQETNRLTTASKLQSKEINKHIAWLNKRIDELDRGLTKRLRNSEVWRTKDDLMQGIPGVATVTSLSMLAKCPELGTLNRRQIAKLVGIAPLANDSGKRRGARAIWGGRADVRSVLYMASLSAMRYNAVIKAFADRLRAAGKPPKVVIVACMRKLLTIMNAIIKNNTPWNPKIA

SEQ ID NO: 477370 - protein, 429 aa, unidentified
MSYRIAGIDVHKKMLAVVVSDVEIESEYQFERRMFGSSPEQLRSLAAWLLEQEAEEVVMESTAQYWKPVWGALERYWKPLREKREGARRRSGTLHLAQAQSNRGPRGRKKDFPDAERLVKRLVARELTLSFVPDAEQRLWRTVTRRKYQLTRNRVRLQNQLESFLEEAHIKLSSLVSDLLGLSARRMLKALADGETNPAALAALADQRLRATPAQLCDALGACAELSPVYRRLLKMALEELRLIDEQIGQLDQEMANLLSQHQDAVKRLAEVPGLGVDSAQQIIAEVGPTSATFPSEKCLSSWVGACPGDDESAGVNYSHRSPKGNRHMRRLLNQAANAAARTKGSIFEIVYRRAVPRLGHNQAIGTIAHRQCRLIWLILHQGVRYEERGPAVTKRSKQLRTSKMLRQLRSLGYRIEPPNPQPSQAQVQ

SEQ ID NO: 477371 - protein, 327 aa, unidentified
MEIAIDVGKRRSYVVVQKDDIVGNEGYIETTKDGFDSIMPNGEGNTFILEAGNNLYAVARILEQYPNSKIVVAHPAAMKLIAKSPNKTDRNDAHKLLDAYNADYLPTSYLPPKEIREDRNLCSARDFFVRQRSAVKNRIRYEANRCGIELGSLTMKVISELEKSEHLTLRQLAMMHKEYTSRISDFDDAVEERAAENHYAALIDTIPGIGYSSALSIASQIGDVHRFPTEFRFFSYAGLCPSIHQSGSVEWKGHLKSGNVSLRTTLIECVWMHIAHCDDSMITETYHRLARRMGPKKAAVACAKRLARIIYFMLIRDKPFEPYEAGR

SEQ ID NO: 477372 - protein, 421 aa, unidentified
MNQLADSQYTAYVGIDWAAAKHDICVQSADGGEREFACISSQPEGIEAWAQDLKQRFGGPIAVALELSKGPIVSALQKYDFFVLYPINPSTLAKYREAFTPSGAKDDPTDAELAVDLITRHPERFSPLNPQSVDMRKLIGLVEQRDKFLSDQGRLVNRLSHALKHYYPQVLEWFREHNTVVFCDFVSQWPTLTQVKRARKASLERFFKSHHVNSAKLIERRITAIKAAMPLTEDPAVIEPHRLQVEMLIEQLRITITALKRFDDAIKVTAQKLPDYDFLFSPLPGAAKVLAPRLLAAFGEDRQRYPHADALQKYSGIAPVTKRSGKSTWVHWRWQCPTFVRQTFVDWAAQTINKSAWAGAYYRQQRAKGCSYQVAVRALAFKWIRILHRCWQDRTPYDESKYLEALRRKGSPLLKYLADAA

SEQ ID NO: 477373 - protein, 330 aa, unidentified
MKNYKEVVGIDVSKKTLDAYCYQGQVHKEFVNDVSGYKSLLKWVLREVKSSDVFYCFENTGYYSLKLALYLDSQNIVYVEESPLKIKRSSGIVKEKTDRLDASLIARYAWLYREELRPSTIKSTSHLELGRLLALRDQLVRNNAGLKGTLKEMKVLLSSPTTDAGCTSLVRSIAYLQKQIKGIEVRIIDIISSDDSMSRNYELLSSLKGVGLIVACQFIYHTGNFTRFSSWRAFSSYCGTAPFEYQSGTSIHRRKQCHYLGDRKMKSLLSMASVSAIQHDSELRLYYNRKLAEGKDKMIAINNVRNKLIARAFAVIKRGTPYVVLQQHAA

SEQ ID NO: 477374 - protein, 299 aa, unidentified
MKSRTKKTLYCGIDLHSNNAMYVVTDQTDKVVFKKRIPNQLPVIVSALKPFKSKLVTVAVESTYNWYWLVDGLMDQGYPVVLANPAAIDQYDGIKDANDLTDAAFLAHLARLDILPTGYIYPKEERPVRDLLRRRTLLVRQRTATKLSLQNMFVRQAALNINWRKIRKLTPEQRVDILGDNEFLLFVTESQIELIEVFNKKILQFEEKVLEHAKLKPEFELLLSIPGVGPILALTIMLETGTIDRFKKVGDFTSYCRCVRAKKQSNGKPKGRNNSRNGSCKSCSSSYEGLGNTRSYNSK

SEQ ID NO: 477375 - protein, 388 aa, unidentified
MQTVADRPEVPTAIRTDLGAIFVSLELSRSTWLITSLSPYGGEKMSKHAVRGGNVAGLLERFAQLREKTRARTGKVFPFVVIQEAGLDGFWIDRALQNEGIESHVVDPASIATSRRRRRAKTDRIDGEALVRALLAYKRGEPRVCAMVKAPTPEEEDRRRLCRERKVLIVERVRHVNRVKGLLFSQGISGYEPLRRDRRERLDTLQTGDGRLLPDHLKAQVRRELDRLELLLEQIKAVEAERDVLLAAQQVAAPAPAAMLLDIKGIGPEFAAILWSEGLFRHFDNRRQVASYAGLAPTPWQSGSVDRDQGVSKAGNPRLRTTLIQLAWLWLRHQPQSALALWFEERVRRNGGRLKKTTIVALARKLLVALWKYVTAGVVIEGAVMKAA

SEQ ID NO: 477376 - protein, 347 aa, unidentified
MRFYNQQHNYYCGIDLHARILYVCILDATGNKVLHKKIGADPDALLEILAPFQDEIVVGVECMHCWYWVSDLCLDYAFDFVLGHALYMKAIHGGKTKNDRIDSFKIASLIRGGNFPIAYVYPKAMRATRDLLGRRTKLVRHGAHLKAHVSNTFTQYNVPSPNLALRYPSSRKDVRNRFNEPAINRNIDIDLNMIGFYTKELTHVECFIEKNAKQHNPKDYMLLQTVPGIGRILALTILYEIGNIQRFPSVQHFASYSRLVKCKAESAGKQYGTSGNKIGNAHLKWAFSEAAVLYLRGNEKAQKYLARLQKRMSKAKALSALAHKLGRCVYFMLRNNTVFDEHRFLPQ

SEQ ID NO: 477377 - protein, 439 aa, unidentified
MSASTGLTLATEVEHYHQGGLAVKEEFSFYVGVDWGVEFHQACILDAQGEKICQRRIEHSGPGMLEFCDFLQALTNGEASALAVAIEVPRGPIVEALLEHNYAVFSINPKQLDRFRDRHTVAGAKDDRRDAFVAADSLRTDQHCFRRVRSDHPDVIRIRELSRSEENVGIDLRRCVNQLSQLLLRYFPQLLRLCSTPDEPWLWALLELAPTPQRAAKLTEKRLKQLLGKHRIRRWTAEEVGEILSAPPLPLAAGSAEAISEHALLLLPQLRLLHLQRKQVADRTQQLLDHMAASTADFPESQEHRNIPVLLSLPGVGRIITATMLAEGAHILSLRDYHALRAHAGIAPVTKQSGKSRQVLMRYRCNQRLRNAFYHWARTSIQHDPRSKHHYAHLRQVGHNHGRALRGVADRLLAVLIAMLKSGQTYDPNRRSTADLTTA

SEQ ID NO: 477378 - protein, 411 aa, unidentified
MDKIYDKCCGIDVHKKLIVACFRCGKKQEVREFGATTRELLELADWLKEGDCEMVAMESTASYWKPLYNILESSDLNAIVVNARHMKAVPGRKTDVKDAEWIADLLQHGLLQPSYIPDKDQRELRELVRYRKSLVGERTRELNRLQKMLEGANIKLSGTVSDINGKSARSILEYLLTGKSIDGSKYDEMYEQKIIAHNLKATKEQIVDDLNGVMSPLQRRMMKELLVHLDELNIHIKNLNDEIDNFMKPEEKQASQAIQDVTGIGNTSAQAIISVIGSDMSRFPTDRHISSWAGLCPGDNESAKKRKSGKTRKGNALLRTTLITCAHAAVKNKKSYFYAQYMRISAHRGPKRAYVAVAHSMLISIYHILKDGVVFKDLGAEYYNQFNKERKINAYLKKLKALGWEAPVVAA

SEQ ID NO: 477379 - protein, 391 aa, unidentified
MVCVGIDVAKDKHDCCILDSDGMVRADCFTIPNNMDGFKQLLQTIRNCTKKSDKIKVGLEATGHYSYNILGFLLDNDLAVHVMNPLHTNLYRKSLSLRKTKTDRVDARTIATMLLSDVDLKSYTDTAYHNEELKSLTRYRFDKVCERAKLKQSVSRLVTILFPELEKLVPSLHIASVYSLISEYPGAKQVSEVHLTKLTNLLTTASKGRYGKDKAIQIRDAAKTSIGSVMPAKSLELKHTIKLIKELTSEIDEIEDSIQQIMDELHPPILSIPGVGIQSAAMILAEIGDFSNFESPDKILAYAGCSPSTYQSGKLTNCYAHMEKRGSRYLRCALYNATKYVCHWNPVFAEYLAKKRAEGKHYNVALSHAMKKLVRLIYALQKSGKAYLTAA

SEQ ID NO: 477380 - protein, 350 aa, unidentified
MRIIGCDYHPGFQQIAFVDTDTGELQERRLEHPEEAEKFYRDLAAQGVKVRVGMEASGHARWFERLLAELQFELWIGDAAEIRTKRVRKQKTDRQDAQLILRLLLKDDFPRIWVPDWENRDLRQLLWHRHRMVQARTRIMNQLQAVALNEGLRCKKRLWREAGREQLEAFPLAPWASRRRHDLLELLDRLSPTITELTQTIEQEAEKCPAARRLRTHPGVGSLTALAFVLIIGRAERFQCGKQIASYLGLVPSEDSSGDRRRLGHISKQGNALLRFLLVEAAQVTVRSLPEWRSKYFHLAMRRGRKIAKVAMARRLAIQLYWMMRKEWDYEQVRRFGPHAGQPEHRRGVQ

SEQ ID NO: 477381 - protein, 345 aa, unidentified
MEPMYYIGLDVHKRKISYCVKDSGGKVYAEGSLPATRLDLDLWMKTLPQPWSAAMEATMFTGWIYDHLKPHAVALKVAHPLMLRAIAAAKKKNDRIDASKICDCLRCDFLPECYMASTAIRERRRTLRYRNLLVRQMVQMKNKIGTLLMEAGVSYNKQRLHKAGYFRELLATNPDINEGLVSLLRLCRETVVRLQKTESALVRSLECDSLLMDRVERLMTIPAVGPITALTWVLEVGEVQRFSSIKKAVSYCGLCGAEKSSANSVQRTPLSKQRNKHLQTTLIEAAKMAPRNSPELAMLYDKEKQKGNANRATLAVARKLVAYLMAVDRRQGAFQVVETSSGIAA

SEQ ID NO: 477382 - protein, 353 aa, unidentified
MKINERISYRDKKVFIGVDVHRRHYTVSCICDDELVKKCQIVAIPEQLLCLIKKYFSEAKVKVVYEAGFSGFALYRHLEQHKIDCIVVNPSSIEISSRDRVKTDKRDSLRMATQLANGRLRGITVPSKKRENQRLITRSREQLLKERTRIKNQIRFKFHQFGLFPLEFQTRLTRNQVILLLKKDLSEELRASVNLYIEIWDILDTEIKKLDKELQKQADDDPLEMVYRSACGVGAVTSRTLANELGDMSQFANEKALFSYTGLTPAEYSSGEHRRLGHISRQGNARLRRVLIECAWSAIKKDKKLNEDFVRISSKAGKKRAIVAIARKLIGRVRAAVRKGEMYEPGHNSAILK

SEQ ID NO: 477383 - protein, 338 aa, unidentified
MQFYAGIDLHSSNNYLAVIDADGKRVSKQKMPNEPGTILSKLDNFKKEVVGVVVESTFNWYWLVDLLGEAGYRVHLANPAAIQMYSGLKHVDDKHDAFWLAEMLRLRILPEGYIYPKEERPIRDLLRKRGHLVRLRTSLILSLQNIVSRNCGVRLSVNDAKRLKEDVIAPLLETNEDLALAGAISKETIDFLTRKIRSVESIVEQKVKLKEEYCHLLTIPGIGKILALTIMLETGPISRFPKVGNYVSYCRKVNSKWTSNDKAKGNKKNGNKYLAWAFSEGAELARRYDTQCRSWYNRKMQKTNFMVAHQALAHKLARAAYCIMKKEVAFTPENLFAI

SEQ ID NO: 477384 - protein, 381 aa, unidentified
MKTLNKYVGLDVHKDTTVVAVADGGRAGEVRLYGEISSDLGALERVLRKLGGAGITLHVVYEAGPTGFVVYRRLQQLNIECIVVAPTKTPQEKGLRQKTDRRDALLLARLHRAGELTAIHVPDAVDESVRDLTRARADAVHDLTRARQRLKSFLLRQGYRYSGKANWSEAHQRYLRELVLPLPALKAVLEEYLLAIDQATQRVVRLEELLAVQVPLWRMYPAVAALMTLRGFQLTAAAVLVAELGDVRRFAHPRHVMAFLGLVPRENSTGNTRRQGSITKAGNAHARWILIEAVQHAFLPPKVSAPLALRQQGQPAAFRALSWKAQVRLHKRGWHLLHRGVMKAKVTVALARELSGFVWDLLRQVPPPKDPAGSHATLTPG

SEQ ID NO: 477385 - protein, 351 aa, unidentified
MNYMGIDHHKQYSHMTLMDEKGKVLKAGKVMNLRSDVEEFLEGAGDEVEAVIEAGFSSYVMVDLLEALGVEVKIANPSEVKAIAKAKIKTDKRDSKILAHLLRTDLIPEVYRRSGENQRAQRVMRQRAFFVESLTRVKNRIHALIAKQSEEVLRDLNQIKDLFSKRGMEVLKRIELPSTDKQLLEALLKTYGHLEEMIKESNDLVKSLYKEMPEAQLIDTVPGFGTFLSVLTAIEIGDIGRFDSAGKLHSYAGVIPSTHSSGNRTYHGRLIKEGNRWLRWAAVEAVIPATRKDFDLRVFYEKRARRKNANVAKIATARRLLAIIYKILKEKRCYEPYKREWKGKKKESAAL

SEQ ID NO: 477386 - protein, 352 aa, unidentified
MAKFEFNELMSIGIDIGKDTFHIVGFDHDGQRVLRKQIKRLALIATFEKLPRCVVGMEACLSAHFVSRTLRKMGFEPRIIPAIYVKPFNKGQKNDFNDAEAIAEAALRPNLKAVSEKTQDQLDLQALHRVRSRLVSRRTATINQIRAFLIEQGITVRKGLRALKNSFETILEKRKDEISPRMRSILIGLYGDWMWMDDRIDKVSKEIEEISRTEENCVNVMTVPGIGPMISTAMVAAIGEGEAFDRGRDFAAWVGLVPRQYSTGGRTILGRISKRGSRYLRMLFVQAAKVIMMRPHRWPDFSFGEWLTRASERMHRNKAAVALANKLARMAWSILRNKTAFDAPRDEIMAGV

SEQ ID NO: 477387 - protein, 454 aa, unidentified
MSDAKRSRRRREMSPVHPDAAAIDIGATMHVAAVGPGRDAEPVRTFKTFTEDLHRLADWFTGCGVRTVVMESTGVYWIPVYEILEQRGFEVVLVNARDARHVPGRKTDVSDAAWLQRLHEYGLLRGSFRPQGEIAALRAYLRQRERLLDDAAAHMQKALTQMNLQIHHVVADITGVTGMRIIRAIVAGERDPDRLAAHRDRRCHASVETVRQALAGNDREEHVFALAQAVELYDVYQTKVTACDARIEAVLERLRPASAKPVGPLPAARHNTRQPNAPAFAVRQALYAVLGIDLTQIHGLGPYLALKLVGECGTDLSAWPSAKHFTSWLCLAPCNKISGGKVLSSRTRRSGSRVAALLRLAAVTVGRTETALGAFYRRLSARAGKAKAVTATARKIAVLFYNALRHGMDYADPGASCSEDRYRRRVLGNLQRRAKSMGYVLQQADPGLPAKSVS

SEQ ID NO: 477388 - protein, 336 aa, unidentified
MSKLYYLGTDVSKEKIICYDGKEEFCFENERGLREFKRFLKKRYKSLEEVVVIFEATGVYSAFLREFCATNGIKAVMLNPRQTPNLAKVIGGRNKSDKIDARMLYRFKDIVKAEDIKVPELDKELEEICAYFSSYRLIVKERVALNNHLKALERNPFAPEELKKVLKGEISRLREQERWLIEEMERRIRSREELETDLELLLTIEGVGMATAIVLLLLFKRYEVRNRNQVVALLGLDPVIRESGRSVRFRSRISKQGREETRAILFMAAMSGIRYNSKLKAFYERLVERGKPKKVAIIACARKLALIAFAIYKTKTAFNPTQGNDKNVKNNAGRKK

SEQ ID NO: 477389 - protein, 391 aa, unidentified
MREAEVQERRVIGLDVHPYLFSAAALSGPDAARARPEWVVDRVGLDRLEGVLSKRARPGDVIALEASGNSFAVAERLGALGLNVVVLESQSVGQVGKTYCATDKVDAVKIARVYLSGLAHPVWIPDGKAAERRELFFAHRNAVRDSTRGRNRIWAYLNQHGVRRPKGLRLAGRHALEALLALRDWTPLQQLVLAQQLTAFQEAEARRRRLREEIAVEVASDPDLLKMIRLLGIRDKVAFALAAFIGKIDRFENPKKLVAYFGLNPCVHLSGIGGGTGQLSHSGRADVRALLIQAAHSILRHGRGPTPRWAIALKMRKGHNVAVAALARKLVVSVWYLLKGFFTPLTDVTETLRVKLHKIASEIGRRRLHQMGFPTVVAFERQKREILLQTV

SEQ ID NO: 477390 - protein, 345 aa, unidentified
MKIVGCDLHTRYQQIAMLDDETGELIERRLEHSNGEAKDFYAKLRGPVRVGIEATGHTRWFERLLAELSYELWVGDAARIRAADVRKQKTDARDAALLLELLLSGRFPRLWRPSREDRDLRQLLWHRQKLVWMRNAVGNQLHALAMGEGICRKKQLFSKKGRAELEALNLDPWASRRRQELLHMLDQTDASLKQFDHAVNEQASGNELAVRLMTHPGVGPVTSLAFVLIVGPVTRFQRSKQLVSYLGLNPQEHSSGGRQKLGAISKQGNPMLRGLLVEAGHTAARLDPELRQDYQRLRLRRGGSVAKVAIARKLAVRMYWMLRREINYTQLVRTQGSSRATLVQP

SEQ ID NO: 477391 - protein, 418 aa, unidentified
MNEEGNTRGTRRYVALDIHKHYCVVAGVDREGKVLLQPVRVEHADLEGWLKKNLRTSDQVVLESTTNAWHVYDLLEPLAKQVVVANPIKVKQIACARVKTDIRDTLILARLLAANLVPNVWVPPMHVRQLRQLLSQRRQLVETHTQIVNRMHSVAHRHHLKHARGKRFNEKNTAWQKDKVLSSVEQFQLGLEMENRAYMEKQISRIGKEVTKMSHQKPWAQSMTYIMQLPGFGVITAMTVLAAIGEIGRFETPKKLASYSGLTPGLEQSGTKKRGKGITKEGRRELRWALVEVAQRAVKSDPHWKRRFQELQHRMHRNQAIVAIAHRLLELVWYVLTRRQPYRHFTHERIAYKYLTWAWQMDEAAREGLTRQQFARYYLMRLGIGHDLTRVALNPKYPRRLASEAELLELRPELKQTE

SEQ ID NO: 477392 - protein, 421 aa, unidentified
MKPAQAAQLAALIGIDWAHAKHDICLQPGTHAAREHSVLKHTPEAIDAWVRELRQRFGKQPIAIALELDKGPLVYALQKYDGFVLFPVNPNLLAKYREAFTPSKAKDDPTDAELALELLVRHREALTCLTPQSAPMRALIQLVHDRRRLVHDRVRVSNRLTNTLKNYFPQALDWFPDKATVVCCDFLSRWPTLKQARRARKTALQAFFREHNVRYPQVITQRIDAIRSAMPLTEDPAIIQPQALLVSALVAQLRTVLAAIEQFDSAIAETCSQLSDYALFRNLPGAGPVLAPRLLAAFGEDRERYHSASEIQQYAGIAPVTERSGQKSWVHWRYRAPSFLRQSFVEWAGETIPRSFWAKAYYQQQRDKGLAHQAAVRALAFKWIRILFRCWQDRTPYDESVYLLALQKRGAPLLQRIADAA

SEQ ID NO: 477393 - protein, 345 aa, unidentified
MLIIGCDFHPKFQQIAFTDTETGECEERRLHHPQEAEQFYRALAGGKARVGMEATGSFRWFRRLLSGLGHELGHELWLGNPTEIRASAPRRQKTDKRDARQLLQLLLEDRFPQVWLPTVADEDLRQLLLHRCRLVRLRTKVRNQLDAIAKNEGLLGQRVGTKKGRQQLQALPLSGWYQQRRQDLFELLDQLERRIVPLNQAVQQAAEERADAQRLMTHPGVGPVVALGYVLAIGDWQRFPRGKYVASYLGLIPEEDSSSNKRRLGHITKQGNSLVRWLLVEAATKAQQCDPGWHRQYLRLARNKHHGVAKVAIARKLAIRLYWMLRSGQDYEQVKERGSHAGQSV

SEQ ID NO: 477394 - protein, 344 aa, unidentified
MTIVEDRPVITAGVDTHADTHVAAALDSIGGLLGTRQFPATAAGYADLLKWLAGFGDVALVGIEGTGSYGAGLARHLAAAGIRVVEVDRADRQDRHRQGKSDPLDAVSAARAAQSGRASGAPKGRDGAVEAIRALMVAKRSARQERTQANGQARALIVTGPDDLRARFARHTPAALSAELAALRPRPGDVPGYATRIALRELGRRVQFLDAQLARLDELIVPLVTARAPSLLSLHGVGPDTAAMLLIAAGDHPERLRSESAWAHLCAVAPIPASSGKTSRYRLNRGGNREASHALWRIVITRMGSHPATRAYVDRRSKEGLAGEGNHPLPEAVRRPRGLPAPPR

SEQ ID NO: 477395 - protein, 372 aa, unidentified
MDLSALWVGLDIGEVTTSICVLGPDDKPVLERRSGSSAQEIAEALSCFEVQKFADIIVESGAEQGLARTLRGLGYPVTLVDSGKAQRFLGIRQNKTDRNDARGLADIARLGRSKSLSVWVRGEECETLRAELVIRDQLVRQRTAIRCCLRSLLRRHGSSLKKVALGTSFCAVVEVELDAIAGTAPRRAIRQIEPLLEVSETLSRIVSDADKRILEFAKSNAVTKRFLAIPGVGPICAVSFYSVIEDPQRFLQTNDVGAYLGMVPKFKQSGTAFRRTSISKAGNTMTRGHLYLSAGVMLSRAAQQSAIGDWGKALAARRGYKLARVAVARKLALAMLSIWKHGCDFEPYPGGTTSRRGEVGLDSGSISRAASL

SEQ ID NO: 477396 - protein, 353 aa, unidentified
MSEKYVGVDAHQAGLVIEVMGAKGNCLMHSVIPTRADAIKEYFSGLKGTVHVTFEEGTLAEWLYSLIQPLVAKVIVCNPRANKLLAVGVKDDDHDAHNLADLLRMGRLKPVYHERQGMQVLKELVHNYDALTTDRIRVMNRVKALYRGRGIPSAGPDVYYKRNRDQWLNKLVEVGRRQRAEFFYQQFDHQSGLCRESRRAMLAEARKHAAYMIIRQISVLGPVRTAQIMAAVVTPHRFRTKRQFWPYVGLGVITRTSSDYELVKGRMQRRQKVVGTRGLNQNYSHRLKYVFKSAAIDGMRREPFRQYYAQLMDKGMRPEMARLTLARKIAAVTLAIWKSGKGFDALKLEAVKG

SEQ ID NO: 477397 - protein, 377 aa, unidentified
MESIIYVGIDVHKDTYSLCSFEMQKDVFFSQHTVKASTANVVSYLNKISESNGNAITVCGYEAGPTGYKLCLDLQRQGFNCVIMAPTSIAKTAKDKMLKTDRADAQILARTLAYHSYKQVVLPTENILAIKEVVRLRASVLKSCKKAKQNLLSFLLYHGISYPGGGRESYWTVKFFTWLKTVTFASDYLTYCFEEYVSEVSRQIQRLEQLNAKLKELEGDKEISEGVKKLKCISGIDTVTAISLIAETGDFNRFKSAKEFASYTGLIPGRHDSGLSVGNSVGITKQGNQNLRHLLVESAKSIKRATALSHGQKSRRLLARQEGMKSEIINYADRAALRIKSRMRKLEIRGLNYNKAAVACARELACFAWGIMTNHIQ

SEQ ID NO: 477398 - protein, 392 aa, unidentified
MFIVGIDIAKRFHEASVIAQDGSLVRKALRFANSQAGYNKLMNMVRGLNEPVVFGMEATGHYWLTLFTHLRNDGFTVHVINPIQSDALRGMYIRKTKNDAIDSMIIADVIRFGRYCETSMQPGDLQAMRELCRQRFYVIDMASDLKRKVLALLDQVFPEYEKLFSDTFGASSMELLSQYTTPEEMLSVSTEKLAELLETASRGRLGLAKAEEIQEAAKNSFGIVLASGSFALIIRQYIEQIRSLESSIAVFDTEIARLLAGFDTQLTTITGIGPTLAAVILSEIGGDIKRFSSPAKLAAYAGVDPTVKQSGDFTGTRMKMSKRGSPYLRRAIWLASTVAAFKDPAIHALYERKRSEGKDHMTVIGHVCRKMVSIIFAVLRDNTPYSPAVISD

SEQ ID NO: 477399 - protein, 413 aa, unidentified
MDKIYDICCGIDVHKKLIVACLNHKRKKELREFGATTRELMELAEWLQKNNCEIVAMESTGSYWKPLYNIMESYGLHVIVVNPAHMKAVPGRKTDVKDAEWIAELLQHGLLQPSYIPSKEQRELRELVQYRKSLVGERTRELNRLQKMLEGANIKLSGTVTNINGKSARKILEYILSGNEIDEKKYDEMYEEKLIAHNLKASKEQILDDLKGFMSPLQRRMLKELLQHLDELNVHIENLNDEIDNFMKPEEKQASQMIQDVTGIGNTSAQAIIAVIGTDMERFPSDRHISSWAGLCPGDNISAKKRKGGKIRKGNALLKSTLVLCAHAAVRHKSSYFHAQFKRISTHRGKKRAYVAVAHSILIAIYHILKDGVKYQDLGAEYYNQFNAERKIHAYLKKLKALGWEPPKEAVPA

SEQ ID NO: 477400 - protein, 464 aa, unidentified
MPSQPSFRPRPRRTISTLEQICPDAAGIDCGAAAHWVAVPPDRDAMPVRSFRTFTTDLQALADWLIACRVTTVAMEATGVYWIPLFEILEARGLTVLLVNARHVKHVAGRKSDVADCEWLRDLLMVGLLRGSFRPAQAIVPLRAYLRHRATLLESASMYVHRMQKALVQMNVQLTLVVSDITGLTGLRILRDIVAGQRDPHQLAAHRDRRCHASAADIVAALTGNYRPEHVFLLQQNLELFDAVHHQLRACDAAIAAELALLTAPCPPPATPLPEDQRRRAPRANEPRFDMRTPLHRLTGLDLSQIDGIGPYTALRLVAEIGTDMRRWPTAQHFTSWLTLAPQNRLSGGRRLSSRTQPSANRAAAILRLAAMSLGRTDTALGAFYRRLAFRVGKAKAITATARKLALLVYRSLADGLLYQDPGAAAYEAQHRAHVLRRLRRQATQLGISLVDMATGEVLEEVVS

SEQ ID NO: 477401 - protein, 426 aa, unidentified
MLSSIARSKATKIPWGWIAAKSEARLRLLKPLNLETTMLLDHPSDGPAAIHTQFGAIFVSLELSRSNWLITSLSPGKGEKMSKHSVTAGDVPELLKLFADLKRKAEVRTGQSYPIITIQEAGLDGFWLHRVLQQEGIESHVVDPASIATPRRRRRAKTDRLDGETLLRALLAYKRGEPRVCAMVVAPSPEAEDRRRLCRERRTLIAERIRHVNRIKGLLFAQGISDYAPKRRDRRARLEALRTGDGRQLPSHLKAQIGRELDRLELLLKQIKAVEAGQEALLAAARTPASEQAVPAPVTMLLALKGMGANFAAVLWSEAFYRQFANRRQVAAYAGLAATPWQSGGIRHEQGVSKAGNPRLRTTMIQFAWLWIRHQPQSALTRWFKERSQQGRKRAIVALARKLLVALWKHVTQGVVIEGAVMKPTA

SEQ ID NO: 477402 - protein, 319 aa, unidentified
MTDQPLAKYVGIDVSKGRLDVAIGAQGEYWDVGNDEKGIVKLVERLKEVQPTLIVLESTGGLEVLVMTELYAAGLAFALVNPGRVREFAKSMGLLAKTDKLDARLLARFAEAVKPSITRLPNEQEQHLSGLVTRRRQLLEMLVAEQNRLNTVRLSLKGKLEEHIRWLQEALAKLDQEIQEYVRQSELWQEKTELMRSVPGVGPVTSSTLLAELPELGKLDRKKIAALVGVAPFNDDSGHRRGKRRVKGGRSSVRNVLYMAALSASKYNPVLRSFYQAMIKRGKEKKVALTACMRKLLTFLNAIIRDSAPWKPGLEHVLS

SEQ ID NO: 477403 - protein, 454 aa, unidentified
MQKQDSYDYYVGIDCAQNKHDFAMKNNQDKFLIKKGHFSNTLQGYEKFLNTVLSKCLDKDKILFGMEVTGIYGTNLYERLKSDGYHVVMIFPDSVKNYRDYKRLNKTDKIDSACIAELLLNGDAQIVHAEKNGYTDLKAYIRRRNALKVTCTQETNRFLAKVCLYFPDLLKVFPSGRATLKAIFSIYPTPYSIIEADFNELVSVLQKASKNKFGVDKANELIHAARNSIVVRKSISDGELYNIHSLIDSIDSLESEIRNLEKIIDSKAEEFPAYHVLLTLTGCGKITAATIVAEIGDISRFHKASQIVSLAGLYGDNSKSGSSVNKRGKISKKGSRYLRHAIYMVAEFARRNNPIFKAYFTKKKNGDRTKHILAVNAVANKLCKVIYSLMKNQSTYIIQYRDLAKLSESTQNEFFQNAETDFSAKTRRKKYLYEDEYGELHEFVFKSIKTALIE

SEQ ID NO: 477404 - protein, 313 aa, unidentified
MSPAKVYVGIDVAKDWLDVAQRPGGEAWRVPSDERGVAALVERLKSVRPTLVVLEATGGLQIPAVAALAAAGLRTVVVNPRQVRQFAGATGRLAKTDAIDAQVLAQFGEAVRPEVRPLPGAATQELSALVARRRQLIEMLTAEKNRLRLAAEKVRPNIEAHIRWLEGELLDLEGGLGDVIRSSPVWREQDNLLRSVPGVGPVLSFVLLADLPELGKLSRKEIAALVGVAPLNRDSGQFRGRRQVWGGRSHVRTALYMATLVASRYNPAIKSFYQRLLSVGKPKKVALTACMRKLLTILNAMMRHQAPWEMSAS

SEQ ID NO: 477405 - protein, 320 aa, unidentified
MSQHSLRNEVAVGIDVSKDFLDVDVAPAHQPLRVPNTPEGHAALVKHLRSFKVDIIVVEATGCYELAVTAELLAAGLPVRVMNPRQIRDFARATGRLAKTDRIDAAVLADFGLAVQPEPRPLPDAQTQQMREKLARRRQLVEMITAETNRHHRATAEGVRRSIEVVLNVLKDELRRLDEDLDQAIRESPAWREKVELLQSVPGIGPQNARTLAVELPELGQCSRQQIAALVGVAPMNRDSGQFRGRRTIRGGRGRVRHCLYMATLTATRWNPKIRHFYQRLLAAGKPKKLALVACMRKFLTILNAMLRERKPWTETAVTT

SEQ ID NO: 477406 - protein, 324 aa, unidentified
MDAWIGIDVSKDTLDACFLRPNGKTISKQFLNNSAGCQKMLNWVSTLSAPLRHFCMEATGAYSQSAASFLVEKGERVSVENPARIKYFGMGEGILNKTDKVDARVIALYAKQKTPEPWRMSQPEVLHLLALMRRIQAIETHLGQERNRLGEPDLDPAVACSIDTILQALQQEITRLEAQVREHIDQHPNLREDKKLLTSIKGVGEKLAHWILAEMPDPKEFESAKSAGAFVGLSPVEYSSGRTIKKRTRLSKAGNSNLRRALYMPAMAAVRFNPIVADLYQRLIARGKCRMVALGAAMRKLLMLAYGVLKTRIPFDPEFAISKT

SEQ ID NO: 477407 - protein, 342 aa, unidentified
MSVYVGIDVHRKRSQVAVIDGKGEVLANRNVPNGAEPILKVIGGLPPGTPAAFEAAYGTSWLVELLEDYGFAPHLVHPSRCKAIASARLKNDKVDAAILAQLLRADLLPEAWIAPPAIRQLRALLRHRVALVRLRTRLRNRIHAIVADYGYDRPAGEYWSGPGRAWLASLQLPAVSRELVEDDLGLIDALQEPIDRLDWEIRQRARSDPRVKVLTQLPGIGPFTALVILAEVGDISRFASARKLASWAGLTPTVRGSDRVAHYGHISKEGSVWLRWVLCEAAQTAKRHPEFAATFQRIAQRRGKKIATTAIARKLLTRAWHLLADAERAAAPQPLAPPTAAR

SEQ ID NO: 477408 - protein, 369 aa, unidentified
MKNVTTYVGIDAHKKDLFIAMLVGQEKTPVTWTVPNEPSAIRRLVRKLERDAAGPVRACYEAGPCGYALQRRLTTPRVSCQVIAPALIPRKPGERIKTNPRDARKLVELLRADLLTEVHPPTPEDEAVRDLCRARDDAREDLQRCRHRLGKLLLRRGLHYTAGRHWTQGHRRWIGSLEWTHAAERSVVDDYLLAIDQVEARLKELDQRLTEVAETEPYKERVGWLRCFRGIETLTAMFILAELHDFRRFHSARALMAYLGLVPGEDSSGEKHRRGRITRTGNALVRRVLVEMAWHYQHRPGVGGALARRRRGQPSRIIAIADKAQQRLCRRFRLLALQHKPGPKIAVAVARELAGFLWAALQPAAPTQA

SEQ ID NO: 477409 - protein, 343 aa, unidentified
MQTIKTIGLDIAKSVFQVHGVDAGGQMVIRRQLKRRFVLSFFEKLPPCLVGIEACASSHHWSRELQALGHTVRLMPPAYVKPYVKRQKNDSTDAEAICEAVARPNMRFVPTKTVEQQSCLMLHRARHLFIRQQTAVINSIRAYLAEFGIVAPVGRRGIEQLLEVTADTADHRLPELARACLAALGDQLRALKVQILQFDRRIIAWHRSNATSKRLDAIPGVGPALATALVASIAEPTAFRSGRDFSAWVGLVPKQNSSGGKDRLGSISKQGDRYLRSLFTAGALAVIRYAKIHGAGHRPWLTGLLARRPTKVAAIALANKIARMAWAMMARGERYREPVALAA

SEQ ID NO: 477410 - protein, 410 aa, unidentified
MAAVMIGVDPHKGSHTAVVIDQAEMALDQVTVRACAAQAERLLAWAAAWPERTWAVEGAGGLGHLLARQLVAAGERVLDVQPRLAARVRLLAAGDVNKNDPDDARPVAVAALRSAACPPVRADDHGAVLKVRAKRHRDLSRARNQVVCRLHAVLCELVPGGVSKQIRAAAAARLLGQIQPAGAVQAARHELAGEFLAGLRRLDAQRRDTRRRLATAVRASGTTVTEVSGVGPAVAAAVPGDVRDISRFPGPDCFAAYNGTAPAGVSSGGRVIYRLSLRGNRRLNHAIHMAAVTQIRYRHTKGRAYYDKKIAEGKTPKEALRALKRQVSDAIYQRMKADARRAAAAAAGPGGHPGNGSVASVAGSHPADRLFGQATPGPEPTLRPRPGRSKATRPGSSRRTRRPAPGHTSA

SEQ ID NO: 477411 - protein, 349 aa, unidentified
MIEHSKESVVTVVGIDLAKRSFHVYGADGHGKQVFSKKLTRARLSLFMANLPACTVAMEACGSAHHWARTFRTYGHEVRLIAPQFVKPFVKSNKNDAADAEAICEAAQRPTMRFVAVKTVEQQDIQAIHRMRSLMVDRRTAQINQIRGLLLEYGIEIAQSRAAVGRRLPEILEDADNGLSARFRAELHELAEELRHLDTRVSHYDEQIARQDAQVQRLMTIPGLGAKGATALVAAVGEDPRLFQNGRGLAAWLGLVPRQHATGGRERLLGISKRGDVYLRQLLIHGARAVLRWVERKEDHTSRWATALKARRHTNIACVAMANKITRVAYAVLTTGKPYDPASGALAKG

SEQ ID NO: 477412 - protein, 411 aa, unidentified
MEVINKRCCGLDVHKESVVACLMIREGGKVHKEVRTFLTMTLDLVVLHDWLKAHQVTHVAMESTGIYWRPVFNLLEEDFTVLLVNAAHIKTVPGRKTDVKDCEWIADLLSHGLLRGSFIPPEPIRDLRDLTRYRKSLTDERVREVNRLQKFLEAANIKLSSVANDVMGASGRAMLEALTAGSTDPQVLSELAKGRLRKKLPELRKALEGRFRPHHRFMVGEILTHIDFLDEAIERISQEVSCRILPFSKTVEVMDLVPGINQRVAEGVLSEMGVDMSYFSTDGHAASWAGLCPGNNESAGKRKSGKTRKGDRWLRRYLIEAAWAATRKKGSYLSALYHRLVVRRGKKKAIVAVAHRLLVIIYHMLKDQGSYRELGSDHFNKVNAAHVQRHHVRRLESLGFKVILEPLAKAA

SEQ ID NO: 477413 - protein, 336 aa, unidentified
MYEKYLFFVGIDVSKSKLDVTFLEKPLGKKIVHFVVSNDNKGIKEIVKQLNNRKIALEEVLISFEDTGVYSLPLGCYLTRYKIDYWMIPAIEIKRSKGISRGKTDKNDSKDIAFYTLTHLHKLRLTQLPELSLMELKLLFTEREKLLKSLRIIGSTSEGIGYIPKEAMGDVLKINKVVIKQLQKAIEKVERKMKEIIQSNEQLKLQNELIQSIPGVGPQTALYIILVTKSFQSFENWRQVACYAGVAPFQYSSGSSIKGRTKVNHLADKKLKSLLNMCALNSKKHDAELKQYYARKVGEGKSKMLVLNNIRCKLLGRIFATINRGTPYVNIQKFAA

SEQ ID NO: 477414 - protein, 394 aa, unidentified
MYNAVPVNVKHYFTHYKRAPLWSKVLSAWLIPYKKGTPSMTSTKYIGLDVHKESISIAVLNCAGKVVMECVIETKASTILQFIHGFRGDLQVTFEEGTWAAWLHDLLKPHVTELVVCNPRENALLKEGSKSDRIDAHKLAELLYMHKLKPVYHGEHGLRMLKELSRSYLTISKDLGRVMNRLKALYRSWAIPCAGTQVYAPHYRSEWLSKIREAGVRRRAELYYLQLDALRLVRQQARKELLAEARKHRATKLLRQIPGIGPLRAAHLVALMQTPHRFRTKRQLWNYSGLGLETRDSAQYRVVKGQLQRSKKPVTLRGLNDNHNHDLKDIFKGAAMRASTAAGPLRDFYEALLAKGRKPTMARLTLARKIAAITLIVWKKEVRFDANYLKQQAA

SEQ ID NO: 477415 - protein, 411 aa, unidentified
MMDVGSRYEYSGTMPGQKALSEGGTQMRDKTFVPREYDVFAGLDVDKKSIAATFSGHQGFIRSLSMPYKVEDLLNHVRNHFADQKVAFVYEAGPTGYGLYDGLAAQGYTCLIAAPSMIPRAPGQRVKTNRLDSKALSESLRGGQLKSIHVPSPLYRELRHLTQLRDTMMSEAVGMKQRIKSLLLFEGIAFPPAPAGSQWSFIVKAKLRKLPCSNTVRFKLDQLLDSLEFAEKQIFKSTKEIRRFCQTDPELSQCIKYMMTVSGVGWIVASQLLARIGDWRELENIRQLGGFLGLVPMEHSTGDKTDRGPITHTGDGRLRSKLIQAAWSAIRKDGELREFFRSVCQRHPRKVASRVAIVAVARKLSVRISVVLMKQRPYEVRKKVHSAPLTQEETSPQGTTRRQAEPGEKNS

SEQ ID NO: 477416 - protein, 341 aa, unidentified
MQVTTIGLDLGKRVFQVHGVDAAGQVVVRRKLQRAEVAGFFAELAPCLVGIEACATAHYWSRMIASYGHEVRLMPPAYVKPYVRRGKNDAADAEAICEAVTRPSMRFVPTKSASQQAALSQHRVRDLLVRQRTMLINALRGHLGEFGIIGPAGRHRLGDLQRALWAADDVPALARVALQALIAELHSLEQRIQALELAIVREHKTNVVSRRLATIPGIGPITATAITATIADPAVFKSGREFAAWIGLVPRQHSSGGKQKLGRISKQGDQYLRRLLTVGATAVMRRVSGKLDRLSVWVRELLGRRPFRLVSLALANKLARIAWAVMTKQEPYRTSPTAAAA

SEQ ID NO: 477417 - protein, 355 aa, unidentified
MNTNIKYIGIDVHQATSVFAVLNQRGKAVAEAVVETKPEAIISYLKSQRGTLRVTFEEGTYANWLYHVIKPHVAKLLVCDPRKNKINGNKTDKIDARRLAELLRNNSLTAVYHGENSTGTLKELARSYVSLQQDSTRIKNRIKAIFRSRGIPCRGRLIYSTKNRQEWLQKLSDEGARRRADRLLRELEPLGQLRAEAQQEMVQESRKHKSCQTLRGIPGLGCIRVALILAYVMTPHRFGSRRQFWTYTGFSVVRRGSSEYEIHNGEVKRSKRKPLPRGLNRNYNHILKEVFKGAAITAANRGPFKKEFNARIAKGTQENLAYLTLARTIASITLALWKKGERFDIRKYRLSKQTT

SEQ ID NO: 477418 - protein, 313 aa, unidentified
MAQMAPTVGVDVSKQRLDVALYPAEARFSASNDSAGWHELCRRLRPIGARAIGIEPSGGYERGVIAALLDAGLPVRSVNPWKLRQFAKAAGWLAKNDRLDAWAIACFVATLPTRAVQHDPTRQHLAELVTARRQIVDLRQELSNQLEHLSDPELRRMQERRIRHIDADLVRLDRRIADAIAAVPALATRHDLLRSMPGVGPVLAATLLALLPELGSITNRAIGALVGVVPYDFDSGRMKGLRCIFGGRAAVRRVLFMAAQAAAMCNPVLKAFKQRLLAAGKKPKVAIIAVMRKLLTTLNAMLRDQQEWRAAEA

SEQ ID NO: 477419 - protein, 446 aa, unidentified
MEVIHAHAAGIDIGSKSHWVAVDQNSQHVREFGVYTKDHLKLIEYLRSFQITTVAMESTGSYWQTLFNALQSAGFDVILVKGSHTKNVSGKKTDLLDCMWIQKLHSLGLLSASFILSDYLQVLRTYFDHREYLIDQTSRYINKMQKTLRLMNLRLDVAISDIMGKTGRAIINAILDGQRDPHYLASLAHPRIKKSKTEIADSLQGEWRDDLLYELKSCLKFYDMYLAEINQCDQKIAALLTEYAPQESAPFQLSRQDGFKNDKKQKTKFSPGFNVRELAFAHLRTDLFQIPGVSHTTVLSILCNLGNDIFRFKSAKQFASWLRLVPNNKISGNKVISSRTPKSKSTVATSLRQAANSIGNQKDHPLTPFFKRIAFRKGRGSAITATARKLAVIIWNMITKSQSYNEYDYYQISQKRKNAQLKNIRNRIAKLNLTEMELKALIPIRQ

SEQ ID NO: 477420 - protein, 490 aa, unidentified
MGARRRTKQKPAMVEPVEIPDAEHELVIERAAAIDVAKTAGKVCVRLPAKTGRRFSRVWDVPARTGAITELAEQLMKLGIEKVTVESTSDYWRIWYYLLEDAGLDVQLVNSRDVKNVPGRPKTDKLDAVWLAKLTEKGLLRPSFVPPAPIRVLRDYTRLREDLIRERTRYWQRLEKLLEDAAIKVSAVASKLDTLSTRDMVEALIGGERDSRRLADLARGRMKTKRSELITALDGRFDDHHAELARLLLGQIDALTAQIGALSARIERLIDAMDESDHPTGDRGRSGGGGPQVTGAPSTGGQATAPARRTTTAIGVDSDTATVVEPQRLTAVERLDEITGVGQRAAQTIIAEIGLDMTRFTTPAHLVSWAKLCPRTIQSGPVIRGGKTGKGNPYLKGALGEAAAAAARTDTFLGERYRRLVKRRGRLKALVAVARSILVIVWQLLSDPTARFHDLGPDYHTSRVVTERKIRNHIAHLTAMGFHVTLQPAA

SEQ ID NO: 477421 - protein, 345 aa, unidentified
MPIVGGLDIHRKQITFDYLDTATGEVKRGQIAPADREHLRAWLARFAGRGDAAFALEGCTGWRYLAEELAAAGLEAHLGEPADTAAARGRKRHAKTDKTDARHLRTLLDEGRLPECWIPPGHILECRALLELYHDLRAAHTAWVQRIHAVFFHQGAPPLSEDALRTGQGLAGLRAAAAAHLSAAGQLQVATALDMLAAIEARLGPLRKQLRETARLLTGARVLADRLYGVGPIAALALTCWLGGAGRFSSSRKAVRFTGLDVTVWSSDRKGPPGRLSRQGPPVLRWAVYEAGKTHARASAPDHGYYAAVKDRKNGKRAVLSEARKIVRQACHILTELGDDALTAA

SEQ ID NO: 477422 - protein, 350 aa, unidentified
MEILYERCAGLDVHKKNVKVCLKTKDADGQPSKEVRTYATKTQNILQMRDWLKEQGCTHIALESTGVYWKPIYNLLEDDFEILVVNAHHLKAVPGRKTDVKDAEWIADLLQHGLLRASFIPSVPQRELRELTRYRTRLVEERAREINRLQKTLEDTNLKLGDVVSDLMGKAARLILSAVAEGETDPGRLASLAAGRVRASQEELEGALTGNVTAHHRFMLGEHLKQIDTLERAIGRVSEEIARRFTLPDPPAAPTSPPDEAEQQTLPPVSQESAQESLSKPRLNWQAAIVLLMSIPGISERAAQCILAEIGLLMQQFPSAQHLASWAGMCPGNNESAGKRFSGWSLSIIS

SEQ ID NO: 477423 - protein, 385 aa, unidentified
MAPPTKPRIVIGLDVGKSAHWACVVTREGELLASGPIPNRENAIDGLYAQYPGALVVVDQVRNIGSLALSRAKLAGMPRAHLPGLAAHGASKLFAGDAKTDERDAMVIAKTVLGIPDALLAVADRPPEIEAARSLAAQRDFLTCENTRSKNRLRSILLESCPEFEAQADLSDPATLKLMAAVGGPWSISEASSQSVGALTRGCRRAKVAALVGSVESSSRPHPAAVACEDRAVRLLARRISENAAEIESLTSEISALLAADETYRCLLTVPGIGPRTASELVISIDIADFAGHDRLASYCGLAPRNRQSGTSISSVSASRQGNKRLKNLLIFSCNCLARSRNRWGEYYARCRDRGMPHGKALKAVARKRLKVIYAIMRDKVPYAA

SEQ ID NO: 477424 - protein, 327 aa, unidentified
MRQHKSLTEKVKTAVAFDVCKAFLDMHIQADGKALRTPNTHEGFDQIAVTLADYDVSLILMESTGGFEDAAACHFQSLGYDVAVINPRHARRFAQAMGKAAKTDRLDAAILADFASVLDSRSDRSRYIKPPTDEERKYLSQMVARRRQVVDLLATEKQRLTHADNYGKDSISKMINFTESQLKEINHDISRYVKKNFPDLSKLLSEIPGIGAQSVGILVGDVPELGKIDNRRLSAVIGVAPFNHDSGKMRGKRCISGGRKSVRNVLYMAVLTATRFNPVIKAFYNRLINKGKPTKVAFIACMHKMLRIMNAMVRDGSSYNPDLHTVI

SEQ ID NO: 477425 - protein, 407 aa, unidentified
MVYTRCCGLDVHKAKIVACLITPGSASQVQKEIRTFGTLTDELLALGDWLAEAGCTHVAMESTGVYWKPIWNVLEGSFELLLANAQHIKTVPGRKTDVRDCEWIADLLRHGLLTPSFVPDREQREVRELTRYRLALVRERSREVQRLQKTLEGANIKLSSVASDILGKSGREILAGLVDGRTDPAALADLAQGKLREKLPALERALVGRFGSHQRFLVARQLSHLDDLDGLIAELSAQIAERLRPFDEAITRLDGIPGVGRITAEVLVAEIGTDMTRFPTDRHLASWAALCPGNHESAGKQTSGKTRKGNRALRTALVEAAQAAGRSRKTYLGAQYHRLTSRRGKKKATVAVAHSILIIAYHLLRDGTDFHDLGPDFFDRRNQDALERRLVSRLEALGNKVSIEKVA

SEQ ID NO: 477426 - protein, 473 aa, unidentified
MRKAQMKVKSRAKAKSKAWRWKKQSSLLEQINFNAAGIDVGSREHWVAVPAERDPQPVRCFGTFTSDLEALADWLLQCGVKSVAMESTGVYWIPVFQILESRGLEVLLVNARQVKNVSGRKSDVSDCQWLQQLHSYGLLAASFRPAAEVCVLRSYLRHREHLVQQASTQIQLMQKALTQMNVQLHHVLSDVTGVTGMAILDAILAGERDPLKLAQLKDPRVRSSVETIAKALTGDYRAEQLFVLKQARESFQFLQAQIAACDVEVNKVLSGWDAKVDLEQQPLPPTRKKNRSQSKHKPLPFNLREQLYRVTGVDLTEVDGLDGLSAQALISEIGLNMQRWPSEKHFASWLGLCPDHRISGGQVLHNRTRPVINRAADVLRMAAQSLKDSQSALGAFFRRLKARLGPAKAITATAHKLARIVYQLLKYGHHYVDPGAQYYEQRYRENILRGLKKRAASLGYTLVENAALNVQVS

SEQ ID NO: 477427 - protein, 344 aa, unidentified
MTYYAGLDVSLRSTNICVIDDQGEVVTESKTDAEVADIVSFLDELDIEISQVGLEAGTLTQYLTYGLQFAGFDVVCMEARQVKAALSAMRNKTDKHDARGIAQLLRSGWYSRVHIKSMESHRVRALLASRKAVLAKCIDLENEIRGIFKVFGIKLPPRLGHGAFDPKVRPLIEADETLSLSLLPLLEARLMLYQTFRVLDNRTRHLAHDDPICRRLMSAPGVGFITALTFKAGVDDPARFKHSRTVAAHFGLTPRRFQSGELDLEGHISRCGDANVRSTLYTAANAMLTRSSKWSSLKAWGMQLAKTRGHRRAVIAVARKLAVILHRMWIDDTQFRWGTEGVRS

SEQ ID NO: 477428 - protein, 363 aa, unidentified
MSQQTRSNTITKQCVGIDISMDTFMACISHKTSEDEILVKSTKQFNNKSEGFEHLLQWVSKFSIPTLPIVFVMEATGVYYENLAYELIEREQSVSVQLAKNVKYFMQSHNIKSKTDSIDSQAIALMGLERKLSLWQPGSIRMRVLKQLSRERSMLQTEQTVVKNQLHASQHSYAPGLRTIKRMQTRLAVIKEQIAEVEQDMKKIVEKDSSLAERVANVCTIKGVGFISAITVIAETNGFALFNSKRQLISYSGYDVVRKQSGNSEAKARISKKGNKNIRKALYFPATSAAIHDPIMKQTYERICQKTTIKMKANVALQRKLLVLIFTLYKNNVPYDHQYQQNKELHLTNAIKNKAESIVNCSA

SEQ ID NO: 477429 - protein, 438 aa, unidentified
MDQGKDKRGQQTADAEYWRQRTAFVGFDWASDHHDVVLVDQYGKIVEDFRFDDTAEGWQLLVKTLNKHSDPAVAIETSSGATVQRLLEAGYAVYPVNPKAAKRYRERKAPSGTKTDHLDAWSLADALRLDGHTWRQLKPDDPLTAELRLLCRDEVTLIEQRTAFVCQLRSALHEYYPVALEAFDDWTLRSAWAFVEAFPTSEALAKAGKRKWEKFLHTHKLYRKETYQKRLDLFARAETFCGNKATTNAKSMLAVALAGQLRVLQSHLDKFRKKIEELFAKHPDHDLFGSLPGAGEKLAPRLLAELGDDRDRFDSPQALQCYAGTAPVSFESGKIKRVRFRRACQKALRRSVHLWANLSRATCPWAQAYYRKKRDEGQTHACALRCLGQRWLKILWKMWQTRRPYDAELHQRNQVKHGSWVIALTTVTPEQRTTAETG

SEQ ID NO: 477430 - protein, 339 aa, unidentified
MNEISMIGLDLAKGVFQVHGIDAAGDAVVQRQLRRGQMIGFFTKLPPCLVGMEACATSHYWARELAALGHEVRLLPPAYVKPYVKRGRKNDAVDAAAICEAMASKGMTFVPVKTPEQQAGLMLHRARRLLVTQRTMLANAVRSHLAEFGIVEAAGEAGLSRLIPLAVDAADPSLPAAAREALTMLATQLKDAETKIEALDREILAWHRSDEASRRLATIPGIGPVIASTIVATIGDPGRFRTGRDFAAWLGLVPSQHSSGGKSVLGPITKMGDRYLRSLLVLGATAMLRRKTSGYGPWLAHLLARKPARQVSVALANKMARIAWAILAHGGVYRKPAAA

SEQ ID NO: 477431 - protein, 412 aa, unidentified
MLFVGDDWAEDHHDIEIVGEDGRRLAARRLPEGLDGVSRLHALIAAAMPAQWAELEAGEAAARVKIGIETERGPWVAALIAAGYEVFAINPLSVASYRRRHSTSGAKSDAADAHLLAEIVRLDREHHRPVAGDSDIGEAIKLVARSHQSVVWDRTRHILRLRSVLREFFPAALEAFADLAAADILELLAIAPDPDRAARLPKSKVVAVLRRANRRGVEEKAATIQSVWRAPALRQPTQVQAAFAVIVTSQVRVITALNLEIGQLGEVVAHHFGRHRDAEIYASQPGLGVILGARVLAEFGDDRTRFADVKARKNYAGTSPITRASGTRKVVLARYARNERLGDAIQQWAFGALKGSPGARAYYDALRARKIGHQAALRQLGNRLVGILHGCLKTGTLYDENTAWAHHHTAAA

SEQ ID NO: 477432 - protein, 390 aa, unidentified
MRYFIGIDVAKFKHTACVIDTYGTVLVESFDFTNDIIGFQSLLKNIKPFLKKKHLVGMEDTGHYGDNLRNFLLEKQYKVVMLNPIVTSHIRKASNKAKNDRIDCFVIANTMMNPNFYRDQHAQSIDYATVRQLTRMHHTHTEEINRYKCQLQKSIDIVFPEFNSLLNTKYSKTYLEILDTYHSAYTIANTDIRLLRNTLKNVGVGRSVSISAEQLKKAAKESIGQHNLAIEMDIPFLISLIRRLTSILGEIDKKIEEFSHQLNSPILDISGISHFSAMSIISELGDITYFSSEKKLIKFAGVNPCVYESGTYSMTHTRLEKKGSKYLRKTLYQIIDVVIRFNPIFQAFYQKKISQGKSYRCAQGHCIRKLLRVIYKILSTGERFNPEKLK

SEQ ID NO: 477433 - protein, 313 aa, unidentified
MSAPLYLGLDVAKDTVELASEPAGLHGQFATTAAGLAALVAQCQAQPVTLLVLEATGGYEAPVVAALAAAVLPVVVVNPRQVRDFAKALGQLAKTDRIDAQVLARFGARVQPIPRPLPTEATQALEALVVRRRQLLEMLHAERHRLTLARGRPVRDNLRRHIRWLERSLADTEAEVATTIAASPLWRVQEDLLRSVPGVGPQLACTLLGQLPELGHLDRHQIAALVGVAPFACDSGQWRGSRHCWGGRAGVRRVLYMAALVGTRYNPVLRAFYQRLRHAGKPAKVAITACARKLLVILNAVLRDHRPWSPAYA

SEQ ID NO: 477434 - protein, 421 aa, unidentified
MEQTRRCFGLDVHRDFAQVAICQAGQVTQAGTFATTPEGVREFAAGLGPDDEVALEATGNTWAIVTVLASRAGRVVVANPGKTRAIAEAKVKTDKVDAAILAQLLAADYLPAVWQPDAAIGALRRQVLRRAHIVRQRTRLKNQVHAILHRNLVPRCPAADLFGIKGRSWLTAQQLPPDERAAADALLRQLDFHASELALIDADLGRVALARPEVLRLMTIPGVDATVALSIVAAAGDFTRFRTPQRLISYLGLNPRVRQSGGQPASHGRITKAGPAHARGMLVEAAWSASKAPGPLRAFYQRVRARRGMQVAVVATARKLAVLCWHLIIKEQDYAFALPSLIAHKQRKLELRAGLPAARGRKGQAARYSLKAVRAAERDLAAQGEAAYRTMVAAWQPARPAHKKAAGAAASKGTRLIKPTG

SEQ ID NO: 477435 - protein, 350 aa, unidentified
MRKNSRVIERHPAETIGVDLGDRTSHYAILNEEGMVVEEGSFRNNADSIAKHFGKKERVRVALEVGTQSAWIAREFNKLGHEVIVANARELRWITSSDTKNDRNDAVKLARLARADRNLLAPVEHRTAEQQAELAVIRARDALVRSRTLLVNTARSLAKGFGLRLPASITHTFGARALALLEENLRAAMQGILEQIDALGVKIRDYDQRIAEVSAKHPDVERLASVPGVGALTAATFVLTLGRKERFAHSRDVGSFLGLRPRQKQSGERDPQLGISKGGDKYLRKLLVQCAHQILGHWGKDSALRQWGLSKSTGSPSKKRAVIAVARKLAVLLHRMWTTGEIFKPFPQMA

SEQ ID NO: 477436 - protein, 354 aa, unidentified
MLIGKESNLNPWRCYIKLYAGFDLHSNNSYLGIIDENGGRVFKRKLRNDPELIVTVLNPFKSDIEGIVVESTFNWYWMVDLLSDKGYQIHLANPSKIQQYSGLKYSDDKHDAFWLAEMLRLSILPEGYIYPKEDRPIRDLLRKRGHLVRLRTSLIVSLQNIIARNGGEKLKGSDIKVLKTDRVTPLLQDNEDLALAGKVSKEAIDFMTRQIKAIEASIEGKMQLSSPYDRLLSIPGIGKILALTIMLETGPIGRFPKVGNYTSYCRKVPSGRFSNDKKKGTGNRKNGNKYLSWAFAEASERARFYDSEARKYFTRKRQKTNAPVAHSALAHKLARAAYYIMRDEVVFMPDKAFA

SEQ ID NO: 477437 - protein, 425 aa, unidentified
MSVRDYSKQVARRQRIGDTTLVVGVDIGCASNAVGFMNKEGKVLGSYSNMPNSREGFEQFVKMTEGLKVKHRLTEVLIGLEPTGHYWRKFAYFAKAKGCEVRFVRTTALKHHRELDESSSAKSDKQDALTITNITREGKYIDTVIEDGRMRHLRTLVKVRERIQKRNVSAKNSLHAALDDYFPELKEIFWSMHSRGLWALLERCPFPVDVVSLKVSALEEIIARASRRRVEASRKAMAVFQAAKESIGLKQIGSADRYRLRMCLDEVKRTELMIKDIEREIKRMLKDTPQAEYLLSIPGIGPISAAVFLGELGDPSYFQSARQIVKYSGYDPQESDSGYRVSRKFISKKGRWLLRKHLFLMSMRVVVLSRYFQEYYQRKLQTKNRFGQLPRKKEILCAVAIKLIKVIFALLRDKRNFEDTVTAVE

SEQ ID NO: 477438 - protein, 330 aa, unidentified
MKKWKFTLGVDVSKNTLDISCSELNEHIKINNGSEGFILFLKWCRRIKIDLQDAFLVLEYTGGYEYKLMQFCEAHAIVYARIPGLAIKNSIGIIRGKNDKVDSARIAQYGEEKHKSIQPSKPLNPAIIRLKELLSFRKRLVRENAGYKSSIKEREHMQDVNKKDLIIKSLLQKQKINTKIIENIEGEMMKIIAGDELMKINFTLITSIKGIGKVNALMTIAYTENFTSFSNPRSYAVYVGVVPFDHTSGTSIRGRKRVSHLANKELKQELNQAARSAMVWDKEMNNYAENKLKTKCYKIVLNNIKFKLILRMFAVVKKGEMYVDNYRNAA

SEQ ID NO: 477439 - protein, 322 aa, unidentified
MRYIGIDVSKATFVVAYSSDKGGEIRTFNNTTTGIKQFIGALPKDGSIHGVMEATGNYSALLLYMLNVAGITVSMENPLKVKNFAKAMLSTIKTDKSDARLITLYGEKMNPRPFKVQGEAILRLRQKRTVIRQLTKQITAMSNLRGSLACLPVPDKGATHTVDETIKFLEKKRDRLQSELTDLVEVEFSRQLALLTTIKGIGITLATALIITTGGFTYFQNAKQVSRYLGICPTYEQSGTSVNIRGHINRNGDVYTRGLLYVAAWTASRFNTKCGETYTRLRQNGKPGKLAMIAVANKLVRQAFAVVTHDKEYVDGFVSNRP

SEQ ID NO: 477440 - protein, 309 aa, unidentified
MEHFIGIDVAKDRLDVHIRPKGESFALARDGEALAALVERLRGLAPTLVVLEATGGYETVVASAIGAAGLPLAVVNPRQIRDFARATGKLAKTDRIDAAAIAHFAEAVRPPARPIADAEAQALGELVARRRQVIEMIVAEGHRRRMASQRRVIRAIERHLAVLQTELSELDGDIDDAIRKTPAWQEEADLLASVPGVGKATLRTLIAELPELGHLNRRKIAALVGVAPINRDSGTLRDRRTIAGGCPAVRTGLYMAALVASRANPIIAPYYAKLRAAGKTGKQALVACMRKLVVILNAILRDRKPWQPA

SEQ ID NO: 477441 - protein, 349 aa, unidentified
MGEVSTIGVDIAKSVFQVHGVDADGTVVIRRRVGRAKILEFFSKLRPCLVGMEACATAHHWARELKKLGHDALLMPPTYVKAYLKRGKNDAADAAAICEAVTRPSMRFVPIKSVEQQSTLMLHRTRDLLIRQRTQLINALRAHLAELGLVAAKGREGLCQLVTVVTECGDERLPSNARFACQAIVGQLHAVQTQISGLDKRITQTHRANPDSKRLDAIPGFGVILSTAVVATMTDPKAFKTGREFAAWIGLVPRQNSTGGKDRLGSISKQGDRYLRRLLVVGAISIVRTARMWPDKYPWVIELLGRRPAKVVAVALANKMARVAWAVLAKGETYRAPTRLSNAAITVAA

SEQ ID NO: 477442 - protein, 318 aa, unidentified
MTPLVFVGLDVAKATLDVALRPSAEQWSVPNDEAGVAALLERLRPQSPALVVCEATGGFERAAIAMLAAAGLPVVVANPRQIRDFARATGQLAKTDQIDAAILALFAERVRPVPRPLPSEAAQLLDALLTRRRQLVEMLVAEKNRLGFAPRPLHKGIQQHIRWLERQLDDVTTDLADQIERSPVWRAKDDLLQSVPGVGPIVSAVLLAELPELGTLTHKQIATLAGVAPLARDSGTLRGKRMVWGGRAGVRTALYLAALCGRRWNPQLRRFYERLLAAGKPKKVALIACARKLLTILNAMLRDTTHWRAPELAIQHSC

SEQ ID NO: 477443 - protein, 381 aa, unidentified
MDAMTREAESSAAKPSLLVAFELGERAWKLGFSSGMGQRPRVRQIPAGAVGVIANEIARAKSRFGLAAEAPVISCYEAGRDAFWLHRYLVAHDVTNHVVDSSSIEVNRRARRAKTDRLDLGGLLSLLARYVQGDRRVWRVVRVPTLAEEDVRQVPRTMETLTRDRTRLVNRLKALLATQGVRVRIDRQFVDALNGARLWDDTPMPAGLRDRIMCDWAQLQHVETQLRERKAARARLVDATQPTGHAIEHLQTLRAIGPMGAWVLAIEIFGWRQIRNGRQLGALVGLVPSPYQSGETRYDQGISRAGNTHVRRVMVQLAWGWLRFHPASALSLWYQRRFGHGGMRLRKIGIVALARKLLVALWRYLETSTVPDGAVLKPLAG

SEQ ID NO: 477444 - protein, 348 aa, unidentified
MTVTIVETRAITGGVDTHADTHVAAALDSIGGLLGVQEFPATAAGYARLLGWLGGFGPVCLVGIEGTGSYGAGLARHITTAGVQVVEVDRSDRQDRRRQGKSDPFDAVSAARAALSGRARGASKGRDGAVEAIRALMVAKRSAAGERTQTINQARALILTGPEDLRARFTGHTVAALVAELASLRPGPGSTVGYATRIALRELGRRAEFLDGQIERLDNLIGPLVTAQAPSLLARYGIGAHTAALLLVAAGDHPERLRSEAAWAHLCGVTPIPASSGKTVRHRLNPGGDRQANHALWRIVFTRMGSDPATRAYVDRRTQEGLSKKEIIRCLKRYVAREVYPHLRSSGG

SEQ ID NO: 477445 - protein, 457 aa, unidentified
MGRHKSKNKGRDTMSVVHPNAAAIDVGATMHMAAVNADRTPEPVRSFGTFTTDLHQLVDWFAECGVDTVVMESTSVYWIPIFELLDARGFAVFLVNARDAKHVPGRKTDVSDAQWLQRLHSFGLLRASFRPKGQIAELRAYLRQRERLLEYGASHIQHMQKALTEMNVQLHHVVTDITGVTGLRIIRAILAGERNPAVLARMRDRRCHASVEMIEKALAGNYRAEHLFALEQALALYDTYQQKAFACDARIEAVLKELSVPRDREGGQLPAARQNRSHQQNAMLFDVRAALFALLGKDVTQIDGLGPYLALKLIAECGDDLSAWPSAKHFTSWLCLAPSNKISGGKVLSARTRRAGNRAAALLRLAAATVGRTDTALGAFYRRLSARIGKAKAVTATARKIAVLFYNALQHGMDYVDPGASSYETRYRARVIANLHRRAKAFGFALQPIDPPPSAVS

SEQ ID NO: 477446 - protein, 392 aa, unidentified
MFYLGIDIAKVNHVASLIGEDGTILVKAIKFTNSNEGLQKLIDSISAYDQSQIYCAMEATGDYWLSLFSALSDKDFNVSVFNPYQIKSFRGAYSNRKQKNDVIDSIIIADFLRFNGIEKTCLPNDDLLALKNLTRYRSNLVTNISKSKTQIKGILNKVFPEYSDVFSDTFGDASKQILLNCPTPSEVANFNTRKLANLLKKASKGRHGTDTVRKVKDLAKNSFGIKFTGDACSFEIKQLVNQIIFLENQVDELDLKIKEIYSKLDSHLESIPGVGKTIAPIILAEIGDINNFSTTSKLTAFAGIDPSENQSGNKKSTDEKTSKRGSPYLRHAIYQAAFVATNNDPVMHDYYVKKRAEGKHHYVALAGVERKLLGIIFHVLKENRDYRPPKSS

SEQ ID NO: 477447 - protein, 407 aa, unidentified
MDLLKTVFGIDVSSRKSNVCIMVNGQKVNDYAISNDMVGFNQLLDDLKQVTNPQIIFEATGVYSRRLQAFLDMHELRYVMMNPLEAKRKTKDDLHQNKTDKLDALYLAKLQSEHPQRLAYVQSKEYQELMANNRIYEQASHDLITNKNRLHKAVQLTFPEIEHLLANPRGKNYWSIALRFPHPDIVLETKETDIIDFLKGLSGIGKKRANDITQSLIRLAKVACPAVKKNSAHIRGLKMAINNILSAEEECQTALQEMAKLAPKRDLEILTSIPGIGENTALRIISELGDIRRFNNPSQLNAFVGVDPQVYESGNLTAHLSISKRGTAIGRKVLYLAINQIQSAKKAGNPCHIADYYEKRKRSSETASHKKAAIASIHKLLRTIFALIKNDQLYSYDVAKHNQRLLS

SEQ ID NO: 477448 - protein, 436 aa, unidentified
MERKMLNVGIDFSKNRADVGLFGPNGEIISKHTPFRNSQTGYNLFKEHILEAMKTNDLEEINISGEATSYYWMPFFMTISKDVALNEYDLHPFLLNPKWVSWYKKCFAPQHKTDSEDPLFIAERTRTSQPVHEWTYDESWFMHRLLTRFRFHLKQGLTREKNFYQAYLFVLNSAYTQQKPFRDVFGSTSAHILADLGQLSQFSKMDDHELAEYLQKTSRTNLNDSLENARRLKKVAEESFQLDSGLSDVLQRILNMTMQYIKFIEEMIKEVDKCIAEKAKKLPEVAILRSIPGIGPVFSNGIAAEIGGISRFLAGQKYDQRKKRIRNKNLRDADASVAKYAGLWWPRNASGNFESDQRKLSKTGNRYLRYYLIEAADRLRQWSPVYDEYYQKKFAEVRKFAHKRALVLTARKSIRLYVGLLHRLEPYRPHEVCIRN

SEQ ID NO: 477449 - protein, 429 aa, unidentified
MQNESTPGARGPVFCGVDTHADSHWLCVLDWRGRKVLSRRFPADAGGYEALAGAIAAAGEPACVAMEGTSSYGAGLTRHLASLGMPVREALSPAGTQRRRPGQGKCDEADAERAARAAMSGSRLGTPKSQDGWVDGVRCMLAARSGAVKARTSAVNTARSLLTTAPEGLRSRFRGMGGPRLMEELPSVRSEGALGAALGALADLWAAARDAALDMERAIGASLEENCPALLAMYGCGPVSAAKLAVAAGDNPGRLRSEASFAAICGACPIPASSGKTVRHRLNRGGDRQANSALHEIARQRVMRDPETAEYAERARGRGKSDREVMRCLKRYVAREAYRALMHPHEVRRPEDASALVAARRAAKVSQVRAASILGTSEKYISMLERGQRELKPIRRAYEAWVEAGLPLDWDRQAFEAERKMDSKKDLAI

SEQ ID NO: 477450 - protein, 430 aa, unidentified
MEEVDEQELHVERVAALDLGKAALEACVRVPHQTKPGRRLQEVRGYATTTAALLGLADWLHSWGVTRVVMESTSAYWKGVYWLLEAEGFDCWLVNARDVKNVPGRPKTDKADAVWLAKVAERGMCRPSLVHPRPIRQLRDLTRYRRALIQDRTREMQRVEKLLEDAQIKLSSVATDIFGVSGRAMLEALIAGQRDPKALAQLARRRLRAKLAALEEALRGFFTDHHAAILRMMLDNIDRLSQQIAALDTTIEEAITPFAAQVAQLDAVTGVGLTAAQELIAEVGVDMGRFPSAAHLVSWARFCPQVHESAGRKKPTGRGKGNPWLAGTLGNIVATAARTDSFLGARYRRIAKRRGKQKAIVATGNSVLVIVYHLLADPTATFVDLGGDHYLSRINHERRARSLASQLQAVTGQRIVIRDGQAIIVQPDAA

SEQ ID NO: 477451 - protein, 429 aa, unidentified
MSYRIAGIDVHKKMLAVVVSDVEIESEYQFERRMFGSSPDQLRSLATWLLEQEVEEVVMESTAQYWKPVWEALERYWKPLRQKREGAGRRSGTLHLAQAQSNRGRRGRKRDFPDAERLVKRLVARELTLSFVPDAEQRLWRTVTRRKYQLRRDHVRLQNQVESLLEEAHIKLSSLVSDLLGASARRMLKALAEGETNPAALAALADWKLRATPEQLCDALGACTDLKPVYRRLLKMALDQLQFLEQQMDQLDQELASLLHPHQDAVQRLAEVPGLGVDSAQQIIAEVGPTAATFPSEKCLSSWVGACPGDDESAGVNYSHRSPKGNRHMRRVLNQTANAAARTKGSIFDIVYRRSVPRLGHNQAIGAIAHRQCRLIWLILHQGVRYEERGPAVTKQSKQKRTARMIRQLRSLGYRIDPPNPQPSQAHAQ

SEQ ID NO: 477452 - protein, 399 aa, unidentified
MIFVGIDVAKDKHDCFITNTDGEVLFKSFTITNNLDGFDELYQKIESVMEDVSKVKVGLEATGHYSYNLLGYLLDKGLPTYVINPLHTNLYRKSLSLRQTKTDKVDAHTIASMLMSDVNLKSYSDTSYHNEELKSLTRYRFDKVKERAKLKTSISRLVCILFPEIEKLVPTLHQNSVYELLYEFPGAKQIANAHLTRLSNLVETASRGHYTKDTAITFREAAKVSVGSNMPAKSLELKHTIKLIRELDAEIEEIENEIKIIMDEINSPILSIPGISYRMGAMILAEIGDFSQFDSPDKILAYAGMSPSTYQSGQLDNYHSRMEKRGSRYLRYALFNATTYVCLWDPTFKAYLAKKRAEGKHYYVALSHATKKLIRVIYQLESSGQQYKKLINHSNIISS

SEQ ID NO: 477453 - protein, 421 aa, unidentified
MPPAEGREMDRVVKRCCGLDVHKSSVTVCVRVIETNGTLHQQTEEFAATTQGLLLLRDWLSSFKVELVGMEATGVYWKPIYYMLEDDFELWLLNAEHLKHVPGRKTDIKDAEWICQLVEHGLVRPSFVPPKEIRELRNLTRYRKVQIEERTREVQRLEKVLQEAGIKLSSVATRVLGVSGRAMLEALISGTTDPEVLAELARGRLRSKIPALKEALEGSFSSHHALMVSRILSHIDYLEETIAELSAEIEKVIAPFSDEVELLDTIPGVNRRVAETIIAEIGTNMDQFPTHYHLASWAGMCPGNDESAGKRRSGKTRKGSKWLRSALIGAAHAAAKAKGSHLAARYARIKGRRGPKKAAVAVGHSILVICYHILQRGEAYREIGEDHFHRCRSEEAYRRRLVRQLEKLGHRVMLEPLPQPA

SEQ ID NO: 477454 - protein, 355 aa, unidentified
MFYVGLDIHAKRISICALNETGQVVHRSQVRSIEEMMRVLGSLPDRFEVCYEASCGYGHFHDLLRPLAARVLVAHPGQLRLIFRSKNKNDRNDAERLAKLLYLGETPTVHVPSLQVRTWRELINCRSQVIAKRTRAKNTVRALLRSAGVVPPKQPGLWTKKGLAWLRQLTLPTPSQHLRRDLLLEEIETLIRQVRRIEQQLNHQAQQTPAVAQLRSIPGVGIRTADAVAAFVDDPHRFRHAKAIGRYFGLVPCQDQSGDKNRLGHITREGAPVVRQLVAEAAWQAQRRSPTVRAYFERVQRDDPQRKKIALVATAHYLVRVMWAMLKRGTDWQEGPALATASGAAAGGDPAPEVD

SEQ ID NO: 477455 - protein, 317 aa, unidentified
MTSQPLFVGIDVSKARLDTALRPDGRTFSDRNDPDGIAALVSRLLALQPALIVLEATGGYEMPLAAALQVAGLPVAVINPRQARDFAKATGRLAKTDRIDAAVLAHFAEAVRPAPRPVADPQVRHLDALLARRQQLIGMRVMESNRLGTATDPAVRDGLGRHIAWLEAELAEADKQLAAAVRASPAWREKDELLQSVPGIGPVSSQTLLAALPELGALPGGQLAALVGLAPFNDDSGTRQRGRHVRGGRAVVRRVLYLAALSAVRHNAVLKAFRERLAARGKRPKVILTAVARRLLVIANAIIRSGRPWQAELAAAR

SEQ ID NO: 477456 - protein, 465 aa, unidentified
MKRHRRRPSPKPRTSPNALERLHPHAAGIDCGSAEHFVAVPPDRDTTAVRSFPTFTADLYRLADWLTACRVTHVAMEATGVYWIPIFEILDARGFQVILVNARHVKNLPGRKSDVSDCEWLRDLHILGLLRGSFRPADGIVALRGYLRHRATLIESTGSLVQRMQKALIQMNLQLPLVVSDITGVTGLRILRDIVAGHRDPHQLAAHRDYRCRASQAEIVAALTGHYRDEHVFVLQQNLELFDVYQRQLTACDVAIEAHLAQLAAATPPLTSPLPAARRRQKPRENEPRFELRTPLHQLTGVDLSQIDGIGPYNALRLLSEIGTDMTRWPTEKHFTSWLTLAPHNKISGGRLLSSRTQPSANRAAAILRLAAMNLGRTQTALGAFHRRVAFRIGKAKAVTATARKLAILIYRTLKDGLVYADPGAEAYDTQHRTRVLRRLRQRAANLGFGLVNLTTGEVAEGTVS

SEQ ID NO: 477457 - protein, 399 aa, unidentified
MGQQLWAGIDAGKSEHHCLVIDTDGQRLLSRRVANDEAVLGELIDAVITLADGGEVTWAIDLNHGGAALLISLLMAAEQRLLYIPGRTVYHASGSYRGEGKTDAKDAAIIADQARMRRDLQPLRPGDEIAVDLRILTARRSDLVADRTRAINRLRAQLLEYFPALERAFDYSHSKAALILLTGYQTPDGLRRIGAARLEAWLRKRNARNAAAVAVAAIEAADAQRTTVPGQQVAAAMVARLAKEVMALDTEIGDTEAMIEDRFRRHRHAEIILSMPGFGVTLGAELLAATGGDMTAFDSVDRLAGVSGLAPVPRDSGRIHGNLKRPRRYDRRLLRACYLSAQIATRTDPASRTYYDRKRSEGKTHTQAIIALARRRLNVLWAMLRDHAAYQPAATAAAA

SEQ ID NO: 477458 - protein, 344 aa, unidentified
MIYIGMDISSKSFVVHGIDEKKRVLVNGEIAPTRAGLKGMIRGLGSQKKLVIFEAGNQLKWIAKTLKEMEGVEIHVVHPNEIKWINQSSGKTDKIDARKLAHLGRGDMLPRKVHIVEGKIRELRDLISARQRLQSKRVALINSIRGQMKQEGHSLPEKFFQSKHWREKLKGIKIGEVQKLIIESFMDSIASLLIAEKKLTEKIGTIKDKGIELLEGIPSLGRLSSRVILSALDDVGRFDSKKCVAKYGALTPRIYQSGGITHLGRINRDGRQEVRRVLLQCAHVIVRMRSYGARPLREFFERIRKRRGKKIAIVAVARKLLTIAYGVLKSKTAYDPSRLTGVTA

SEQ ID NO: 477459 - protein, 378 aa, unidentified
MSKQNYAFDAAQLPKEIAIRLKRPDEKHVAMDNHKEMTVIGVSGNRGRIIHETIVPTVEKPLLEFIDCLGGTITLTFEEGTHANWLFNLLEPRVSFVLVCDPRRNRELTRGGNKSDKLDVRMLLQLFQGNMLKAVYHQRETDRTLKELVRNYDTWVKDTARQMNRIKAIYRGRAIKSSARLYSQSQRQHWLGMLSEPGVRLRAEHLLEGLDYLREMRQKARSAMIAESRRHNDSKRLQTIRQFGPVRVARLIAHVGTPKRFRGKEQFWGYCGLAVVTQSSADFVMVNGQLRRNYKNVQTRGLNRNHNHYLKELFKSAAVAAISSGEFKEFYQKRIAQGMRPEMARLCVARKLAAIALVVYKKGESYDPARINKTAAKA

SEQ ID NO: 477460 - protein, 367 aa, unidentified
MKKISTAASHNIGKVEGQRLTVGLDVGDRWSWYCVLDEAGEVLLEQKVATTPKALKEMFGKMPCSRVALETGMHSPWMSRRLSELGHEVIVAHARNVRLIGESRRKDDRLDARTLARLARIDPQLLAPVKHRSAKAQADLTVIRARAGLVRARTALINTARGLTKSYGERLRGCNSRNMNAEQAQGLSPELQAALGPLLAEIESLSARIREYNERIERLSQESYPEVALLKQVKGVGTLIALTYLLTLEDAHRFGKSRDVGCYLGLQPGRRNSGESEPQLHITKEGDPYLRTLLVQGAHHILGPFGADSDLRRWGLKLAERGGRNGKKRAIIAVARKLAVLLHRLWVSGEVYEPLRNSSRPMLATAA

SEQ ID NO: 477461 - protein, 343 aa, unidentified
MQTITTIGLDIAKSVFQVHGVDAGGQVIVRRQLKRRYVLTFFQKLSPCLVGIEACGSSHHWSRELQALGHTVRLIPPAYVKPYVKRQKNDATDAEAICEAVTRANMRFVPTKTPEQQSGLVLHRTRHLFIRQRTSVINAIRAHLAEFGIVAPVGRHGVEELLTVVADPNDKRVPEIARACLLAFGAQLGRIKEQILEFDRLIRAWHRSNEMSMRLEEAPGVGPVLATALVAAVADPQSFRSGRNFSAWIGMVPKQHSSGGKNRLGNISKQGDRYLRGLFVAGALSVIRYAKIHGTKHRPWLTALLARRPTKVAAIALANKIARMVWAMMARGERYKEPIALAR

SEQ ID NO: 477462 - protein, 482 aa, unidentified
MTPDSTRVMIPGIDCERVFTRKGVVMENYYMGIDVSKGYADFVILDAKKDVVEPNFQLDDTFGSHCKLFEILKRFFDCHSGSVLFAAVESTGGYENNWLHSLGGFQGTLDIRSARLNPLGVRANSKASLRRVITDKISARDVAEYLIAHPEKVTYQQEDSLAGLRRQWGFVRLLVKQKTQILNQFESLLYTANPELIAYCQSGVPAWLLKLLKQYPTAAKLAKARATSVARIPYVTAGRAKELIEQAKKSVASATDETTGSLITAMAEQIIRMEETIRIQSQQMAKRCAIPEVTLLKTIPGISDASAIGLMLEIQSVKRFSSVKKLAAHFGLHPAFKTSGDGTSGVRMSKQGRKEPRKILFMVAMVSLTANPHIRKIYEEHTEKGMEKMAAIGLCMHKILRIVYGMLKNNQAYDSQVDQKNRENRMARKATHTVKNVNRRYEIFDQQAPISRRQSNKRKEWKQSQGDNITQHGIGVPIPSAA

SEQ ID NO: 477463 - protein, 309 aa, unidentified
METLLTHCAGMDVHQETIVVCAITGTAGDSPHVETRTFSTMTKSLFELLQWLESKEVTHIAMESTGIYWRPVYNILEGYFDITLANAQRIKNVPGRKTDVSDAEWIAKLLRHGLIEPSFVPQADLRELRELTRLRKKQVGGLTAKKNRLQKVLECANIKLGTVISDVFGVSGRNLLQRLMEQGFIDPSDIEERVKGNVKKKVPALADSLFGTLDEHQLFMIRFLWNEIAFYEESIRQLDERMDAYLVSYKEEMEIMQTMPGVKRTTAASILAEMGHNMDQFPTAAHLTSWAGVAPGNHESAGQKKVPAR

SEQ ID NO: 477464 - protein, 343 aa, unidentified
MQVTMLGIDLGKNSCSLVGLDATGKVVVRRRMRRETVIAFCLKHPTCTVAMEACCGAHHMGRALAAQGHVVRLMSPEYVRPYVKAQKNDDRDAEAIAEAATRPTMRFVELKSEEQLDMQTLHRVRDRLICERTSVMNQIRSLLLERGLTTPQGKAKLAARLEELLDGENSPLTPRIQLLINEMRDEWRSLDQRIGALDAEFAAQARRDARMCRLLSIPGIGALNATALVAAIGDASTFARGRDLAAWLGLVPRQVTTGGRPRLLGITKRGNKYLRKMLIQGARAALPTLSKSATQLGAWLRGLLSRAHVNTVVVALAAKTARIVWALLRHEKTFEATAITVAT

SEQ ID NO: 477465 - protein, 415 aa, unidentified
MEKQRNKVCGADIHKKFLVATIISRDGIKMTKRFGMTLEDLLELKSWVVENQCEQVAVESTGVYWIPIHAVLEDAVDLIVANAYKIKHIPGRKSDLIDSEWIAELCLNGMIEPSRIFPKEDRELRRLTRAREGYVTDMTREKNRIHHALESCGIKLSSVLADVFGKSGRYLLNSLLDGVELEEMIKGIPVKSIRKKADLIREAVRGSLETTQIILIRGGLEQIESIQRRIDELEGEIKNRIASRREDLKIAMSIPGIGFTSAVTILAEIGDFKDFAKAEQLAAWAGLVPAVYQSADKLVTGSITKHGSKHIRWILVEVAQAIARTNKSELKRFFRRVQAKKGYNVAAVALARKVLCILYHLLMNQEMYQEDEVIKTKSIGIDPSSLPTKMGFEEMIQVLVKAGYEIRKTSSGTGG

SEQ ID NO: 477466 - protein, 314 aa, unidentified
MAEGDVYVGIDVSKAWLDVAVEPSGQYWRTENNAKGIGQLASRLGRLAPQIIVVEATGGYEARLVEGLCQAQLPVARVNPGRVRKFAQGLNWLAKTDKIDAKLLARFGEQGKPRLTKLSNEYEKRLAGLVKRRKQVLEMLVSEHNRLENADAQVRPYIQDTMTMLQRQLEELEQAIGSLMDDTPHLKGKRDLLVTVPGVGQVTASTLISQLPELGTCDRKEIAALVGLAPFSHDSGKKRGRRAIKGGRPAIRNALYMATLASIRFNPVIGKFYYRLLGYGKETKVAIVACMRKLLTILNAMARQNQPWNPALAS

SEQ ID NO: 477467 - protein, 333 aa, unidentified
MQDLSTKQHFVGCDVSKDTLDLALYQPKTDYRKFEHVQISNDTEGFKQLLQWLKARKIKKNDVAIAFEHTGAYSIALAEWLHKKKITFNMLHPLDVKNACSRGRNKTDEVDAKFIADYAYTMREKLAPSGPEPKNIKHLRELRNERDLCVRCRASYLCQIKVQTEAQTIARMHKMVDFMTVQIHQIEEEIKKIIAADETIATNYHLLISIPGIGMVNAVNTIVATGNFTRFQTSRQYAKFCSVSPMAVQSGTSVHSGNHVCKKGHNELKATLSEAARSAIIHDPQLRHYYQRKRSQGKSHGCVMNAVKFKLICRMFAVIKRQQPYVNTECYRG

SEQ ID NO: 477468 - protein, 392 aa, unidentified
MIIVGIDVASEKHDCFMLQKETGLVFRASSVTIGNTEEGYKKLHADIQSFCGATGDSDVRIGLESTGIYHTNIITFLIAQNYKVMMINPILTNMARKAAKVHSAKNDNLDAKTICRYLVDHPDEFSPYTPTLYHTSVLKSIARKRYFITEDLRKAKMAVNNIVQLIFPEFKKLFSNIYGESALAILKEYPSVKKLAKARVSKLAALIHGRCKCTAEQLIDAAKHSIGLSDDWYTFELEDAIAELEHIQKRIAAYDAQIKRYVDEICPNILTIPGVGYVTAGLILGEIGDISRFRSPDALVSFCGLDLTVYQSGKYKALHVSPSKKGSVYLRYALFQVSRVIWQCNSTFRDYYGKKQAEGKHHYVILGHIQKKLARVIFSVLKNNSAFQERPA

SEQ ID NO: 477469 - protein, 358 aa, unidentified
MYYAGVDAHKKYSRVVLTDHLGNQVSQASLSNDLIGFQEFFKQINEPVKAVVEAGRTWGVIYDLLEGMGIETVLANPLKTRAIAEAKIKTDTIDAKTLADLLRADLIPEVHVPSHEIRTQKNLLRQRFWLVELRTRVKNRTHHILDRNHVKLPTYSDLFGKAGRQLLNQIMIPSPDNLLLKAHLDLLEYVEKQIDYAEKWTREALNNHPGMAIIRTIPGFGKILSALAALEIDDISRFSCAGKLCAYAGLVPTTYSSGGKVRHGKLLPSCNRWLRWAYVEAAWIAQRTSPYCHAYYERIKRRKGANCANTALSRRLCEITWYCLTEKRSYEERNPTHILINKPVAFESSWSYGTQQPD

SEQ ID NO: 477470 - protein, 370 aa, unidentified
MLENVAVRGSRYREPLTRRTAPVSPQATTVGELWDRCRSHARPNSRQTSIARTRQVTVAKIICGVDVSSFSLEACIGPAGPTQAFSNTAKGIVELLAFCRQHGVELVAMEASGGYEKQPFALLWAHGLPVALLNPRAVRRFAEGMGLLEKTDRIDARVIAWFAAVKSSRPCAPVCAEQQRLKALVTRLRQLTELQVAQRNQRLLVSEATVLTSFTEVLALVASQMRTLEVAIAALIAADPLWQKLDQAFRSIKGVADRTVARLMAEMPEIGTASNKAVSKLAGLAPLARDSGKHQGKRVVRGGRRDVRAILFVVAGVVRRYDPDFAAFHQRLSAAGKPRKVIRIALAHKLLVRLNAKARQVRHEFAALTA

SEQ ID NO: 477471 - protein, 406 aa, unidentified
MRVLYERCCGLDVHKKTVVACLLTPAGKEVRTFGTMTRDLLAMGDWLKEQGCTHVAMEATGVFWKPIYNLLEDRGMQLLVVNAKHSKAVPGRKTDVRDAEWIADLLQHGLLKGSFIPDRSQRELQELIRYRRSLIGERAREVNRIQKVLEGANIKLAAVVSNTMGVSGRAMLEALVAGTADAEAMAKLATARLEAAPEQLAAALEGRMGEHQRTLLGLQLQHVTQLDEAIERVSAEIEERLRPFEDQLHRLDTIPGVSQRGAQEIIAAIGVDMSRFPSDRHLASWAKLCPGSNQSAGKRGSAATGKGNPYLRETLVEAGWAAGRTKHTYLAAQFHRLKARRGAKRAVVAVAHSILVIAYHLLQEDGTIYTDLGPTYFDERSKEATTRRTVKRLERLGYKVTLEPAA

SEQ ID NO: 477472 - protein, 440 aa, unidentified
MSTCLRTPAPEFAALVALDWGDRKHCWALRPVPEGAVESGELENTPEAIALWAAQLEQRFGGRPIAVALEQQQGAVVYMLSRHAHLVLFAVPSSMSAAYRKAFCPAGAKNDPGDTALLLDLLLCHRQRLRCYQPDTTDTRLLQMLVEERRQSVEQKTGVVQRLTDCLKQYFPQLLRWFGSPDRLLVADLLDQWPTLQQLQSTNPAPLARFFRQHHFGNEERIHQQIQDMYTAVAATTDAAVLEARTLRARALVRLLRTLWLTIAELEARIQQLVAQHPDAALFASLPGAGAATVPRLIAAFGTQRDRFDTAYQLQCFSGIAPVLKASGKTRTVQFRLACPKFLRQTFHEFAGQSVRYCAWAKAFYEYQRTRGVPHHTAIRALAYKWIRIIFRCWKDRQPYDEARYLASLRQRGALLGAVFAQPPEIKWKSVAGFQKLSEI

SEQ ID NO: 477473 - protein, 369 aa, unidentified
MLYVGIDIAKNKHDVTALNVPGKTVLKPLTFSNNKAGFELLDLSIRQINQDCLIALEDTGHYAFNLLNFLHEQGYKVYTYNPLLIKEFAKSLSLRKTKTDKKDAHGIALKLLSDPNREQFQHNNRQVELKILTRHIHRLKKKQSDWKVQYTRCLDIIFPELDKIVGKHSEYTYQLLTRYPNPQKRIEAGFDKLIEIKRLTASKIQDILSVAPRSIGTTSPAREFEIIKHYKRLIDKAEKCVNDLMAEFNSVITTVTGIGNRLGAVILAEIRNIHAFDNPAQLQAFAGLDSSIYQSGQIDLAGRMIKRDSPHLRWALIQAAKACPRFSPAFKTKLEQGKHYNVAIIHLAKKLIRTLFYILKKSCHLTNKK

SEQ ID NO: 477474 - protein, 352 aa, unidentified
MTVTIVETRAPARAITGGVDTHAGAHVAAALDPVGGLLGVQEFPATPAGYAQLLGWLGGFAAVCLVGIEGTGSYGAGLARYITAAGVRVVEVDRADRQDRRRAGKSDPLDAVSAARAAQSGRAAGAPKGRDGAVEAIRALMVAKRTARSERTQTINQARALVVTGPDDLRIRFATHAPADLVAELASLRPRPGAVVGYATRIALRELGRRAQFLDRQLERLDEFIVPLVTARAPGLLALYGVGPDTAALLLITAGDHPGRMRSEAARAHLCATAPIPASSGKVTRHRLNPGGDRQANHALYRIVITRMSSHPPTRAYVARRTKEGLSKKEIIRCLKRYVAREVYPHLRGPAG

SEQ ID NO: 477475 - protein, 312 aa, unidentified
MAQMVVTAGIDVSKAWLDVALWPTRAELRVERSAAGYQQLEAWLSENGVTRVGLEASGGYEIEVIDALQTRGFEVMRFNAQRIRLFAKAKGRLAKNDRADALTIAQATLVLLDQAPPQRRRDLDPLVEHLTYRRQLRAWIVDCANQLEHLTDKALRRKLIARRCAWQNELAAHDRKLASLVGEHDEWHAVEQRLRAVPGVGPVLAQTLLALLPELGQLSRRAIASLAGVAPFDDDSGRRTGERHIKGGRPVVREALYMAALAARRHNPVIAAFAKRLAGKKPKVIIVACMRKLLVILNAMLRDGTDWHAKAA

SEQ ID NO: 477476 - protein, 423 aa, unidentified
MKNSTARKLKQVPKGYLVMGIDPHKKRHAAVAMTQDFTTHSKFKFNNSKEGFEVALERIRAEMVRTGSRGVIFAIETGGHYWRNLAYFLDERGIPFRFINQFTLKRRREGKDLNRRKNDYRDSEVAAQLLCTGEFTDTKLQHGIYAELRAAHNAYRRLVKERTRITNLIKGLLDGIFPEFTQVFKDPCGLTALSVLSICSIPGIIAQMTGEEFVNIIRAKHQGHLMRKKLRALHYAAQVSIGIEAGAWSVSSEISFLVEKLRLIKRQVCSIDETLARLVDETEEGKYLLSIIGLNYTSVAGLLAELGSFRSYQSAKQLIKMAGSNPTESESGGKRSAHTPMSKKGRPVLRYCAWTAVIPMLRFNPDFRTWAKNLRERPVHANPLNGREVVGAALNRLLRLAFALVKNHAFYQVPRLEIAPVVV

SEQ ID NO: 477477 - protein, 364 aa, unidentified
MSEHITWVGMDAHKEAINVAALSAQERRQEWIIENTPAAIRRLVRKLEREAAGGEVRCCYEAGPCGYALQRQIEAAGAVRCVVIAPALIPRKPGERIKTDRRDARKLAELLRAGLLTEVHAPTVDQEALRDLCRAREDAKHDLLRCRHRLLKLLLRRGVVYRGGKKAWTQAHRQWLRTLTFEQAHEQAVLDDYRLAIEQLEERLKTLEQHMLTAAQREDVAQPVGWLRCFRGIDTVTALSLVAELHGLERFASPRALMAYVGLVPSEHSSGQRIRRGGITKAGNTHVRRLLIEASWHYRHPPHLGAALKQRRAGQPAHIIAIADKAQQRLYRRQRHLAAHGKASTTAVVELSGFLWAALRAPHS

SEQ ID NO: 477478 - protein, 452 aa, unidentified
MAKVAKRKQTSKGLRLEVVNPNAAGIDISPKEMQVCVPSDRDGECNRTFGVYTEDLHYIAEWLKACCIDTVAMESTGIYWLPVFRILKESGFEVILVNASDVKNFSGRKTDASDAEWLMMLHSYGLLKPCFQPENIARTMRNLVRHRDNLIRSASREVLHLQKAMEQMNLKLDNVFSDILGKSGQSVIKAILNGERNPKVLADLADPRCRTSKEEIEKSLHATWDEEHLFEMRQSDSLYQFYQQLIAECNAKINEIAMQYSATVDAPKTQLLRSEKYNAKKNRIGFDVEKVAFELWGVNVMRIPGMSRGALLRLVGELGADFTTKFVDVKHFVSWANLVPNNKISGGALLSSKVPKKKNPVGMIFRQAANTLKAAKNPLGDYFRHMRAKGGHLQAMVATGKKLASIFYCMVQRKLEYNEKVYCNHRKQELQNKVAYLHKRLQRMESELANCG

SEQ ID NO: 477479 - protein, 442 aa, unidentified
MQFSNLQMKRHFIAGKIIVGIDPSKEKSDAAVIDAFGLLQGKTFSFQNNHEGFQKQLFNCLNERIVNLSKENTIFAIEAACNLWQKLADYLISQGYTVVIINPLSTYKARSLINHSFSKTDAKDALVVANAAREGYFDFYRIHSDTTKAMHDLAVTYDKLKRSLTQTKLRLRALVELTFPEFTDVIRMSTNTALYLLEHYITPQEFLDANVFDAIRGMEKVSRKKKGVKEFKKLQEAAKTSIGLSLDQEQVNAAHTARDAWIAMIKLLSIKIDDVQSQIIVMAKEKPYFDILTSIKGISDISAALFIAEVRELYNFQHYKQIEAFAGLGLKNCDSGKYRGYRHISRIGNSRLRSIIYRMTSETRNHIPEVRIRFLNRKMIHDRHRKNIIACSSNLLKLIMVLVQENRPYEFREEKVKELQELEIKIEQMKEKKIKRSYKKAS

SEQ ID NO: 477480 - protein, 427 aa, unidentified
MKSNTQNAKIEAITEKTLVLGIDVGSETHYARAFDYRGIEYSKKPFKFSNTEVGFATFKEWILDLKERHEKDKVVPGMEPTGHYWFNLGKFLQDNEMKPVLVNPHHVKKSKELDDNNPTKNDRKDPKVIAGLVREGRYMIPYLPDGVYADLRTASNIRFQLQAELTRIQNRISRWFNIYFPEYRTVYGKPDAKSGMLLLKAAPLPEDILTLGIDGVNQIWRDAKLRAVGKARAKTLIEAAEHSVGSKEGAVSARMEIRMLLEDYESRNTRLQEVMILIEELVRKIPMAEKLLEIKGVGIRTVSGFLAEVGDISRFNNPKELQKLAGLALVENSSGKHKGETTISRRGRKRLRYLLFEVAMSLVSKNQEFRELHNYYTTRRLNPLKKMQSLMAIAAKLIRVFYAILANGVTYDAQKMLSDIHRQPQAA

SEQ ID NO: 477481 - protein, 370 aa, unidentified
MKKYSELFIAFDTAKKKHAVAVADVGREGEIRYLGEIDSSSTAIEKVLGKLAQRYTTLRVCYEAGPTGYGLYRQICALGHDCTVVAPSLIPRRPGERIKTNRRDAVTLARLFRAGELTSVWVPDAVHEAVRDLVRAREVASRDLRKKRQQLLSFLLRHGRIFTGRKHWSLAHRRWLADQKFQHPAQQIVFQDAVNAIEDAAARLRRLDEQLVAIVPSWSMAPVVTAYQSMRGVSFIAAVTFVAEIGDVRRFDNPRQLMAFLGLVPAERSTGERVRRAGLTLAGNRRARRVLVEGAWTYRYPARVSETLRPRLEGLPKTIRDIAWKAQIRLCARYRRLIATGKKTPVVIAAIAREMAAFLWAIGRHVEPVS

SEQ ID NO: 477482 - protein, 449 aa, unidentified
MEVLYARCAGFDIHKKTVRVCLLIRQENGKTHKEFRTYSTTTQDLLNLLEWLLSLGCTHVALEGTGVYWKPVYNLFEGHLEVLVVNAQHIKAVPGRKTDTKDAEWIAELLRHGLLKASFIPSAPQRELRDLTRYRVRLTEERAREVNRVQKALEGMNLKLGDVVSDIMGKASRMILWSIADGESDPARLASLAVGRVRASQEQLEAALTGTVSEPHRFLLREHLTQIEHLERAVERITAEITRRFSTPDPPEEAERSKPEESLRKEESTNPSQPVLPPSKQGLCWQEAVILLCSIPGISERAASGILAEIGVNMQQFPTASHLASWAGVCPGNHESAGKRLSGKTRKGNPWVRRLLLQAAHVVARQKHGYLTAQFQRIAARRGKKRAGMAVAHSMLVIIYHLLQEGVPYEERGDAFFEEQDRQLTEKRLIRQLERLGHQVTLQPLAQAG

SEQ ID NO: 477483 - protein, 312 aa, unidentified
MTQNEDFVGLDVGKFEIYVFISNTGSTFTVPNTPSGHTQLQTKLGKPQVQTIALEPTGGYEWAVWEVLDTAGFDVRQVSAAHVRAFARATGALAKTDPIDARLIAEFMAFRPQAGRRLPDNKLRHLNALSAKRRQLVELRKRLKCQIQQHHDAELVGLDTELLELLSHQIKVLDDAIQTNIKADSQIKQHAKILRSIPGIGPVLCTALIAEMPELGSISDKQIAALAGVAPINNDSGQTNGKRSIKGGRYNVRCLLYQAALVASTHNKHLKAFSKRLKEKGKHHKVILIAVARKLLVIANALVAKNQLWRTN

SEQ ID NO: 477484 - protein, 428 aa, unidentified
MNIEENIRREQFCQIKSEISGSDQYLVVGIDVAKDKHHAFMGTATGKSFLRKLVFENNLEGFRKLLERSDAVKTQNALSKVVFGLEPTGNYHKPLGAHLIRCECHVVLVTGKAVKNNRELLDGRWDKNDDKDAANIADLVSRAKCLYYDFPSGNINEVRQSLSLRRRLKKEEHSLRMRIRNNLLAQYFPELDRFYSACESESLAIVRWCLDPGRIADMDFEQFFSMVTRSRRGIAQKRRLKKIHQLAVESVGCAMGPAAEFEAVLLVDKLKEVRGQLKQVAGQIQDVCLQFADYSFLLTIPGFGPYVAARVLASISNPWRFDSSNQVLKMAGYDLGANRSGKRSDDAVPVISKRGNSELRYALYQAAHVASTRNRDFIGYFTRILRGRERERGIKTKMKVKLAAKMLKIAWTLMRKQEVFDPDYLIIE

SEQ ID NO: 477485 - protein, 345 aa, unidentified
MTIVEARPITGGVDTHAGTHVAAALDSIGGLLGVQEFPVTPAGYARLLGWLGGFGTVALVGIEGTGSYGAGLARHITAAGIRVVEVDRSDRQDRRRQGKSDPLDAVSAARAAQSGRARGAPKGRDGAVEAIRALMVAKRSARSERTQTINQARSLIVTGPDDLRARFTGHTVTALVSELAALRPRPGAVVGYATRIALRELGRRAEFLDGQLERLDELIVPLVTAHAPGLLALHGIGPDTAALLLIAAGDHPARLRSEAAWAHLCAVAPIPASSGKVTRHRLNPGGNREANHALWRIVITRMSSHPPTRAYVERRTAEGLSKKEIIRCLKRYVAREVYRHLRPAA

SEQ ID NO: 477486 - protein, 376 aa, unidentified
MEKFNGIYVGLDVHKATIAVAVVRGVRSQAQYFGEIANAPAEIKKLVKRLSPEGEVMNFCYEAGACGYEVYHQLKKLGQDCDVVAPSLIPRKAGERIKTDRRDAMMLAKLHSSGDLTAVWVPDKEQEAMRDLSRAREDMMQMQTKARQRLGAFLLRHGKIFQGKSRWTQAHWRWMEEITFETAMQHIVLQEYIEAAKDLERRVQCLEGQIRLAMTGWNLEPVVKALMALRGVGMLTAVATIAELGDLSRFDTPKELMAYLGLVPSEHSSGGSKRQGGITKTGNSHVRRMLVESAWNYRFAARKTRDIQKRAEQTSEKVQAIAWEGQKRLCARYQRLLHAGKVKQQVTTAVARELTGFIWAIACEVSGKAHASKATR

SEQ ID NO: 477487 - protein, 411 aa, unidentified
MSAGVITAVGIDVSKYKSTVAARRPGGEVALLPFDVSHDVAGIKKLLEKLHSLEDEDGEIRVIMEHTGMYWRPVALALQQAGFFVSVVNAILIHNFSDNSLRKIKTDKADALKIANYGLTFWMDLREYSTEDETRQMLKIQSRLYERTTTTGIMLRNGLISLLDQTFPGANKLFLNEGRNTKGHIKWVDFVIRFWHKECVAALSLHTFADTFQKWCKRTGYRFSPSDAERIHTAARNAVATLPKNDSTKLLITQAAISLNTVYDSLHALRTEINRLASLLPEYELVMEMEGVGKITGPQLMAEVGDVRRFSHKGALVAYAGVDAPPFQSGTFDAKNRHVSKRGSPHLRRVLFEIASMILVHGNPDNSVLCFMDKKRAEGKHFYVYTVAGAAKFLRIYYARVKEYLNTQEIA

SEQ ID NO: 477488 - protein, 376 aa, unidentified
MYAPFEVQHTREGMLELVSLLRSSGEEVRAVLESTGSYHCPVVAALLENGIFVSVVNSLRMKRFCSQSIRKVKTDRIDAMQIALYGLAYWQELQPTRLPEDTYRELQLLARQYYQMTSLLIKAKVDLNAICDQVLPGMQELMNDHAGRHKLSDFVLRYRHTTHILEMGETRFRKDYCKWAEKKGYRNCERMAALIFATAQNGIPVLPNAPSTQIVITEAIRVLHTVEASRDAILTQMQALAKTLPEYSLVREMPCIGDTLAPRLIAEIGDVRRFHSKRALIAYAGIGAPPYQSGKFCANNRHISKRGNRYLRKTGYEVMQSYVMHKPANDPIFTFIEKKRGEGKSGKLAMVAGLNKFLRVYYGKVTELYRSLPAIE

SEQ ID NO: 477489 - protein, 373 aa, unidentified
MNSILYVGMDVHKENYTLCCYSIDDEDLMYKQTIMPDYKMILKYLEQVRGRYHEEDVEFVCGYEAGCLGYTLYHQLTNHGVKCIILAPTTMGITNNDRIKTDKRDAGNIARCLAFHTYSAVHVPTVEDEAVKDYLRMRNDKKKLLKITKQQLLAFVLRHGYRYSGGRNYWTIKHVEWLKSLNLGGVLQESLMEYLITYDYLTNKIEILDKRIEELAGGERYQEKVKKLSCLLGVKTHTALSVIVEIGDFRRFAKAERLAAFVGLVPSEDSSGGKQKRGSITKAGNSHVRSLLVESAQSYTRGKIGHKSKELKRRQNGNSPEVIAYADKANERLRRKFYRMVLSNNSNRNVAATAVARELACFMWGLMTDNIAS

SEQ ID NO: 477490 - protein, 334 aa, unidentified
MKQVNQVGVDVDSQQLVCALQCAEQRAPIATFANSAAGHKKFIGWVTKGGRSARVCLEATGIYSLEFALALHHAKRVEVMVVNPRAIKDFARACMQRAKTDAVDAGGILEYLQRMPFAAWQPPAPEILELQAINRRLEQLHTELTREKNRRHASEFAGASADAIAHDIEVNVHHLERRIERMQQSGLKLVRGVPALATKLAHLVSTKGIGETSAMRILAEVLMLPDDLAAPQWVAHAGLDPRPYESGTSVHRPRRITKVGNRHLRAALYMPALVAIQHDPNVRAFYNKLIAAGKKPMQAIVAVMRKLLHAIWGMLKHDQDFDGNKFFKLTEKTA

SEQ ID NO: 477491 - protein, 362 aa, unidentified
MQIIGCDLHARQQTLAILDTTTGEVVEKTLTHEGSNVREFYSRLPGPVCVGIEATGSMVWFVNLMEELGIECQVGHPAKIRAAEPRKQKHDRRDADLILKLLVENRFPSIWLPSKELLDLRALLLHRHQWVRVRTRIQNALQAIALANGLRRGPSLWSQAGQCTIASLPLAPHTAHRRSELQAMYVKFEAEIEKLNQRVEEQACERPGARLLMTHPGVGPVTALATDVFLGDPRRFADGKALASYVGIIPSEHSSGGRQRFGGLSKQGNPLLRFLWGEAGAHAVRRDPELQRFYRRKLIQKGLGKARVAVARKLGIRLWIMLRDQIDYHEFCRRGQVQQKSGDACAGMPGTRYGATSHRPID

SEQ ID NO: 477492 - protein, 320 aa, unidentified
MKFNNALGKIFVGVDVSKATLDVYRPDTKEMLQIVNSDEGIAILCSQLEKKKRKVMVVMEGTGGYEHLLVKHLSSCKIEAAVINPRRIRDFAKGIGLDAKTDPIDAKVISRYAEVVVPQPMATKSDHELKHGALVTRRNQLLELINQENNRLKQSWDDDAKQSIRSVLEVLKKQLKDVDSKLAKMLQVDTQNKRTIEVLQSVKGVGPVMISTVLAELPELGKLNRGEVAKLVGVAPINRDSGTKSGKRFIGGGRGQVRRVLYMATIIAIRHNSAIKAFYAHLKSKGKESKVAIVACMRKFITILNLLIKTDQLWENKMSA

SEQ ID NO: 477493 - protein, 387 aa, unidentified
MPQPNDLSRSLVALDQDSTLVAVIEMGQASWLVAAIVPGINRHPLKKIATDQEQLLQVLRRWAKEAETAGRMIKRIAVAYEAGRDGFWLARWLRAGGVEAYVIHPSSVPVPREHRRAKTDRLDTELLKRAFLGWLRGEPDHCSMAAIPTLAAEDAKRPGRERENLVGERTRIVNRIKGALARLGLRNFKPMLRNAPQRLETLRTPEDAALPPNTLAELRRDMARLSFVKQQIKEVESARLERLQRAPGERGNAMVHLLTRVVGVGVETADMLVQEVFCRNLRDRKAVARYAGLTGAPDESGKKRRERGLAKSGNARVRRGMLQIAWGFLVHQKDSALAEWYRARTADARGATRKTMIVALARKLLITLWRLATTGEVPEGLVLRAAP

SEQ ID NO: 477494 - protein, 390 aa, unidentified
MYYCGIDVAKRKHAVAIQDEHGQPVQRPFTIENTRAGFDQLLQALAALKSPVLIGLEATGHYWWALYDDLTHHEHPVVVLNALQVHAFRKSGVRKVKSDRTDAGWIAEFLRFSQPAPAKPTTALFLQLKDLSRFRYHLSDQIGDCKRKLLSVLDRVFPEYETLFSSVFLSSSRQLLAKAASAQELAAFDLTELAELLQSASRGRFDRTKAEAIQTLAQQSVGVSFLADAAQLEVRCLLAQIDLLEDQRDQVDLALAQLMEQVPQHLTSIPGVGPTTGAALLAEIGDIQRFDAPEKLVAYAGIDATVYQTGQFEARQMHMSKRGSPYLRHALWQAASMAIQYDEELRAYYDRKRKEGKAHGTALGAVCRKLITRVYIVLKENRPYEVRTKS

SEQ ID NO: 477495 - protein, 406 aa, unidentified
MNMNAVGIDVSKRKSTVAILRPGGKAVGKPFDVPHLFADFQSLIKRIRELDGETRIVMECTGRYYEPVARELSQAGFFVSAVNSQIIRNFQGQDNPLRKVKTDKADSVKIARYTLDSWANLKQYSLMDELRSQLKTMNRQFDFYMKHKTAMKNNLIGLIDQTYPGANAYFDSPAREDGSQKWVDFIDTYWHVDCVRKLSLTAFIDHYQKWCSRKKYNFSKSKAEEIYGKAKELIPVLPKDSFTKRIIKQAVGQLNAASQTVEQLRSLMNETASKLPEYPAVMAMKGVGPSLGPQLMAEIGDVTRFTHKGAITAFAGVDPGVNDSGDYSQKSVHASKHGSPALRKTLFQIMDVLIKTKPDDAVYLFMDKKRAQGKPYYVYMTAGANKFLRIYYGRVKEYLAALPTSN

SEQ ID NO: 477496 - protein, 355 aa, unidentified
MNIVNKIDFTGQHIYVGLDVHKKSWNVSIHGAHLEHKTYSQPPDPQVLGNYLRRNFPGAYYHCVYEAGFCGFWICDGLKEQGIDCLVVNPADVPTNDKERATKSDRVDCRKLARNLRDGRVHGIYIPSKIKIEDRNLLRIHQNLVKKQTRCKNQIKSFLHFYGKSIPEEMVLSHWSRRYIQELENISMEGPTGIISLQTLLSELIHLRGLIAKIKREIIALSRSEDYRESVQWLKTIPGISTLGAMTLLTELVDIERFACFNRLASYVGFIPNVHGSGEKERQTGLTNRRNPTLRVLLIEAAWVAVRKDPAMMMAFNRLCIRMKKTRAIVPIAKKLLRRVRFVLKNRTAYQLAVV

SEQ ID NO: 477497 - protein, 354 aa, unidentified
MYSPYVSVGRHIVFSFNPNSCRGIQARIFARLGTENMVNESFVGIDVSKQWLDLGWEPAGQAERLAHDEVAIAGLCERLAQERPTLIVLEATGGLETHLASALAAAGLSVAVVNPRQVRDYARACGRLAKTDRIDALILAAFARAIRPQVRAPKDDETLELGALLARRRQLLDMRVQERLRLERASPVQRDSIKEHIAWLTERIARLDTDLMRRLRSSSLWHEQEDLLKAIPGIGPITRVTLIALLPELGKLNRREIAALVGLAPFNRDSGQHRGERVIWGGRAQVRQVLYMAALAATRSNPVIRTFYQRLRAQGKPAKVALVACMRKLLTIMNAMLKHNTPWNPNTLDLKHSC

SEQ ID NO: 477498 - protein, 354 aa, unidentified
MKRARKELQAGDRVFVGIDLHKKKWHVTARTAEFELFSGSIPGCWKALQRILYRYKGHQIYTVYEAGYFGFWLHDHLVEYGAECIVTPPSLIPQEYGNKVKTDRRDSRKLAHYLAKGMLKRVWVLTEKERYHRQVTRRRRQLVGDRIRTQSRIKAELKLYGIDLPEPDGKWTKIYLGNLGRIRFNNRFMQESFKCLLEQYHFLDGQIVKQTKLLQELSKTELYQERVELLMTIPGIGLIAAMELLLELQDVSRFQRADQLAAYVGLTPSQYTSADKVRMGRITRVGKNSLRATLVQASWALIRKDGVMQEKYDRLKSRSGGKRAIVAVARTLLIRMRRMLLDNEPYVIGLIATN

SEQ ID NO: 477499 - protein, 338 aa, unidentified
MVYGAIDLHMRYSWIRIIDADGVVQREQRIPTSRERLVRAFDGWGRMRILLETGTESDWVAEALEGAGHEVVVADPNFAPMYGELRRTIKTDRRDVAALAEANRQRWYRGTHRVSREQRDVRRILRSRRQLVQMRTGTLSLIRSLVRQAGFRAKANVAQGLPKYVAQLGLPTTLADTIAPLSRLIETLNQEIAAIETRLRAITASDPVVTRLQTVPGVGPIVAMTFRATIDDITRFPRADQVSAALGLVPREASSAERRHRGHISKAGPSELRSLLVQAAWCAWHTRSNVMLRAWTERIARRRGKRIAVVALARRLSRILFALWRDQTTFRLEAMHVG

SEQ ID NO: 477500 - protein, 370 aa, unidentified
MAHSSTLFVGLDVHKETIAVAYVAEERGAEVVALGTIGTRQKDIDALVRKLRAKGKSLHFVYEAGPCGYWLYRYLTKQKLTCWVVAPSGIPKKAGDRVKTDRRDAVQLARLLRSDDLTPVYIPSVEDEAIRDVVRAREDALKDLKAAKVRLKAFLLRQDIRYEGRANWTAAHLRWWAKVVCPTPAQQLVFQEYVRAVSEHTERLQRLEAELPALVQSWRWAPVVEAIQALRGIQFTAAVTLIAELGDLTRFANPRQLMSYLGLVPSEHSSGERRRQGGITKTGNSHARRVLVEGAWAYRYPAKVSRHLQLRVEKVPKVIQDISWKAQVRLCKRYRRLVARGKQVNQVVVAIAREMAAFVWAIAREVTVAS

SEQ ID NO: 477501 - protein, 375 aa, unidentified
MKEKLRFLVLDVHAETIAVAVAETDGEVRSLGTIPNRAESIRKMIKKLGPAEKLRACYEAGPTGYVVYWQLAELGIQCEVVAPTLVPVKAGDRVKTDRRDAEKLARCYRSGDLTAVWVPDEGSEALRDLVRAREAAKQDQMRARHRLSKFLLRSGQRPPTGVRPWTRPYLTWVAQLRFTQIAQEATRQDYLHEVEHMRERVARLEQAIMEAVKLASPALQQVINDLQALRGIADISAVTIAAELGQVSRFGSARQLMGYCGAVPSEDSSGKRIRRGGITKTGNAHLRRIVGEAAWSYRRPPCIWYGLRRRQETISEEAKEIAWKAQHRLHKRYMKLGAAGKAQGKIITAVARELLGFIWAIGTKAETTVSQRAAA

SEQ ID NO: 477502 - protein, 388 aa, unidentified
MNVGADKSEPLTAIHTDLGAIFVSLELSRSSWLITSLSPGGGEKMSKHSVRGGDFAGLMERFAQLQEKARLRTGQSFRIIVVQEAGLDGFWIHRALQNEGIESHVVDAASIATSRRRRRAKTDKIDGETLVRALLAYKRGEPRVCAMVKAPTPGEEDRRHLCRERKALTAERVRHVNRIKGLLFSQGISGYQPLRRDRRQRLEELQTGDGRAFPQHLKALVNRELDRLELLLKQIKTVEAARDALLAVGQTAKPAPAAMLLDIRGIGPEFAAILWSEGLFRHFENRRQIAAYAGLAPTPWQSGAVDREQGVSKAGNPRLRTTLIQLAWLWLRNQPRSALSLWFHERVSRNGGRLRKTTIVALARKLLVALWKYVTAGVVIEGVTMKVA

SEQ ID NO: 477503 - protein, 350 aa, unidentified
MIIIGVDFHPEFQQIASVDTDTGEFQEKRLAHREEAEKFYRGLAAAGQKVRVGMEASGHARWFERLLAELQAELWIGDAAEIRTRRVRKQKTDRQDAQLILKLMLKDDFPQIWVPSWENRDLRQLLWHRHRMVQARTRIMNQLQAVALNEGLRCKKRLWRERGRQQLESFRLAPWASRRRCDLLELLDRLNPTITELSQAIEREVENCPEAKRLMTHPGVGALTALAFVLIIGQAERFGCGKQVASYLGLVPLEDSSGNRRRLGHITKQGSSMMRFLLVEAAQVTVRSVPEWRSKYLHLMMRRGRKTAKVAMARKLAVRLYWMMRKGWGYEQWKKFGSHAGQPGHRDGVL

SEQ ID NO: 477504 - protein, 398 aa, unidentified
MASGHAYRANRPNTWLLRPMLQSEDSSCQPGANGMDPALGARWNLERQCLKKEDVMQVVRIGLDLAKYVFVVHGVDSHGKVAVRKTLRRDGVALFFANLPRCLVGMEASNGAHYWAAVLTDLGHEVRLISPQFVTPYVKSNKNDRNDAEAICEAVSRPSMRFVPPKSTDQLAIQAVHRIRRRLIGDRVRLVNQIRGLLSEHGIVIARDISQLRRRLAVILGNDNDGLSEMVRSLMRDLQKEITDLDDRIAIYDRRIREIFRTSEQCRRLSKIEGIGPVTATALIAAAGDRTCFKNGRQFAAWLGLVPKQRSSGGRARLVGISKRGDRYLRTLMIHGARSALSRSSGKQDPRSLWLGKLRQRRHPNVAAVALANKNARIVWSMLSNDAAYQPALSLKAA

SEQ ID NO: 477505 - protein, 406 aa, unidentified
MADVIALDVSMGKSNVAWYRQTTCLNEYIFNHTQSGFSELLSTIRKADHPIIYFEATGIYSKPVEHFCIEHQLKYCRLNPLELHLKSENLRRVKTDRYDARKIALTVQNSCFRLTVPKSSRFARLHELSRFYNQLDYDWAHRLMQLHIALEQTFPELKQLFKNRTSKLALNIVELFPHPDFVKPLSRTKLKNRLIKSTDKKLSNMKGFKYADQLLKLAQDAYSAASQDSVQVDEVRYYCRLLIELTKQKEKIVKQMITTAQEDETFQYYVSFPGIGPQTAAQLMAELGDISRFDNANQLNAYVGIDIQRYQSGQGGRQDHINKRGNPIARKLLYFAIGNMIRQQHHAPSHIVDYYYHLKQKRPYPKMNKVAMVACMNKTLKCLLSMIKHHTKYHYRYTDSRSLVKN

SEQ ID NO: 477506 - protein, 477 aa, unidentified
MSKGSGTTRGDRRRNERRARLRRVLPRDGAVIGIDLAEEKQAIAVIDHDLRVLARKTVRVKVFRLGEALDWAVAQARAKGFGPVSVACEPTGPRWLQVQQLCAERGLPLVCIQPLVSHIAREQQDFTSHKTDEADCVMIARLAVELHCYLPEQLDETWAHLRHLGRRRNQLITAATASVQRIRDFLSVAWPVAAETCVRPFESVTWLAAMQVVMSRCGADPAKLAPCGVEAFAVLVRRAVPCWGGVRPSGRVCQAVFAALTDTQGVVASHRRGLLRRCTDELDDLQRTRARLRAVEADMVTVLAQLGLVRLADIPGLTAVGAAAILAEAGDPRRYDSSSSLVKHAGLSPADNASGAFSGQAHISRRGRPGLRLTVWRAVWAVLIHNPVMAAKYQAMTQAADTAAAQAASASADAGSRQVSAAAAAARARRAKARVACAASLLRWIYSMVVHGTGWDPAVASGAAACQHAPSSRQQAA

SEQ ID NO: 477507 - protein, 403 aa, unidentified
MNNVAGIDVSKGKSMVSVLRPFGEVVAKPFSVGHTGSELKELADYLKSLDGETRVVMEHTGRYYEPVARFLHDEGVFVSAVNPKLIKDYGNNTLRKVKTDKADSRKIARYGLDNWAELRQHTPMDTIRMQLKTLNRQQSLYAKTKTMMKNNLIALLDQTYPGVNALFDSPVREDGSQKWVDFATAFWHVDCVRNMSLTAFAERYRKWCKRHGYNFSQSKAVEVHTGAQDLIAMLPKDALTKTMVRQAIDALNAVSASLERLKAEMQALAAQLPEYPVVMAMHGVGDSLGPQLMAELGDVARFTHRNAITAFAGVDPGADQSGTHEAKSTRVSKSGPPELRRALFLVMDCLLKTQPQDDPVYRFMDKKRAEGKPYLVYMTAGANKFLRIYYGRVKEYLASLEEN

SEQ ID NO: 477508 - protein, 402 aa, unidentified
MHYLGIDVSKASHQCIVLDASGEAMAKAFTIQSSKDDFAKLVKKLSELNIPKSDLTIGLEATGNLWENIYTFLKEQGFKVTVLNPYQTRKFHEVTLKKAKTDSIDALVVAGLLRSGCASGSYIPDDTIQSLRDLIRLKDSYLSDIKNYKRKAYSLLGLIFPEFLNLVKDPFNIVSTEILLTYQTANDFKCAKPKDLLKIVRGHQGNTYDENWAHKVISAAKDSIYSGKASKARGLVLKSLIQNIRSLKEQIELLENEIQNLLKPDNGSSNSGADNLLTIPGVGAKTVAVFLAEAGDIKRFSRCKDFIGFVGLYPQIEQSGSSLDKARLTTKGSRLLKHALYLASVASLIHNPYLKSIYNDKVSQGKSAKEAIIVVGRKLACIMYSMLKNNTAYNPQRAAFAI

SEQ ID NO: 477509 - protein, 356 aa, unidentified
MSHEVKYIGMDVHKEAIVIAVQNESGKLVMESVIETKASSILQFLHGLRGELHVTWEEGTWAAWLYDLLQPHVQHIVVCNPRRNALLKEGSKSDKVDAQKLSDLLRTGMLRPVYHGENGLRTLRELGRSYQTISKDLTRVMNRLKALYRGWGIPCAGTQVYAARSREEWLSKIPHAGVRRRAELLYQQLDGLQALRREVRPEFLAESRKHKAAKLLRQIPCIGPIRAARLIALMQTPHRFRSKRQLWTYSGLGIETHDSAQYRFVRGQLQLSKKPQQLRGLNRNHNHEMKEIFKSAATRASCGRGPFYDFYAALLAKGMKPEMARLTLARKIAAITLTLWKKEERFDAEQLKTQAA

SEQ ID NO: 477510 - protein, 377 aa, unidentified
MKRIKFVGLDVHAETISVAVAEQEGEIRSVGVIANREESIRKLVKKLGPVDELRFCYEAGPTGYVLYWQLTRMGAKCEVVAPTLVPVKAGDRVKTDRRDALKLARNYRAGELTAVWVPDAAHEALRDLVRAREAAKQDELRARHRLSKFLLRHGRRSPMGVKAWTMKYLEWVKREVHFEQMAQEATLLDYLHEVEHGAARIARLDSAITEAVKSAPPQMRAVIEALQALRGIAHVSAVTVVAEVGELSRFARARQLMAYGGIVPSEDSSGERTRRGNITKTGNAHLRRVVVEAAWAYRHRPSVGAKLRKRQAQVSEEIKEISWKAQQRLHQRYRKLLAKGKNKGVVMTAVGRELLGFIWAIGIKAETAQQEPLRRAA

SEQ ID NO: 477511 - protein, 349 aa, unidentified
MTVYVAVDFHAREQTISWCDTADGEVHRTKLRHQHDDVRAFYQQFWGEVIVAFEASGYSAWFEQMLAELGHTVWLGNPAEIRRKAPRRQKNDRRDADLMLDLLLKGDFPKVHGFSEESRTVLRQLRYRHKLVKVRTIAKNSLHAIGINAGLPLKRRLLTEQGIAQLQALSLSPVLTQQRDEWLQLIALMNQRIATVEAQLQQRAKDDADIALLQTHPGIGLLTSLALRYTLLPTSRFSSTRQVTAYVGLDCMEDQSAERRRMGSISKAGSKLLRFLLNEAGHTAARHDPELKKFYRRLLHRRDKPKAKVAVARKLLVRSFIMLRDQIDYAEFVRRGVAARVAREAHSLP

SEQ ID NO: 477512 - protein, 482 aa, unidentified
MKPKQQEKTKNATYQPTQGHWQQMNRKQRREMTRKIQSEDISLEMIHPDAAGIDIGNESHYVAVPPTRDSQPVQRFGCTTAELKAMAEWLKQCRIRTIAMQSTGVYWIAVYDILEQAGLEVYLVNARDTKNLPGRKSDVQESQWLMKLHTYGLLRNSFRPSQEIRTMRSYWRQRNDLVQSAGRHIQRIQKALTQMNIQLANVLSDVSGMTGQAIIKAILAGERDPHKLAAFRDHRVKASEEEIARSLEGNWEEDVLFVLKQEQDGYEFCQKQMAECDQRLEQYLQQREDRSAGATLPEEKRKERLKKKKGNKPLFDLRTGLFRMTGTDLTRIDGIDVMTAMTILSEAGWDMSKWKTEDHFVSWLRLCPDNRISGDKIIGKGRLPTNNRVSIALKMAANALRTSKTYLGAQFRRLRSRLDTPVAIKAMAAKLARLVYRMLRYGMKYVDQGAAFYEAQHRQLQIKHLKTKAAKLGFQLLRVPAA

SEQ ID NO: 477513 - protein, 355 aa, unidentified
MKILAIDMGWSNSVSCLFDCSTGEVQYQTLITGKEPFARLLKEMNPEQVVIEAGPMAGWVRDLCEQMKLKLLVLNTNDEPWRWRNVKKKTDRKDAFKLTQVAALRQGSGVHVPEHAVRQWRQLIYYRQTLVDEMVSIKNRLRAVLLQEDLHLPSGQKAWEAQSWQKLSAMAKELEECGKDDLWRGMVKLELRRLEELAAHLGSVEKKLDGLAREDERVKRLKQVPGVGTRTAELVVALIDDPKRFGRGRKLSSYAGLSPRKHQSGKMDRDGHISRCGNGLLRKLLVQAAWSGKRNSLRMSRIYERVRKNTPKRTKQAIVAVARHLLVWLWAMLRDGSSWQVGHQPPPPKELSAVT

SEQ ID NO: 477514 - protein, 399 aa, unidentified
MRVERAWAGVDIGKEHHHVVVIDVEGNRKLSRRVRNDETTLLELISQVTALANEVRWAVDVSTGGAALLLALLVAHGQQVCYLSGNQVHRAADGYRGEGKTDAKDAAIIADQARMRRDLSPLRVDDELIVELRMLVARRRDLTGDRVRLVNRLHEQLLGISPALERVLDLTNRGPLVLLTRVQTPATIRQLGTAGLEEWLRSQKVRSATTLATTVVAAAESHHTTLPGEQLAAQLVTDMAKGVIALDEQLTQTDKLIEGRFRRHRHATALLSMPGIGILLGAEFLAATGGDMTAFASADHLAGYAGLAPAPRDSGRISGNLHRPRRYHRTLQRALYTSALVSVRCNDQSRIFYDRKRSEGKRHTQAVLALARRRVNVLWALLRDNRCYQPAPPPTAAAA

SEQ ID NO: 477515 - protein, 448 aa, unidentified
MSRAWRQKGQLNIPGGCKMNYNQNHKIAQITSQTLIIGVDIAKFKHVARAQDFRGLEFGRPYTFENTSTGFDGFLAWIQELTQKHGMEKSIIGVEPTGHYWLNLAHFLKEKAIKLVVVNPLHVKKSKELDDNSPTKNDVKDARVIAQLVKDGRYAEPHIPQGIYAELRVAKKIRDLLSVDLQAVQGQIHNWLDRYFPEFFTVFKDWEGKAALQLLKLHALPHEIVKLSDEEILAHLKQAVQRAVGVSKVRDLKHAASVSIGIREGADMAKLELRTLLDKYMLIKKRFDELDSKIDGLLEQIPGVKQMLAIKGIGKDTIAGFFAEVGDLTYYSHPKQIIKLAGLSLKENTSGKHKGQTKITKRGRKKLRALLFRVMMPLVAKNTAFKALHQYFTKRPNNPLKKMQSLIALCNKLIRILFTIGTKQCEFSEERMLSDIPHMEVSSMVVAA

SEQ ID NO: 477516 - protein, 317 aa, unidentified
MEYVGIDWAYRRARWCAKDHGGRILGEDWIPADEDGLAWLVAALGCDVNACVEMMSGAAWVRDRLTSAGWRVQIADARKAKAVASLAVKTDIIDARVLAELARRDLVPELWVPSLDDRALKERLLRRMHLVRLRTSAKNRAQGILTQWGVKLAFKRLAAPDASKLLERRGVPEVWRRSVAEAVAVVELLDGRLRPLERELRPLALADPRVELLRSIPGLGDLLGLTFAAEIGDVSRFPSARKLVGYSGLSPRVSQSGESSRTGRLSKAGPGLLRWAAVEAAQNAYRPTNPWHALYRDVKTRTGGKSNPARQPWRARS

SEQ ID NO: 477517 - protein, 410 aa, unidentified
MLYIGLDWSEKEHHVCILNEAGARISQLRVPHSLSGFQCLDAERAKLNVPAQECLVALETNHNLIVDYLLDREYVLYMIPPRATDGYRNRQRTSGAHDDASDAVLLASLIYTPSDRASLRRLQPNSALIQEMLGQVRLIEALRSSIQRQSNQLHACLVRTYPVALTLFSDLTLPLTLEFLQAYPTAQEARSLNREAFEAFCRAQGDHRRDLGARRYACLLEPMPSAHAAAVAACREQIRVLAQVLLPQVRCRLQAIQRLQQLFHQHADAFVFASLPGAGKLLAPALLAKFGDQRERFGQAQEVQALAGTCPVTKRSGRRRAVLFRRGCDKEFRRLAQQFALASRRESAWAEAYWNEIRPRCASDSHATRILANRWLAIIWKLWQSRQAYDEAYHLQQRAQRRAPKVSQFA

SEQ ID NO: 477518 - protein, 463 aa, unidentified
MARNNKSKKRKKLVRALKTIQPDAAGIDLGSREHWVAGPPLDDNTPNVQRFGTTTPELLRLADWLKEQEVKTVAMESTGVYWIPLFEILDSRGYEVILANARQVSHVPGRKTDMLDCQWLQLLHACGLLRGSFRPSDDICRLRALLRERNTMVDQRSDWVRRMQKSLDQMNVCVHHAVSDITGVTGMAIIRAIVDGERDPRTLAKMRDRRCKKSEDQIAEELTGNWRAEHLFNLHQALNLYDQFCKVVSEYDAQILAYIKSLQPGVNDDQSAPPPVSKSKAREIAKKGQEPMRQALYQLTGFDLTTIDGIGVDTAAVIISELGFDFSAFPDEGHFVSYLRLAPNLSISAGKKVPSKIKGTTTSRVAGALRIAALAVRNSKTALGAYYRRISRRKGASVAVFATARKIAQIIYRLVCYGQAYIDIGAKAYEAQFNNRRLKYYTKALKDMGYKVKPLAAVKAKAA

SEQ ID NO: 477519 - protein, 373 aa, unidentified
MGNSVAGRRRAGKEIRLLAEEVAFVGVDVHKKTYQVSVWTEGREWVAQWTQPADSEALCRRLEPVRAQVAHVVYEAGPTGLSLARMLRERGFSADVVAASKTPVAAGRSNKSDRRDAGQMARLDAKGMLTAIYVLTRQEEADRQVLRRREQVRGDMSRTRHRIKSFLLQHGVAEPAGLAHWSRAAVAALHRQVLGKELGRCLASLLRDLDHGRQELVASAQDIRELAAGERHAAAVGRMCSVPGVGVITAMTFATELPEPKRFPTPETIGAITGLAPRVSRSGETAKGGPILKTGNAHLRRVLVQASWQWVQRDPAAKKLFGHLVGETGGAQKAIVAVARHLAILLWHLVTTESTYTPGQPAAPEPEPAAAQA

SEQ ID NO: 477520 - protein, 355 aa, unidentified
MTKIKYIGLDVHQASISIAVRDENGKLVMQSVIATRASAILEFLEGLRGTLHVTFEEGTYSTWLYDLLARRVSKVVVCNPRKNALLKKGNKSDRIDAGKLSELLRNGSRSPVYHGENSIRTLQELARSYMTLTVDTTRVMSRLKAIYRSQAIPYGGKKLYTRKHRQEWLTQLHQPGLLRRAERLYEELDLLLQLRRQAKQELMMESQKHCVCERLRTIPYLGPIRAAVLAARVQTPHRFRTKRQFWAYCGLGLETRSSADYQQMEGQLQRSRKKVLIRGLNVDHNHDLKNIFKGAALSASIFAGPLQDFYQERITSGIQPEMARLTLARKIAAVALTIWKKGESFDAAKLKTQAA

SEQ ID NO: 477521 - protein, 357 aa, unidentified
MDSSKERPKMTAGLDLGDKYSYLCLIDTVSGEVIEEGRLRTTPETFRPRFASEQLMRIAIEAGTHSPWASRVLEECGHEALVANSRKLRLIYANKQKTDQIDAENLARLARLDPKLLYPLKHRGEDSQAHMALIRSREALVSARTQLVNHVRGAVKSFGGRLPKCPARSFHNRAPEHIPEALWPALGPILEQIGSLTQCIRDYERQLETISKERYPETELLRQVEGVGPLTALTFVLTLEDPYRFEKSRRVGAYLGLVPAMDRSGDRDPQKRISKEGDEMLRKLLVGSAHYILGPFGSDSDLRRHGEKIASRGGKNSKKRAVVAVARKLAVLLHHLWVSGELYDPLYNAHRCGDVAA

SEQ ID NO: 477522 - protein, 395 aa, unidentified
MRFVGIDVGAERHVVASVDAVGAVLLKPTGFSEDAAGYQHLRTVLGSATDTLVAMEATGHYWKNVFAVLVTQGFAVALLNPLRTRRFAAEELQRTKTDAIDALGIARFAAQKRPVASRLPDPATEELRERLRYRDRLSQDFGNRERQLHRLLDLGFPEFPRHVHDVGSELATAIPRDYPTAAAFQGVSVRRLGGLRYAGRHSVGAELAAALLAAAAASVGQHHGPAYQVQVRDACEDLDIVRRRLRTLDRDIERLLERHEVGTLLTTIEGIGPQTAARLVATFGDFSGVRSGAALACYMGAIPGLRQSGKRTSVRAHLTPIGAARLRAKLYMPVLSAVRHNPWLRAYYAALIARGKLPKVALIAAMRKLLHAVYSVATHRRAFVPHVGVPLEART

SEQ ID NO: 477523 - protein, 318 aa, unidentified
MENISQWVGIDISKATLDVYLRPLGKAMKVANTKEDISKLVETLKSYTVNLIVLEATGGLETELVIQLQAADLPVALINPRQGRDFAKATGKLAKTDAIDAQILAHFGEAMQPQILAVESEESRQLGDLISRRRQLVEMRTAEKNRRERARGKALVDIEAHLEYLDNCLEKLNQEIEELTQANQQWLEKVNLLKTVPGIGQVISTTLVSDLPELGQLTAKQISRLVGVAPINHDSGQHKGKRMIQGGRAQIRATLYMGAVVAMRHNPVIKTFYERLVGRGKSKKLALTACVRKILVILNAMVRQNQPWQLPDNLQPCS

SEQ ID NO: 477524 - protein, 426 aa, unidentified
MNEQNAKEFEFAAFVGWDWADQQHELRLQVAGSTEVERQVIKQDPAVLFEWVEQVRKRFGGARVAIAIEQSRGPVVYALMAYDFLVIFPINPKCLARYREAFRPSKAKDDPFDAELALDLLIRHRDQLKSWQPDNEITRTLRLNVEHRREMVKERTRLTNRVTSILKCYFPQGLRWAGDLGSRQACDFLTAWPTLEAVRDAGQRALQEFYSKYGCKHKTIEQRLKETREAVPLTTDRAVISALARRVKASMSQVRCLIDAIAEIDGYIEELFANHPDHDLFESFPGAGKVLAPRLSVAFGTDRSRYESAEEVQLLSGISPVTVRSGKSIRVRRRYARPKFMHQTFVEFAEQSIIRSPWAKAFYKQHRQVGHNHYAILRTLAYKWQRIIYRCWIDRVPYDEKMYQMALSRAGSPLAGLLTSEDRPNA

SEQ ID NO: 477525 - protein, 411 aa, unidentified
MDRFVERCAGLDVHKDSVAATVRVPGGGRERLQETRTFSTTTRGLVTLADWHASYGVTLVGMESTGCYWKPIFYLLEERFECWLLNPRHLRNVPGRKTDVQDSAWICQLVEHGLVRASFVPPRPIRELRDLTRYRKAQIEERSREVQRLDKVLQDAGIKLSSVASETLGVSVRRMLEALVAGTHDPAVLAQLAKGRLRRKLPALREALEGRFRGEHHGLLVAQILAHIDYLDETIATLSERIEQVIAPFSKERELLETIPGVGRTAAQVLIAEIGVEMRVFPTSAHLASWAGQCPGNRESAGKRRSGKRRQGSKWLRTTLTESAKAASRCKGSYFSAQYARLRGRRGPGKATGALSHSILVAAYHILDQHVPYQELGADYFDRRTSQQRTNRLVRQLEQLGHKVNLEPLPA

SEQ ID NO: 477526 - protein, 469 aa, unidentified
MDLLKLPIYTFYCEFLDMEERFMKKVFIGIDVGKFKNSISIIDTEGNPIIKKGLSIENDYYGFARLEEQIDLIINNYGFTYDDCIAGVESTGHYWFNLRDYLKDIGIETVMIKTDSVKHRRALEEGQKGKNDTLDARVIASCLRNGNYVYIRENERELRALQKLTRMRNDISDELVALKNKIHRCIDICNPVFFKIFENLNSKTGVALIKLYPSPQDIINVELDNIKKELGEIVDKPNMRMVSLYKEECEIWSGLIKEPSYAEKVEMIAYIDKFLLQNKSKEHLDKQIKEIAKNIIPLYSEFEQIKGIPLIQLISVLSEIGDIRNFKNTRAILAFLGLSLKGNASGKYIGERRINKAGSRIVRKHLFNIMDTLVKHNEYFRIAYCYYKSYNHKNPTKKRSMQIAVMCKFVRVMYGMLKHNTNFDYKEMLKGYYFGDCNMKVFKEEFEGEKRTKKIENYKLAYSIFINYS

SEQ ID NO: 477527 - protein, 405 aa, unidentified
MPYFCGLDWGSIGHAVCVVDETGAVLLRFEVAHDAAGLAELRKKLDRLAPAGDIRIAIERPSGLIVDALVEAGHTVVPIHPNVVKACRPRYRAAGGKSDPGDAFMLADILRTDGHRFRPLAPCSDEIKALRALVRGRDELVAERIALANRLRSLLDSFWPGAAAIFADVDSPIALAFLQRYPTPESATRLGEKRVKAFLASNAYCGRRSPAELLARLRAAPTGLAAEAEAEAKGEMVGAFAAVLERLVGEIAKLTSRIQNTVAELPDGQIVMSFPRTGRICAAQILAELGDVRQRFPSADHLAAEAGVCPVTHASGKSRGVVFRWACNHRLRRAVTCFADNSRHASPWAADIYKRARSRGCDHPHAIRILARAWIRVLWRAWNDGALYDQKLHNAAVSHNQALAA

SEQ ID NO: 477528 - protein, 344 aa, unidentified
MLYVGLDLSRKRLDWQALDPEGAVAAVGAVPPDRDGLVRLADRLDERPVLAVIESMTGARFVHDQLEFAGWDVRIADAVKARGIAPLACKTDRIDCWVLAELARRELVPEVWLPDPAVRAERERARFRLHLVKHRSSLKNRVHAILFQHGVPNGHSDLFGVSGRRLLERLALPEPWASTVQASLALIDTLDEQISGCERELRALGADHPYIPLLMTCPGIGWVLAYTIASEIGEITRFATPRKLVGYTGLCPRVDQSGERDQRGPLRKNGPNYLRWALVEAAHTACRHPAYAPVRERMRERHGQKRGSKIAAIEIGRRLSEAIWHMLTNSQPFAPAGAAASLAT

SEQ ID NO: 477529 - protein, 345 aa, unidentified
MDIMYYIGLDVHKKTISFCVKDASGQVHQEGKIGATRRELDRWIETLPQPRISAMEATIFTGWIYDHLRPHAQQVKVAHPLMLRAIAAAKKKNDRIDASKIADCLRCDFLPECHMASPEMRDRRRTLRYRQLLVRQMVQMKNRVSGLLMETGVSYNKQRLHQVGYFRELLSSPEEVHESIRPWLKLSRETIVRLQKTEYGLVSSLERDPWLADRIRRLRTVPGVGPITALTWALEVGDVSRFRSIRQAISYCGLCGAEKSSADKVMRTPLSKQRNKHIQHVLVEAAKLAPRQDHDLAQVYETEKQKGNANRATLAVARKMVAYLLAVDRGKRDFVPAEDYRSAAA

SEQ ID NO: 477530 - protein, 331 aa, unidentified
MFPVGIDVSKKNLDLCMLYDGIKGRIKTRNIQNNRHSVENILRWLRLQHCGPEDVHVVMEATGVYHERLATELHDAGFRVSLANPHRSREFARGMGIMTKTDKVDAYMLACYAFLKKPHYWEPPAPEIRYLGALLRRRDVLLGDALREEKRLEKYLSTDTPADIISSCRRMAQLLREEVSNIERQIKAHIKASPALRRDYTLLNSIKSVGPQLGMHMLVVLRSHNFASAEQAAAFLGVVPIEKRSGTSVRSRPRMSKIGPPQLRAKLYMSALCGKIYNKRMRNIYDEMCLRGKPKMVAIGALMRKLVHWCYGVLKTGTVFNDEGLKQVLST

SEQ ID NO: 477531 - protein, 386 aa, unidentified
MKKYNVYAGFDVHAATITAKVAVPGWGDEGIIDQGTFLNSPDAIRKKINQLKKKYGEIAVCYEAGPCGYTLYWQLVGMGVHCDVVAPSLIPTKAGDRVKTDRRDAHKLARYYRSGELTPVFVPDKAYEAIRDLVRAREAAKKDLRSARHRLGKFLLRNGLHRPKHIATNWTQKHLDWIKTLKFEEKSQEIVYVDYLHEVEHQRDRLKALESSLNKAIDEGPAVIREVVAALQMLRGVGKITAIGVTLEVGNFSRFPSPSQLMKYAGMISSEYSSGATRRQGAITKAGNKHLRTLMIESGWSYRYMPGLNSRMKKCENEIDAEIIGEVKEIAWKGQRRLCERYRALCKSGKKPQVAITAVGRELLGFIWAIAVIVERRHAEARKTAA

SEQ ID NO: 477532 - protein, 388 aa, unidentified
MRYFIGIDISKFKHTAAVIDQDGVVHIEPFDFDNDIIGFNSFFTSVSSFIQDDFIIGMEDTGHYADNLQKFLLSKNLKVAMFNPLATNHIRLAFNLAKNDRLDSLTIASALAMPRLYRIIEDEHFTYHEIRELSRYHQSLSKTMNRYKNRLQKFIDIAFPEFNKLFDTKYSKTYLKILKDFQSAQNIANTDIRTLRKALLSKGRCVSITAEELKSAARDSIGHSHIALDLEIQQTVEMIEKIDSNLNIVDKKIEEFSLQLNSPILAIPGISHISAMSILSELGDFTQYESAKKIIKLSGTNPYIYESGTYSMPRTRLEKKGSKYLRCTLYNIIQIVINNNPVFKDYYDRKISQGKSHRCAQGHCVRKLLRVIYHILTTGCEFDPSLLR

SEQ ID NO: 477533 - protein, 395 aa, unidentified
MKNVRFVGLDVHAETIAVAVAESGGEVRSLGLISNRIESISRLIRKLGRPEQLRVCYEAGPTGYPLYWQLTQMGVKCEVVAPTLVPVKAGDRVKTDRRDAERLARCYRAGDLTPVWVPDAAHEALRDLVRAREAAKADQLRARHRLSKFLLRHGRRAAEGVQAWTVKYWDWIKSRVHFEQPAQTATFIDYVHEVEHAAARIQRLEQAIDAAVETVPSQMRAVIEALQALRGVAQVSAVTMVAELGQISRFTRARQLMGYSGAVSREHSSGARIRRGAISKAGNAHLRRVVIEAAWSYRYRPSIGKALAARQRGQSEAVKEIAWKAQHRALPSLPQAHGRRQNQAAGRDGRGPGAARVHLGDRCARRAGVASTRSRGLKRFELFEAQTDSGWGGTR

SEQ ID NO: 477534 - protein, 407 aa, unidentified
MNEKKNYVLAIDVAKGKSMFFILSIHGEVILDAIEYEHTFSHFKMINQIIGKEEIKDDLVVFMESTSTYHYPVMRYFLEQDYDVIVVNPNLVKKSSTTFRRTKTDRLDAIKIAETYFKEEIKSNAIKTGRLYDDLQAAHRQLISLEKALTAIKNRYTRLLDICVPEHELFYSDKSDKYSLKYITLFEHFPHSEFIQKKRVDHIASILNLTFNRSFKTRLTKEATQLKNISKDAYPGVSIASNEVDNLRQTIIILKVFMGHYELAKARLIHLGKQTKEYTYISSIPGIGDQTASQLIAEIGDFSRFRSYKQINAYCGIEPSVYQSGKTFYNGKITKSGNPFARKVLYSVIMNIIQSSRSNYPEHPINIYYTLKKEKENKSTKESVIASSTKLIRILFSLCKYKRTFTK

SEQ ID NO: 477535 - protein, 442 aa, unidentified
MAKSEVSQQAQEPEFAAFVGIDWADQKHAWCLQAVGSTQRESGELEHKVETVEAWVTQLCQRFGGDRPIAVALEQTKGALLYMLAKYECLHLFPVPSTMAASMRKALYPSGAKDDPTDSDLLLDLLLLHRDKLHRLTPDTEATRRVQNLVEERRKLVDEKTAQLNRLTSNLKIYFPQMLEWFEALDTELVCDLLEHWPTLEELQKVSSEDLRRFFHQHHCRNRELMERRLQGIGQARPAIQDRPVIEAKRVVVRVTVQLIRSLRAGIAELDGKIAEATATHPDFFLFASLPGAGEVMAPRLLAAFGSQRDRYSSADEMQIYSGIAPVLERSGKTKWVHFRRACPKFLRQSFHEWAGHSMVKSAWAQAYYRQRRKQGQGHHAAVRALAFKWIRILFRCWKDRVAYDEKKYLAALAKRGSPLRELLVASAVRTCEIPSEIVVNP

SEQ ID NO: 477536 - protein, 346 aa, unidentified
MEVLIGVDPHKGSLAVAALDEATGELLERAGFAQNRAGLRSLERWAKRFPERRWAVENAGGLGRHLAGRLAGSGESVVDVPPKLSARVRLLSSGDARKNDELDALATALSASRNERLARVDPESASEALRLLSERREDLVAERTRALNRLHALLRDLLPGGVAGKLSADRAGRFLRRIRPKGTSARLRRRLASEVLRDVRALDRKIADLNRRIEAEVEASGTTLTQIFGVGPILAARIIGTVGDVTRFPTKAHFASYSGTAPLEASSGEVVRHRLSLAGNRHLNYALHMVAVCQARSDARGGAYYRKKIGEGKSSKEALRCLKRRVCDAVFRSLMADSQASSHSAA

SEQ ID NO: 477537 - protein, 415 aa, unidentified
MERRRYKACCGADIHKTFLIATILLFDGTKLTERFQMDLESLFEFREWVITNGCEVVAVESTGSYWVPIYHVLEGHVDLIVANAYKIKHIPGRKTDQIDSEWIAELCLNGLIQPSRIFSEDARNLRSLTRARERYVDDMTREKNRIHHVLDSCCIKLSSVISDIFGKAGRYILNCLLEGMDIDEIIDGIPVTRVKKKADQIRAAIKTKLSPTDIILIRGCLEQIENIQKRINEVETEIRKMVVPLRKSLAIVMSVPGIGFISATVILAEIGNYKDFDKAEKLASWCGLVPSVYQSADKNHTGSITKQGSGHIRRILVEVAHVVARTGKKSKLKDFFLRIKAKKGTNIAAVALARKLLCIIHHRLMNQEMYLEDEHRKEGDGGSLYPSKQISLDEMIRYVVAAGYEVRKRESGIGG

SEQ ID NO: 477538 - protein, 339 aa, unidentified
MQTHIGVDLHQRFCYLTAVDASGKKLKQSQVANQPAALRAWLRDLPGPKQVVVEASGFWPAFARAVAAESDRLVMVHPQRMKAIASARLKNDRVDSETLAHLSRADLLPEAWMADERTQQTRLLTRLRIALGQQRAKAKNQLQAVLHQEGFLRPVADVFGKKGRAWLAGLALSPAARMVVEVWLKVVDQMDQAIAEQMRELERMAKHDARARWLQTMPGIAAYSAMVILGEVGEIERFQTKRALASYAGLTPSVRESAGKRKRGGGIGHHGSATLRWIMLQVAQTAARYSPAARAWYLRLKRRKPPQVALIALARKLLTAIWALLRHGVCFDENTFAQA

SEQ ID NO: 477539 - protein, 321 aa, unidentified
MAIPVQALLIGVDVSKATLAICLGPDQPVQTLDNDRNSIARWLAALPAEPVCIAAEATNTFHLDLVDLAHHAGHTVYLVDGYRLSRYRDSIGTRAKTDASDAQLLQRYLAHERDSLRPWSPPPEGYRTLQQLLQRRATLVQARVALQQSLADLPGLKQAAATLFRQLKRIDLLIQKGLVDTLTKLDWNADFKRCQAIEGVGPLTAAALTMSFHRGAFHSSDAFVAFLGLDVRVRDSGQLRGRRRLTKKGNPELRRLLFLAAMQAARSRSWKDFYQRHLDRGFARIQALVILARKLARVAFALLKNQSEYQPRYLKEACMET

SEQ ID NO: 477540 - protein, 340 aa, unidentified
MKLYGAIDLHSTNNVTVVIDEQDRVVYQKRLPNDLEMILKELSVYQSELQGIVVESTYNWYWLVDGLMEQGYKLHLANTAAIQQYEGLKYTDDHSDARWLAHLLRLEVLPEGYIYPRADRPVRDLLRKRSQLVRQRTTNLLSIQNLLTRNTGSSLSANRVKALDVQQVDELLAEPDLALAVKANLSVMSSADEQVQLLEQTVTQRVKLRPQFSFLKTVPGIGEILALTIMLETGHIQRFSGVGNFASYCRCVGSQKISNGKKKGKGNTKNGNKYLAWAFIEAAHFAIQYNSKIKSFYQRKKVKTKVVVAIKAVAHKLCRACYYIMRDRVAFNITKAFGQQ

SEQ ID NO: 477541 - protein, 396 aa, unidentified
MCKVIMIGCDLHDKAMLLKVAVGRDEPETRLVKNSPAGRKAMIADLLRRAKALGGARVVFVYEASGQGFGLHDELSDAGIECHMLAPTKIARSPRQRKQKTDEKDALDLLQLVRAHVLAGNPLPTVWIPDLQTRDDRELVRMRLDVGTKITALKAQVQSLLKRNQLRRSAETGKGWNRLFWVWLRSLQRTPAEARENPLRAGARAALASLLRQLQFLEAEEARLDQLIIDLAWSPRYGRGVREIGRLVGVGVLTAMVFLTEIGDLHRFANRRQIAAYLGLVPSSQESGEARDRKGHITRQGSSRVRKVLCQATWSRVRCDAQEKAAYERIKAKNPQHKKIAVVASMRRLAVRMWHCGLAAAAAPPATAEKMAGEGVPKTKVKRRRRCGCAAGFSEA

SEQ ID NO: 477542 - protein, 470 aa, unidentified
MKQQPEEIPDADHELVIERVCAIDVAKASGAVCVRLPDSAKPARRRVSRVWQVPATTRAVTDLATQLVAEGIEKVTVESTSDYWRIWFYLLESAGLDVQLINARDVKNLPGRPKTDKLDSVWLAKLTEKGLLRPSFVPPAPIRQLRDYTRLRVDLTRERTRHWQRLEKLLEDSLIKVSSVASKMDTLSVRDMLEALIGGERDPRRLAELARGRMKSKRAALIEALTGRFDEHHAEIARMLLDQIDTLSVQIERLTVRAEQLLAAMPDAQAPDPGKHPGAQPPGTGGSCPATDVARAAEVAEDNPAGPGLTAWQRLDEITGIGPLSAQVIIAEVGLDMGRFATAGHLVSWAKLSPRTIQSGAKHRGGATGKGNPYLKGVLGEAAAAAARTNTFLGERYQRIVKRRGKLKALVAVARSILTIVWHLLSDPAARFRDLGPDYHATRTDTTRKIRNHISQLTALGYRVTLEPAA

SEQ ID NO: 477543 - protein, 346 aa, unidentified
MTSNAIRYIGLDIHKKFLFAVVLDSKGDLISEKKIKNEPWELDKFFKKIDKDSKIALESCSCWEYVYDYLTDKGFTNIVLANPSRVRLIATSRKKTDSHDAKILADLLRVNMLPTSYAPPNVIREQRQVTRHRASLGRLKGIIKNKIHAILIRNGINQEFSDVFGQEGINYLRSLDLSMIDRYQMDQHLELIRHYDLQIRKTESLIEDYVAYTPQVKLLMTIPGISYYSGLTITGEIGDVRRFSSAKKLTAFAGLNPSVSQSGDKCYMGHIAKQGDKHLRWMLNQCANVAVMHDSTLAKIYQRIKKRRGHNIAITAVSRKMLCFIYIMLTHNIKYQALQIHKAKAS

SEQ ID NO: 477544 - protein, 450 aa, unidentified
MEHGMTQQDKPNKRGPRLEVTHPNAAGIDIGCASHYVAVPADRDDEPVREFKSFTVDVHKLADWLEACGVDTVAMESTGVYWIPVYEILERRGFTVLLVNARHVKNVAGRKSDVLDCQWLQQLHSYGLLRGAFRPDDQICVLRSLSRQRAMLLRMQARHIQHMQKALVQMNIQLANVISDVVGETGQKILRAVVAGERNPYVLAAMRNVRIKASEEEIVQSLRGNWRDEHVFSLKQALELFDEYARKVADCDELMEQQMVRLHKHDGVPSKARKQSGRNKPKFDLRTRLYQMCGVDLTRIDGIDVGTAMTVLAEVGVDMSKFPTVKHFAAWLGLCPGTKISGGKVLGSKTQKCANKTAQALRQAAVALKNSPSALGAYYRRMCAKMDKPKAITAAAHKLARLIYTMITKGEEYVDQGQAYYEERYRQRVEINLRRKAESLGLRIVPMEAA

SEQ ID NO: 477545 - protein, 359 aa, unidentified
MDNNEDGTRHVVGGVDTHKDLHVAAVVDGQDRVLGTACFATTRQGYRQMLVWMRSFGDLRRIGIESTGSYGAGLLRFMQQAGIDVLEVTAPDKHDRRRRGKNDDLDAQNAAHAALAGRRTVTPRSRDGMVESLRVLTVCRKTAVAARRVAIQIIQTTIVSAPDGLRDTLRSMTRMQLVRTLAAWRPDLTAYREVEAAYRISLKSLARRYLELHDEIADLDAMISAIVDDLAPELIARNSIGYTGAAQLLLTAGDNPERLRSEASFAALCGVSPVPASSGKTIRHRLNRGGDRAANSALHIIAIGRIRTDSATKAYVARRTSGGHSKLDAIRALKRYIAREVFHIITRLHREINQTCIAA

SEQ ID NO: 477546 - protein, 350 aa, unidentified
MSDGIAGGQVVGIDLHLYRSVIARIDERGEQLGWIRIDNDPKALVAECRKAGRGVPVAIEATYGWYWAVDALAAAGFEVHLAHPSGMKALRKRKRVKTDPADAYELANLLRLGSLPEAYIAPHDLRELRELVRHRRQLVKLSTAVKAGIRALLAKHNIRLSATQLESDTATGLLDALALPGTYAVRLASQRRLMLVLADEIAAVEVELHARLRHHPGYRNLLTVKGIGPVLAATFVAEIGDVTRFPTAGALCCWAGLTPRHYESDKTVHRGHISKEGDPLVRWAAVEAVQRQCEPTVKAVKDAIVARRGKGARNIAKVAAARRMLEVVYYVLRDGQARCLTPGETGGAAA

SEQ ID NO: 477547 - protein, 409 aa, unidentified
MHETQPVVGSGDVVVIGVDPHKASVTIEARDTREILRASGTFPTTTAGYRAMIQVARQWPRRIWAVEGARGVGRALVARLLAGGERVVDVPAKLSARSRVFDTGQGRKTDAHDAHAIVMVALRDHPLREVVIDEDLEVLRLLVDRRDELAAARTQALNRAHRLFAELMPGGAPTKKSVTQYQALLAGIRPRDGAGRVRRRMLAEELTEARRLEVRVKEITAEIKAAVLARGSHLMDLPGIGPAGAGRILADVGNVARFPSRHHFASWTGTAPIDASSGAHQRHRLSRAGNRRLNHVLHIAATVQMRHHDTAGRVYYDRKRAAGKRPLEAMRCLKRRLSDVVYRQLVMDAVGVQMAKIEAGPGGHSGATLQSSAAGLPPHTGTSDQPLPGPATTTLDPPIRSRQVPITAG

SEQ ID NO: 477548 - protein, 338 aa, unidentified
MSILYVGIDLAKNVFAVHGVVEHGKPALVRPAVPRAKLHELIACLPPCTVAMEACSGGHHWARLFAGHGHTVRLIAPKFVAPYRMSGVRGKNDAADAAAICEAVQRPAMRFVPVKSIEQQARLMVHRARQGYVQARTATINRLRGLLSELGIVLPLKAATVRRQAGAALEELPGWANTVVGDLLSELHRLDERIAQYDRHMQVIAREDQRAGQLMRLAGVGPTTASAVLAMIGKGHEFACGRQFAAWLGLTPGQYSSGGKTRLGRITKAGDAYLRTLLILGARAVLAAAKNKHDPISRWAIALEARRGYWKAVVAIAAKNARMCWAMLARGEAFKLPA

SEQ ID NO: 477549 - protein, 391 aa, unidentified
MTKRKTETVNDLSRCLDPLDMDATVIAVIEMSQSSWLVAGIVPGVERQPLKKIAIDEHALLTLLSRWREEAEKKGHKITRVTVAFEAGHDGFWLARRLATLGIEVHVIHASSVAVTREHRRAKTDRLDTELLKRGFLGWLRGERGHCKMVVVPTLAEEDAKRPSRERETLVGEASRIITRLKAAFVRLGIRSFNPKLKAATERLGTLRTPEGEPIPPNTLAALKRDLERHQIIKRQIREIEQTRLDRLAQAPAKGPHAMVLLLARVVGIGVETADMLVQEVLSRNMRDRRAVARYAGLTGSPDESGAKRREKGLARSGNARVRRGMIQLAWRFLMFQKDSALAEWYRQRTANALSMRKTFVVALARKLLIALWRLARDGVVPEGVRLRPAA

SEQ ID NO: 477550 - protein, 365 aa, unidentified
MEQFIGCDAHKKFSLFVAMNEDGEYGRAIRVGHDREAFRAFLKDLPPGSQIALETSGSYYWLVDEMERAGHRPQLAHALTAKRRMEGRHTTDARDARGLAMLFRKGTLPRVWIPPAELRDQREMLRLRMSLVRMKTQLKNRIHGVLLRYNLGIQASDLYGDQGRAELISRQGELPQWSRESVLEQLQMVDSVQSQIVDCEKQLEAILYPNAERDLLKTLPCVGKVLSAVIALEMGDVRRFGAAKYLVSYAGLVPSARESAARKRQGRCPRDCNVYLKWAFVEAANLIASKQKAWSGRHAVRLYQRVKQNTKMHGKATMAVARHLAEASYWILTKQEVYREPKSKAAGSFVDARVSANSPMAFEAE

SEQ ID NO: 477551 - protein, 366 aa, unidentified
MKKISTVATNRNEIFKEHKLTIGLDLGDRSSHYCILDEAGEVILEHSLPTTPKGIHQVFDGIPRSRIALETGTHSPWVSRQLTQMSHEVIVAHARNVRLIGESSRKDDQLDARTLARLARIDPSLLGPVQHRSAKAQIHLTVIRARAGLVSARTALVNAARGLTKSYGERLRKCGTQQMNREMAKGLSTELREALEPLFGEIESLNERIAEYDRRIEQIAKEVYPQVALLKQVKGVGTLIALTFVLTVDDPHRFQRSRDVGCFLGLRPGRRNSGMSQPQLHISKEGDRYLRTMMVQGAHYILGPFGQDSDLRRWGLRLAERGGRNAKKRAIVAVARKLAVLLHKLWVSGEVYEPLRNNPKVVGQVA

SEQ ID NO: 477552 - protein, 387 aa, unidentified
MPQPNDLSRSLVALDQNSTIIAVVELSQSSWLVGGVVPGIERQPRKKLEPNPERLLGLLHRWRDEAVRAGRTITRIALAFEAGRDGFWLARWLAARGVEAYVIHASSVAVSREHRRAKTDRLDTELLKRGFLGWLRGERGHCSMARVPTIAEEDAKRPNRERDCLVGERTRIVNRIKSTLARLGIRNFKPTLRKAAERLAAVHTPEGVPLPPNTLAELQRDMARLGFVVSQIQEIEKARQKRLEQHPETGPDAMVRRLVCIVGIGVETADMLVHEVLSRPMRDRRAVARYAGLTGSPDESGARRREQGLARAGNARVRRGMIQLAWRFLMFQNESALALWYRARTADSRSGTRKTMIVALARKLVIALWRFVTTGEPLEGVVLRPAS

SEQ ID NO: 477553 - protein, 331 aa, unidentified
MKIRETVGIDLSKSTLDACIHSNQLFAKFENSNKGFKELVKWVSKHSAHEASETLFVFEHTGRYSHNIGRFLSKHEVKFVIVPGLEIKRSLGITRGKDDKADAARIALYAYRLRDELKPTKLPEKQLTKLKRLLTLRDRMVRQRAGYKASLGEDKRIFCDKEDHCLFECQDNLIEELSKQISQVDKEMMKIIHGTKKLKKIYKLLLSIKGIGTQTALYTIVYTAGFTKFKTWRKFASYCGVAPFPHQSGTSIKGRNKVSNLANKKIKSLLTMCVGTAIQYNPEMKAYYERRLKEGKEKMKAQNIIRNKLLARMFAVVKRGTPYVNTMKYAA

SEQ ID NO: 477554 - protein, 331 aa, unidentified
MADAKRFVGIDVAKAQLDVAIGPNGESFSVANDETGISELLRRLEPADLVIIEATGGLEVPVASALATAGIAVAVVNPRQVRDFARATGQLAKTDALDAQVLARFGEAVKPQVRALRDAQAQALEALVNRRRQLVEMLTAEKNRRANSPKVIHKGIDEHIRWLEKRLSGLDDELAGLVRETPIWRERDELLRSVPGVGKVLSTTLLAHLPELGALNRKQIAALAGLAPFNRDSGSLRGSRCIWGGRAQVRRVLYIAVVAAVRSNPVIKNFYAQLRARGKYPKSALTACMRKLLVILNAMLRSKMSWQTPALAASTATFSPRLGAVPEHGCC

SEQ ID NO: 477555 - protein, 416 aa, unidentified
MRTLKLTLKGFKMYYVGIDVAKEKHYVCILNDAGEYAVKPFWIYTDIIGLRRLIKQFGDLSLDNDDFIIGIESTGAYSENLYEYITDSDYEVVLLNSYQTAKYRDFSTAKKIKNDTIDAYVIAELLSTGRYKQSHISNEAYHSLKVLGRAKKSLMDKIKTIKREISTVMATVNPEITKVFPNIFTKTALEVIKVYPTATDIAQATPKKLTRLFRHIKGNNFSEDKAKFLIDLANTSVYAGRACKARASLLSSYIRVLELYCQERTQIEAEIKILMTTEIDALDNTVENLKSIPGVSDKTISAILGECGDLRRFDSAKAFIGYLGLYPTQYQSGNSLSVGRLAKRGIPIAKHALYMAAVGSVLHNPQLSKIFRDKISSGKSKKEALIIIAKKIAAIMYSITKHNKPYEAHRVFVPNR

SEQ ID NO: 477556 - protein, 352 aa, unidentified
MLSPRHKKHTVCALGQDGKVLWRRDVENSPEALTPFFKENAGATVAMETGLCCRWISALAKSCGCEVLVGNARKLAAIWKSKQKNDEKDALLIAELARTSTLLFHPVELRDDERHEMVQIIELRAVAVSQRTQAVNSVRGLCKARGVFIKKCDASCFHKVAGEAIPAGMAWKFKPMLRHLKEIVATVKRYDAMLEKYARAHFKEEVELLQTIPSVGPVTSCAFVAHISDPRRFGSARDAGAYFGLTPGQDQSGDRDAPKRITKTGSTLMRHLLVTAANYILRESSPDTALKRHGERICERGGKVARRKAKTAVARKLAVTMLAMLKSGKPYDDVLAAKKAATVAPTVTGLIA

SEQ ID NO: 477557 - protein, 355 aa, unidentified
MNDAKYIGMDVHTATISAAVRDSSGNLVMEATLETKAETILEFVHGLRGSLHVSFEEGTCAAWLHDLLKPHVSEVLVCDSRKNALLRVGNKNDREDARKLSELFFLNELHPVYHGETGIRTLKELARSYLTITRDLTRVMNRLKAIYRGWGIACAGQQVYAPRYRAEWLAKITEAGVRRRAEIYYQQFDALAALRQEVRRQLLAESRRHPAMRLLRQIPSIGPIRAALLIALMQTPHRFRTKRQLWAYCGLALRTYDSGEYRFVGGQLKRSKKAATIRGLNKNHNHDLKNIFKGAATRAAATAGPLQNFYEARIANGMKPPMARLTLARKIAAITLLVWKKGVRFDAEQLKQQAA

SEQ ID NO: 477558 - protein, 417 aa, unidentified
MQVVYPHCAGLDVHKRTVVACCLTPDPKGGWHTQTRTFQTMTVDLLALADWLHEREVTHVAMESTGEYWRPIFNILEAEFETLLVNAAHVKNVPGRKTDVRDAQWLAELLQHGLLRPSFIPSVPVRELRDLVRHRSNFVRERATLVNRVQKVLEAANIKLASVATDVLGVSGRRMLDAIVAGEADAAVMAELARGRLRAKRAELAKALDGRVRPHHRFVLTELLCQIDSFDETITRFDEQIMEACRPFEHAVERLDTIPGVGRETAEMIVSEIGVDMTRFASANHLAAWAGVAPGNHESGGKRLSGRVRKGNQALRKGLVQAAHAAAHTKNTYLAAQYQRLARRRGSKRAVVAVAHSILVIAYHLLQRQEEYRELGGDYFDRQRPEATVKRLTHRLEQLGYQVILQQPALVEVCASA

SEQ ID NO: 477559 - protein, 404 aa, unidentified
MLVYIGIDWSGNKHDICFLNQPGVVMQQFEIPHTFTGFQEIDKMRRKISVDPKDCHIGIETSHNLLVDYLWDMNYSNIHVIHPKAVHSAQGRYRTSGAKDDKWDSRLIADMLRTDQGRYPIWKPDSLLTRQIRAGVRHVDDLTKHIVRAKNQLWAVLMRYYPMALNVFSGLDAMITFKFIQSYPTPEQAKALTREDFYDFARINRHSKRKLWPKCYSRIFDPYPETNPELAKIYSSQAVSISKSLEFHIREKKTWIKKLTQLFEQHPDRHIYASLPGTGEFLQPALLSKMGDDRNRFPAPEVLQAIAGTSPVTKRSGKRKVVYFRRACDRDFRNYVQQWAKYSLNQSAWANSLYSSISHIHTGNDAYRRIGNRWLEVLWRIWQNNTTYDDNFRLKQRLLRSKPQ

SEQ ID NO: 477560 - protein, 332 aa, unidentified
MTQNLIPVGIDVSKATLHVAILFPERAKPQYQTFDNTEVGYAALQAWLIEAGVKTAHVCLEATSIYGHGVATALHQQGYRVSIVNPVRIHGYAKSQLKRTKADRPDATLIAQFCRDLKPSAWQPSSADIQTLQEYTRRLDALTHMLTQEKNRLAISSDALKSDIQAHITFLEAQVKALKKQLRSHIQSHEHLQAQADLLVSIVGIGPDTAARLLAEIGDIHAFTSARQLAAYAGLTPQEHTSGTSVQGKTRLCKIGNARMRKALYFPAIAFLRHARELHPWCERLTAAGKTKMAIIGAAMHKLIRIVYGVLSSGQLYDPEKLKPQKSALAVP

SEQ ID NO: 477561 - protein, 429 aa, unidentified
MIMGFTKPIEHFNLQRKKVITMNTLYVGIDVSSKSNVVYLMLPNGDKHSNFSVANSHEGSTQLVKRILSVLTSHSLDTVLIGLEATSVYGDNLVYFLREDATLAPFNRKIHVLNPKQVKKFHDAYNDLPKNDYVDSFVIADCLRFGRINKEVYMGDYRYKALQNLTRARFFAVQNLVKEKQRFMNVLFKKYSTMTQEKVFSDTFSTTALAVYDAFESAEALANMDLHELTDFIMEKGKNRFPDPDAVAKAIQKAARSSYRLPKTMNDSVNQVLSISITSMKALESQIKEFDKAIKAQMELLPNVLISIPGIGPVYSAGIMAEIGEIDRFNSQAALAKYAGLAWKQHQSGGFEAEVTRLIPSGNRFLKYYLCEAAFSLVRCDKEYSDFYHLKYKEVNRCQHKRALALTARKFVRLVFRLLKDNRLYCPAK

SEQ ID NO: 477562 - protein, 409 aa, unidentified
MRLFVGLDVSSFDIKVCILNGEGKKLDSFSVNNDLPGATAIKERLLQRIANQEVKTFKIGLESTSVYSFHPSMFLHYDEDLQRFGAKVFLMNPKQIANFKKSYSDMDKTDEIDAFVIADYLRFGRNQMSIVKESQYVALQQLTRSRYQLVRMLTKEKQHFLQHLSYKCNTFSQEVDSSIFGNAMMELFLEKFSLEELADMSLDELAEFLQMKGKNRFGDPKCVASTIQKAVRSSYRLDKVVEDSIDVLLGTSIAVIRTYQQQIKEIEKSIKRIMAGLTQTLESIPGIGPVFAAGIIAEIGQIERFDDETKIAKYAGLYWRTHQSGRFTAENTSLSRNGNHYLRYYLVEAANSVRKHVSDYQEYYVKKYNEVPKHQHKRALVLTARKLVRLVDALLRSHQLFTPERCVKV

SEQ ID NO: 477563 - protein, 422 aa, unidentified
MPNVLSTQSPAVLVGIDIAKLRHDVLIEAPGWKHRKRLVLLNTAVEFRRLTDYLHSLHLPVHIVFEATGNYHRPLARFLLGQGFDLELIPSLAVARTREGMHNSWDKNVPKDAQVLLYLLKTGVTQRYHDPLVNHTHDFQELSLTYAQISMEKTRMQHRLLTHYLPLYFPEIERHYHASRSLWLLDFLQAFPTQTTITALDREQFIQKAWPIIGRKVAKRRLLEDIYHRAQSSIGLPVAEDSEAVGMFRALLNEMSRLCKLRQELEQRAEGYLDDNDDFRRLKQIPGIGPILALTILAEAGDLRRFHHHRQFLKFCGLDLATQQSGQFRGVSKLSKYGNGRLHCALWMAATVAVKQRENSFREKFERYIRKDPLSADRKRMAYVAVAGKMARVVYGIIKSGTECRCFHEVAAPSGRAVSVRP

SEQ ID NO: 477564 - protein, 395 aa, unidentified
MKVCGLDVHKDSVFMCILDENNQAIQKEFSTLTPDLEGMRELLIETGVREVAIESTGIYWMPIWRVLEKGNLKLKLVNPLFIKQLPGRKTDIKDAHWIAIVLQKDLIKGSYIPEKGIQQLRQYARRYVHLCENITRIEQEIDRQLHRCNIRITNYATKIGSISVMKVVKAIIEGETRANELKKHIHGRITNKYKEKIEASLTGVINDSDRFILSQNFKDWQMLNKQQKECIEQMENLCNKLYKEEVRLLMTIPGIQKLSAIMLIAEIGVDLKAFRTAKFLVGLAGLRPRNAQSAGKVKSRRTTNGNKYLRRILVQCAWAITRMKTGFLKTKYETLCKRMSAKKALIAIARKLLVIIWNVVLKKEEYIEFKPKIDETKRKKRILHLEKELAELRTA

SEQ ID NO: 477565 - protein, 421 aa, unidentified
MKFKAQEKQNQLIENISSLHLVVGVDIAQESHVARAVSFRGIALGSPLEFGSYDEGFQLFGRWIQDLLKSYKLSKIIVGMEPTGHYWLSLARWLSSRGIEAVLVNPHLVKKNKENRDNTPSKSDRKDALVIADMVKNGYYSPVRFNPEAYEELRILMANRDTVTKRLNSAVNQIHRWVDIVFPELRHVFKILTCTSAIATLRLFPLPKEISRLTTEQVIAGWKQYVKRHAGLQRAEQLITFAKRSVGATKALHAYKIHLDQLLEEYDLAQRQLEQIAHEVHLVLERIPYAQKLLTIRGVNVTSLAGVLGEAGDLSGYAHGNALLRHAGLNLAEASSGKWRGKMVLSKRGRPRLRRFIYLMTMCMVMTNPDVRALHHYNVDVKKLKKMKSIMKLCGKVARMLVGLAKSSEAYSSAKVFPQSA

SEQ ID NO: 477566 - protein, 429 aa, unidentified
MSEEKSLELRISVDVGYRRHSVAMGLSSGEVLEEFEIDHRIEGFEEFFSRIEAQRKKRNCAVSVAMEGYNGHARPLDSLVRERGYRLYNLNNLKFARFKEIFPGAAKSDRIDARKGLELFQLSDHLPLAKEVLQEVSGTAPENEILKRLTRRRRRLVNERVRVVNNLQADLQAVCPGLLEITGEASNQWFLNFLLSADTLPQLARLKRSTLLKIPSVGVKSAAIIEHWQKRAHFSQEVEWVSEMIQEDAKRCLELDEKIKRLQAKIAEVAKNSKIAKTLRSIPGFGAVCTSELAGEIGTIERFASEGSLSLYLGMSMLDNSSGKYQGTKAPKHVNTRAKAAMMIGVDRHRKYVPESQRYYEKKRSEGKKHNQAIRALGRHLARIIYKMLKQEREYEIRPEKGDTKAKVGPRSFVKTKIRRPKISSKETK

SEQ ID NO: 477567 - protein, 400 aa, unidentified
MKQFNPKTATIESETALALIQQQQKAVKQYRLYIGLDVHKDTIAVSIAQSDGSQPRYYGEISNTPKAIEKLVRKLSPEGELLGCCYEAGPCGYGLYRQITAMGHDCIVVAPSLIPTKPGDRVKTDRRDSESLARLYRANELTAVWVPDSEQEAMRDLTRAREDMKHLERQSRQRLGIFLLRHGENYDSGKSKWTQAYFRWLEEIKFEQPVQQIVFQEYIDCVIQQQKRVKGLEKEMQKALDGWSLAPVVEALMALRGCKLITAMTVMAELGDITRFDSPRQLMAYLGLVPSEHSSGKSTSRGGITKTGNGHVRRVLTESAWCYRFPARKTAHLQRRAELTSAAVQDITWKAQKRLCGRYQHLMDRGLLKVKVCTAIARELTGFIWAIACEVMDKKMSLGG

SEQ ID NO: 477568 - protein, 348 aa, unidentified
MLIIGCDYHPGFQQIAFVDTETGEFGERRLTHREEAEQFYDTLRERSVRVGMEASGHARWFERLLRDLQFELWIGDAAEIRTKRVRKQKTDRQDAQLLLRLMVEDRFPRIWVAGAENRDLRQLLWHRHRLVQMRTRVLNQLHVVALNEGLRRKKALWRPAGRNQLESLILAPWASRRRRDLLDLLDQLTPKIQELTRALEDEVEKRPVTRRLMTHPGVGPLTALAFELVIGTPERFHCGKQIASYVGLVPSEESSGDRRRLGHISKQGNSLLRYLLVEAAQVTVRSQPHWRSKFFHLAMRRGRKIAKVAMARKLAVRLYWMWRQGCDYAHFEKLGSHAGEPGNRHGVE

SEQ ID NO: 477569 - protein, 349 aa, unidentified
MSQSHNSAVAVIGIDIGKNSFHVVGLDDRGAIVLRQKWSRGQIEARLANLSPCLIGMEACVGAHHLSRKLKALGHDARLMPAKYVRPYSKGQKNDFRDAEAIAEAVQRPTMKFVATKTADQLDLQALHRVRERLVSQRTGIINQIRAFLLERGMAVRQGLRFLRAELPRILAAPPDVLSPRMVRLIKDLAEDWRRLDERIDRLSNEIAALAQQDAGCERLMSVPGIGPIISSATVAAIGTGDAFSKGRDFAAWLGLVPKQISTGDRTILGKISKRGNRYLRVLFVQAAWVVLIKPMSWDRHGLKHWIEAAKKRLHRNVLAIALANKLARIAWGVLAGGHTFEASKLQIA

SEQ ID NO: 477570 - protein, 422 aa, unidentified
MSLKIVHKVCCGIDVHKTFVVACIATTNDKGVTTYKRHRFSTFTAGLRELLKWLLENNCKDVCMESTGKYWIPVFNILETDCKVVLAHPKYVKAIKGKKTDKKDAKWIADLFKHDLLEGSFMPPKDIRDLRDLMRYRFKLTCFSSSEKNRLQNSLTVSNIQIASVVSDTFGKSAQNILTKILEDPTDTSFDIAPLIHGSMKKKLPELELAIDGFIDQTQAGKIKVIKQHHLDLQDRKNDLEQLILALATPYQTYIDLILTIPSIKDVFTAISIISEIGVDMEVFPTAKNLCSWAGLTPTSNESAGKKKSVRISKAGCYIKPLLVQCANAVVKSEKHPEFRNRYLRIKRRRGHKKAIIAIARMILTAIYHMFKSSEVYDAQRYRKADVIPVQREITIEQAIIIAQSQGYRIRSFIDEGNILRQ

SEQ ID NO: 477571 - protein, 482 aa, unidentified
MKKRNIFPYQSQELNTLFEEAGNNAKVMCIPIDYAKKEHVVMLCNGHGNILRKPFPVKNSPEGLEYLTQQVLSSCHHRGIDPKHAFFGGEDVGSYAQNFISTLRSGGWLIAGVNAHDAKKQRANAQASTDVLDLMGIASMLLNRRANCFPAQTGIYRNLRSLTRHRKKVVDMSTEEKNRIYTVVDQVFPGFLDEKNTGISPFSNSSLYLMADRFSPAQIRRRKRQKLIDTLRNYGTVKPEATADKLQHYAARVLNTPSEYLSALQVSLAQHIRHFKCLQDSIEQLEKEMALWLAQSQGAFLTTLRGIGIVLASGVTAEIGDPAKQKPVANLVSYSGIIPRVKQSGGPEGKTRTGKVSKRCNRILKNYVVQSAHHIGLHGPEDLMADHKRRGANGQHADFGTGRRYLRIGMCLMHTSQIYIPKRLRRKGINPEERAGYFLMIWPSLRDKWAKLGALEAAFANDNPLGRWRNMVQELYEIKLKL

SEQ ID NO: 477572 - protein, 408 aa, unidentified
MDLTPMHKRVIALDVHQAKITACAVVEHDDGRVEVTKRDFGAFKRDRRALAQWALEMAPEVVVMESTGVYWKSPFAALEAVGLIAWVVNARHVKAVPGRKTDMADAQWLATLARAGLLRASFIPPVQMRQLRLVARQRQKLVGMCSAEKNRLHKVLVDAGIRINVLVADIHGQSARAMVKALIAGQPMHEVLDHKGRLRASRQELCEALSTEQFSAVHRFVAQEIVQHIEQIEQRIARMDQYLLQGLRPWQPQLRLLQTLPGIDEQGAAMLLVEIGADMSVFGSAERLASWVGICPGNNESAGKRKTGRIRKGNAWVRRLLCEFAQAAARTRCALKAKFDALTIRKGHKKSVVALAHKMLRTIYAMLSNGSHYQDKEVDYEALNVQRNAPRWIKMLRKHGFIATPAAA

SEQ ID NO: 477573 - protein, 415 aa, unidentified
MTEQRWYAGVDWASESHHVFLTDGDGRKIGEKIFKHSGEGLAEMAAWLMAASGAAAPDQIYVAIEVPHGPVVETLIERGFKVHAINPKQMDRFRDRFTLAGAKDDSRDAEVMSSALRTDLQCFRPLAAIDPVIVELREWSRIAEDLGAERNRLTNRLREQLWRYFPAMLELESDLGAAWLLDLWEVAPTPSKAARIREVTVAKVLKRNRIRRFDAAHVLDVLRKPPVQVAAGTIEAASAHIKTLIARIRLVDRQRKEAHRQLDALTARLIPAEEPEPGQRQQHDVEILASLPGVGRIVLATLLAEAWEALQRRDYAALRSLTGVAPVTKRSGKSCIVIRRQACHDRLASAMYHWARVAVQHDTRSRAKYAALRGRGHSHGRALRSVADRLLNVACAMLKNGTLFNPSMEAQNASC

SEQ ID NO: 477574 - protein, 332 aa, unidentified
MTIDSLAAIPLRFKHVIAFEVSKAELVVQSFPDGRPLRIANRRAAIAKAIRRERTRNGKLGLGPLLVVCEATGSYGRQIVEVAHQLGVAMHRAHGSRVRAFARFKGQLAKSDAIDVGMVGAYALASEGLALHVPDRAEQKRLRALIDRRSQVCDLIEAERCRLEHVEEKDIERMIAAHIRTLEMQKRRIEASLDELAESDATFAKACRLMRSVKGVGTMTPLALLAYLPEIGAVSRETIAALAGLAPFDRDSGTSTGRRHVAAGRAPARQALYMPATVAIRHNAHLKALFDRLIARGRPFKAAITAVMRKLLVILNAVVASGRPCHMAGAAR

SEQ ID NO: 477575 - protein, 394 aa, unidentified
MEAGILQAEGEDEVVVHAALELSRSGWLLAVQGPSDGRPSHHKIAAGDAKRVLHLMAQARCASARRLGHDHVRVASCYEAGYEGFWLHRVLVAAGVESFVVDPSSLRVDQRAKRRKTDRIDVETILRALIAWRHGARDECSMVVVPETAAEDERRLSRERGRMVQERTAHVNRIKGLLMTVGIYDVAPLAADWRARLAALVTGDGRPLPPRLAAEIGREIERLVVLQEQIAIVERERDGRQGEQRAGTQAAGQATDPTTPRGRIAQLQKLRAVGPETASVLQSEVFYRHFDNRRQVASYVGLDPSPWSSGTTMREQGISKAGNRRARHALIELAWMWLHWQPASALAIWFRKRVGVAKGRARRTMIVALARKLLIAVWRFLEFGVVPTGAVVRG

SEQ ID NO: 477576 - protein, 390 aa, unidentified
MPVVATELEVPVAAVRTDLGAIFVSLELSRSTWLITSLSPDGREKMSKHSVSAGDIEGLIKRFSELQQKARVRTGWSFSVVTIQEAGLDGFWIHRLLEREGIESWVVDPASVLTSRRRRRAKTDRIDGETLVRTLLAYKRGEPRVCAMLKVPTPDDEDRRRICRERKVLTAERISHVNRIKGLLFAQGIRDYEPQRRDRRTRLDELRTGDGRCLPGHLKAQISRELDRLEIVLTQVKAIDAERDALLAQGNEDQPPRPASLLAQLKGIGPEFATVLSSEGLFRTFNNRRQVAAYAGLAPTPWQSGSIDHEQGISKAGNPRLRTTMIQLAWLWLQHQPGSALSIWFRERVERNGGRGKKTTIVAMARKLLVALWKYAVHGVLIEGAAAKAA

SEQ ID NO: 477577 - protein, 340 aa, unidentified
MKHTVVGIDIAKNVFQLHWVELESGEIVSKQIKRAGLLEHFANRAPCLIGMEACGGAQHWARSLTAMGHQVKLLPGKAVKAFVTGNKNDACDARAIWTAVQQPGVRAVAVKTEEQQAVLALHRMRQQLVKFRTMQSNGLRGLLMEYGEVMAAGRAGLTRAMTDTLARLSERLPAMLIDTLRQQWEMLGKLDEQIAQIEQRLQTWMKEDKACKAIAAIPGVGLLTATAAVATMGDAKAFRCGREFAAWLGLVPRQMGTGGRVKLLGISKRGDTYLRTLLIHGARSVLTRAKECDAWIEQLGKRRPPNVVTVALANKMARTIWALLAHDRQFEKAHVSSKPA

SEQ ID NO: 477578 - protein, 406 aa, unidentified
MQIMHERCAGLDVHKKTVVACVVTPGGQEIRTFSTMTVDLLGLSDWLLVCGCTHVAMESTGDYWKPVFNMLEGSFEVLLVNAQHVKAVPGRKTDVKDAAWLAELLQHGLLRASFIPPVAQRELRDLTRYRSTFIRERTTLVNRVQKLLEDANIKLAAVASDIMGVSGRAILAALLAGHTDPQALADLAKGRLRSTRDQLAKALDGRVEAHHRCVLTELLCQIDSLDETIARFDTQIQEISTPFEAAIGLLDTIPGVARPTAEMIVAEIGTDMSRFPSADHLAAWAGVAPGNHESAGKRTSGKTRQGNRFLRTVLVQAAHAAARTKSTYLSAQYRRLATRRGKKRAMMAVAHSMLVMAYYMIQRQEPYREAGGDFFDRLQPEDTARRLVKRLEHLGYHVTLQNPSTD

SEQ ID NO: 477579 - protein, 418 aa, unidentified
MKVEYPTCCGVDVHKTFLVATIITTQGFTPHYSKRRFSTFNNSILQFKQWLIDNNCFDLCMESTGKYYIPVLNLLEDVIHVTVANPKWVRAVKGNKDDVKDSKWIGDLFRLGLVPGSYIPDKPIRILREYTRYRSKLVSCKSSEKNRFQNAFTVCNVALDAVVSDMFGKSASSITDYLIKSDSFDPAHCTSLLKGKLKKEADTVIESIEGYQMTKEQKERMVMVRSHLDFLHQSLEVIDEKLDKMVAPYENAITLYCTIPGVARASAITIISEVGMSMSQFANSKRLCCWAGLTPSNNESAGKKKSVRITRAGVYLKPALVQVAHAAVKSKISPYYKSKYERISKRRGKKRAIIAIARMILTAIYHMSSTGEEWNPSDLYKIDMPQEMLEKQKEKAIKQAIKLLTAEGIIKSPSITVA

SEQ ID NO: 477580 - protein, 367 aa, unidentified
MKQSSKIFVGMDVHKDSIDITLAEQGGEVRRFGEVGGERTALLKAVRKLTSRGGELVFVYEAGPCGFWIHREITALGHTCWVVPPSLIPQRPGDHVKTDRRDSENLARLARAGELACVHVPDVRDEAVRDLVRARDDAVIAQRRARQQLKALLLRNEIRYVGKTSWTSAHLRWLSELKLAQPAQQIAFQEYVDAITVATGRIERFEQAMREEVSTWRLAPVVAALQAMRGIQFVHAMTLIAELGDLTRFESPRQLMAYLGLVPSENSSGQRRRQGSITKAGNAYARRVLVEAAWAYRHPARLTRIIALRQEELPKQVCDVAWKAQLRLCAKYRRLRARRVLETKIIVALARELSGFVWAIGQQVKPR

SEQ ID NO: 477581 - protein, 408 aa, unidentified
METIHPICCGLDVHQASVSACLRRVNAHGAVSVESREFGTTVKDLVALADWLVEEGCPIAAMESTGVYWKPVWNILASLLDVWVINARDVKQRRGKKSDRADAKWIAELVAHDLVQPSFVPPARIGVLRDLVRMRTVLVQGRTQVKNRVLAVLEDTNVKLASVVSDPFGMSGRKMMEALVKGERDCKVLSEMAMGVLRRKIPQLEVALQGSFTEHHAFLIRLGLESLDQSNRQIAELDAQIERLMEPLQEEASRLTSIPGVGQNAARVVLSEIGTDMSRFGSAERLASWAGLCPGNHESAGKRYSGKTRKGNRYLRRVMAECAWAASKTNTFLGRTFRRFQIRIGGKKAAVAVGHKMLVIIFHLLNEGQLYDDGRYDSISQREQIRQRNRALTTLQRLGYQVALTPAS

SEQ ID NO: 477582 - protein, 350 aa, unidentified
MSPNCAPTTIATIGIDLGKNTFHLVGLDTRGAIVLQLKLSRGQIERRLANVPCCLIGMEACSGAHHIGRRLTELGHDVRLIPAQYVKPFLKGHKNDYRDAEAIAEAVQRPTMRFVAIKTPEQMDLLALHRVRSRLVGQRTGVINQIRGFLIERGITVRQGVMPLRKALPDILSSNQDALSPRMVGLIADLAQDWRRLDERIAAVSAEIEALARQDHGCQCLMTVPGVGPIISSAVVAAIGNGSGFKQGRDFGAWLGLVPKQESTGDRTILGKISKRGNKYLRTLFVQAAHVVLARRPGAAMRSLWPWIEQASKRLHRNMLAIALANKLARIAWAVLARGRAYEPRVPAHA

SEQ ID NO: 477583 - protein, 342 aa, unidentified
MNQYVGLDVSLEETKIHVLDEAGGRVWRGKCASHPDELETTICKHAPGAVRIGLETGPLTTWLWTELSKRRLPMVCLDARQAQRALDMRANKTDANDADGLAHLVRAGWYKEVRVKSRDAMLSKAVSAARRQLLDISTNLSNQVRGLMKTFGLVVPKGKGRIFEANVRRLLDEEHALAAVVLPLLEAWCAIRNRAAELDRLLLRKVRDDANCRRLMTAPGIGAVVAASYVAAIESPANFKHARDVGAWVGLTPRRFQSGEMDYDGHISRRGDERLRALLYVAATVILTRVRAASALRSWALALKKRLGFKRAAVALARKLAVVLHVMWKTRKNFDPNHRLVA

SEQ ID NO: 477584 - protein, 314 aa, unidentified
MAAIYVGIDVSKDRLDIHLRPSGETLSVNRTASGIIELTDTLAAQSVALVVLEATGGYELVVANGLAAAGLPVAVINPAQIRHYARALGRHAKTDRLDAEVIARFGEATNPPARPLADEATQLLAELIARRRQVLAMLVAERQRLSRGGTPRVVQSLKRVVRALEKELADIEGEIDLAVRGSPGWAAAEDLLVSVPGVGPGTARTLLAELPELGQLDRRQIAALVGLAPFVRQSGQWRGKSMIAGGRASVRTALFMAAQVAKRYNPVLTSFYARLIAAGKPKMVATIAVAHKLLIMLNAILRERKPWIVAPVTA

SEQ ID NO: 477585 - protein, 374 aa, unidentified
MDPIYIGVDFHARQQTICYLKTETGELVSSELKHQDKDQVRAFYAAFRGPVIVGLEASGYSPWFERLLEELGCAVWLGHASEIRRRARWRQKNDRRDAELILELLLHDEFPRLHRPGVASRDVLRMLRYRQKLIKMRTMSKNSLQALALQAGLAKGSRLFTRAGQEALATAFMSPAMQWQREHWLQLLSPLNQQLLEALVWLKAQSKGDVAVARLRTHPGIGLLTSLCLAHTLQPVARFRNTRKVAAYAGFDPVERSSAEHKRFLGISKAGSRLLRHLMVEAAHVAVRKDEDLKRFYQRLADRRGRPKAKVAAARKLLIRAYIMLRDEIDYAEFRRRAVAARLARLGHGPQVPEVVIGQPASTERQEQLTRVRK

SEQ ID NO: 477586 - protein, 355 aa, unidentified
MGEGSWVGLDVHARSVVAGVIDQGTGEVRSLRLQPGGETVAWLQTLPAPVRVVYEAGPTGYRLARACAEAGINCVVAAPSRLRAAADRVKTDRRDAERLARLLRLGEITPVRIPTLEEEAARDLVRAREDARSDLMRARHRLSKLLLRHGLVYDGTAWTRTHDVWLRGQRFDGGPLAIVFDECYGRMLDAKSRRDALDQAIAELAATPPYVEVVERLVCLRGVSTLTAFALTVELGDWHRFRPQSLGPFLGLTPSEYSSGERRRQGAITKAGNSHVRRLLIEAAWHQRPPTRRSITLERRRIGKPLAVQAQAERSGRRLHGRWHALEARGKPRSIVVVAVARELAGHCWALATMD

SEQ ID NO: 477587 - protein, 334 aa, unidentified
MWHIGIDLHRKMLVMAAVKDDGEVIDPVRIDCQDTAAILAAVEGLKPFRAVIEATGTYRWLYDLLSPHGTVLLAHPLRLRAMIQRRAKTDKLDAQLLANLLRINQIPLAYVPPEDYQQLRDLTRTRARLVRGQAEAKIKLRALLARQNRSAPYKVPFGPRGLAWFAKQDFGWLENLVRDELLARMKHYAKHTATIDERLEELRERFPEAGALLEIYGMGVFSALVIIAELGEVDRFRTAKQVGAYAGLSPQVHQSGSHCYHGSISRQGSPWLRWVLVQVAMHVVRDDVALQNFYTRIRKRSSAKIARVAVARKLAEICWKRLRRWHEQHGRKAA

SEQ ID NO: 477588 - protein, 390 aa, unidentified
MADVTPSMHPGDVRRWVAIDQHKFSIVAAVLAPDGGRPEVCRIETTEKAIRRFVDRLGGPVGVAVCYEAGPGGFALWRLLTRIGVACDVVAPSLVPIRAGDRVKTDRRDAKKLVGLYRGGLLRFVHPPTEELEGLRDLLRARDDVRCARTAARNRVLKQLLRHGRIFREGKKAWTKRHRAWVARQRLDDPLAHEALEQLLIHVDGIERQLGTLDARLAEIAGSERWAGHVEILTRFRGISTLTALGLIAEIGDFARFSHPRELAAWLGITASEYSSGDQQHRGHITKAGNRHARRLLIEAAWHYRHAPRRPASGTQPDERAWQAQVRLHHRSRHLLEHGKRTTVVNVAIARELVGFLWAAMTDQPLRATDTPTATSSSITRDQQPEEVAA

SEQ ID NO: 477589 - protein, 403 aa, unidentified
MNAVGIDVSKGKSMVAIMRPFGEIVSTPFEIKHTSSDINSLIELINSVEGESRIVMEHTGRYYEALAHELSAANLFVSAVNPKLIKDFDNDSLRKVKSDKADSVKIARYALDKWQNLKQYSVMDELRIQLKTMNRQFGFYMKHKTAMKNNLIGILDQTYPGVNSYFDSPARSDGSQKWVDFASTYWHVDCVRKMSLNAFIDHYQKWCKRKKYNFSQSKAEEIYGKAKELVPVLPKDEITKLIIKQAVDQLNSASTTVEELRTLMNETASKLPEYSIVMNMKGVGPSLGPQLMAEIGDVSRFTHKGAITAFAGVDPGVNESGTYEQRSVPTSKRGSADLRKTLFQVMDVLIKTMPQDDPVYQFLDKKRAQGKPYYVYMTAGANKFLRIYYGRVKEYLATLPEPN

SEQ ID NO: 477590 - protein, 366 aa, unidentified
MHVKEKNRVAINLGKRRSYFVVEKDGIVVREGYADSSVQGFNDYLSEVEEGSRVIVEACNSIDRVARMLKGYRIVVVHPYKVRIIAESIKKTDKNDAHILLDLDRIGQLHLSYIPDERIRKNRDLCRNRYFLIRQRNTVKTRIKDFAYRLGMDFGSFNNRRLEILKGLDNPVLNQLIGRLEDLDKGLKAVDLLIHEAYSQDSYAKLIDTLLGFAEYSSLAISSEIGEISRFAYTERLYAYAGLVPSIRQSGNYEHRGKTIKGNGFMKYLLVEASTTFLRCCKDSLVYKSYVSIAKRAGKNKAKIAAARRILGIIYYMLRRGKRFDPSYGRETSNEMTCAFNERDRMYDAPLPNQNGKREYGFGDCV

SEQ ID NO: 477591 - protein, 339 aa, unidentified
MSVYAGLDTSLDAVAICVIAETGEMLWQGKVLGDPDAVTAALQRWRDDLVRVGLEAGATSEWIGGHLVDEGFPVVCLESRHVKAALGAMTVKTDRNDAQGIAQIVRTGWFKAVHLKSAAGQRLRTLTAARKAAVRAVTANEQVIRGLSRPLGLKIGAVTRVRFEARVRQLVGADRLLLGIFEPLLRMHRCLRENLADLHRLVLRAVRVDPICRRLMTMPGIGPVTALTYRATIDDPKRFRRSRSVGAYLGLTPRRYQSGEVDRIGRITKVGDSETRTALFEAANVILRPTTRWSSMKAWAMKIANRQGARRAKVALARRMAVTLHRMWVDEQDFRWSAA

SEQ ID NO: 477592 - protein, 304 aa, unidentified
MIIVGCDYHPGFQQIAFVDTETGELQERRLEHGEAAEKFYRDLAAQGMNVRVGMEASGRAGWFERLLAELNVEWWIGDATEIARKRERKQKTDRQDAQHILQLLMEHRFPKIWVPSWENRDLRQLLWHRHRMVQMRTRIMNQLQAVALNEGLRCKKRLWRQHGREQLESFRLAPWASRRREDLLELLDRLNPTIAELSQSIDQEAEKFPEVRWLMTHPGVGPLTALAFVLIIGRADRFQCGKQIAAYLGLVPLEDSSGNRRRLGHITKQGSSMLRFLLVEAAQVTVRSLPEWRSKYFHLMMRRG

SEQ ID NO: 477593 - protein, 369 aa, unidentified
MPLVRGERAARFTFGTPSPRGSIWRAFATVLWKPEQLIDFNSHLQGWETENMPELIHVGIDVSKDALEVACGPQSPTQCFTNDDAGHEALVNVLHVHRVDLIVMEATGGYEAPCACALQAAGLAVAVVNARQARDFAKAMGYLAKTDRIDAQVLAALAAVLANRADRQKLIKALPSDEQQRLHALVLRRRQLVQMLVAERNRLPMSHQAARVSIEALIKAIRKQIVDIEADLSSHIAHHHADLAGLLRSAQGIGPHTSMALIADLPELGKLSNREISALVGLAPFNRDSGKMRGKRMIFGGRTQVRCALYMATIVAMRHNRVIQRFYQRLLAAGKPKKVAIVACMRKLLTILNAMVRTGKQWDETFHFA

SEQ ID NO: 477594 - protein, 341 aa, unidentified
MKKFIRIGVDLAKNYFQIHALASEGALAVTRKMTRVKMREFFSRIEPCLVGMEACGTAHYWARELKAMGHEVLLMPPAYTKPYVKRGKNDAVDADAICEAMSRPGMRFVPIKSAEQQATLMLHKTRELLIKQRTMSVNALRGHLSEFGIVAAKGIGHVDELLDLAESDAMLPAAAKTAMRVLAQALEGLDKAIDDLEKEISSAHGQNEVSRLLDQVPGIGKLIASVIAASVPDPSVFKSGRDFAAWLGLTPRQNSSGGKQTLGGITKQGNRYIRKMLVLGATSLLNVVGKRKGALRDWIVGLLAKKPARLVTVALANKLARILWAMMKTGECFRTEMFAKA

SEQ ID NO: 477595 - protein, 365 aa, unidentified
MEKGITFVGMDAHKVAIKLAVLLPGQTKPVEWQLANEKAAVRRMVRKVQRLAPDEVRFCYEAGPCGYALQRWIQEAGVCVVIAPSLIPRKPGDRIKTDRRDARKLAELYRAGLLTEVHPPTPEDEAVRDLCRAREDAHEDLVRCRHRLSKMLLRRGWIWNGSKRAWSQGHRLWLRSLRFEQEADQVVLDDYLLAIEHVEQRLRGLEQHIEAASQQPAYAEAVGALRCFRGIDTLTAMGLVAELHDFMRFDSARGLMAFLGLVPSEFSSAESERRGAITKAGNRHARRLLIEAAWHYRHRPNPSSLKRRRQGQSPEVVALADKAMHRLHRRFNRMLAKGKPRPKVVVAVARELAGFVWAALHSKAA

SEQ ID NO: 477596 - protein, 446 aa, unidentified
MMARKRTKQRLRVVHTHCAGVDVGSREHWVAVDPDHCQQPVRCFTTFTDDLEALADWLESLHIKHVAMEATGVYWIPLFELLDARGFQVHLVNARATRQVTGRKSDVLDCQWIWQLMSYGLLRGAFRPPEAVCTLRSLVRQHANKVQEQSRCIRHMQKALTQMNIQLDNVVSDLMGKTGTAILRAIVAGERDPQQLAKHRNRCLRADEQTIARSLQGNWRDEHLFALSQALAHYDFLGQQMQACQQAIEAALARLPTLCEHTDEPNKVLRSTHRSLQAQRQLHHALNQVMGVDLTAIPTIGVDTALVLAAEIGPDLSRFPTSAHFCSWLALAPPTRISGGKPLPGGGARKVINRAGQALRQAASNARRSESFIGACHRARLARMDTAKAIKATAHQLARLIYAMLTKGQAYVEQGIEAFEARRQDRQLRALEYKARKFGLTLVEAA

SEQ ID NO: 477597 - protein, 270 aa, unidentified
MVHVGVDLHKRMSQIAVLTEEGEIAQRRLANDPERLEAFFAQLPPRTPVAIEASGTWWWLVDLLERGGHRPVLSNPKQTKAIAAARLKNDRVDAERLALLLRGDLLPTVWIPPAELREARELIRHRVQLVWLRGEVRNRLLAMLARRNLQPTSGKSWLTVRGQRELQALPLTPIATTIRADCRALLPLLDEQIRRLDDDLRTRWGADPRVRRLQTIPGIGAFIAIVLVMELGDIQRFPTAKHVASYIGLTPRVRASADRIRSGHPPLGTQ

SEQ ID NO: 477598 - protein, 403 aa, unidentified
MIFVGDDWAEDHHDVYVMSADGARLASRRLPEGLAGIRSLHEVIADHAGEPGEVVIGIETDRGLWVQAMGVAGYQVFAINPLAVARYRDRHHVSGAKSDASDAKVLADLVRTDRHNHRALAGDSLEAEAIKVLARAHQNLIWTRTRHTNALRSALREYYPAALEAFQDLHDRDALAVLGRAPTPADAARLSLSKIRSALKHAGRQRNIDVRAQEIAAVLRTEQLAAPAPLTAAFAATTRAAVGIIIELNHQIAELETELTTHFEAHPDADIYRSLPGLGVILGARVLGEFGDDPNRYTSAKSRKNYAGTSPLTVASGKKHAVLARRVRNRRLYDAIDQWALGAINNSPGARAFYDQHRAVGDLHHQALRALGNRLVGILHGCLRHHTHYSEHTAWAHRTTTAA

SEQ ID NO: 477599 - protein, 439 aa, unidentified
MAKETIFKTVNENVAGIDIGAEMIFVSPDGVEAVSFETFTSGYEACIAYLQSKMINKVAMEATGVYWIVFYYMLEKRGIKVYLVNPKETKQIKGRKTDVKDCQWIQKLFSAGILRNSFIPEGKLMELRLLVRERLDIIEMGSTYVNKMQRCLELMNIKLKEVINQVHGTSGIRMIKAIIEGHRDSSYLLSLCDKKIIKNKSERVIKALEGEYNPTYLFMLKGNMELWDIHQQHIKTIDQALEKLLEELSDGKQDVPTEVAKLIRHHAPQIAGLHQMLANLYGVDMNSISGLNDYTLLRLIGETGIDMSRFPTVKNFVSWLGLSPKNHRSGKIKKNVKGTSCNAAGQIFKLCAHGLLSSKNIAIGSFMRKLRGRKDSSIAIKAGARKLAIAYYNALTKGTAYVEQGTKLYEEQIKRREMAALKKLAKKYNMQLSDNQKAA

SEQ ID NO: 477600 - protein, 402 aa, unidentified
MYNAVGIDVSKGKSTVAVLQPAGVIIRKPFNINHTSSELDELAKYIGSLEGETRVVLECTGRYHEPVVKTLSEAGLFVSAVNPHLIKNFGNNSIRKVKSDPADAKKIARYTLDNWIELRQYSSMDNTRTQLKTLNSQFSFFMKQKVAAKANLIALLDNTYPGVNKLFNSPVRDDGSEKWVDYAYSFWHVDCVRKIGLKTFTERYQAFCKKHHYNFQPAKPAELFLASKDLIAVFPKEASYKLLIQQSIQQLNLASSHVEELRSKMNELASTLPEYATVMGMYGVGKTFGPQLIAEIGDISNFSHREALTAFAGVDPGVDQSGTHNSKSNKASKCGSNHLRKTLFQIMSTLLQTAPEDDKVYQFLVKKRAEGKPYYVYMTAGANKFLRIYYGKVKECIRNLEQ

SEQ ID NO: 477601 - protein, 316 aa, unidentified
MLYVGIDVAKNKHDVTALNVPGKTVLKPLTFSNNKAGFELLDLSFRQLNQDCLIALEDTGHYAFNLLNFLHEQGYKVYTYTPLLIKEFAKSLSLRKTKTDKKDAHGIALKLLSDPNREQFQHDNRQVELKILARHIHRLKKKQSDWKVQYTRCLDIIFPELDKIVGKHSEYTYQLLTCYPNPQKRLEAGFDKLIEIKRLTASKIQDILSVAPRSIGTTSPAREFEIIEIIKHYKRLIDKAETCVNDLMAEFNSVITTVTGIGGRLGAVILAEIQNIHAFDNPAQLQAFAGLDSSIYQSGQIDLAGRMVKRGSPHLR

SEQ ID NO: 477602 - protein, 347 aa, unidentified
MVKENFIYVGIDLHKETHTAVMIDCYNQKLGEITFPNRPADFPKLVTKVKKCNTDAKEVVYGLENAYGYGRPLAVWLIDKGYFVKDVNTAISHRQAKHRGAMYRKSDSDDAEAIALATLNMLDKLPDACPNDAYWSLGQLVHRRDNIMKQRTRLVNQLHEQLCIAYPSYKQFFNDISRPTALYFWEHYPSRKYLKGKSVEELRTELVPVSHNRCSTKNCEKILDAVASDKVKNNAYQDARDMVTLSIVSDLQHYDSQLAEVDKMLEQMYKMLGCTLTTIPDVNVITAVKILAEIGDIKRFSNANKLAQFAGIAPLHLSSSGKGKDVATKQGNRRLQATIYFLAIQMV

SEQ ID NO: 477603 - protein, 319 aa, unidentified
MTRIICGVDIASSSLAARIGRDGTASTFANTQPGIAELAAFCESHSVELVAMEATGGYEQRAFAQLSEHGLPVAVVNPRAVRQFAQSMGALEKTDAIDSGMIAWYAETKKSQPLCLAPKTQLELRARVTRLRQLTEMRTAQLNQQRLVIDPAIQKGFRKMLQFLGQQIEELELAVAGLIQSDPLWRELDQAFRTIKGVADRTVARLMAEMPEIGTLSNKTISKLAGLAPLANDSGKHQGRRAVRGGRSAVRDILFIVGSVVARYEPDFIVFQQRLRAAGKPPKVVRIAVAHKLLVRLNAKAREVRRLAVAHAPSALTCA

SEQ ID NO: 477604 - protein, 406 aa, unidentified
MKGPVITVDVSKGSCHYQPYIEKGRPFRKPKVLHDTIEGFADLEAIIQKVKEKSGYDTVPVVFEATGVYHRCLQKYLDDQKIPYYIISPLLSAAYRKTDLHSNKTDDLDCAHIAKTYYSDEKLLPFHRQEDLFTKLQRMNRYYEVELNHLRMRKVSFRSCLDIIYPRMDKCFKGHASLYDPVPMEVLKKYPHPTLLLRHREETIVKAIVKKTSHNARFVSEVVHKMYECAQHCYSGCDVNEIEAVKFPDMINELQKQMNQCDSILKEMTDLARTVPYFTSIRSIVGIGDNLAARLIAELGDMSRFTNRRAIAAYAGLNPKISQSGDVDGTHLRISKKGNRHLRCLLYLGASCNYRLKKNDPIYKFNQKKRQQSISPLKSKAANVAAAHKLLAIIYALAKSGETYRS

SEQ ID NO: 477605 - protein, 417 aa, unidentified
MQYAPVKLADQPANGLTCGIDWARDDHAVAIVDSGGRAVYRGVIEHSARGLADLIVVLNRAGATEVAIERPDGPVVDALLEAGLTVVVINPNQVKNLRSRYGSAGNKDDRFDAFVLADTLRTDRARLSPLTPNGPQTAVLRALVRARKDLVIHRVAVANQLREHLKRVYPGPIGLFDALDSPISLRFLTRFDCQDRADWLTPKRLGAWLATMGYRGRTDPAVLHARLTASPRGATGTQGCAHAGISRALVATLSTLGDQIGLLAVQIGEQLADHADAHIFTSLPRSGTVRAARLLAEIGDCRGKFPTPDALACLAGVTPSTRQSGKMRSVSFRWACDKQLRDAVCDFANDSRRANPWAADLYTRARARGHDHPHATRVLARAWLHIIWCCWQTNTPYDPGRHRALQTLLTQQPHATT

SEQ ID NO: 477606 - protein, 349 aa, unidentified
MALTIVKEARPVTGGVDTHAGTHVAAALDPVGGLLGVREFPATAAGYAGLLGWLGGFGTVCLVGIEGTGSYGAGLARHITAAGIRVVEVDRADRQDRRRQGKSDPLDAVSAARAAQSGRARGAPKGRDGAVEAIRTLMVARRSAAGERTRTINQARALVLTGPDDLRTRFARHTPAALITGLASLRPRTGDVAGHATRIALRELGRRAQFLDGQLQRLDELIVPLVTAHAPGLLALYGVGPHTAALLLITAGDHPGRLRSEAAWAHLCAAAPIPASSGKVTRHRLNPGGDRQANHALWRIVFTRLGSDPRTRAYAERRTAEGKSKAEIIRCLKRYVAREVYPHLRPAGG

SEQ ID NO: 477607 - protein, 315 aa, unidentified
MTQTITTTAGIDTSKAKLDIAVHGRTERWQVANALPGWRALAVNLAKVDVTRVGIEATGGYERGVVEHLRGAGFIVLVLQPVQVKAFGRVHLRRAKNDALDAELIAACTAAIDDPRIAPDPRLAEMAQNLTFLEQLEEDIARFKTRLEHIDEPGLRRLVNSDIVRLKARRTVQIRSLAKRLRAHDDLARRFDLVLSIPGIGERTALALIIRMPELGLISREEAAALAGLAPFDDDSGKHRGQRHIAGGRGRLRRSLFAAALPAAFRWNKALIALYARLVAGGKAHKSALIACARKLLIYANTVVQRGTPWTEKAA

SEQ ID NO: 477608 - protein, 342 aa, unidentified
MKDTVVGVDLAKNVFQVHGASMTGHVKFRKKLTREQFRRFMAEHPACVVVFEACGSASYWAREMEALGHEARLIAPQYVRPFVKRQKNDAADAEAIVIAARQPEMRFVAPKTAEQQAKGVLFRGRERLVHQRTELVNALRAVLYEYGHVFPAGFVHLKRIETVVDEPGCDLPALIIAECRDLLAQIADKTERIDVKTKALKALAAQTDMARRLQTMPGVGPLTALAVEAFAPDMAQFKTGRDFAAWLGLVPRQHSTGGKARLGGITKAGQTDIRRLLIIGAMTRIIGRARHKVPAESWIGRMLAKKPKMLVGIALANKMARQIWAMLTSGKDYRDPALAVSA

SEQ ID NO: 477609 - protein, 338 aa, unidentified
MTIAQAPRTYELFVGVDIAATMAEVSTQRTGAKASRSFTIDQTPEGYHRLVRKLQTFGYAPSRILVVMEATGSYWISLATHLVHEGFRVSVINASQAHHFAKALLKRAKTDAIDAQTLAQLAMVLQPETWMPPPQIYYELQQRMAQRDDLLNLRQQVRNQLHALEQHPKVIQAVRNRMESLLSTFQSQIDEVEVEIAAALNQDSAWATAAERLQSIKGVGWVTATWTLVTTLNFTTCDTVDSLTAYAGLAPMPRQSGASVWHRPSIGHSGNSRLRTAYYMASLTAARFNPVIQVFYSRLIEAGKPEKVARCAAARKLLHIAWAVVKKDQPFDPNDARG

SEQ ID NO: 477610 - protein, 335 aa, unidentified
MVKENFIYVGIDLHKETHTAVMIDCYNQKLGEITFPNRPADFPKLVAKVKKCNTDGKTIVFGLENAYGYGRALAVWLIDKGYLVKDVNTAISHRQAKHRGAMYRKSDSDDAEAIALATLNMLDKLPDAYPNDAYWSLGQLVHRRDNIMKQRTRLVNQLHEQLCIAYPSYKQFFNDISRPTALYFWEHYPSRKYLKGKSVEDLRAELVPVSHNKCSTKTCEKILDAVASDKVKNNAYQDARDMVTLSIVSDLQYYDKQLAEVDKMLEQMYKMLGCTLTTIPGVNVITAVKILAEIGDIKRFSNANKLAQFAGIAPLHLSSSGKGKDVATKQGNRRL

SEQ ID NO: 477611 - protein, 393 aa, unidentified
MICVGIDVAKDKHDCFILSSEGEVLADVFTIQNNAEGFDTLLQTIRRCVCPGDKIKVGLEATGHYSYNILGFLLDKGLDTYVINPLHTNLYRKSLSLRKTKTDRVDARTIAAMLMSDVDLKSYTDTAYHNEELKSLTRYRFDKVRERAKLKQSVSRLVTILFPELEKLVPSLHMASVYALLSEFPGAKQVAGAHLTHLKAVLYDASKGRYGRDMATTLREAARCSVGSVMPTKSLELQHTIRLIRELDAEIEDIEAAIQSMMDEMQSPIMTIPGIGVRMGAMILAEIGDFSRFDSPDKILAYAGMSPSTYQSGQLSLSGAYSHMEKRGSRYLRYALYNATKYVCLWDPVFAAYLAKKRTEGKHYNVALSHAAKKLVRLIYAMEKSRQSYRNAA

SEQ ID NO: 477612 - protein, 333 aa, unidentified
MNHVGIDVSQKELVVVVSTKGKARPAKKFENTTTGHREIIQLLAKLKDKTRICLEATGVYHFDLAVALSRADDLEVMVINPKAAHNFAQALMKRSKTDTIDAATLAAYCERMPFEVWLRPTDEVIALRAIGRRIAALNKLKTQTKNQRHALTATQDTPDIVIEQTEELVSVLEKQIQVHRDSALELIQQHESLTRVFTLIIGIKGIAEASAIQLLAELLVLPQDMSAKQWVAYAGLDPRHNESGSSVAKKPRISKAGNKYLRHALYMPALVATRYEPNIKGYYHHLIENNRLKKLQALCAVMRKLLHAIHGMLKTNKEFDGSRFYAMPVDTSS

SEQ ID NO: 477613 - protein, 316 aa, unidentified
MNTFQNNEINVGIDTGQAQLDFNVRPTGESFSYPNTPKEALVAAKRLAGLNPTRVLIEATGRLEANFVRAARKVGLPLVVCNPSQVRNFAKSTGRVAKTDTLDAQDIAHFGEALKPRLTLVKSAKLQEVSDLIAVRSQCLSMSTMQKNRLTRMPKSVHGPIRRILKAIQSEVAKIDQQLDKLIDRCPQWAEKRDLLLSAKGVGKVLAFTLLSELPELGQLNRKQIAALVGVAPMNRDSGKFEGKRIIRGGRHKVRTVLFVSIMSAIQCHPKLKPMYERMVAAGKPKKVAMVACMRKQLTILNVMMRDGTHWQENMI

SEQ ID NO: 477614 - protein, 392 aa, unidentified
MDKAWVGVDAGKEFHWAHALDASGAELLSRRVENDEGSLSALIDEALSMTPDLVWAIDQPGGGAALLLALLWERGQKVLYVPGLVVDRARDAYRGESKTDQRDARLIADQARMRGDFSKLAPQEGALAELQLLLARRRDLVVDQTRAITRLREALLSLFPALERALDLNTKGALVLLTRYQSPAKIRRTGCKRLASYLKGRGVKGADELARKALAAAKTQSVELPAQEVASRICAEIAGEILALKERLQALDKEIASRFFERPEARILSSLPGMGPLLGSEFLVAAGDLSVFDSADQLAAYAGLVPAARDSGKRVGNNRRMRGGNKTLKRVFFLSAFSSLRSSPHSRVFYERKRREGKRHTQALIALARRRVNVLWAMLRDGTTFKSPPLRA

SEQ ID NO: 477615 - protein, 304 aa, unidentified
MHLLEFGMRVDNDASGWDPLIAKLKESDVDLVVVEASGGYERGLVTALHRAQIDVARVNPRQAREFARSMGVLAKTDRVDARCLRDFADVLARHKDRHKYITPPADPERELLAALMTRRRQLVDMRVAESNRLEGANARTVRSIRSVIKTLDKQLQDIDGDIDQHLERHFKPQKELLDSVRGVGPVTILTLTSALPELGHLGRRQIAKLVGVAPLADDSGRRKGVRRTAGGRSEVRAVVYMATLTAIRHNPVIQAFYSRLVAAGKPKKVAIVACMRKLLTILNAIVRDQAPWRTDAGLTSSRST

SEQ ID NO: 477616 - protein, 426 aa, unidentified
MRVLYDRVAAIDVHKDMVKVAIRVPGAKRGTRKTDVLEFRTFYGVLQAMARELRGRGVTHVVMEASGVYTDPVYYALRELDFAEVMVINPAHAKALKGHKTDARDAIRLLDLYECGLLSGSYIPDPDLREVRDLARYRMKTVQARTSEIQRLQKTLETAGIKLSSVVSDVTGGSATAMIEALISGERRGAVMADLAQTRLRAAGKMADLSMALTGRFTDHHALMCRLHRDRITIFDDAVKDLDAKIAPLVARYAREAELLKTLPGFGDVIVAGWLGAIGPAPHQHFATASRLASWATLCPGNYMSAKKSKGGRTGDGGAYIKPLLIQAAWAAVRVPGRLQARFGRLVRKFGGPRNKGAQKRAITAIAHTLLKIAYSVLKTGKPYADLGADFYTRRESPDARQDYLMRQLRKLNPGCVITITPAEAA

SEQ ID NO: 477617 - protein, 411 aa, unidentified
MQVVHERCCGLDVHKKTVVACILMTLTNGEVQRHIRTFSTMTAGLLALSDWLESLTVTVIAMESTGIYWRPVFNLLEDGRTVILVNAQHMKAIPGRKTDIKDSEWLADLLRHGLLKASFIPPAPIRELRDLTRYRKSLVQERAREVNRVQKVLETATIKLSSVATDVLGKSGRDMLSALIEGTTDVESLAELARGKLRKQLPQLQQALDGRVQAHHRLLLKHLLAHIIFLEETLEQLQQEIEQHLCPFEETMTLLMSIPGIAALAAAAILAEIGDDMTRFPSAKHLASWAGVCPGNKQSGGKRLSGKTTQGNATLRAMLAEVVWVLSRMKDNYLSAQYHRLARRLGKKKAVVAVSHSLLVIIYQVLSTKQPYSDLGADYFEQRDSARLTQRSVRQLEALGYTVTLVPKEAA

SEQ ID NO: 477618 - protein, 408 aa, unidentified
MNPLFVGIDVSSKNNVAYLMKPDGSKHSSFSVQNNLGGAKLLSERIVSALSSMRLSDVVIGLEATSIYGDNLVYALREDGGLGRFRRKIHVLNPKQVKKFKEAYPDLPKNDWVDAFVIADHLRFGRINREVYMDDYRYKALQTLTRARFDVIQNLTREKQRFANYLFLKCSGMAQDKDIQNTSATTIALMEHFETVDDLANADLEELTAFITETGRGKFADPDATAKAVRAAAKGSYRLPKTVNDTVNQAMAVSIASMRALKGQVKVLDKAIEQQFEIIPNTLTSIPGIGKVYSAGIIAEIGDIHRFDSQASVAKYAGLVWNRSQSGDFEAEHSRMIKSGNRYLRYYLLEAANSVRRCDSEFRRYYDLKFKEVNKYQHKRALALTARKLVRLVFRLLKDNRLYIPPEG

SEQ ID NO: 477619 - protein, 344 aa, unidentified
MIKRKTIGLDLAKNSFFFVVLNEHGKRVTRKKLSRNQVLPYLANLELSVVAMEACSSAHYWGREIRKLGHDVQLLPPQHVKGYLRGQKNDYNDAQAIAEASQHGAIRTVAIKSIEQQDQQSILHMRRFLNVERTRLITHVRGLLSEYGIVMSQRASTVKKEVPRILEDAENELTNVFRQFLNRQYLRLLDIEKELSVYQDYIEATVKSNDTCQRLITMPGVASIVSISLTSWMRDGYQFKRGREASAALGLIPRQNSTGGKNVLLGISKRGDSHLRSLVVNGARAVVAHAKKKTDKLSIWINRLVEQRGFNRAVIAFANKVLRMAWVIVTKKPEYKPIEKLAGC

SEQ ID NO: 477620 - protein, 355 aa, unidentified
MNGTKYIGIDMHKESMTIAVRNAVGKIVMECVIETKASMILQFIGGLRGDVQVTFEEGTSAAWLYDLLKPHVSKLVVCDPRKNKSMREGNQNDKIDARRLAELLRLDHLTPVYHGEHGLRTLKELVRSHLTVTKDLVRVMTRVKAIYRSWAIPCTGTQVYARCHRAEWLGKITEPGVRRRAEFYYQQLDALRVLRQEVRRDLLAESKKQKVWKRLCQIPAIGPIRAAVLLGILQTPHRFRTKRQLWNYGGLAIEMHSSADHRSVDGQLQRSKKNVLVRGLNRNCNHDLKNLFKGAAAVASSKPGPFAEFYAALVAKGMRPEMARLTLARKIATIVLILWKKGASFDTQYLKPQTA

SEQ ID NO: 477621 - protein, 342 aa, unidentified
MQITTVGLDIAKNVFQVHGIDAAEKVVVRKQLRRGQVLAFFKALLPCLVGMEACATAHYWARELTKLGHQVRLMPAKDVKAYVKRNKNDAADAEAICEAVRRPTMRFVQIKSPEQQGRLMQHRARDLLIRQRTQVINGLRAHLAELGITAAQGNVGLKELLAIIASDVDARLPADAHAVLIVLAAELQAMQTLITSIEKRIMAQHRSSEESKRLETIPGIGIVGATAIAATVTDPKVFRSGRDFAAWIGLVPRQDSTGGKQKLGPISKQGDRYLRRILVVGAIAVLRRARQQPERYPWLTQLLARKPFRVVAVALANKMARIAWALLAKGGTYRAPALAAAA

SEQ ID NO: 477622 - protein, 402 aa, unidentified
MNCVGIDVSKGKSMIAVMRPFGEVVVSPFEVRHTASELSELARLLKSLDGETRVVMESTGNYHAPVAWLLHDAGLYVSVVNAMLVHDYGNNSLRRAKTDKKDAVKLANYGLDHWLTLPRYVPEEDTRLMLKTCYRQYQQYSKVQTMLKNNLISLLDTAFPDANRLFTSPPRADGSEKWVDFVATFWHCECVCGRSEKAFTTQYQKWCRKHGYNFSQDKALDIYASACGRFGVMPKTNTAKLLVEQAISQLQTTSSALAALKQEMQSLAASLPEYPVVMGMFGVGPTLGPQLLAEIGDVRRFHSKKALVAFAGIDAPPYQSGQIDVRSRSISKRGSASLRRTLFLVMSVILQCAPIDEPVYQFMDKKRSEGKPYRVYMMASANKFLRIYYASVKAYLESLEHD

SEQ ID NO: 477623 - protein, 351 aa, unidentified
MNSTRIAVDLAKSVFQVAVSSVPGRIDQQHRLSRERFGRFFAAQASTEVLMEACGTAHHWGRELQALGHRVRLLPPSDVARYRDGNKTDRADTIAILEAARNEAIDAVPVKTLEQQALTSLHRLRSAYVADRTARINTVRGILREFGHAIPQGARAFVVHARVALTDEQLPEALRPELERALDEIDAFKEKIRQITSRIEDIGQRMPEVEHLRSVPGIGILTATALVAFVGEPLRFRSGRCFASYLGLTPRESSSGLKRRLGRISKRGNTYLRMLLTHGARSALLAARRAQEPDPLQVWALRVELRSGHNKATIALANRIARIAWRVWRDQRAYEPSPSAGRFGPGGRHTH

SEQ ID NO: 477624 - protein, 416 aa, unidentified
MNAFSLYIGIDWATQTHQVCVMDAHGSIVREQVVQHTGESIREFLRSLEVTDRKPDQVAVSIEVPRGPVVEALLERGYAVYSINPKQLDRFRDRHSVAGAKDDRRDAFVLADSLRTDRHCFRRLSLEPADVVRLRELARAEHEAGEDLRRAANQLFQLLLRYYPQLLQLCSFPDEPWLWALLEMAPTPDQGRKLTLVRLRNLLARYRIRRLTAEDVREVLGGCALPVGAGVAEAVSERVLLMLPHLRVLYRQRRDLIERMDLLLERISACDEHTPGTLARDTAVLLSIPGVGRAISAALISEAFDALTQRDYEALRSHAGSAPITRRSGKTSQIIMRYGCNQRLRTALYHWARTSVMNDERSKHHYAGLRRAGHKHARALRGVADRLLAMLIAMLKSGSFYDAARRGATISTPTAA

SEQ ID NO: 477625 - protein, 394 aa, unidentified
MKLIGLDIGKNKHFFCVMDQQTGEIISQPVSFSNDKEGFDFLVQKIKSYPKDSILIGMEDTGHYHFALLKYLLDLQYTVALINPKTTDFNRKMQGGITKNDKLDTINICDVLDTPERKKQYRITKVNSFDLYEQKQLTRHHHNLKEEENVYKNRLQKCIDIVFPEFNKLFNSKYGIVYMNILKMFGSAENIANTDIRTIRKCFEIEGRGNRISLTPERLKECARSSIGISSSAEVIQIKHLTAQIELIEEQLTEIDKKIEEFSIQNNSPILSIPGISHFSGTSILAELGDISNYSKPSQIIKFAGVAPLHYESSQFNAQHTAITKKGSKYLRKTLYQIILPVIRHNPVFNKYYQLKISQGKGHRCAQGHCVRKLLRIIYHLLKTNQQFDPQLLR

SEQ ID NO: 477626 - protein, 460 aa, unidentified
MTLLERLGSQLPRRYYLGVDVGYKEHVAVVISLRTFVRGDDRWKRARCVHFPTTQAGLRQLQRYLDRFSTDRSEFLGLCEPTGGYYGATVFQYLLDQEYNMNLVEIATTRHMREKIFPGVPKTDEMETRVMARIGYLHEAVGEEFTLRPLELPDPDDADLLTLCRDSWKLSTMITRARNQFTQLMAVIFPELKIFFTSSVSTVVPVRLVAAYPTPALLAEAPAEEVRQVLWKARGYQHTHRVAELQALARDSSGLPPDPGRAWRLEWLTNFLLTNFQYQAALDKRIKELVEQRDSYELIVKVPYSGPATLGVILAVTGDVSRFSNYRKYVAYTGYFAGLETSQTIDRTKMSRRGNRNLKRAFFQIAAPLVWFDEGDNDYKDLFQRKKAEGREWYEAMPFVCAALARHIYHCLKFKDPYDPGKAFQGSSSTPASGQELADLRANLDEKFEVMETHLRQIEG

SEQ ID NO: 477627 - protein, 348 aa, unidentified
MNRSAPTHCPVYCVDLAKHKFQVHGFSASGQRQQRLSLSRSQFERLFCRPPSGDCLVVMEACASSNYWCRRLQPLGYRVKRVPAQFVDKQRIGNKNDGTDADAIFAVHQDARVRPVPVKTVQQQDLCAQHRLRELLVSQRTQLLNQARSLLAERGQVAPQGRSALEALIRQAQADQEVTAELIELLEQITDQVDTLDTQLEKVEARLKAASEASALIRLVQSIHGVGLITATAVVAEYGANLSPFADARQFAGSLGLTPREHSSGQRRRLGGITRRGNPYLRTLLVQGAQSVLNQCRRREDALSQVAQRLLERKRRTVAVIAIANRLARIIYAVIKHNRPYRAQPQQA

SEQ ID NO: 477628 - protein, 316 aa, unidentified
MTTTPVFVGIDVSKDRLDVALRPTSDRWALANDAPGVATLVARLQGLAPTLIVLEATGGLAVPLTGALAAAGLPVVVVNPRQVRDFAKATGQLAKTDALDAAVLAQFAEAVRPALRPLPDAATQALSAVLARRRQLIEMLTAEKNRLGSALPPVHKGIRAHISWLERRLADLDADLAQAIRESPVWREKDDLLQSVPGVGPVLATTLLASLPELGTLTRQQIAALVGVAPLNRDSGAWRGKRRVWGGRAPVRAALYMSALVATRYNPVLRAFYQRLCAAGKAKKVALTACMRKLLTILNAMLKYRTPWENNFAHAS

SEQ ID NO: 477629 - protein, 358 aa, unidentified
MKIIGCDLHARQQTIAMLDSDTGELEEKTLEHQGETVREFYSALSGPILVGIEATGSMQWFLELLEELGIECRVGHPAKIRKAETRKQKHDRRDARLLLTLLAENRFPTIWMPSNEQRDLRTLLRHRHQWVRLRSRVQHTLQSIALNHGLRRGHALWSQAGQHALRALPLAPHASERRAALLSLYPLLQGSIEELDKEVCEEVQQHPQARRLLTHPGVGPITALATEVFLGDPKRFIDGKALASYIGMIPSERSSGRRQRLGAMSKQGNTLLRYLWCEAAMHAVERDPELKRFYRRKLVQKGLGKARVAAARKLGIRLWIMMRDQINYQEFCRRGKARQESGSVRAGMPDRNSGPAAQ

SEQ ID NO: 477630 - protein, 345 aa, unidentified
MQSMYYIGLDVHKRIISYCVKDGSGTIYAEGTIPATRFDLDHWMKTLPQPWTAAMEATMFTGWIYDHLQPHAAAVKVAHPLMLRAIAAAKKKNDRIDARKICDCLRCDFLPECYMASTAIRERRRTLRYRNLLVRQMVQMKIKISALLMEAGVSYNKQRLHKAGYFRELLASNPDINEGLRSLLRLCRETVVRLQKTESALVRTLESDSLLMDRVERLMTIPAVGPITALTWALEVGEVQRFPSIKKAISYCGLCGAEKSSGNTVQRTPLSKQRNKHLQTTLIEAAKMAPRNSPELAMLYDKEKQKGNANRATLAVARKLVAYLVAVDRRQKEFLTVERENRTAA

SEQ ID NO: 477631 - protein, 391 aa, unidentified
MIYIGIDVAKDKHDCFITNSDGEVLFKAFTITNNLDGFNDLYQKIETVMKDITKVKVGLEATGHYSYNLLGYLIDKGLPTYVINPLHTNLYRKSLSLRQTKTDKVDARTIASILMSDVNLKSYSDISYHNEELKSLTRYRFDKVKERAKLKSSVSRLICILFPELEKLVPTLHMASVYALLSEFPGAKQVANAHLTRLTNLLSEASKGRYSKDTAITFRDAARTSIGSNMPAKSLELKHTIKLIKELDSEIYEIENEIKIIMDEINSPILSIPGINYRMGAMIIAEIGDFSRFDSPDKILAYAGFSPSTYQSGHLYGAYAHMEKRGSRYLRYALYNAAKYVCHWDPTFTAYLAKKRAEGKHYNVAISHAVKKLIRVIYHLEKTNQQYIKAS

SEQ ID NO: 477632 - protein, 364 aa, unidentified
MKTKRNKTVKMQLVSDRPIKKVSFGIDISKDNFEVSVGLGYDYSEEPQIRNIGSFNNTGAGMGRFITHSRNLLTGLNLTPEAKIQFVMESSGVYYECLAYRLYQEGLSVHVALATKMKNYTKTLKNKSKNDKQDSLAICRYGLEKNLQDWKPMSDEMKKLKELTRELALHKDDIVAAKSILHSQKAAYKTNPEGINRMKSKIKYLERLIKKVNEEIKATVDNNPELKEKVNMIIKNFRGVGYQTVVILLAETDSFKQVTNSKQLVSYSGLDIMENQSGNKTGKARISKKGNSVIRRALYMPALSAIRFNDRMKELYQRICDGHTGVSKKIAIVAVMRKILCIIYALWKNNTEYNPNYLLMPMAC

SEQ ID NO: 477633 - protein, 356 aa, unidentified
MTNLKTNFNEQTIYVGLDVHKRSWNAALYLNDQYLRNVHQPPSPQALYKFLQTNYPGADYVCAYEGGKFGYWIQRQLRSRGVECIVVNPADIPATHKDEVSKTDARDARGIAMALQCGQLRGIYIPPIQQESDRSLVRHRKKIWRDLVRCKNRIKGFLDYTGVELPDKFSNSNWSKNFLAWLWEIKFSYSSSRTTLDYMIREAELLRKELLSISNDIRKLMRSKEYKKIYYLLRTITGIGPLTAALLITEVGDMKRFASFYQLNSFIWLLPSEHSSGERELKGRLTIRRHRQLRSDLIECAWTAKRTDPALSLFYSEQLKRGKEPKLIIVKIARKLLSRIRYVWLTEKPYEKGVVQ

SEQ ID NO: 477634 - protein, 320 aa, unidentified
MLPPSTAWVIIGADIGSVEIVLACNDASRPTATIANEKKAIDRWLKTLPQGSSIGMEATGRYHRRLADQAAALGLTVYVLNPKDVAYYARALGQRGKTDRLDAQTIARYVAREGKDLHPYCPPTAAQRDIATLLQQRATWVKHAVALEQSLSDVACLQREAQRAITAIRDLIAAIECKLKAQIAANQALEARRKRLQSIAGVGPLVSIALAQRFDRIAYPNSDAAVAAYGLDPRPKESGQFVGKRKLSKRGNPEERRLVYLAAMSAARTQAWKPYFAKLLAKGLSKTAAYCALARKIIRVAFAIWNSNATFNPELLGIKG

SEQ ID NO: 477635 - protein, 471 aa, unidentified
MPRRKPASSRPDPAPAALLQTLNPPAAGIDIGATAFWVCVPPSAVASPAAPSAPAVLPPHVRRFGSFTAALYAMAAWWRQCQVTTVTMASTGVYGIPLDDRLASAGFQVLLVDPRQGQRAPNRPTTDVHDCPGIQRLHRLGVLTAALRPEEPSRVWRASQRHRATLIEDAGRHLQRREQALEQMHVTLPAVVSDLTGLTGMSILRALGRGERDAKAVATLRDQRWKASAATIARALHGTWQPEHLFALQPSLALDDDSHEQSRACARVIAAHLQGMALPEVPPLAPQRRGRRRTANAVTVDARQRLHPVAGVDLTASEGMEERTARVVLRAIGTDMSRWPREKHCGSWLGLAPNPKKSGGRVKSSATRPGVHRAAQAWRLAAQHLQRAPSALGAFCRRMAARRGRAQAITATAYTLARLISARLKPGMAYVAQGLEASETASRERVVRQRKRKAAALGLGIGERDVVAQPS

SEQ ID NO: 477636 - protein, 339 aa, unidentified
MSKLLKNFIGIDISKSYFDVALIILMQPGQRIHHQFSQCKNGFKEMLQWLAQQGVIINEETIFCMEYTGIYNTGLVNFLVEQKALVWVEMPLRIKRSCGFERGSNDKTSAVKIAAYAFRHQDQIQLWRPLDSSIERIKNLIAQRDRIVNAITGLTVPVKEMLECGCVAEARQLEKLQKSPLKALQKSKDAIEQLILKIVEQDEHIYKKTKQVQSIKGIGKVTAVTLLAYTKGFTTFSTAKQLACYCGVVPFSKTSGSSVRFKPTVSHMANKKLKKLLHLCALSAIKNDPEIKLYFERKVGEGKNKMCVINAVRNKLIHRVFAVIRDDRFFEENYVRKCA

SEQ ID NO: 477637 - protein, 455 aa, unidentified
MVDVLYERCAGLDVHKKTVVACCVHSQPNGRKEQETRTLGTRTGELLALLDWLGTWECTHVAMESTGEYWKAVYNILEGQVEILLVNARHLRNVPGRKTDVHDAAWIAELLRHGLLRGSFVPPRPQRELRGLTRQRSAVVRERSAVLNRVQKVLEEANIKLASVASEVSGASARAMLEAMVAGETEARVLAELARGRLRAKRGELEQALVGRVSDHHRFLLDSHLQHIDFLDGQIERFSQQIAKRMEVFSPPPDLPTEEPPAAPAEGGETLCPSPGADSAGPTLLTGAQAVALLDTIPGIDCRLAEVIVAEVGVDMQRFPNADHLASWAGVAPGNNESAGKRRSGKTSPGNSALCQALNQAAHAAARTKNTYLSAQYHRLAARRGNKRAIVAVAHSILIIIYHMLSRQERYRELGGNYFDERKRESVTNRLIRRLEKLGYHVSLDPKPAMATIAP

SEQ ID NO: 477638 - protein, 384 aa, unidentified
MRTDHLAGVDTENIILATSLELAGAQWKIALHDGRRQSPAVHTVRGAQAAMRVQALLEVIERYKQKWSLPQEVRVVVSYEAGQDGFWIYRALRSRGMECYVIDAASIPVERHRRRAKTDRLDAIKLVTNLRAWLHGERDRMRVVRVPSLQDEASRQLIRDRGQLHKEVLQHRERMRKLLITMGCWDGFDHRTFAKRLASGKLVCHDGTPLPSELHERLLRETARLALAEEQLAALERTLQERLPAPVRKRIAYLRHLKGVGHIGASRLMLELFWREFDNRRQLGACVGLVPQPYDSGQSRIDQGISKQGNRRVRTQLIEMAWCWLRYQPSSALAQWFNKRTQGTEANRRARRIAIVALARRLVIALWRYLKDGVIPQSAQLKGA

SEQ ID NO: 477639 - protein, 347 aa, unidentified
MEHYAGIDVSLEASSVCVLDASGKVVREAKVASEPEALTAWFARLGLEVARIGLEAGPLSQWLHGAMTGAGLRVELLETRHVRTAFKTMPVKTDRSDARGIAQLMRLGWFRPVHCKSLCAQETRAMLAARRLMKDKLHDLELGLRGLLRNFGLKVGKTTPRTWEARIRELAAGHPTLETISEAILAARAVLAREFADLDRQVRGLARQSSQARLLMTTPGVGAIIALDFASAIDDPSRFKSSQRVGCYFGLTPRKYQSGQTDITGHISKIGDKQVRCSLYEAAHVILTRSAKPSGLKRWAQGVVKVAGVRKGKVALARRLAVIMHKMLIAGTPFDPSIGMPALAKAA

SEQ ID NO: 477640 - protein, 347 aa, unidentified
MLRVGLDLIRKRLDICAISDQGELVDELAAPFDEEGLCRLSERMAEKHAGRVRAVVESMNGARFVHDTLEAQGWDVLVADAQRVKVLAPLACKTDKVDARVLAELSFRDLVPAIWLPDPQVRRERELARFRLHLVRHRSSLKNRIHSTLITFGKPCPVSDLFGVAGRKLLERLDVPEPWRENVEASVVLIDQLGRQIDAVASELKYVGADHPYVPVLMSAPGVGWLVGFSIACEIGDISRFSSPTKLCGYTGLCPRVIQSGESDRRGPISKHGPKYLRWALFEAALNACDHPLYKERYERTKKRLGRQRGPKVAQIELSRKLAEAIWHMLTRNQPFAPAGAPFRLAA

SEQ ID NO: 477641 - protein, 334 aa, unidentified
MENIALIGIDLGKNSFHIHCQDRRGKAVYRKKFTRPKLIEFLASCPATTIAMEACGGSHFMARKLAELGHIPKLISPQFVRPFVKTNKNDFVDAEAICEAASRPSMRFVQPRTESQQAMRALHRVCESLVQDKVKTTNQMHAFLLEFGISVPRGAAVISRLSSILEDSSLPIYLSQLLLKLQQHYHYLVEQIKELESQLKRKLDEDEVGKRLLSIPCVGTLTASTISTEIGDGKQYASSRDFAASTGLVPRQYSTGGRTTLLGISKRGNKKIRTLLVQCARVFIQKLEDQSGKLADWVRELLCRKSNFVVTCALANKLARIAWALTTRQQTYEA

SEQ ID NO: 477642 - protein, 311 aa, unidentified
MNGTDVFIGVDVSKDTLDVAVRPTGEEMSFANTEDGVAARRDFIHSFSPRLIVLEATGGWEAVAVSVLAAKGFPVVVVNPRHVRNFAKATGLLAKTDKIDARTIARFAEAVKPEVRPLKDEEAQRLDAFLARRRQLLQMSTAEKNRLVLAPRWTKKDIQAHIEWLEKELDKVNREIQKRIQKSPLWRERDELLQSVKGVGPALSITLISDLPELGALSRKKIAALVGVAPLNRDSGKYRGRRIIWGGRSQIRVVLYMAARAAIRFNPVIRDFAERLKKAGKPYKVVVTACMRKLLTILNAMVKNGTRWQVA

SEQ ID NO: 477643 - protein, 345 aa, unidentified
MQSRIIAVDLAKAVFEVAVANDRCRVLERHRLSRKAFSAFISTQPPALVLFEACGTAHFWGRTAQALGHEVRLLPAQYTKPYRRRGKTDRADTEALLEAHRCDDIKPVPVHAVEQQTIQQLHRVREQWKHTRTQRLNGLRGFLRELGFDIPLGAKTAQTHARKIIGDESLPDPLKATFTRMLDEIAGLEVNIADVERQLKGLTQHNPDVQRLQTVAGVGLLTSTALVAAVGSPQRFPSGKHLSSWLGLTAREHSSGNRRHLGKITKQGDTYLRTLLIHGARSVLTRIKTLQRAGKPLPRLYQWASALELRVGHNKAACALANKLARICWAVWTTNTDFNPNHVPA

SEQ ID NO: 477644 - protein, 459 aa, unidentified
MCLEDRPVLEANAAGIDIGAREIFVAVPPERDENPVRVFATFTEDLEGMARWLNNCGITTVAMESTGVYWIPLYDVLEQHGVKPCLVDARNMKNVPGRRTDWHECQWLQYLHSVGLLRAAFRPESDVCAVRALMRHRNDLAEMSHQHIQHMHKALTQMNVQIHHVISDITGLTGLSIVDAILGGQRDPVELAKLRDPHIRASEETIRKSLVGNWRPEHLFTLKQSREIYRHYQEQIAACDEEIEKLVARFPPRVDPETRPLPPDRKKKSRKRNRRNLESGLHSNTVKAVFDTRTEAYKLFGVDVTQVPGLLMMVFRLFSEVGRDMSRWPTAAHFVSWVGLCPDNDISGGRVLWRGRRKVKNPAGQLFRLAAYGLHHDQTPMGDYLRRMKTKLGPAAATTATAHKIAIIFYTMVKNQMEYDATLWAQRDTERDKRIEANLKRQAQQCGYKLVPIEEKPAA

SEQ ID NO: 477645 - protein, 368 aa, unidentified
MKQVTTYVGIDAHKKDLFIAMLVGTDKTPVTWTVPNESNAVRRLVRKLERDAPGPVQACYEAGPCGYALQRQMTTPRVSCQVIAPALVPRKPGERVKTNRRDARKLGELLRAGLLTEVRPPTPEEEAVRDLCRARDDARADLQRCRHRLGKLLLRRGLHFSGRNWTRAHRQWVDGLTWVHEAERVVVEDYWLAIDQVGARLSELDARLMEIAQTEPYREPVAWLRCFRGIDTLTAILILAELHDFRRFQSPRALMAYLGLVPGEDSTGEKHRRGRITRTGNALVRRLLVETAWHYQHRPAVGVALTRRRKGQPTRVIAVADKAQQRLCRRFRKLAAEHKPPPKIAVAVARELAGFLWAVLQPAPAHVN

SEQ ID NO: 477646 - protein, 365 aa, unidentified
MNKCHSNTELSSHEGTRSQFNGGECAIKLGIDVHQDFYVVVEQVDGTNPKPPQRFPKQAFLRWAARLKENTGAEVHAVYEACGFGFSLQRQLSSLGVQCHVVCPQKLDEQNRRVKTDGLDAKALVLKLDRFVQGNRSSLALVRVPTEEEEQKRAIHRQREQLVKARKQLEAQGRSLMVNHGLEPVQSWWKPRAFAALPVPQWMKELLANSQPILMALQQKIASLTIQLQSSATPKQPRGLGLMTSVIIDREIGDWRRFSNRRQIGSYTGLCPGEYSSGNTRLQSCVTKHGNPRLRAALVELAWRLVRFQPNYKPIVKWRQILAKGALATGAARKKAIVAVARQLAVDLWRIKTGRLRAEELGLIN

SEQ ID NO: 477647 - protein, 385 aa, unidentified
MQTNSTKGPAAIRVDLAAIFVSLELSRSKWLVTSLTPGGGEKMSRHIVSAGDVSGLLDHFGELQRKSEARTKQNLRIICIQEAGLDGFWIHRVLEREGIESYVVDPASIATSRRRRRAKTDRIDGEALIRALLAYSRGEPRVCAMLRVPTPEEEDRRRLVRERKALTNERIRHVNRIKGLLFSQGVSGYEPLKGDRRKCLDALITGDGRPLPPALRAQISRELDRIELLIQQIKAVEEERDAMLAAADAPTPTLLLNLKGIGPEFAAVLWSEGLSRKFDNRRQVAAYAGLAPTPWQSGQIDYEQGVSKSGNPRLRSTLVQVAWLWVRHQPNSALSQWFKTRVMQNGGRYKKTAIVALARKLLVALWKYVNAGVVIEGAVLTKSSA

SEQ ID NO: 477648 - protein, 377 aa, unidentified
MSKIRFVGLDVHADTIAVAVAEPDGEVRSLGVIPNRLESIRKLVAKLGPAKQLKACYEAGPTGYVLYWQLTALGVACEVVAPSLIPVKPGDRVKTDRRDATKLARSYRAGDLTPVWVPDVAHEALRDLVRTREDARQDQQRARQRLGKFLLRHGCRPPEDVKKNWTNKHLDWIKRQVRFDQPASQAALLDYVHEVEHAADRLQRLEKAIDDVLATAPVEIQEVVRALQALRGVGQLVAVSVVAELGSLSRFSNPRQLMGYSGLVSREHSSGKHIQRGGITKTGNAHLRRLIVEAAWAYQHKPWIGGWLAKRQQGLDEETKAIAWKARWRLCTRYKKLAARGKNKPQIVTAIGRELLGFIWAIAVRTETKFSPDRKAA

SEQ ID NO: 477649 - protein, 385 aa, unidentified
MRMQAKVTQMGMDCHKNFSRVSARDAAGKIAWRQRVEHADRSSLREQLQRWPAGVPVVLEGTFGWGWISDELKAAGLDPHLASSRKVAGWREARGLAKNNKIDADLLSELWTQPSRWWEVWLAPQEVREQREWLRYRMALVRMQSGIKNRIHATLHRHGILHDYSDAFGIAGLKFLQDLMQTETLASSTRSTLKGYLELLKQVRQQIAAATREFHAQVQCSGPAQLWRSVPGISWVLAYTILAEVGEVSRFKDGRHLCSYSLLVPRCDQSGDEEDAPAVGQHVGHMGRHTLKWAFIAAARGAVRKSAYFRAVFNRRTDNGTRNKGRGYIAVARELCRVGYSCVSKGRSYSEAPPPRPWMSSGSNNQDLLVRECVGPDCPLAAVRA

SEQ ID NO: 477650 - protein, 385 aa, unidentified
MRRAIKRGPGPSHLLLTPDQAGNVVGIDPHKRTLTATVVDPRGGILASEHFRVSGDGHRAMEAWARQFGAVARWGVEGASGWGRHTAMFLTGRGYDVRDVCPNRTARNDRARQRGKSDTLDSERIAREVLAYPLLPKAFKRAGQDQGPDEHQQLLAIWHNRRLSILKSRQHLVNEAESLLCELPLDLREALPASKAVRPRLNALAARNRRRRYDPPTKLRLQMLDTYHAQIAALDLEEKQVIAHLRELVRDSGSTLAELCGLDTRSVAELLVEVGDVRRFTEGGFARFNATAPLPASTGEGPGEPIRHRYNPGGNRRINAVLHRMAITQLRCEPRAQAIYANARANGPHTKKEARRVLKRHLSDVVYRRMTRDLAAHTTEQLLAA

SEQ ID NO: 477651 - protein, 340 aa, unidentified
MELYAGMDLHSRNTLVGVIDSSLKRVFERRVPNDLSLIVATLEPFSSELEGIVIESTYNWYWLVDGLMDAGYSNVRLANPSAIKQYEGLKHRDDRHDAFWLAHLFALGILPEGYIYPKEDRPVRDLLRKRSFLVKHRTAHILSLQSMLEREKGYKLSGNEIKRLKAEDIARIFSQEHLVMSAQANRSSIEFLGHHIKRIEKAVRNRVKLSKSFEYLLTVPGIGDILALTIMLEVGEIARFARVGNFASYARCVSSQRLSDGKKKGQGNRKNGNRYLAWAFVEASHHARRYNEGLRSYYQSKCAKRNKAVATKAVCNKLARACYYIIRDQVPFREEALFCS

SEQ ID NO: 477652 - protein, 346 aa, unidentified
MKILSLDLGKYKTVGCDYESESGAHQFKRGFTTPTGLAKMVQEVKPDRVVIEVCSIAGWVCDLLWGLGIEVQVANTSDDAWRWRKVKQKDDRRDALKAARLSAVNQLREVYIPAHEVRQWRALITYRQQVIRRRTKIKNHIRDLLLREGQILGRGSSCWSQVGIAALAAQARPFSECGPAELWRGELQLELEQLQEIQRQVATVTAQLDKIGAGDARVQLLRTVPGVGARLAEAIVALLDQPQRFRKASQVSGYIGMVPKAMDSGETERRGHITRQGSRLVRSLLVEVAWAGLRHNAWVRQTYQRLSGGKKARKKIAIVAVGRKLLVKCWAMLRDNRAWDWQPQIT

SEQ ID NO: 477653 - protein, 327 aa, unidentified
MADYSEVFVGIDTSKLRNAVAIAEGGRNGEVRYLGEIANTEAATSRLVKKLAAQHRRLTFCYEAGPTGYGLHRLIKTLGHECVVVAPSLIPKKPGDRVKTNRRDALNLAKLLRAGELTAVWVPDARHEAMRDLVRAREAAVDDLKSKRQQVLSLLLRLGRHYTGQRTWTRAHMNWLVSQKLAHREQRIAFEEMLLAVRQADERVIRLERAIAAAVPDWSLAQVVTALMAVRGLDLISATIFLAEIGDLSRFASPRQLMAYLGLVPGEESTGDRVWRGGITKAGNHRARRILVECSWSYRHPPRVGKKKLAKVEAAPPGRSPGRRRRA

SEQ ID NO: 477654 - protein, 399 aa, unidentified
MKKHAFFELRVSVDIGCRNHNVAIGLSSGEVLDEFSIPHVPDGFRQFFARVEKQALRFGCPVSVAMEGYNGYARPLDTLVRAHDYRLFNINNLKLARFKEIFPAAAKTDALDARKGLELFQLRDHLPMAGDVLQEVRATPRENDILKRLSRRRRRLVDERTRLLNNLQADLQAVCPGLLEITGRADNLWFLRLLTSTDDLRKLARLRRSSLLKIAGIGVTYASVICAWQKRAQFSDEVEWVGEMIQEDAARVLELHDRIHSLEARMETVAQDSSIAKTLSTIPGFGPVCTAELAGEIGTIERFGTEESLALYVGMANLDNSSGKQRGSKPPRQVNTRAKAAMMVAVDRHRKQVPLSQRYYEKKRTEGKKHNQSIRALGRHLCRVIFKMLKDNRGYRLPQ

SEQ ID NO: 477655 - protein, 347 aa, unidentified
MDVHKESISIAVMNAAGKLVMECVIETKASMLLQFIDGLRGDVRVTFEEGTWAAWLYDLLKPHVSEVVVCNPRKNALLKDGSKSDRIDARKLAELLRGNHLKPVYHGEQGLRTLKELARSYLNISKDVTRGMNRLKALYRSWGIACAGTQVYAPRHRSEWLGRISEAGVRRRAEHCYQQLDVLRLLRQQVRRDLLLESRKHPAWRLLGLIPGIGPIRAALLIALIQTPHRFRTKRQLWTYSGLGLETHDSAQYRVVEGQLQRSKKPVTLRGLNQDHNHDLKDIFKGAATRASSSRGPFHDFYEHLLAQGRKPTMARLTLARKIAAITLIVWKKEVRFDASYLKSQAA

SEQ ID NO: 477656 - protein, 385 aa, unidentified
MTNQLQDTTFIPRDYDIFGGLDVDKKSIAVTFRDHGTMRKSLKLPYSASQLLNYTRKHFPGQRVAFVYEAGPTGFGLHDELTQASHPCLVVSPSMVPTVQRKRVKTNRLDSDNLSDRLRGGQLRGIHVPPPSYRELRHLVQLRDTQVAQLRATKCRIKSLLLYEGIPFPAANGKWSGQVLRQLVALPCNATVRFKLDQLIDAMQFHFLAAAKVQKQIRYFCQNDPELRQCISFLVSLPGVGTITATHALARLGDWRQIKDVRQIAGFLGLVSSEHSTGDKENRGEITRIGDSRLRNKLIQCAWTAIRKDPELRAFYRRIYERQPKKVAARKAIVAVARKLTTRMYAVLKEQRPFVIRADSSIAPLTAEETVGPRVRLDAAQNEQQ

SEQ ID NO: 477657 - protein, 355 aa, unidentified
MSSEKYIGLDVHQATISVAVVDSQGKVVMESILETKASTILEFFAGLRGSLFVTFEEGTWAAWLYDLLKPHVTEVLVCNPRKIPLLKQGNKSDKIDARKLAERLRLHDLKPVYHGETGVRMLRELARSYLTVVKDLSRVMNRLKALYRSWAIPCAGRDVYYRRHRSQWLEKIPEAGARRRAEQLYEQLDMLQHLRQQARRELLAESRKHTITAKLRQIPALGPIRSALAVALIQTPHRFRSKRQLWTYSGLGLETRDSGEYHYVGGQVRRRKKQATIRGLNKDYNHDLKGLFKGAATRASVQPGPFQEFYQRSLAKGIKPTMVRLTLARKIAAITLTLWKKGEDFDIDKLNSQAT

SEQ ID NO: 477658 - protein, 453 aa, unidentified
MEQPREVPEEEHEQVWERVAAIDVAKGSGVVATRVPDEDRPGRRRTHVHTVPARAGAITELGDYLRARQVQVITLESTSDYWRIWFVLLEAAGLRVQLVNARTVKNVPGRAKTDKNDAVWLAKLTERGMLRPSFVPPPDIRRLREFTRLRATLVQDRARYWARMEKLLERALIKISDVVSDLAGKSARAMIEALIAGERNPKVLAGLAQKALRKKQAELAGALEGRFEEHHGELARILLDQIDALTGQIEHLDTRAGELLDQIPAAWGIDADGTAGPGAGHSPDAPVLPAIARLDEIAGCGLIAARAVIAEIGLDMTVFGTPGRLVSWAKRCPQTRQSGQKTSHGKPGKGNPWLGGILGEIAATAARTDTFLGERYRRIARRRGKRKAQAAIARSILIIIYHLLADPEARYHDLGPDHYDTRTDRDRKIRNHIRQLQALGLDVTITPQAEPAA

SEQ ID NO: 477659 - protein, 372 aa, unidentified
MKEHSELFIGLDVSKLKISVALAEDGRGGEVRFFGDIDASPASIAALATKLAKREARLHFCYEAGPTGYDLYRQIIALGHDCAVVAPSLIPQRPGDRIKTNRRDAVSLAKLHRAGELTPVWVPDVGHEAIRELVRAREGAMEALRRARQQLLSFLLRHGRVYTGRTPWSKAHSSWLCGQTFEHPAHQIVLAEYRHAIEEAEVRLKRLTGQVMETAASWSMAPVVQAYQAMRGVAFMIAVTFIAEIGDVRRFDNPRQLMAYLGLVPSESSTGERVHRGGITKAGNSRARRVLIEGAWTYRFPARMSRLIQGRQDDLPKAVREIAWKAQVRLCGRYRKLTAAGKLKAVTVTAIAREMAAFLWAIGQVVAPVLAV

SEQ ID NO: 477660 - protein, 398 aa, unidentified
MTESSDYESVQVFIGVDVGKDTHHAVAINRSGKRLFDKALPNDENKLRSLISDLKQHGQILLVVDQPATIGALPVAVARSEGVLVGYLPGLAMRRIADLHAGEAKTDARDATIIAEAARTLPHALRTLKLADEQIAELSMLCGFDDDLAAQTTQASNRIRGLLTQIHPALERVLGPRLEHPAVLDLLQRYPSPEKLASLGEKKLAAQLCKLAPRLGKRLAADIAQALAEQTVVVPGTNAAAVVLPRLALQLITLRKQRDEVALEVEQRVLAHPLYPVLTSMPGVGVRTAARLLTEVACRAFASAAHLAAYAGLAPVTRRSGSSIRGEHPSRRGNKALKRALFLSAFAALRDPLSRAYYTRKMSQGKRHNQALIALARRRCDVLFAMMRDGTFYTPQGS

SEQ ID NO: 477661 - protein, 342 aa, unidentified
MQVTTIGLDIAKNVFQVHGIDANEKVVVRKQLRRSQVLAFFAALAPCLIGMEACATAHYWARELTKLGHKVRLMPAKDVKAYLKRNKNDAADAAAICEAVRRPTMRFVRIKTAEQQGQLMQHRTRDLMMRQRTQVINALRAHLAEFGIVAAQGDKGVKELLAVVADQQDARLPVDARASVMVLAAQLEALQTLIGSIEKRIKTQHRANEESQRVETIPGIGVIGATAIAATIVDPRAFRSGRDFAAWIGLVPRQDSTGGKQKLGPISKQGDPYLRRILVVGAISVLRRAIQNPEKYPWLTQLLARRPFKVVAVALANKMARMAWALLAHGGTYRAPQLAAAA

SEQ ID NO: 477662 - protein, 325 aa, unidentified
MNQVVLGIDVSKETLDVALLQDANLKFGKFENTQEGFARLYKWLHIAKVEHLHACLEATGQYSDAVAEYLYEQGCQVSMVNPARIKAYASSKLRRFKSDKGDAEIIALYCQKEEPAPWTPPPASFRELQQLVRFLEDVKIQHQQQKNRLAAGGTSEQVQAYLNEQIAYTAKLIKKVTQDIKEHIDQHPDLKAQKDLLVSIPGIGDITAAALLGEVRDFRAFDSARQLAAYAGLVPEQRTSGTSVRKKPRLVKRGNVHLRTALYMPALTALKYNPVTCALSYRMELTHHCPMAIIGAIMRKLLHLAYGVIKTGKPFDPQYGKAFAY

SEQ ID NO: 477663 - protein, 402 aa, unidentified
MNSVGIDISKGRSTVAVMRPFGEVVISPFEVRHTDSELSELAKQLKSLNGETRVVMEATGNYHAPVAKLLHDAGLYVSVVNAKLVHGYGNNDLRRVKTDRKDAVKLANYGLDRWLTLPRYIPEEDTRLLLKNCYRQYRQYSKVQTVLKNNLISLLDTVFPNVNRLFSSPIRGDGSEKWVDFVAEFWHCRCVSEKSEKAFTSKYQRWCRKHGYNFNVEKAHTIHAEASGHIGIMPKSETTKLLVEQAVAQIRATSAALTALKRGMLALAAQLPEYPVVMGMFGVGPTLGPQLIAEIGDVRRFYSKKALVAYAGLDAPPDDSGNVTGKHKPMSKIGASSLRRTLFLVMSVYLQNAPLDEPVYQFMDRKRAEGKPYRVYMMASANKFLRIYYASVKAYLETLERF

SEQ ID NO: 477664 - protein, 337 aa, unidentified
MEAHTIGVDLAKNLFQVHGVDRHGQLVLRKQLRRSEMAAFFAKLPPALIGMEACGGAHHWARKLAAFGHQVRLMPAEFVKPYVKSNKSDMRDAEAICEAVARPTMRFVAVKSIEQQAILSLHRAREGAVKARTAQANQIRGLLTEYGMVMPQGIVHIEKMLPSILADMHNALPGFLIQLFQTLLDNFRHLDRLAQEIENAIRRWHLANEESRRLEQIPGIGPLTATALVATIGEAKTFHNGRQFAAWLGLVPRQHSSGGKERLLGISKRGDTYLRKLLIHGGRAVVRYADRHPGQYKGWLANILTRRHKNVVAVALANKNARIAWALLAKDRAFCQA

SEQ ID NO: 477665 - protein, 358 aa, unidentified
MTTAATHHEHGNTPAGTLFVAFALREKTWKLGFTTGHGQKPRERTVTARHQERVLEEIAQAKRRLGVPDTAPVVSCYEAGREGFWLHRFLQAHGITNQVVDSSALEVNRRRRRAKSDGLDVRKLLSMLMRYAQGERQVWQVVKVPSVEAEDQRHLHRDLETLKQERASTTNRIKGLLSSQGIRVTSLSNVPEQLEALRLWDGSPIPPGLRRRVLRVYAHYTFLSEQIAAVEAERRALLQASTDASIDQVRQLMQLKGIGINGAWLLVLAFFGWRAFTNRREVGGLAGFTPTPYQSGERTREQGITKSGNRHVRWMTTELAGSWLRFQPDSALSGWCRERFGGGGKRLRRMGMVAVARK

SEQ ID NO: 477666 - protein, 419 aa, unidentified
MKRTKTKKHQTVNEKTLIVAVDIGKTVHYGYFRGPQGHDIKPFPFRNTWGHFKDFWDKIVRYKTENKLEDIIIGFESTGSYAEPLTHYLTQKPVQLVQINPMHTKRIKELTDNSPNKTDRKDPRVIADVIALGHALTVVIPEGSAAELRRIIQARERAINIRTIMINQLHHMIYLTFPEFTQVIKNIKTKSALYLLKNYPTPESIVSLGLKSLSLLLKKVSRGKMQRKRAVRLFEAVQHSVGIHEGRQGMLLEIEHLVSDIENKNLFINQLEEKLTYHLGRIPYSQSMLSVKGVGPVTTAGLIGEVGDFGKFKTVSEIMKLAGFNLYEVSSGKHSGQCHISKRGRSMMRKLLFFAAIGTVRSNGIMHKKYHDMLDRGMPRVKALVAIARKLLCILFALARDNMVYCDNYNKVHKVALAA

SEQ ID NO: 477667 - protein, 392 aa, unidentified
MEVMIETCCGIDVHQKTIVCCILDGPLDTNRPKKIQKTFGTRTGELRQALQWLEEHHVTDIFMESTGQYWVPVFNIFSEGTGQLILANPQHIKNVPGRKTDMKDAEWIAQLGRCGLIQSSYIPAPEVMELRLMTRRRLSYTQKRTQAKNELHNILQRSNIKLTGYLSDIFSKTGQALLQLFINGEVLSLASVSACMHGKVKASPEDILRAMDGKLSVTDRQLLEDSIDEYRFYSEKIRQIECHIRKYILFHFPEEYDLLLTIPGIKEQGAAVILAEIGPNTEAFKTVGHLASWAGLSPGSNESAGKKKSSRTTPGNKYLKTTLVSSGGIAGRSKDFAFRSLYYRISSRGSKMKAVVACGHKLLRIIYKILTDKVPYNEKRALGLRQQHLALN

SEQ ID NO: 477668 - protein, 356 aa, unidentified
MSRDIKYIGMDVHQEAIVIAVLNGSGKLVMETILETKASSIVQFIHGLRGELHVTWEEGTWAAWLYDLLQPQVHQVVVCNPRRNALLKEGSKSDKVDARKLAELLRTGMLRPVYHGENGLRTLRELGRSYQTLSKDLTRVMNRLKALYRGWGIPCAGTQVYAPRYREGWLSKIAQAGVHRRAELLYQQLDGLQTLRRNLRPEFLAESRKHKAAKLLRQIPCIGPIRAARLIALIQTPHRFRSKRQLWTYSGLGIETHDSAQYRYVGGQLQRSKKPQQLRGLNQNHNHEMKEIFKSAAIRASCGSGPFHDFYAALLAKGMKPEMARLTLARKIAAITLTLWKKGGRFDAELLKTQAA

SEQ ID NO: 477669 - protein, 338 aa, unidentified
MKAYAGIDLHSSNNYIGIMDQDHKRLFGRRMPNSLDKILMVLEPFKSDLKGVVVESTYNWYWLVDGLQEHGYRAHLANPSAIKQYEGIKHTDDKWDSFWLAHMKHLNILPEGYIYPKEQRPVRDLLRRRLFFVRHRTANILSLQSTITRNLGIKMSSNEIKKLDMDDACDLFDSSNLVFMAQNNISTIKHFGKIIKGIENKVKSQVKLRKEFVMLTTTPGIGLILGLTIMLEVGDIGRFFKVGNYSSYCRCVGSKRLSNGKKKGENNKKNGNKYLAWAYVEAAHFAKRHISKAQRFYQQKMAKANGAVATKALANKLARASYFIMRDQVPFDEDMLFR

SEQ ID NO: 477670 - protein, 403 aa, unidentified
MIFVGDDWAEAHHDVYLMDESGRRLGSQRLPEGLTGIRQLHELIAEHAEEPDQVVIGIETERGLWVGALTGAGYRVFAINPLAVARYRDRHHVSGAKSDTSDAKLLADLVRTDRHNHRLIAGDSPEAEAVKVLARTHQSLIWTRNRHTNALRNALREYYPAALEAFEDLAHGDALGVLGRAPTPQVGAHLDLAAIQSALKRGGRKRNIAARAHEIRAALRTEQLTAPAPVAAAFGATTGATVGIIAELNRQISELEASLDKHFETHPDADIYRSLPGLGVILGARVLGEFGDDPNRYTDAKSRRNYAGTSPLTIASGKKRAVLARHVCNRRLYDAIDQWAFCSINTSPGARALYDQHRAAGDLHHQALRALGNRLVDILHGCLRHHTPYNEHTAWAHRMPAAA

SEQ ID NO: 477671 - protein, 449 aa, unidentified
MAKQQRRAVVLEPNAAGVDIGAEEIYVAVPPDRDEESTRKFSTFTRDLIALAEWLERCRVRTVAMESTGIYWIPLFQILEERGFTVYLVNAHYLKNVPGRKSDVSDCQWIQYLHSVGLLRTSFRPPDHICAVRALWRHRASLLQMAAEHTMHMQKALSQMNLQIHHVLSDITGTSGLAILDAILAGERAPVELAKLCHFRVRSPRETVAKALEGDFRPEHLFTLRQSLDGYRFHQKLIADLDCEIARLMRNLPSTAENPAPPTTRTKRTAYRRQGNDPSFDLRGELYRIAGVDLTDIPGVSAVTAQVILTEVGPDISRFRHASAFASWLGLCPEKRVSGGKVLSCRTRRVAHRAATALRLGAHSLSRAKGYFGDFFRRMRSKLGTASAITATAHKIARVIYHVLLTKEPYSETIFYQCEEQSRQRAELRLRRYVHQLGFQLMPISSSDH

SEQ ID NO: 477672 - protein, 355 aa, unidentified
MDNKKYIGMDVHQATISVAVRDSAGKLVMESIIETKAATILEFVQGLRGSLWVTFEEGTSAAWLYDLLLPNVTKVVVCDPRKNVLLKSGNKNDRVDARKLAELLRCGLLSPVYHGESGVRTLKELARSYLAIAKDLTRVMNRLKGLYRSWAIPCAGQKVYSPHHRAAWLEKLTQAGVRRRAERLYQQLDHLQPLRQEARRELLAESRKHPASGLLRQIPWLGPVRVALLIALLQTPHRFRTKRQLWAYSGLALETRISGEYRFSGGQLERSKRQPTLRGLNANHNHDLKNLFKSTATVASASAGPFQDFYIALLAKGMKPTMARLTLARKIAAITLMIWKKGERFDPEQLKRQAA

SEQ ID NO: 477673 - protein, 340 aa, unidentified
MQITTIGLDIAKNVFQVHGIDGEEKVVVRRQLRRGQVMRFFQELSPCLVGLEACATAHYWARELTKLGHEVRLMPARDVKAYVKRNKNDAADAEAICEAVRRPTMRFVQVKSAEQQAQLMQHRTRDLLMRQRTQLINAMRAHMAELGITAPQGREGIKQLLATIANDEDTRLPVDARASLIVLAAQLGAMQTMIGSLEKRIVARHRANPDSKRLQTIPGVGVIGATAIAATVTDPAAFRSGRDFAAWVGLVPRQDSTGGKPRLGPISKQGDRYLRRILVVGAVSMLRRAKLNPERYPWVTRLLARRPFKVVAIALANKMARVAWALLAKGGTYRPRLAAA

SEQ ID NO: 477674 - protein, 344 aa, unidentified
MNEAYDGRQFVGIDLHRRRSVVVRMTETGEPLGWVRICNDRDQLVQVMTEAGENPEVVLEATYGWYWAADLLAGLGANVHLAHPLGVKAFSYRRVKNDIRDATDLADLLRMGRLPEAWIAPPDIRDLRQLVRHRAKLVHLRTSLRCQVHAVLAGQGVPVSVSDLFGVAGTKLLQELVLPHAYRYRIDSLRRLITVFDVEIDEVARLTRTRLSNDPGYAAVHTIPGVGPILGSVFVAEIGDVSRFPGPAQLTSWAGLTPKHHESDTTVHRGRITKQGSRLVRWAAVEAVQRTTKGGQLRALQERIQARRGRNIATVAAARELLEMVFYALRDHTVRRLSRPVQAA

SEQ ID NO: 477675 - protein, 326 aa, unidentified
MNNIGIDVSKHKLDCLWLKDPQLNKVKTKVFKNTPEEHQLLGRWLLDQTQTDASDIRIVLEATGVYHEAVAHSLHQQGFIVCVVNPARAKEFAKSLGHQHKTDAKDSLALALFGQAMKPDVWEPEPLEIKELRSLISRLQALEMDYQREFNRLEKAQVSQESERIIESLGLMMKHLKDEKLRLEQDIDDHINRHPHLKKNQKLLCSIPAIGPVLSRIMISIIHSDRFKSAEQVSAFLGLIPKIQESGLWKGRSRLSKRGPAKVRAKLYMAAIVAIRHNPDIKNQYERLLANGKTKMQALGAAMRKLVQICFGVIKHQNEYYPQLKN

SEQ ID NO: 477676 - protein, 342 aa, unidentified
MDIKVLGIDLGKTVCSLAGLDEAGAVVFRKRLQRHRLLGFLDTLPPCVVAMEACGGAHHIGRFCLQKEHEPRLMSPLYVRPYVKVHKNDDRDAEAIAEAATRPTMSFVAIKSEEQLDLQALHRARERLVSDRTRLINQVRGFLMERGIRVGTGRHVFQKELARLAAEGAADLSPRMLLLVTDMASELDVINDRVAAIDAEIKALAKTDADMQRLMEIPGIGPTIATALVAAVGTGSSFGKGRDLAAWLGLVPRQITTGGKAKLIGISKHGNRYLRKLFIHGARTVLHLVRDRTSPITAWADGLKERAHVNVAAVAMANKMARIAWAVLTKGERYRPNAMSGL

SEQ ID NO: 477677 - protein, 372 aa, unidentified
MKEDSVVFVGLDTSKLKISVAVANGERNGEVRFFGDISSEAASVASMVNKLSKRGTKLHFCYEAGPTGYGLYRQIIELGHECMVVAPSLVPKRVGDRVKTNRRDAVSLARLHRAGELTSVWVPDKGHEAMRDLVRAREAATDALKQARQQLQSFLLRHGRIYTGRKPWTRAHTRWLACQAFDHPAHQILLAEYCQAIEDAGVRLDRLTTLVVETAASWSMAPVVAAYQAMRGVAFMTAVTFVVEVGDVRRFDNPRQLMAYLGLVPSEHSTGERVKRGGITKAGNARARRVLIEGAWTYRFPARVSPTIQARLDDLPRNVREIAWKGQLRLCGRYRRLVAAGKPKVIAVTAIAREMAAFLWAIGQEIAPATKV

SEQ ID NO: 477678 - protein, 466 aa, unidentified
MTPPTDFFLHPRPSTPPPPQPPARTGPLQVFNPHAAGIDIGEAEHWVAVPPDRAPQPVRRFGTFPADLDVLADWLIDCGITTVAMASTGVYGIPLFELLETRGVQGLLIDPRQATRAPGRPKTDRLDGQWLQRLQTSGLLAGALRPEAQGCVLRHSLRHRQRLRTSAAPHIQPMHKALQQMHLTLTQVVSDIPGATGMAIRKALVAGERDPQRLAALRHAHGQHDEDDIAKALQGPWHAAHLFAFQHALSLYACSHPPLALCDQQITRHLATFADTSAGQPLPPKARRATKTTAPRFDARTPLYRLAGVDLTTIEGIEEHTALVILSAIGTDMQRWPRVKPFCRWLGRCPQHQISGGKVLSRRGRPGAHRVPVALRLAARSLPHSQSALGAFFRRMNVRLGTPKAITATAQKLARRVSSLRQHGSAYVQQGLDAYETPSRERKGTAMTTQAKALGYTLVPLAAQGA

SEQ ID NO: 477679 - protein, 342 aa, unidentified
MSEKRYIGVDLHRRVFTCCVRLENGRQFLSEWRLEQMPQFLKKLRGTDEVAVEVTGNTRLFYDAVAPHVARVVVVNANQFRVISQSVKKTDPNDARNLALYLAKGLLPEVRMKEKQQAQVASLLQTRDRLVKLRTALKNKINNLLSARGIELEKEELSSEKGLTRVLAKDVEELTLFELQVLVEQIRSLNHSIAELEKVIDREGQKLKGHGNLTSIKGIGSLGASILLSVIGDVRDFPEEGKLAAYFGIVPRIHNSNETEHSGHITKRGSKLGRTALVQCSLIAKRYSPYLASYYEAIRCRRGTGRAIIALARKFLGVIYRTLKNNWVFEDFPNFVLRETAA

SEQ ID NO: 477680 - protein, 402 aa, unidentified
MRVIHERCCGVDIHKKLVVVCAVTPEGRETKSFGTMTKELLLLADWLRERSVTHVAMESTGVYWKPVYNLLEGEFTVWVVNAQHMKAVPGRKTDVKDAEWIAELLQHGLVKPSFIPDRPQRELRELVRYRRSLIQEQTRVVNRLQKVLEGANIKLGSVASNVVGVSGLAMLSAMAEGIEDPHVLADLAKGKLREKRGELEEALRGVVGEHQRMLIKMELDHLTFLGEKIESLDQEVARRMGPFEKALERLDTIPGVGRRTAEAILAETGMDMTQFPTAGHLASWAGVCPGNNRSAGKRKRSPTMRGNGSLRTALVEAARAAARSKTYLATQYHRIAARRGANRAAMAVAHSIAVIIHTMLSRATSYTDLGTNYFDQRDQQATLKRSVRRIERLGYRVTLEVA

SEQ ID NO: 477681 - protein, 402 aa, unidentified
MITCGIDIGKGKHAVAVIDESGRQLVRTRFYDNTKAGAERMLAELLRHAEPSQIHVGMESTGNYWRAYYDFLKGRGCVVDVINPIVTSASSAGDIRGRKTDKRDAESIAEVVLRGKYACRRDEGLQERKLRALTRQRGFIVEERSAAKLHLASLVAEAFAEFESLFEDPYGALALAVLSKYPTASHLARARKSSLAKIVRANTRGKDADAEALRLIGGAKDSISLSCEITDALAWCVTSSIRTIMDLDERVKDVEEAIKGFDPPDLASKLMAIKGSGKVMPMVVAAEFGDISRFRTNPKDGSEAGMHKRLLAYAGCEPRIRESGKWKGRKFISKRGSRQLRTALYLLANNIRQWDPYFKAVYERKIGSGKHHNVAVFYVVAKMIEVLCALYKSGRNYAAIQP

SEQ ID NO: 477682 - protein, 361 aa, unidentified
MKVKAIGLDLAKNVFQVHGVEERQRKLFNRQLKHAQMLEFFLKLEPCLVAMEACSSAHHWARKLSALGHTVKLIAPQHVKPFVKTNKNDAADAQAICEAACRPDMKFVTAKSPEQQAVGALHAIRDGAMKARNATANRLRGLLLEFGVRIPKGISYVSQHVPDALEDASNEVPTVLRMALLDEYEQFKSLDARIDRVQKQIDQWHRASAASQALGKIPGIGVLTATSMVAHAGDPDSFANGRQVSAWLGIVPKQHSSGGKTKLLGISKHGDSRLRTLLIHGARSVLTALKRRLAAGVDPAQLTSTERWLVEMMKRRPANVVAVALANKNARTAWAVLKHGRPYEAGYISLSPRARAALEAG

SEQ ID NO: 477683 - protein, 409 aa, unidentified
MQPILKSCCGIDVHKSMIKASIAKGPLDKPPKLTTRTFSTMTSDLMKLKDWLRENEVEAVAMESTGVYWKPIFNILEDEFPVVLANPQYLKKVPGNKSDVKDSKWIAGMLRCGLIPASFIPPKAIRELRELNRTRRKLMGMMASEKNRIQKVLEDANIKLASVVSKIDGVSSMNMIRALMKKDKLSREEISDMARGKLKNKVDQLVEALNGKVTGHHRFLLRLHLNNIAFLAEQVQEIDEEIQKAMIPFQKENTLVQTIPGISKTTASAIIAEIGVNMSQFPSDAHLASWAGICPGNNESAGKKKSGKIRKGNSYLKATLTEVAWAASRTKGSAYSAIYHSLAKRRGKKKALIALGHQILRDIHRVLKTGMPYVDEGAEAVYLRNSKARQQSAIRFLERSGYTVITASA

SEQ ID NO: 477684 - protein, 346 aa, unidentified
MTKERPMNNLNTIAIDLAKNVFQVGVFSPQRIMTSNKQFSRQKLTSFMAKQEKAIVVMEACYSSHYWARLFMKMGHIVHLLPAQHVKPFVRGNKNDRNDSIAIAEASWRPNIKFVPLKSIEQQDIQALHRIRDKLISRRTSIINQTRGLLSEYGVVMPQGLKSFTQHISALIDPKDERITVRMKQQLRGVKEEYDQLSRRSKTIETELKQYAQQNTLCQRLMTLPGVGVLNATALYAAIGNGSQFENPRALSVWLGVTPKQYASGEKSFYGGITKRGNHYLRKQLIHGARSVMHRIKAKDDKLSVWVKQLVERRGKNKAAVALANRLARLAWILLHRDENYHSVVS

SEQ ID NO: 477685 - protein, 344 aa, unidentified
MGEVITIGLDIAKSVFQVHGVDGLGVVVIRKRVSRAKMLEFFAGLPRCLIGIEACPAAHHWARELQAIGHTVRLMPPSYVKAYLKRSKNDANDAAAICEAVTRPSMRFVAVKTKEQQAALMLHRARQLLVRQRTMLSNAIRGHLSELGIVSAKGRNGTDELLEIIGKDADSRIPLAARSVLKVLASQYVAIGVEIASISKSILAWHRACEPSRRLEEIPGIGPIVATALVAEISDWMAFSSGRGLAAWIGLVPKQHTTGGKDKLGSITKQGNRYLRWLLVNGAMAVIRYAQKHGTKKHPWLGQLMARRPTKVAAVALANKIARITSAIMVRGDRYREPALMPAA

SEQ ID NO: 477686 - protein, 412 aa, unidentified
MEIYCGIDWAEHHHDIALADASGAIVARQRISDDAAGLAVLLDLLAGHGDSPGDPVPVAIETPRGLLVAALRATGRPVYPVNPMSAARYRERHSPSRAKSDKLDAAVLANILRTDMAAHRPLPEDSELAQAIAVLARAQQDAVWARTAAHNKLRSHLREYYPGFLDAFAGKRGGLLRPEARAILAAAPDPAAAARLTLARLRALLRKAGRQRGIDAEAQRLRAAFRAEQMRQLPLVEQAMGKQALALLARLDAACAGADELRAAAEESFNQHPDAGIYTSFPGIGALTGARVLAETGDDRTRFTDAKGLKAYAGTAPVTRASGKRKTVTCRRAKNNRLADASSTWAFSALTASPGARAHYDRRTDAGDGHAAALRNLSNRLLGCLFHCLQTGQHYDEATAFPAPHAKLPRAA

SEQ ID NO: 477687 - protein, 351 aa, unidentified
MSQPVTTTIAVMGIDIGKNSFHVVGLDQRGAIVLRQRWSRSQVERRLANMPPCLVGMEACVGAHHLSRKLKALGHDARLMPAKYVRPYSKGQKNDFRDAEAIAEAVQRPTMKFVATKTADQLDLQALHRVRERLVSQRTGIINQIRAFLLERGVAVRQGQRFLRIELPRLLTAPPDVLSPRMVRVIEDLAGDWRRLDQRIEALSAEIEAIARRDAGCQRLMSVPGIGPIISSAMVAAIGKGDGFGKGRDFAAWLGLVPKQISTGDRTILGKISKRGNRYLRVLFVQAAWVVLIKPKSWERHGLKRWLEAARKRLHRNVLAIALANKLARIAWSVLANHRNFETTRILVAAQ

SEQ ID NO: 477688 - protein, 403 aa, unidentified
MKETATTLREHDSAQKPVLYMALELGDKKWRIAFSDGSRTRQVSIPGGDVAALEQALTKAKQRWGLAGATPVLSCYEAGRYGFWLHHYLTNRGVQNVVVDSASIMVDRRARRAKTDRLDADSLVQQLRRWHGGERQVWRVVHVPSAAAEDQRRPQREWERLQRERTQQSNRIRGLLRLHGLDLKVGREFAERLVELRQWDGQALPPRLVAELRREYQRWELVNNQLLALAKERVAEAREGQTSAARQVRQLARLMGVGEHGAWILASEFFSWREFKNRKEVGALAGLVGTPYQSGKMVREQGISKAGNRRVRKLVVELAWCWLRYQPQSALAKWFWARFGEGSGRMRRVGIVAVARKLLVALWRWVAQGLLPEGAVLKPALVPETAVTGKYVLQPATGLRAAH

SEQ ID NO: 477689 - protein, 347 aa, unidentified
MNHFAGLDVSLKRTAICIVDRDGNIVREGVTDTEPEALISWLRSTGFAFQRIGLEAGQCSSWLHNGLSESGLPVICVETRHAKSVMQAQNVKTDRNDARALAQMMRTGWFKAVHIKTEDSQKLRALMGSRRCLLDKQRDLNNHIRAALRTFGFKVGLIGQSRFEVRVRELIVPDGALQALVVPLLEARRMLGEQARVLTRLIGRLVRRDATCRRFMTVPGVGPLTALAFKTTIDNPARFRKSRHVGVHLGLTPGKYASGEVDYNGRITRCGDAFAREHLFEAAHSLMVNTRRWCSLKAWGIRIAKRSSMKNALVAVARKLSVILHRMWRDGSDFRWEKSTLETRAAV

SEQ ID NO: 477690 - protein, 424 aa, unidentified
MNHQPNASPIERYVGMDVHKHYVMVGGMNRQREWVLRPRKVRMSKFRTWAAHNLKATDAVVIESTSNAWTIYDIVAPLVGDTVVADPRQVSEIAKAKVKTDQRDIERLLRLLIADMVPAVWVPPIQVRELRSLISYRWRLNKQITMTKNRLHSVLHQYNLQAPEGGLFRDKNQAWWQEQVFAPLVAIQVEHDLKLLRQLEEHRVAINQELARLSNTAPWDAQMVYLMQIPGFGVVLGMIVVSAIGDISRFSHPKKLVGYAGLGAGVHDSGEKYSGKGITKQGRKEFRWAMVEVAWRAVGAYPYWKSQFNTLKKRMHPNQAIVVIARKLLVTVWHVLTKQAAYQHATEEDIAYKMLTSVPLAGIWSWNMDEKALNGLTRQQFAKYGLLRLGVGQEITRIVRSNLPRRLAPSEEVLAIKPELKPPG

SEQ ID NO: 477691 - protein, 402 aa, unidentified
MNAVGIDVSKGKSMVAIMRPFGEIVSAPFEIKHTASDINSLVELINSVEGESRIVMEHTGRYYEVLAHQLSEANLFVSAINPKLIKDFDNDSLRKVKSDKADAVKIARYALDKWQNLKQYNVMDELRNQLKTMNRQFGFYMKHKTAMKNNLIGILDQTYPGVNTYFDSPARSDGSQKWVDFASTYWHVDCVRKMSLNAFIDHYQNWCKRKKYNFSQSKAEEIYGKAKELVPVLPKDDITKLIIKQAVNQLNSASTTVESLRTLMNETASKLPEYPIVMAMKGVGASLGPQLMAEIGDVSRFTHKGAITAFAGVDPGVNESGSYEQKSVPTSKRGSSDLRKTLFQVMDVLIKTHPQDDPVYQFLDKKRAQGKPYYVYMTAGANKFLRIYYGRVKEYLSSLPES

SEQ ID NO: 477692 - protein, 423 aa, unidentified
MNSDQPELAAYIGLDWADERHAVCLRVSATNEIRTFSVEQKPEKLHEWVASLRLEFGGQNVGIAIEKSRGGLIYALMGYTFLILYPINPKALAKYRESACVSGAKDDPSDAALLLDLIYRHRDRYRPWMPDTPETRKIQLLSEYRRRVVGDQTALTNRLEAVLKGYFPQALEWAGALDTVQACDFLTKWPSLQSVQKAKPAQLRKFYLDHGCRRTELIDKRLEEIRNARLLTEDKDVTSSSVLMVQATADALRPVIASIKRFNEELEAAFQQHPDHELFESLPGAGDVMAPRLLAAMGSDRGRFDTAVEIQQFSGIAPVTKKSGKMHYVHRRYACPKFVLQTFHEWSRITIRFSVWARGYYEYQRAIGKRHHAAIRTLAYKWIRIVFRCWKDRVPYDEQVYLASLRRSKPAWAVQAGLTTQAA

SEQ ID NO: 477693 - protein, 421 aa, unidentified
MPNIEIGVDSMVKENFIYVGIDLHKETHTAVMIDCYNQKLGEITFPNRPADFPKLVTKVKKCNTDAKEVVYGLENAYGYGRPLAVWLIDKGYFVKDVNTAISHRQAKHRGAMYRKSDSDDAGAIALATLNMLDKLPDACPNDAYWSLGQLVHRRDNIMKQRTRLVNQLHEQLCIAYTSYKQFFNDISRPTALYFWEHYPSRKYLKGKSVEDLRAELVPFSHNKCSTKTCEKILDAVASDKVKNNAYQDARDMVTLSIVSDLQHYDIQLAEVDKMLEQMYKMLGCTLTTIPGVNVITAVKILAEIGDIKRFSNANKLAQFAGIAPLHLSSSGKGKDLATKQGNRRLQATIYFLAIQMVQISSKGTPRNPVVRAYYEKRKAEGKTSQQALICISRRLISVIYGMLKNGTEYRMPVVENAGEKL

SEQ ID NO: 477694 - protein, 428 aa, unidentified
MSYRIAGIDVHKKMLAVVVSDVEIESEYQFERRMFSSNPEQLRSLAAWLVEQKAEEIVMESTAQYWKPVWETLERYWKPLCEKREGARRRSGTLHLAQALSNRGRRGRKRDFVDAERLVKRLVARELTLSFVPDAEQRLWRTITRKKYQLRRDLVRIHNQLEALLEEAHIKLSSLVSDLLGVSARRMLKALADGEANSAALAALAHERLRATPEQLCDALGACTELKPVYRRLLKMTLEHLQILEQQIGQLDQELATLLHPHQDAVERLAEVPGFAVDSAQQIIAEVGPAAATFPSEKCLSSWVGACPGEEESAGVNYSHRSPKGNRHMRRLLNQTANAAVKAKGTIFEIIYRRCVPRLGHNQAIGVIAHRQCRLIWLILHQGTRYEERGPAVTKRSRYQRTWRMIRQLRNLGYRIELPNPDASQGQA

SEQ ID NO: 477695 - protein, 342 aa, unidentified
MEYFAGLDVSLEETAICVVDGDGRTAGEARVASEASAIATWFEATRLRPARLGLEAGPLAPWLQLGLEERGLPAVCIETRRMRSATLLMAVKTDRGDARAIAHAMRAGWYTAVHVKSMPSQELRLLLRNRKTLLEQRVRLDNVIRGTLKAFGIKLGRVSEARFADRVAALLEEHRPGLLDFVQPLLAVRLTLRRSYQALHRLVLRAVRDNPLCRRFMTVPGVGAVVALSVMTGIDDPRRFSRGRKVGVHFGLTPRKYASGEVDRNGAISRCGDAMVREALFQAAHTLLTRVQRWSALKAWGMRLAKRRGLRRATVAVARKLAVILHRMWVSGEDFRWTAEAA

SEQ ID NO: 477696 - protein, 347 aa, unidentified
MRFYTTQHPFYCGIDLHARTMYLCILSQDGEVMLHRNMPAAPEPFLKAVAPYRDGLVVAVECIFTWYWLADLCAREGIPFVLGHALYMKAIHGGKAKNDKIDSQKIAVLLRGGMLPQAYVYPAEMRATRDLLRRRVHLTRKRAELLGHIQNTNSQYNLPEIGKKIAYKANRDGVAERFPDPAVQKSIEVDLALIGYYDQLLSDVELTIVQTAKQHDAHTLYRLQSVPGIGKILRLVLLYEIHAISRFPRVQDFVSYCRLVKCAQESAGKRYGTSGAKIGNAYLKWAFSEAAVLFLRHNPVGQKYLTRLEKKHGKGKALTILAHKLARAVYYILRRDTVFDMDKFLHG

SEQ ID NO: 477697 - protein, 427 aa, unidentified
MWQETGDSDPIIERVAALDIGKAELVACVRVPSAGSGKRRQEVVTHSTMTRSLLAMADHFAELGVSRVVMEATSDYWKPVYYLLEAYEFEVWLVNARDVKHLPGRPKTDKLDAVWLCKVAERQMIRPSFVPPPQIRRLRDLTRYRIDLVNVRTAEKNRVEKLLEDACIKLSSVASDIFGVSGRDMMRSLIAGQRDPAVLAQLARARMRPKIPALQEAFTGHFSDHHGFLLAKMLSRVDALDADIAELDAQIEAAIAPFAEAVQRLAEIPGIKAITAHAIIAEIGLDMSRFPTAGHLGSWAKFTPIVKESAGKKKGKNATGRGNPYLARSLGEAAVSAGKTDTFLGERYRRIAKRRGKKKAIVAVGRSLLTIIWHLLSDPDTHYHDLGPDFYDNRIGPERRKHNHLRALEALGYTVTLEPATTLEPAA

SEQ ID NO: 477698 - protein, 339 aa, unidentified
MKLYTGIDLHSNNNYLAIIDDNDSRVFKRKLPNHPETILATLAPFGEQVEGVVVESTFNWYWLVDLLREAGYHVHLANPAAIQKYKGLKHSDDNHDAFWLAHMLRLGILPVGYIYPKDDRPVRDLLRKRGHLVQLRTALINSLQGIISRNCGCSLNTHKIKTVKEDFITPLLAGQSDLQLSGAVSKDCIDFLTGKIKEIERSIKSSMMEKTSFQALQTIPGVGNILALTILLETGDISRFAKVGCYSSYCRKVPSRWTSNSKNKGKGNTKNGNKYLAWAFSEAAELAKRYSDSAKAFYNRKVARTNRMVAHAALAHKLARASYYIMRDGVAFEEKKLFA

SEQ ID NO: 477699 - protein, 339 aa, unidentified
MKLYAAFDLHARSSHLVVLDEQGKKIFTKNLLNEAEGMIRVLEPYREGIAAIAVESTFNWYWLVDALMESGYPVRLANPVAIQKYKGLKHSDDSSDAAWLAEMLRLRILPQGYIYPREHRPVRDLLRKRMHLVKLRTSLVNSLGNIVARNVGVKLRASKIKQLTYDHVSPLLAGDDDLALSGRVSKETIDYLTRQITTIERVVEAKLPLKQEYALLQTMPGVGPILSLTITLETGVISRFPQVGNYASYCRKVPTRWTSAGKAKGKGNANNGNKYLAWAFSEAAEKARQHDPKIKAYYDRKAARTNFMIAHSTVAHKLSRAAYYIMRDHVPFDREKLFG

SEQ ID NO: 477700 - protein, 339 aa, unidentified
MQVTTVGLDLAKNIFQVHGIAEDGTVAFNKSLRRAQLLQFFESLEPCLIGMEACGSSHHWARQFQKLGHEVRLMPAMYVKAYVKRGKSDAIDAEAICEAVTRPTMRFVAIKTEEQQGVLFLHRARDLVVRQRTQLSNMLRGLLGEFGIVIAQGVGRAVKFSKAVLDGDPPSIPNVAIDVLTNLCNQMVALHLRILWYDKRILLEGRRNRQVMLLRTIPGVGPVTASAIVATAGDGHQFRNGREFAAWLGLTPINRSSGGKERLGRISKMGDRYVRRLLVAGMTARLRHMKDNPDRADPWAIALLERKSPRLATVAMANKTARIVWAVLTRNERYRPHTA

SEQ ID NO: 477701 - protein, 320 aa, unidentified
MMPHQRRLVGIDISKRKIDACIHGEAERRTVPSTPAGEAELIAWLRAHEVGEAVTEASGGYERRWAEALRRAGLVVRTVDPKRVRYFAKSAGRLAKNDPIDAAMIAWFGVTFPAANAGLTPEPARQKLDQLVTARATLRELETALTNREEHKQPALVTKAQAAIRKILRAQIKTLDKAIAAAIAEDPAMARRAEIITSVPGLGPQAAAGLIAWLPELGQVDDKAIAALVGVAPYDDDSGERRGQRHIRGGREKLRSLLYMPIVAASTQCNPVLKPYYQRLLAKGKDGKVPLIACMNKLMRILNTMLARDETWNPPTRAAA

SEQ ID NO: 477702 - protein, 317 aa, unidentified
MTNQAKQDNRFHIGIDVAKAKLDIHCLETGADWQVENNTKEIRAFARRHHKMLAQSYIAIETTGGYEHLCCEALHGRGYKVHQAHSYRVKSFIRSMGQGAKTDRLDAMMLAAYGHERKTKLRLYAPRSANQQLLKSLMLRREDLVKMQTQEKNRLAGPMAKALGASFKAILKAIANQIRLVERKIRACIKQDENLQAREKVLLQIKGIGEITSCSLLALLPELGAMDRKQAAALAGLAPYAKDSGEYRGYRSVKGGRPAVRRALFMAALSAVRHNREMKIFYTRLCANGKKPIVALTATARKLVTIANARIRDMKLS

SEQ ID NO: 477703 - protein, 371 aa, unidentified
MHDTIFVGMDVHKATISVAVADGARGGEVRHLGNFLNRADHVGKLVERLSKTGGRRLRFCYEAGPCGYGLHRQITDLGHECAVVAPSLIPVKAGDRIKTDRRDAVMLAKLHRADELTAVWIPDAAHEAMRDLIRARATAVKVLGKARQHLQGFLLRHGRIYAGKKGWTLPYRRWLTTLRFDHPAQQIVLQDYIHSVHDAEERIARLTKQIEELVPNWSMAPVVEAFQAMRGVAFVSAVTVVAEVGDFTRFDNPRQLMAYLGLTPSEHSSGTAIRRGGITKAGNALARRVLIEGAWTYRMQARVSRKLHDRLEGLPQIVRDIAWKAQVRLCARYRRLAATGKAKVVVTTAIAREMVGFLWAIARQAQVGSAA

SEQ ID NO: 477704 - protein, 319 aa, unidentified
MNNTTSQNCVIGIDVSKAALDSHLLPDESRARFDNTAEGHERLVAWAGSHQPQRIVLEASGGYELPVVAALASAGLPVIVVNPRQVRRFAQALGVQAKTDRIDARVIALFAQAVRPEIRPLKDELTVELDAIVSRRRQLQDMLVAEQHRRTRAKGPVRKNIDAHIAWLERQVHNVDGDIAKLIQSSPVWREKEDILDSIKGVGRVTIATVLGALPELGTLSRQAIAALVGLAPFARDSGSWRGKRFVRGGRPDVRRALYMAALVASQRNPALRKFYQGLVARGKPKKLALTATMRKLLVIMNSMLRTKTRWDTRRFSPT

SEQ ID NO: 477705 - protein, 458 aa, unidentified
MCRELQPLRQALSLQLKADLFPATAGIDPNKLRQTYLDRLTMYIGVDVADRTFTALAEDASGEVLGTLEACPNRLKGFRRFMAWAEMLRDKHGLRILAVACETAGIFYWALWDFLAQQPGLARVLYNPRTTKHMGEVLSKRVRDDLVDALLLAEQLRLGSTPEVQLQEDADLLAARYYSRAARDLAQQINRKKNQLRALLRAYCPPLCKVFPGSKLHHPAVYALLQENLFPDEFAQAGAEALATTLVTHCRDAFGLAEAQQLVEASRQALTRPIGRDAIRHLVHAHTEDITTFQERKAFYLKSGYALIDDRQETVLLRTVKGAGVSNTLALVSEIGDVQRFPSGEHLASFLGLTTSKHISGTTLYRAKRITKQGSPNGRYAAVNVAQHLTRYVPRYQAMYQRIKGRKPPRKGHFIALVAVARDFVTNVLYDIWCYQRPFFLEVSDYRDYRRKNQRSDD

SEQ ID NO: 477706 - protein, 350 aa, unidentified
MLIIGCDYHPGFQQIAFVDTGNGEFQEQRLSHREEADKFYRALAASGQKVRVGMEASGHARWFERLLAELNIELWMGDAAKIRAKRVRKKKTDREDARHILKLMLKDDFPKIWVPNWDNRDLRQLLWHRHRMVQMRTRIMNQLQAVALNEGLRCKKRLWRKHGRPQLESIRLAPWASRRRRDLLELLDRLNPTIAELTQLIEQEVEKYPLAQRLMTHPGVGALTALAFVLIIGEAERFECGKQIAAYLGLVPEEDSSGESRRLGHISKQGSGLMRFFLVEAAQVTVRSDTEWRNKFFHLAMRRGRKIAKVAMARRLAVRLYWMWRNDWDYVQLKKFGPHAGKPGSGVGVQ

SEQ ID NO: 477707 - protein, 399 aa, unidentified
MDHVVIGVDPHKLSATIEVVDQHEHLLGSGRFSTDQAGYAAMRAYAKTWPKRLWAVEGANGAGRPLAQRLLEAGEHVVDVPAKLAVRVRLFDTGHNRKTDAHDAHAVAVVAVRTTNLRVLKVDGELEAMRMLADRREALTRRRVQTVCRLQALLAELLPGQAKRDITTGQAKAMLATVRPRDIAGKTRRRIAAEELAELIAVEAKIKKATAELKAMVLARESRLMDIHGVGAVVAARILADVGDVARFADRNRFASWTGTAPLDASSGEQNRHRLSRAGNRRVNHMIHIAAVTQLRLDTEGRAYYRRKRADGKKPQEALRCLKRRISDAIYKQLVTDAVRAEGADPGGHCGASQESSAVDLPPHIDTSDQPLPDPQTRRYAAPPGTRKSQPVGTLASTG

SEQ ID NO: 477708 - protein, 353 aa, unidentified
MTSAGRDVFGGVDTHGRTHHAAAVDGAGRLLGDAEFTATAIGYQQLRAWLTGFGRLVKVGVEGTGTYGAGLARFLAEQGVEVVEVDRPDRKTRRRQGKSDPIDAIAAARAVLSGTATGTPKTRTGPVEAIRALRVARRGAVKARTAALNQLHGLLASAPEPLRADLVALSTGELVDRCAGFRVDHTRLLEPTAATKAALRAIARRVQLLQEEIALADARLRPATATVAPRTAAIFGAGPEVAGQLLVTAGDNPERLRSEAALAHLAGISPLPASSGRTDRHRLNRGGDRAANSAIHRIVLCRMRYHERTRAYVERRTAQGLSKKEIMRCLKRYVVREVHAALLADFDHLTSTA

SEQ ID NO: 477709 - protein, 405 aa, unidentified
MSLISYSQPTIRVSIDVGCHQHSVAIGLSEGNVIIDEFEIKHDLNGFNTFFQRIEKWEKKHAFPVNVAMEGFNGYARPLDKLIRARNYRLFNINNLKLARFKEIFPGPAKTDPIDARKGLELFQLDELLPLAKGVLQEVAATPRVNDDLKRLTRRRKRLVRERVSLVNSIQADIQSICPGLLEITKSVSNVWFLNFITSSSDFKKLAAKRASSLLKIASVGKKYLADIQSWQAQALYSEDADLVGPMILEDAEQIKVFNAKIKRINAQINLTKLDSDEARLIQSIPGYGDTVSAELSGEIGTVNRFEKESSLALYLGMTGLDNSSGRYKGSKQPKHVNTRAKMAMMTAIDRHRKLVPESQAYYEKKRREGKKHNQAIRALGRHLCRVMFKMLSENREYVVKNKQD

SEQ ID NO: 477710 - protein, 342 aa, unidentified
MQITTIGLDIAKNVFQVHGIDAKEKVVVRKQLRRKKVMGFFKALSPCLIGMEACATAHYWARELTKLGHEVRLMPRKDVKAYLKRNKNDAADAAAICEAVRRPTMRFVRVKSEEQQGQLMQHRTRDLLMRQRTQLINALRGHLAEFGIVAAKGDAGLKELLAIVADDRDERLPSDARASVIVLAAQLEAAQTMLRSLDKRIMKQHRANEASRRLESIPGIGIIGASAIAATVSDPMVFRSGRDFAAWIGLVPRQDSTGGKQKLGPISKQGDRYLRRIIIIGAHAVLRRAKENPHKYPWLTQLLARRPFKVVAVALANKMARTAWALLAHGDTYRAPELVAAA

SEQ ID NO: 477711 - protein, 421 aa, unidentified
MPGWPPAASPSEPAEDHDSAFMGTWAGEVLFPLYLVGGNRVQQTEYPLAVEAVGERGRCVLPSEEPEQLPEPKELVSRKVGPTQEGVGMTIKRFVGIDVSKHTLDVFVRPDDEALVLSNDEVGIAELVERLRTLAPERVVFEATGGLEMALMAALSEAGLPAVAMNPRQVRDFAKSMNRLAKTDSIDAHVIAQYAELICPPLRPIPDEQTRLLSATIARRRQIVEMITAEQHRLSPAKGRIQTQIAQHLAYLKQELTDLDHELGDQISQHPNWREKDKILRSTPGVGKVLSSSLLADLPELGTLSNKEIAALVGVAPLNRDSGLWRGHRSVWGGRAQIRATLYMATLVATRFNPVIRAFYFRLTSAGKAKKLALVACMRKLLTILNAMMRHLSPWSDDHAGYPPIPSAQPTSSPCPTAQAT

SEQ ID NO: 477712 - protein, 341 aa, unidentified
MNYYVGIDVSLEASSLCVVDANGKIVREGKVASEPDALIAWLKGLKLELTRIGLEAGPLSQWLYAAMRQAGFAVELLETRHVCAALKTMPVKSDRNDARGIAQLMRLGWFRPVHCKSMAAQETRALLTARKLLQTKLHDLELSLRGILRGFGLKVGPTTPARFEERIRELVAGHPRLEVIVNSLLAARVALRREFDRFEKQVRDAARCDTRVRLLTSIPGVGAIVSLSFTAAIDDPARFKSSKRVGAYLGLTPTKYQSGETDIDGRISKIGDASVRAALYESAHIILTKPLKGCTALKSWAMKIAKRSGMKKAKVALARKLAVIMHRMLADGTSFRNAAAV

SEQ ID NO: 477713 - protein, 344 aa, unidentified
MGEVITIGLDIAKSVFQVHGVDGAGAVVIRKRVSRAKVLTFFADLPPCVIGIEACPSAHHWGRELEALGHTVRLMPPSYVKAYLKRSKNDANDAEAICEAVTRPSMRFVALKTKAQQAALMLHRTRQVLVRQRTMLSNAMRGHLAELGIVSAKGRNGTSELLRIIADGADSRVPPVARGILEVLARQYSAISAELGSIQKGILAWHRSCEASRRLEEIPGIGPIVATALVAEIGDWKAFGSGRDLAAWIGLVPKQHTTGGKDRLGGITKQGNRYLRWLLVTGAMAVIRYAQKHGTRKQPWLGRLMERRPTKVAAVALANKIARVAWAIMVHGDRYKEPELPVAA

SEQ ID NO: 477714 - protein, 387 aa, unidentified
MPRPNDFSRSLTPFEQNSTLVAVIELSQSSWLIAGTVPGIDRQPLKKITPDETALLRLLHRWRDEAIGKGRTITRIAVAFEAGRDGFWLARWLAKHGIEMHVIHSSSVAVSREHKRAKTDRLDTAMLTRVFLGWLRGEHGHCGMVAVPTIEEEDAKRPGRERENLVGERTRIINRMKSTLARLGIRGFKPQLRKAPQLIETLRTPEDVTIPPNTLEEMRRNFARLAILREQIKAIEDARLQQLEDAPQAAPNAMVRLLASVIGLGVETAYMLVQEVFSRTLRDRRAVARYAGITGAPDESGSKRREKGLAKAGNARVRRGMIQLAWRFLLFQKDSALAQWFRTRTEGAAGARKTQMIVALARKLLIALWRMVTTGEVPHGVVLRQAA

SEQ ID NO: 477715 - protein, 338 aa, unidentified
MRLYGGIDLHSNNNVIVLLNEKDEAVYKKKHGNDLIEILACLLPFRKELEGLVVESTFNWYWLVDGLMASGFKVHLANTSAIKQYEGLKYSDDRSDARWLAHLLRLGLLPEGYIYPREERGLRDLLRKRSQLVRQKTSNLLSVQNQYARQTGSDLGAKKVVALLSEERGLSGLDADQALSVQSNLRVLSCLEDQIARIEKTLKGRVKLRQEFQQLHTVPGIGDTLGLTIMLETGDISRFEKAGNFASYCRLVGSQRISNGKRKGKGNTKNGNKYLSWAFVEAANFAVRYNQTIKRFYQRKKDKTNGVVAIKTVAHKLARACYYILRDQVPFDTTKAFG

SEQ ID NO: 477716 - protein, 347 aa, unidentified
MLIIGCDFHPGFQQVAIFDNLTGEIQEKRLQHREEAEQFYGALAGQEVLVGMEACGHYPWFERLLAELGIELWFGDAAKVRASVVRKQKTDRRDAEHLLDLLREDRFPRIWVPSLEVRDVRQLLVHRHKQVQARTRSKNQLQAMALSQGVQKKYKLWTKAGRAELEQLPLLPYAAERRKRLLETLDGLEAEIVELDRRVAEEARQRPEAVRLMTHPGVGPVTALAMVLTLGPAERFKSGKQVGSYFGLIPSEDSSGGKQRLGRISKQGSSFLRFLLVEAGQTAARYDPQLKRFYRRLAVRKNRSIAKVAVARKLATRLYLMLREDWTYAQLCQAVMQVSSSHSVAGQ

SEQ ID NO: 477717 - protein, 402 aa, unidentified
MKFLKHGLGIDMAMEKFDACLSIIDEQQRVTVRSQRSFKNNKKGFEIFLAWVLKKTKQFALPAVYLMEATGIYYEQLAWFLHRQQCTVSVMLPNKAKKYKDALGLKSKTDRIDAKGLAQMACEQNNTIWKPLSDSLYLLRLITRQIQSIAEQSTVLKNQLHALHYGMYRDKDIEKMYARQIGLLQKNKKGLELRIKKIVEEDTILKKKFADICKIKGLGLQSLAVIIAETNGFAAFENVSQLVSYAGYDVVENQSGKRSGKTRISKKGNSHIRRCLHFPAFNTIKYEVEPFKNLYERIYERSKIKMKGYTAVQKKLLIVIYTLWKKDEAFDQNYQDKISGEVQLEPSFASVPKELAKAFDEKGKAKIGKQKITPDKTRVTQDKHPSKHRRMPSFASHKFIKI

SEQ ID NO: 477718 - protein, 344 aa, unidentified
MEIAVLGIDLGKNSGSVVGLDTAGRVILRRRLRRESVVKFAASLAPCVVAMEACCGAHHLGRILQAQGHTVRLMSPEYVRPYVKAHKNDDRDAEAIAEAATRPTMRFVELKSEEQLDMQTLHRARDRLVGERTALINQLRAILLERGLVIPQGRRKLEQHLAAILDEGSDVPLSPRVRALVEDMRTEWRELDRRIGAFDDECAARARTDAAARRLATIPGIGVLNATALVAAIGTGKAFGRGRDLAAWLGLVPRQVTTGGKPRLLGISKRGNSYLRKMLIHGARAALPSLASAETGLSQWLRGLLARAHKNTVVVALAAKLARIVWAVLRSGQLFERRTASAAR

SEQ ID NO: 477719 - protein, 348 aa, unidentified
MDHIIRIGMDTSKHVFQLHGVNAAEEPVLRRKLRRNDMVVFFERLAPTIIAIEAAGASHHWARLLRSFGHEVKLIAPQLVKPYVKRGKNDAADAEALCEAMSRPTMRFVPVKSAERQAALMLLGLRDRLVRNRTQLGNAIRGYAAEFGLAAAKGIAHLAPLLDRIQSDESLPGLARELFAAHAKEYAQLQAQIDEVEGKLMAWHKTNPGSRRLVQIPGIGPIGAAMLIMKTPAPETFRSGRQFAAWIGLTPKDHSTAGKVRLGVITRAGDEGLRSALVVGATAVIRHLRNGNGRSMLSAWVEQLLKRKPPKLAAVALANKLARIAWKLMVTGETYAAKPRPVALAGVA

SEQ ID NO: 477720 - protein, 351 aa, unidentified
MPRTTTLHAVTTIGIDMGKNTLHLIGLDARGAIVLREKVARGRIALRLANLPPCLIGIEAGMATHYVARELAALGHDVKQVPATYAKPFRQGQKNDFRDAHAVAEAVQRPTTRFVPAKTNEQLDLQALHRVRSRLVSERTAVINQIRGFLLERGIVVRQGLRFLRQQLPDILAKRADVLSPRMVRIVAELAGDWRRLDERIETVTDEIEALAKSDDSCRRVMTVPGIGPIISSAMVAAIGNGAAFARGRDFSAWLGLVPKQMSTGDRTILGRISKRGNGYLRTLFMQAARVILLRSANWPKHGFGLWLVRAAQRLHPNVLAAALANKLARIAWTVLAQERSYEARVTKAAA

SEQ ID NO: 477721 - protein, 335 aa, unidentified
MIIDDAGRRLGRALTVADDPSAVAKLLTWVGNHASGRPVRWAIEDGRGLARRLATALVVAGQSVAWVPVRLMVAERHHTGPRGKSDPLDALATAKAAANPDNARYLAEHRIDEPGADLAPLVDERNDLLGERTRLIGKMRWRLHELAPGLEPKSLTTLKAPRELAARLATFDDTPLRRVLLANCARLESLTRSINALTRELGEHARRTCPALLAVPGAGAIVATTILAELGNPARVRNAAALARMAGTAPIPVWSSDTKQHRLDRGGNRRLNKAIHTIALTQARTHPPAQALIAKHQDKKGKRGAMRVLKRHLTNVIYRELHHDLTPQTRHELAT

SEQ ID NO: 477722 - protein, 426 aa, unidentified
MTYRIAGIDVHKRMLAVVIADVAVEGEYQFERRKVGTSPSELCRLADWLVAQQVEEVVMESTAQYWRPVWATLEQRWRPKRLQESDGAKSGQLHLAQAQSNRGAAGRKKDFPDAERLVKRLVAQELKLSFVPDVEQRLWRTIMRRKHQLTRNRVQFQNRLECLLEEAHIKLSSLVSDLLGKSARYMLQAVAEGETNPETIAALADHRLRATAPQLRDALGACRDLHPVYRQLLKMALEELKLMEEQIDKLEQEMANLLSAQQDVVQRLAEVPGLGVDSAQQIIAEVGPEAAAFPSAKHLASWVGVCPGEEESAGINYSHRSPKGNRQMKGLLNQASNAAVKTKGSIFEFIYRRLVVRLGHAQAIGAIAHRLCRLIWMILHQAIRYEERGPAVSRSTTERRAAKMIRELRRLGYRIEPVECKAEGSV

SEQ ID NO: 477723 - protein, 314 aa, unidentified
MPRSKSVVGIDVSKRHLDVAVAGSQEVVRWPNEAAGIAGLVEALGGQAPGLIVLEATGGYEMAAVRSLQEAGLAVAVVNPRQARDFARASGRLAKTDALDARALAAFGVALRPAPLPPIDASRAAIGDLVARRRQLVDMLIAERNRLEHAGSLTRGWIEDHILVLKSQLAQTDAALGLAVESSTELKHRYELLTSVKGVGPLTAAVLLAELPELGTIDHKQIAALVGVAPINHDSGQYRGQRHIGGGRQSVRCALYMATLVGVRFNPTLQAFYRRLRQAGKRPKVALVAAMRKLITILNAIVRDDRPWQPQDGC

SEQ ID NO: 477724 - protein, 358 aa, unidentified
MKKIVVGIDISKEKIDASAIDVRDSQLGVVKLDYQVFENRPMGFRRMLAWARHLIKGVGLEDVLFCCETTGGYDRCLCDYIYAKGQDIWREGALQIKRSMGVRKGKDDKADSLMIAEYAMRHMDKAVIYETPSGTIRELKALFLYRHKLVQERTEKKVRMTHLAETAAKSKSMSFILRDARKSVKALDKSIKQCEKQILELIKSDEKLMKSYGHIVSVSGIGIVNATAFIAYSNNFKGITTANKIASFWGCASFRDKSGTSVDKKAYVKCYSNSLLKAYLTEAAEWTIKENGIYHDYYLRLKAEGKPYGVIINNVRNKLIHLVHSLVVNDTDYEKNHEFLRVQRKGKKEAPAQLENIN

SEQ ID NO: 477725 - protein, 376 aa, unidentified
MNNLRFVGLDVHAETIAVAVAESGGEVRSLGVIPNRAESVGRVIRKLGKPESLRVCYEAGPTGYVLYWQLSELGVKCEVVAPTLIPVKVGDRVKTDRRDAEKLARCYRAGDLTAVWVPDAAHEALRDLVRARLAAKRDQLRARHRLGKFLLRHGRRATEGLSAWSAKYLAWVKTQHFDHAAQETTLLDYLHEVEHAAERIARLERAIDAAIDTLPVKLRAVIEALQSLRGIAQLSAVSIMAELGELSRFEHPRQLMGYSGAVSREHSSGERIRRGAISKAGNAHLRRIVVEAAWAYRHRPAVGKTLTARQRHCSAAVTALAWKAQHRLHKRYVCLMARGKCKQQTVTAVGRELLGFIWDIGVQVERDVKVPLRQAA

SEQ ID NO: 477726 - protein, 320 aa, unidentified
MMYIGIDVSKNSFVAAYPTKSGYTTQTFKNDTKGVRQFIKSLPEESHCVMEATGNYSMLLLYLLQQAGFPVSMENPQKIKHFSRAMMSVTKTDEIDAKLIAMYGEKMNPAPYKIPSESILLLKQKRTVLRQLKKHLAATLNLQQSLAVLPKQDPTSKTAVEQTIKFLRKQISKMEEEITNLSNKEFKRQMDLLTSIKGIGNTLASALIVATGGFTYFTSAKQISRFLGLCPTYQQSGTSVNIKGHINRNGDTHLRGQLYVAAMASLRCNTTCKEMYDRLRANGKSGRVAIVAIANKLIRQAFAVVNNNQPYIDGYVSTFA

SEQ ID NO: 477727 - protein, 346 aa, unidentified
MKKIVKQVLGIDVAQKELVVCVGRMYDDWSPELYAYKTFANTVKGFIALLLWGKKLTDETIGVRYVMEATGVYHEALAYFLDEKGYEVSIVLPNKISNYVKTLDVKTVTDKTASEAITQFGLERKLDSWKRPKPVFKRLRQLSRERDQLVQARTVVKNQLHAEQVEAEPNKSSIARIKKQIAFLDKQEQEIKAEIVEITKGDEEVNKSIKLISSLSGVGLLTTVTVLAETNGFELIRNKRQLTSYAGLDVKEKQSGTSVKGRARISKKGNKYLRKAMHLPALAAIRSDERFKAVFARLVSKHGIKMKAAVAIQRKLLEMIFIIYKTNVPYDKDYLKNNELCNATGE

SEQ ID NO: 477728 - protein, 418 aa, unidentified
MSFKILKFNCCGLDVHKTWIYACIGITDSNNRTEYKQARFSSFTKGLNELCDWLARYNCKDVCMESTGKYWIPVFNILEQHQIWVTLSHPKYTKPMKGNKTDRKDAKWICDLYMCGMVKPSFIPPADIRELRDLVRYRFKLTCMITGEKNRAQNCLTVSNLKLDDVFSDVFGKSARSITEHILQHPGENFDVAPFIDKRCKTPIEEIQAAVGGVISKEQAVKLRQCLDHIDELQKHISEVEREILRLSDKYEAALNLMRTVPGFDKNPLTAIQVLSEIGGDMSVFPTAKHLVSWAGCCPRNDKSDRKIKSTRISRAGSYFKPVLVQVANALIKSKKHPEFTTRYKRIKTRRGHKKAIIAICRMILTAIWHILSDLKPYTPEGFLEQRPVKESKVLTTSQALNLLRQRGYTIRDNSLPA

SEQ ID NO: 477729 - protein, 374 aa, unidentified
MDHHSGAFVGIDTSKLRNAVAVAEEGRGGEVRYFGEIDTTEAAMRKLVTKLAAKYSRLTFCYEAGPTGYGLYRLIRKLGHDCIVVAPSLIPKKPGDRVKTNRRDAVGLAKLLRAGELTAVWVPDERHEAMRDLSRAREAARKDLKGKHQQVSSFMLRLGRHFPGKKTWGPAHMNWLMLQKLEHREQRIALEELLGAVRQESERVERLEQAIRDAVPEWSLAEVVTALQAMRGIDLITAVTVLAEIGDLSRFQNPRELMGYLGLVPSESSTGDTINRGGITKTGNGRVRRILVESAWSYRYPPRVSREKQMKVAAAPRAAREIAWKAQMRLCGRFRSLTRKGKRPTVVATAIARELAAFIWAINREVVGSHATAN

SEQ ID NO: 477730 - protein, 347 aa, unidentified
MNANAKVAGLDIAKEVFVAVGLDRTGKAVFKHKMNRDEVLPTFRKLQPMAIGIEACAGSHYWARELAALGHDVKLIAAQHTRAFVTGNKNDTNDAAAIAEARSRSSTKYVPINTPAQQDLQMLHRARSALMSERIAMINRIRAFAGEYGRVFAAGVAKFKVGLLAWLADPDNGLSGLALATFRELKEQLDDKEQRILAYERKLNQAAKTEVAQKLMEVPGVGPLTATAVMASVADPHHFRSGRDFAANLGLVPREHSSGGKQRLYGITGKGDSHLRTLLIHGARSALRCAGNKPDSQLRWASNLAQRRNFNVAAVGLANKMARVIWAILAHGRSYVPVWSNSTTRPA

SEQ ID NO: 477731 - protein, 387 aa, unidentified
MAYIAIARIPKWEKRRRKIFSLLLIKKMEILKQVLGVDVAQKELVVTLGKMDASLEVELYAYAVFENNLSGFKKLESWMKKLTNAKVKLQIVMEATGVYHEKFAYFLDDIGYNISIILPNKISSFFRTLDQKTINDKSCSEAIARFGLGRKLENWKKPNEVYKCLQQLTRERDQIVDERVSVKNMLHAENSEANPNANSIKRMKARIQFLTKQESQIKIELSAFAKKDKKLQEDIKILTSIPGVAELTALIVLGETNGFELIRNKKQIVSYAGLDVKEKQSGTSVKGKPRISKRGNRSLRKAMYFPAIVSVKHNPVHTALYARLLAKSGIKMKGLVAVQRKILELMYLLYKKQEYYDPKYEKRVMENPMHALQASSMAALECEDIKI

SEQ ID NO: 477732 - protein, 345 aa, unidentified
MLYVGLDLSRRRLDWQALDREGERVEIGAVPPDRDGLAKLAQRLGAGPVLAVIESMTGARFVHDQLELAGWDVRIADAVKARGIAPLACKTDRIDCWVLAELARLQLVPEIWLPTPAVRAERERARFRLHLVKHRSSLKNRVHAVLFQYGIANSHSDLFGASGRRLLEQLSLPEPWASTLAASLELIDTLDEQITGCESELRRLGAVHPYIPLLLTCPGIGSVLAYTIASEIGEIGRFATPRKLVGYTGLCPRVDQSGERDRRGPLRKNGPNYLRWALIEAAHAGVRWHPPYRDLAERMRARHGRTRGTKIAAIEIGRRLTEAIWHMLTTNQPFAPAGAAASLAA

SEQ ID NO: 477733 - protein, 401 aa, unidentified
MDPQIRVGIDVGCKAHRVGIADPRGSILEEFDISHTNAGFRDFFRRIDHHKQELDLPVAVAMEGFNGYARPLDRLIQEHGYILYNVNNLKLARFKEVFPGAAKTDAIDARKILELFHLKDHLPLAKDALQKVVAAPLVNDKLKRLSRRRRQLVNDKVRVANRLQSDMQAVCPELLAITNNVSNLKFLRFLTYRAELTQLARLRHTTLLAIPSVGQKYARIIQEWQRKASFSTEVEYVGPMIIQDAKRLLELRKQIHALDEAMAELADQSELACRIGSVQGFGKTCIAELAGEIGTTERFAGERSLALYVGMSPLSRDSGQHHGSKRPRSVNHRAKAAMMTAVAHHIRCVPQSRAYYDKKRAEGKTHNQAVRALGRHLVRVIWSMVKNERDYELREVTPSVT

SEQ ID NO: 477734 - protein, 353 aa, unidentified
MEHFIGCDAHKKFSIFASIDEKGEYGPTFRVRHDLEVFRKFLKELPAGSKIALETSGCYYWMVDEMERAEHIPLLAHALTAKRRMEGRHKTNERDARGLAMLLRNGTLPVVWIPPAELRDQREMLRWRMCLSRMRTRVKNRIHGVLQRYNVDIAVSDLFGDAGRVELLARLHELPPYSRQSLLDQLQMVDTVETQISECEQVLEEMLYPSADRDLLDSLPCVGKILSAVMALEIGDVQRFGDPDRLVSYAGLVPVARESADWKRKDRCPRDCNMYLKWAYVEAANLISIHRGHWPERHVAQLYERVKQSTKMHGKATMAVARHLAEASYWMLRKQAVYQEPNSKRKVLSSTHG

SEQ ID NO: 477735 - protein, 404 aa, unidentified
MPTYFVGIDVSKFKHTCCIISEHGEIIKKSFDFSNSKEGFDSLIEIFKSIDQSESLFQIVMEATGHYHECLFRYLVANNYLAQIKNPVVIARFKQSEYLDKAKTDNLDALLIAQYASKHPFSPSMLKSYNIERIRRISRAKYFLYQDKERTINHLHRYLDESFPELIPFLRKRGDIKRYQGRNFFDSKTTLWFIENFPSAKIFSNTRSETAEKLRRMSKGAFSLIKFNELRKIAKESIGVSFQETEEIIIQLVQELRNIQERNDKLDELLIPLIDETAPNLLTVPGIGYRLAGLLISEIGDASEFPSADKIIKFAGLDVRVYQSGTIEKHGAIRKRGSPLLRYALFQAAEKARIHCPEIAEFYSKKKNEGKHPICALTHTARKILRIVWALLKTGQNYNQLVSD

SEQ ID NO: 477736 - protein, 358 aa, unidentified
MEVLYPHCTGLDVHKDTVVACVRHMVNGTVKREVRTFKTTTKELLALSEWLAAEKCTHIAMEATGVYWKPVWHILSDGDFALVLANAAHVKNVPGRKTDVNDATWLADLLAHGLIRGSFVPDPQTQEMRDLLRTRKQLVRERSRHVQRLQKTLEDANIKLDSVISDVMGLSGRKMIEALIAGESDPKQLAQLAHRRIKASPEELCEALRGRITRHHRFLLSLHLQQIDAIDAAIDAIDEEVDAQVEPFRTTVHLLTTIPGVDELSACVILAEIGRDMSRFPTAGHLISWAGLCPRNDESAGKRRSTRMRKGAAWLKTTLVQCAAAAARRKASYLQAQFHRLRARRGAKKALGGIAASI

SEQ ID NO: 477737 - protein, 404 aa, unidentified
MYNAVGIDVSKGKSTVAVLQPGGTVIRKPFDVFHTSHSLNELTNYLDTLDGDTRIVMEGTGRYHEPVLKALFQAGLFVSVVNPHLIKNFGNNSLRKIKSDPADAKKIARYTLDNWAELRQYSGMDNTRTQLKTLNSQFSFFMKQKVAAKANLIALLDNTYPGVNKLFDSPTREDGSEKWVDYAYSFWHVDCIRKIGLKTFTDRYRAFCKKHHYIFQTDKPEKLFNASKDLIAVFPKEKTYKLLIQQSIQQLNLASEHVERLRIEMNELASTLPEYNTVMGIYGVGKTYGPQLIAEIGDVSRFTHREALTAFAGVDPGVDESGQHKSKSNRTSKVGSARLRKTLFQIMTTLLQNAPEDDPVYRFLDKKRSQGKPYYVYMTAGANKFLRIYYGKVKECLRNLEQES

SEQ ID NO: 477738 - protein, 412 aa, unidentified
MEVVYPCCGGLDVHKKSITACVLWAEPKGKSRKEKKRFGTFTHDLLQLADWLEQCGVTHVAMESTGVYWKPVWNILAEQFEVLLVNAQHIKAVPGRKTDQKDSEWIADLLQHGLLRGSFVPPRPTRELRDLTRYRVSLVQEINRIANRIQKVLEDANIKLASVATDALGASGRAILQAMLAGEQDAARLAEMSKGLLRNKIPELKLALEGRMTEHHRFLLRQLFEHLRFTESKLSEIEQEIDRRMLPFEDKVTRLCTIPGVDRVTAWGLLAEIGLDMNQFPSSGHLASWACLCPGSFESAGKRLSGKMRKGNVSLRRCLSQAAWAISMMKNNYLSALYRRLAARRGAKRAVMGVAHALLEIAYHMLKRKEDYRELGADHFDRIDVNRIRRSLVRRLERLGHKVTLEPLAQTA

SEQ ID NO: 477739 - protein, 341 aa, unidentified
MKVTTLGIDLAKSIFRLHGVDARGVAVLRRQLTRKQLLPFLAKLSPCLVGMEAGSGAHFWAREIGKLGHEARLMSPHFVKPYIKSNKNDANDAEAICEAVGRPSMRFVPSKSTSQQDVQGLHRIRAQLIKWRTALANETRGLLAEYGIVVTKGIAPLRRTLPLILEDRENRLSGLFREMLVEMAERLRLLDERIREYDLRVARVFGQDERCQRLAQVEGVGPLVATALVAAVGNAHEFKSGRELSAWLGLVPRQHSSGGKTVLLGISKRGDRYLRTLLIHGARSALRTVESRKDPRSVSISRLKGRQGPNVAAVVLANRNARVMWALLRRGEVYCPATGNI

SEQ ID NO: 477740 - protein, 369 aa, unidentified
MGDGITYVGLDVHKDGIAVAVAEGGLRGEVRDYGRVANTPAALQRLVRKLGHQGVELRFCYEAGPCGYGIQRQLSAAGHDCVVVAPSLIPKRPGDRIKTDRRDASSLARLHRAGELTAVWVPDAGHEAMRDLVRARLDAVHALRRARQQLSGFLLRQGCHYGRPAWTKLHRRWLAGLRFEQAVHHLVLEDYIEAVEAAQARRDRLTAQIEAMLPHWTLAPVVAALQTMRGMALVNAATLIAELGDLSRFANPRQLMAYLGLVPSEYSSGASIKRGGLTKAGNSAARRLLIEAAWCYRFPARVSRELLLRQEEQPRPIREIAWKAQLRLCARYRKLARSGKPANVATAAIARELAGFVWAIARRVPPTAG

SEQ ID NO: 477741 - protein, 430 aa, unidentified
MTKPYPTPTEAVLVAIDVAKMRNEVLIEVPGRARRRRLTVLNTRAEHDRFLAELEALDLPIVAGLEATGNYHWPLAWRLLTAGVALRLVSSVALARTREALHNGWDKNDSKDAQVILHMPRIGATQHYYDPLAQGILDIQELSKTHEAVSKAKTEVLHRILTHYLPLYFPEVERFRHNSRGEWFFAFLDRFPTPASATAMGRKAFVEAAWTLVGRKVSKARLLADIYRTAQSSIGLPIALDGPAIAMFRMIIAEMRSLIRQRDQIETTADHLLSDHPDYCLLRNIPGIGPINALTILAEAGDLRRFGHHREFLKFCGLDLATHQSGQYRGQTRLSKFGNARLRRALWLTAQVAIRQRENSFRDKFERYVAKDRHNADLQRKALSAITAKMARVVHAVVKTGADYRPFVEVAVPSGGTPLRVGREGASATL

SEQ ID NO: 477742 - protein, 454 aa, unidentified
MAKARAKGKTLNGFAEINHDAAGIDVGNAQHWVAVPSGRDTVSVRMFGCFTSDLHALANWLMKCGIKTVAMESTGVYWIALHEILESRGFQVCVVNARQAKNLPGRKTDVKDCQWLQQLHTYGLLTASFRPQAEIIVLRRYLRHRETLVQEAATCIQRIQKALTEMNLQLANVISDISGTTGLRILHAIVEGERDPQRLATLRDWRIKATPEEVANSLLGNWRDELIFIVEENLTLYGVYQVKIARCDQRIEHHLKSMPAQIEGDNNPLPKPRKGKRPHGNAPAFDLRSELYRVTGTDLTQIDGIDVVTAQAILADTGTDMSAWRTEKHFVSWLGLCPDHRISGGKVLQRGTRRVVSRAATAFRLAASSLRRSQSALGAKYRRLQSRLGPPKAITAMAHHLARLFYRMVKYGSQYIDHGMAAYEARFKEQQLKWLSRKAAELHFRLAPIPDLSS

SEQ ID NO: 477743 - protein, 346 aa, unidentified
MTIVEARTITGGVDTHLEFHVAAALDPVGTLLGTKTFAANTSGYKALCSWLSAFGAVAKVGIEGTGSYGAGLARFLSQHNIAVIEVNRPDRGAQYRSGKSDPLDAVEAARAALGGRATAISKSRDGHVEAIRVLLVAKRSARQARTKAIIQMRHLGITAPDELHRRLQGLTVKSLVNEAARLRPRRSSDVVTAATKAALSSIAHRIGALDDELADLDEQITAHVKAVAPELLARFGVGPDTAASLLVAAGDNPQRLRSEAAWAHLCGAAPIAASSGKSAGHFRLDNGGDRQANSALWRIVMVRIAHDPRTTAYFERRVKEGHTKRDVIRILKRYVARELYRYLPRA

SEQ ID NO: 477744 - protein, 412 aa, unidentified
MTRWIGRAIGLDVHRDFCVVAICEDGVTSSAGRVPATPEGIRALAESLLPSDRVALEVTGSCWEVARILEPHVNRVIVVSPDDTGITSARAKTDKLDARTLASLLWRGELEAVWMPDERCRVLRRRLARREQLVRSRTRTKNEIHACLQRRLQGKPPCSDLFGVKGRQWLAGLELPLEERESVDAGIRHVEFLDSEIAAVEKLIAQQALSWPEIRRLMTVPGVNLICAASFIAAVADPNRFLTSRKLVAYLGLDPKVKQSGEAPARSGRISKRGSPAARWALVEAAWTAVLQPGPLHAFYERTKNRRGHGKAIVATARKLAVLFWCMLTRSEDYAHQQPSLTKKKLRRLEITAGAPKNTRRSAGIWSTNDLMRQAERELALQAEASYKRMVTDQQAGAPARKVGASVTPERA

SEQ ID NO: 477745 - protein, 425 aa, unidentified
MQEKIMRITSTTIIVGVDVAKKEHWARVTDYRGVDLCKPIKVLNSEISFDSLMARVEKIRTAKGCDKVIVGMEPSGHYWKAFGWYLYLHQSSPVLVGVNPYHTKQAKELDDNSPTKSDKKDALTIAHLVRDGRYFDIYLPEGAYAELRVLCNERKRLQKQVSRANNTIVAVMDEYFPEYDEVWGKVTCPTSRKILRNIPFPSDILETGEKNLANTLSIFSSGTEGKVRASQLFDAAGRSVGVSEGKTSARLRLRNLLDELELYEGKVDDIEEAMAAIMDGLEMGELLQTMKGVGGVISAVFLGEVGDVSRFDNWKQVRKLAGLNLVEQSSGQHKGKTKISKRGRPYLRWILFLAGQKGVLHNPEMRGFYRCLRDRKQNPLTGYQAYVATGLKVMRILFHMAKNRVPYDPAKALGAVREQQIAALA

SEQ ID NO: 477746 - protein, 360 aa, unidentified
MKKVSKQMRKMEAVDKPEMTLGLDLGDRFSHYCLLNADGDVVEEGRMQSTEAALKRHFEGELPMRIALECGTHSPWVSRLLTALGHQVIVANARKIPAITASESKNDKNDAEKLARFAAYDPRLLSPIEHRSSERQLDLNLIHARSTLVRARTMIVNALRGLVKSAGGRLPACSTEALPTRAPAAIPPALVTVATPLVEQIALLNAQIGGMDKQVEKLAVKYPEISLLRTAPGVGPIVAAAYVLTLDRPDVASNRSAGAFLGLRPGQSQSGDSDPQRRITKTGDRCLRSLLVQSAQYILGRFGPDSELRRWGLKLAATGGKRGKKRAVVAVARKLAVVLHAMWRNGECFQAFPQPVTIAA

SEQ ID NO: 477747 - protein, 345 aa, unidentified
MVMIGIDPHKRTHTAVAIDTAERVLDERLVRATSKQVPELLEWVKRLDGGDRIWAIESAGGLGYLLAQQLLAAGEQVVDIPATLASRVRLLGTGRSDKNDPNDARSVAIAALRAAELVPVRVEDHASVLRLVSRRHTQLGWSYNKTACRLHALVADLVPGGIGKEVVVCQVRSLLVDHPSIGAVAVERHALALDLVDELERLNRQRKALRKRIAVAVDASGTTLTEIFGVGDVGAAIILGQVGDVGRFRTADRFAAYNGTAPIEWSSGNRARPIHRLSRRGNRTLNHVIHIAAVTQLRHRHSPGRAYYDAKRTQGLTGRAALRSLKRRISDAIYRRLVADTARRS

SEQ ID NO: 477748 - protein, 434 aa, unidentified
MQPATRNGVGGPERARSANGDVREKLWDGRRGCRHSRRWTQLMEMAPMSQIDDLSRCLLTFEQVKSITVVVELSEASWLVAAMVPGLERHPLKKLEPDPDALLRLIERWRSEAVKAGQTIERVVLAYEAGRDGFWLARWLLVRGIEVHVIHSTSVAVSREHRRAKTDRLDTGMLMRVFVGWLRGERGHCAMVAIPTLAEEDAKRPSRERESLVGERTRIGNRMKATLARLGIRGFKPHLRKAPERLAALLTPEGCPIPANTIEELRRDMERLAVVREQIDEIESARLECIEQASADGPNAMVRLLVRIRGVGVETADMLVHEVLSRNLRDRRAVGRYAGLTGSPDESGSKRREKGLAKAGNARVRRGMIQLAWRFLGFQKDSALARWYRSRTEGPKGARKTTMIVAVARKLLIALWRLVTAGIVPEGVVLRPVG

SEQ ID NO: 477749 - protein, 400 aa, unidentified
MKVSGLDVHKDSIFCAIYNGKKVEEVKEYPTFTHSIKEMGLYLQKEGVKKIAMESTGIYWIPVWNILEEMGFILTLVNPYIIKQIPGRKSDVKDAQWIATLLHKGLLRGSLVPDKTIRQLRSYSRKYVRLQSDITRVFQEMERILEMCNIRITSLVSNNNSVSVKNIIEQIIQGNSSPEELACYVHGRILKAKGELVQLSLEGFIQEHHRFSLELAYEQYHLFQKQLLLVESKMEEICNAHYQEQMELLESIPGIKKQAAMQIIAETGADMTAFENSGKLTGWAGLRPKNDQSAGKMKSTSVTKGNKYLRRIMVQSAWAASRTKGSFYKSKFEQLCIRKSRKKALIAIARKLLTVTWHVLSEKKGYNKNILPTYNPEKIKHKIIYHQRELLKLESLGFSL

SEQ ID NO: 477750 - protein, 320 aa, unidentified
MKSPSISTSQRRFLALDLHKHYLVVGGVNRQQEVVLNPRRISLQKWPAWAKTNLLSTDTVVLEATTNAWEIYDQVAPLVDRTIVAHPPKVKWIAEARVKTDRHDVLRLAHLLAADLIPEVWVPPVEVRELRSLMAHRRRLVQMSTRARNHLHSLLHRHNLKPPPGKIFTQKHREWWHKLDISPTQQMRFRHDLATIDHVDELLAEIEKELYRISTSDPWADQVPFLLQLPGFGLIVTLTVLAAIGDISRFSRPKKLVGYAGLGASIHSSGDKHRTGRITKTGRKELRWILVESCSSRKRRSVRENVSEHTLRDTITVLNS

SEQ ID NO: 477751 - protein, 375 aa, unidentified
MSDHSEAFVAFDSSKLRNAVAIADSGRMGEIRFLGEIENSTTATAKLVRKLAGKYERLTFCYEAGPTGYELYRQIKSLGHECIVVAPSLIPKKPGDRVKTNRRDAVNLAKLLRAGELTAVWVPDRHHEAMRDLTRARETAVDDLRSKRQQISAFLLRKGLHYCAGKKTWSQAHLNWLMSQKFEYPEHRLVFEEMMMAMRQAQERLERLEQAIRAAVADWSLADLVTALMAMRGIDLISAATFLAEIGDLSRFQSPCELMAYLGLVPSEDSTGDSVKRGPITKAGNRRARRMLVECAWSYQHPPRVGKDKQEKVAAAPPAVREIAWKAQSRLNRRYRALIRRGKLKTVAITAVAREFAGFIWAVAREATAARAAAK

SEQ ID NO: 477752 - protein, 367 aa, unidentified
MKKVSTAVTKQSRNISQQKLTIGLDLGDRNSWYCVLDEAGRIQLEQRVRTTAKGLQEVFGAMPRSRIALEIGTHSPWISRLLSELGHEVIVANARKVRLIGESRKKDDRLDAQTLARLARIDPELLYPVKHRSAQAQADLMMIRARAGLVRARTALVNTARGLAKSYGERLRGCNVRNMNPEKAEGLSPELQAALEPLLACMESVSEQIRQYNERIEKLAQDSYPQVALLKQVKGVGTLIAVTFLLTLEDPHRFRKSRDVGCYLGLQPGRRNSGQSEPQMHISKEGDPYLRTLLVQGAQHILGPFGVDCDLRRWGLKVAERGGRSGKKRAIVATARKLAVLLHHLWVSGEVYEPLHNSRRTTVAAAA

SEQ ID NO: 477753 - protein, 345 aa, unidentified
MEYFAGLDVSVKETSVCIVDDTGRIVRELKVASEPDALLAVLTNPTYHFKRVGLEAGPLSQWLFSVLAEAGLPAICVETRHMRAALKAQINKTDRNDARGIAQMMRVGLYRPVHVKTLRSQKLRMLLTHRKLLQSKAIAIENDLRATLRNFGLKVGVVGTVRFEARIKELVENLPDLVMLVEPLLIVRRTLREQIDVLHRRLLAIVRDDEVCRRLMTVPGVGPVVALTYRATVDVPARFRNSKAVGAVFGLTPSKYQSGEIDRTGGISRCGDEMMRAMLYEAAHIMLVRTTKWSWLKAWAMQIARRRGLKKAVVALARRLAVIMHRIWVDGTEFRWTREQAAAAA

SEQ ID NO: 477754 - protein, 365 aa, unidentified
MQKISTMRTSGRKIFKGQLTIGLDLGDRSSSYCVLDEAGEIILEQKVPTTAEAVEQTFKRMPRSRIAMETGTHSPWVSRVLTELGHEVIVAHAQKVRLIVKSQRKDDRMDARALARLARIDPELLSPVQHRSAQAQLHLTEIRARAGLVSARTALINAARGLVKSYGERLQKCGAFQVSREIGSGLSAGLREALEPLLREVESLNERIKEYDRRIEKMAGEKYPETALLKQVKGVGDLIATTYVLTIEDPHRFRKSRDAGCFVGLQPGRRNSGESEPQMHISKEGDEYLRKLLVQGAHYILGPFGEDSDLRRWGQKLAARGGKNGKKRAVVAVARKLAVLLHRLWVSGEGYEPLRNSQKAITVAA

SEQ ID NO: 477755 - protein, 415 aa, unidentified
MKNRNSKTKSDRAAKPGKARGPIQRDAKEVMAELVAKLSETLASRPALASAGGKREAGVAGPNRDRLTAGVDLGDQWSNYCILGLEGETLAEGQLRTTQQDFAEFFRSMAAARVVMEVGTHSAWAREVVAGCGHEVLVANPRQMDGPKRRRRKNDRIDAHKLARLGRVDPQSLFAIEHRSPEVRQDLVALRARDALVAVRTELINATRGLVKTMGGRLPKCSSDSFPHKVEEALPAEVREVLLPLVRLVETLSGCIAGYDQKIEKLATEKYADTELLRQVKGVGPLTSLAYVLTLEDPKRFPKSRDVGPYLGLVPRQEDSGECQPQLRITKAGDVMLRRLLVGSAHYILGPFGPDTDLRRYGLRLCERGGKNAKKRAAVAVARKLAVLLHRLWVSGEVYEPLRQSLPARTEQEAA

SEQ ID NO: 477756 - protein, 355 aa, unidentified
MVVIGADSHKRSHTVVAVDEVGRRLGERTVKATSDGHLELLRWSASWPQVTFALEDCRHLTRRLEADLLAAGQPVVRVPTRLMAATRRGARHPGKSDPIDAEAVALAALRHPDLPVAALDGPTREVKLLVDYRRDLVRQRTRVANRLRWHLHELDPALQVPSRGLRRYKVIDELAARLADLEGTVARLARQLLARCRELTAEINALEAELRPLVRRLAPTLLVVPGCGVLGAAMILGETAGVGRFRSKDAYARFTGTAPIPVWSGERRGRVRLNRGGNRTVNTALHMIAVTQVRGVGPGQAYVERLMGRGKTRTEAVRLLRRRLSDVVFRALRADEQARSTSTQTPYSAASARAA

SEQ ID NO: 477757 - protein, 340 aa, unidentified
MNKTTQFFIGIDVSKPYFDATLLSVINHVKQDMITERFDNNNVGLKSFAKWLKIHQVTFDENTLLVIENTGIYHRALWLFCSKHNLAIHIGNAMHIKNSFGIARGKNDKIDSQRLCNYARKEWEDLKAMPALNPVLMQLKDLMSARTKLLSQLKSTQTYIKELKNVRINAIQKTIETAHQKAIEGMSASIKHLEQEIKKIIIQNKDLKTNYDLLITVPSIGHLTAVYMICCTNNFVGKISGKQLACYAGVVPFGKESGISVKRKNRVHHMANKELKKMLHLCALTAIQHYPEFRQYYERKKAEGKHSMSVLNAIRNKIVLRAVAVINNQKPYVDNFEIAA

SEQ ID NO: 477758 - protein, 340 aa, unidentified
MPKYIRIGVDIAKNSFQVHALESEDCSATKRKLSRSGIVKFLAEVEPCAIGMEACGSAHYWARRFRAMGHEVKLTPPIYVKPYVKRGKNDAADAAAICEAMSRPNMRFVAVKSENQQATLMAHKTRELLIKQRTMSVNALRGHLAEFGVIAAKGISHVEELVERAAAADLPAMVQATLGVLLAQLRSLDAATDELERAIVANHRRDPVSRLAASVPGVGALAASAILASAPDPQAFKSGRDFAAWLGATPKQNSTGGKEKFGSITKQGNRYIRRLLVLGAISVLRAAPKRKGALCDWLASLRARKPAKVVAVALANKLARIVWAIITTGEAFRTSIYAKA

SEQ ID NO: 477759 - protein, 391 aa, unidentified
MICVGIDVAKCKHDCFIISSEGEVLADVFTIANNADGFDTLFETIQHCARPNEKIKVGLEATGHYSYNILGFLLGKGLHTFVINPLHTNLYRKSLTLRKTKTDRIDARTIATMLMSDVELKSYTDISYHNEELKSLTRYRFDKVRERAKLKTSVSRLVCILFPELEELVSSLHLNSVYAMLSEFPGAKQIANAHLTHLKTLLEKSSNGHYGREKAIEIREAAKHSVGTVMPAKSLELRHTIRLIEELSAEISEIEKAIEGIMDELKCPIATIPGIGIQTAAVIMAEVGDFSAFSSPDKILAYAGMSPSTYQSGQLTSSHAHMEKRGSKYLRTALFSAAERVCQWEPGFKAYLAKKRAEGKHYYVAISHAVKKLVRMIYAMMKRGQHYLRAA

SEQ ID NO: 477760 - protein, 337 aa, unidentified
MKVKVIKQNVGIDVSKDTIDVSFSNLTADFRTVVVSTRKFSNTAKGFKQLQDWVNGKKDTDMSVNFTMEATGVYYEGLAYFLYVQEKYLVRVVLPNKVYKYAQSFGLKSKTDRIDARILAQMGLERELRLWQPVSSSLLGLRQLTRERDALVRTRTNASNQLHAYSHQGKPNKAVIARSKEHISFLDRQIKQIEKEIKIFVNKDKELKTKMEYLLSIPGVGMVTATTIVAETNGFAAIESIKQLTSYAGLDVKIAESGKWKGKSTISKRGNSHIRKAVYMPSLSIIGKDKKTKLFYERLKERKGVGMVAVVAVGRKLLALMYTLWKKEEMYKNASET

SEQ ID NO: 477761 - protein, 343 aa, unidentified
MKLSRVGVDLAKNVYQLHGVDRHGKTMLKRRLKRHQWFKVLLDKTEPGCVIGMEACASAHHWARQLQSRGYTVKLMPPQFVKPYVKSNKNDARDAEAICEAMSRPNMRFVTVKSVAQQDIQATHRIRAELITQRTAKANQVRGLVAEYGLVAPKRLSSLRAAIPCWLEDAENGLTGDFRTLLHGVWEDLLVLDERVGGMDKTIKQLADNNEDCVRLQQLRGVGPMIATAMVASMGDARQYHKSRQMAAAIGITPKQHSSGDRDRLLGISKRGDVYLRTLMIHGARSVVANAKHKDDRLSRWVTAIATKRHPNVAAVALANKTARMAWAMLRNETDYDPDFAIR

SEQ ID NO: 477762 - protein, 313 aa, unidentified
MIIALRYVGIDVSKKHLDIFDEADGVPRRIANATQAITQQVARWQCDALVVFEATGIYDLALREALRQAGIQFARINPARARDFARASGLLAKTDPIDARMLAAFARAMQPAPEQVADPARGALARLAKRRDQLVLMRAQEKNRRSEADDRAMAERIGRLIEVLDSEIAGIEADISALIKAEAQIADDAKLMRSLPGVGPVACMQLIAQMPELGRVGPKQLAALAGLAPFNVDSGTFRGKRKIAGGRKRVRDALYMAALNAVRRADPFKAFYARLRQAGKPAKLALIAVARKLLTVLNAMMRDRKPYLQTKPT

SEQ ID NO: 477763 - protein, 312 aa, unidentified
MAQMVVTAGIDVSKLRLDVETYPTRQQISVERDAAGLATLIAWLSEHSVLRVGLEASGGYERLAIDTLQDAGFEVVLLNPLRVRRFAQAKGRLAKNDRVDARIIALFTAVMVDQLPTPRRRDLDPLVELLTVRRQLQHWSTDCSNQLEHLRDAGLRKILRLQQDKFDREVAKLDQKLAALLNDHDDWQALARRLRTMPGVGPVVAPTLIALLPELGQLSRRMIASLVGLAPYDDDSGKRRGERHIKGGRAAVREALYMAAVVAMKHNPPIAAFAKRLAGKKPKVIITACMRKVLVMLNAMLRDGTDWRIVTA

SEQ ID NO: 477764 - protein, 426 aa, unidentified
MRIVHQESAGIDIGAKQFFVSTKDKVVKSFYTFTSDIILLGNYLKSKKVESVAMEATGVYWYIIYAILEEKFGIDVWLVDGRQTKQVPGRKTDVKDCQWIQELHSYGLLNRCHVTTGDLKSLRTYQRLREDHIETSSMHINHMQKALTIMNIRLKEVLSQIHGKSGLSMIEAMLDGERSRKKLLSLCHISVKKNKSELILKALEGHYTEEGLFTLKQAYQGYEFYQKRLEECDKKISEILNKINENDPLSTGKRKAIRHHKPDVDNLGGHLLKIFGNHDATVLSGVTDYSWLRLLGEIGVDLGKWKTEKHFTSWLGLSPGQHHSGKMKRNKKKGRPKAGQIFRMIAFGLLNSKDVALGAFGRKLRAKKGAALAIKAVARKLAAQYWRLMVKGRDYVERGVKEYEKQVYRSKVRALERLNKELNINY

SEQ ID NO: 477765 - protein, 345 aa, unidentified
MKLLKQVLGIDVSQKELVVTLGRLSDDLTIDLYAYNVFKNTESGFLKLSQWVEKLTEKDIKVRYVMEATGVYHQKFAYYLDERQADLSIVLPNKISNYMRTLEIKTITDKTCSEGIARFGLERKLDNWKKPKEIYRILKQLTRERRQITDERTIAKNQLHAEQSEAIPHISSIERLKKRIQFLNTLEKEIKDEITNNVREHTDLMQDITNICTIPGVSILTAATVIGETNGFELIRSKKQLTSYAGLDVREKLSGTSVKGKPAISKKGNRYLRSALHLPALSTIKWDDNFRDQYARIVTKHEIKMKGCVAVQRKLLELIYIIYKNKTVYDKDYESKKIACQHKMH

SEQ ID NO: 477766 - protein, 329 aa, unidentified
MSVNQQGREAVAVLRPCAGVDVSKAHLDAAWAGRTERVSNDAGGWDVLAGKFKADGVDVVVLEATGGYENAAACALQAAGLAVVVLNPRQARDFAKALGELAKTDRIDAQVLEQFAGVIARHPQRARYIRELPQAQRSHLAALVMRRRQLLTMRTEESNRLALAHRATQQSLRAMLRAIDKQLAAVDHDIDQHMQGHFKEVAGLLESAPGIGDVSTSTLVALLGELGQLPRRPIAKLVGVAPLARDSGTHRGTRVVWGGRSEVRTVLYMATLTAIRHNPAIGQFHARLIAKGKPRKVAIVACMRKLLTILNAMVRDGTTWDGSRHLKSA

SEQ ID NO: 477767 - protein, 294 aa, unidentified
MDTKHDTSLSFKDQDFFIGIDVHKNQWTLSIISMNMLLKKYLSIDPQPSALLKYMQKHYPDGNYYATYEAGFSGFWAARKLNGLGVNCMVVHPADIPSSQKERLNKNDRVDSRKLARSLNNGDLIPIYIPKKVAEEYRYLNRHRLRMVKDQTRLKNRIKGVLHQFGVTIPLHYQERRWSGAFFKWLLSIKFDTEYAQFAYEDLIDQLIQTRARITKHLRKMRVMTKEQKPFSIIIPLLLSIPGIGFITAMTLATEIIDMSRFKTLEKLAAYVGLVPSIQSTDEKEINLRYFTTS

SEQ ID NO: 477768 - protein, 345 aa, unidentified
MEGYAGPQFVGIDLHRRRGVIVRMTEAGEVLETTRIVNDAGRLVSVLRRCGEAPEVVVEATCGWYWAADVIAGAGARLHVAHPLGVKAFEYRRVKNDERDAADLADLLRMGRLPEAWIAPPVTRELRELVRHRAKLVALRSHCRAEIHAVLATCGVQVPMTDLFGVAGIDLLNRVGLPGVYRGRIDSLRRLLELLEFEIDVFTGIVRARLSADPGYVALQTIPGIGPVLAAVFVAEIADVHRFAGPDKLACWCGLTPKHHESDTHVHRGAITKQGSRLVRWAAVESVQVLPATSVIGAFRDRIAAKRGRNIGAVAAARKQIGYVYYALRDHHVRALHATSKARAA

SEQ ID NO: 477769 - protein, 325 aa, unidentified
MSAFVGIDVSKATLDVVVLVEQKQSYCQVPNTTPGITDLLKWLDTFEQVETVCLEATGRYGSRLAKMLYADGFRVSVLNPLRIKSFAQSLLSRNKTDKYDAFVIALYAQRMAPDPWTPPSNTLERLKERTRLLHSLKQTQQAYRNRLQSGLEDEITLGVIRDLIADLDERITALRKSLISLIKQDNELNQQRQLLTSIPGVGDLTAAVFLAEVGEIHHFPSRRALASYVGITPRLHDSGTSVHRHSRISKQGNKRLRTALYFPAISAKKWNPICHEFSQRLEKTGLAKKAIIIAVMKKLLHQMYGVLKSQQPFDPHFQQKPQIAA

SEQ ID NO: 477770 - protein, 342 aa, unidentified
MSIVYVGLDLGSSNFQQVALNHDGVSRVNRDFRTSESNLVKAFSDLKGEIHVHLEAGELAPWAASIIAPLVTRVVCSHPQSNAWIAKDADKCDRVDAYKLAELLRLNRFKEVHYAPDQPRRNFKQLVQHYDELTAQQARMKTKLKARLRMQGVIVSGERVFSSRGRKPVLAEVKSPDLRTAITQLYTVLDQSVAAQAEARLLMLRAAQAFPEIRIFRTAPGIGPIGACRFSAYIHTPNRFSSTRKLWKYCRLSVSHRSSNGKPLRRPRLDRSGCGRLKDVSRKAFDVAMRSRQDNGFKRAYQRALETTHDATHARLTVQRKIISTLRAMWLNQTPYSDELMP

SEQ ID NO: 477771 - protein, 341 aa, unidentified
MQETLYYMGLDIHKKTIAFCVKDAAGEVIREGTIDSRREAILGFIKELDFAWIGAMEATMFTGFVYDLFDEQGHILQVADPYSIKAIVAAKKKSDRLDARMIADLLRCNLLPETYMPPREIRELRQMLRFRNLLVEQAVRFKNKTSGLLMEAGAEYNKSKLHGKRYFKELLEHLDYVPESVLDLLKMSRSSFEMFDEMQKRLVKGLKEHPHIRERVERLRTIPGVGEIMALTWVLEISDPHRFRKISKAVSYCGLCSAYKESAGKVRRGPLSKQRNANLQTMLVEVANLIPRHNAQLKAVYEEELADGNHGSAIIAVARKLVAYMLAVDKNGKDFEIREVA

SEQ ID NO: 477772 - protein, 463 aa, unidentified
MSKKRQSKNRGQANKPKLDWKALEVVHPHAAGIDIGGGEHWVAISPERDEEPVRRFDCFTADVEQMADWLVDRGIRSVAMQSTGVYWMPVFEILQQHGLQVYLVNARHTKNLPGRKSDIAECQWLLKLHTFGLLNNSFQPSDDIRTARTLWRHRGGLVAQASSAIQRMQKALIEMNVQLSHVLSDLSGVSGMAIVQAILDGEREPRKLAALADRQVKASKAVIAKSLEGNWRPELVFVLRQEVEMYRICQDKIAACDRQLQQHLQAMEPKVDLEAQPLGPRPKGKRARGNAPKFDLRTELYRITGVDWTQVDGIDVQVAQSVIAEVGVDLNAFPSEKHFANWLGLCPTNETSGGKVLNRRTPKVVNRAKVAFRQAASTLIRSQSYLGAQYRRLRTRLGAPKAITAMARKLSCLFYRLLTKGQPYVDKGVEYYEAKHREQQIRSVIKRAHQLGLQVAQPVSKSA

SEQ ID NO: 477773 - protein, 323 aa, unidentified
MSQISFKITMGVDIAKKKFDVASLIEGKYKHKTFTNDKLGFIAFVAWLLPLCGDVNPLICMEATGAYSLPLADFLAKQGHSVSLVNPAKIHAFGKSELSRAKTDKADAKLIARYALMMQPPLWIPAPINIRELQSLIRRVEHLLEMIQMERNRQETAEDNVVGSINTVLATLEAELKATRKAIHDHINADPDLKQRGDLLDSIPGIGDAAIAYLLIALSAHHNFNHAKQVVAFAGLAPAPRESGQWRGNTHIAKNGDSALRKALYMPALVAWRYNPLIRVFCERLKANGKNGKAVACAAMRKLIHIAFGVLKSGKPFDPNYAV

SEQ ID NO: 477774 - protein, 401 aa, unidentified
MAAVRDNAWVGIDVGKTHHWVCAVDADGKTLLSVKVANDEAGILSLIAAVTALTQQLTWAVDIIGAPSALLLALLAQAGQPVRYASGRVVAAMSAAYVGEGKTDAKDARVIAETARLRRDLAIIDTDTDLVRNLAVLTGHRADLIADRVRMINRLRDLMTSVFPSLERAFDYSSHKGALVLLTGYASPDRIRRIGQTRLAAWLRTRHVRGFADVAARAIAAAKAQSVVLPGQDLTASIIAELAGNVLRLDERLKSLDDQIEELFQQHPQAAIIQSMPGFGPFLGASLLVGAGDLRAFPNAGHLAAAAGLVPVPNDSGRRTGNLHRPLRYSRPLRHVCYLSAQTSMMRAGPNRDYYLKKRAHGRTHSQAVIALARRRIDVLWALLRENRTWTATPPQPAQAA

SEQ ID NO: 477775 - protein, 416 aa, unidentified
MDVVHERCAGLDVHKKTVVACVLRSAPKGVIDKEVRTFGTMTADLEALRDWLAECGCTHVAMEATGVYWKPVYNILEQSEPLTLLVINAQHLKTVPGRKTDVKDAEWIATLLRHGLLRASFIPDRHQRELRELVRYRTALIHQRAAEVNRLQKTLEGANIKLAAVLSDVTGVSGQRILEALLEGESDPEQLAELAHVRVLKHKREALEQAVVGRLSDVLRFVVRQQLQHLHDLEAQIAACDAKVEDLLRPFDADLERLRTITGVGPRTAEIILVEVGMAIERFPTARHVAAWAGMCPGNRQSGGKRQQARTRKGSPWLRAALAEAAWAASKSKDAYLPAQFRRLSARRGKKRAIVAGGHSILVTCYYLLTRGGTYQDLGETYFDERDRQNVIRRNVRRLQGLGFTVHLEPADSKAA

SEQ ID NO: 477776 - protein, 438 aa, unidentified
MLLDMNVLSKIYPNSAGIDIGSEKVYVSVENQSVRNFRTFTSCYKELSAYLKECSITHVAMEATGVYWITLYDVLEADGFEVTLVNPADSKNLPGRKTDVQDCQWIQQLFSYGLLRKSFVPEDIVRKLRVYTRMREDKLQMASSHVQHMQKALTLMNIRLPEVLSQTHGASGMAMIQAILEGERNPEKLLACCTTSLIKNKGKDILLALEGNYKEEYLFELQQAYDGYMFYIDQVSKCDIETGKVLQDYNNSSNKDYKDGHPVKPIRHNKPNIDQLHQLLLGIHGANPTTLPGLTDYSLMRLTAELGNNIKQWPSIKNFVSWLGLAPGKHQSGKMNKRSKKKPVTRAGQIFKQAAQSILLSKQPGLGAFARRLKAKKGSGIAIKATARKLAELYYRIFDKGMDYVEQGVQRYQEKLKEQQIIFLQKKANELNMQLIEN

SEQ ID NO: 477777 - protein, 474 aa, unidentified
MVMHVDASDKDVLLMSLKGLVSQNNQEDVVVQGSGLSRGDKRRNGQLARLRELVPVDNAILGIDLADTKQAVVVTDHDSRVLARGRVKAKAWELGPVLDWARQVAHARGFTDVTVGCEPTGHRWRVLDQLAAQQNMALVCVQPLLVGQARQREDYTSDKHDDKDAVLIARLVSQLNCYAPERAEETWAQLRQLGARREELITQATRCVQQLRDLLECAWPAVLDAAASPFDSTNWCAALAVVLERCDGDPRRLARRGRDRFSGAVRRELPRWGGQRLWRPIVGAVFSALSDPAGVLAQRRGALQRARWVLDDWRLVKIRRAEVETHMVTLLDELGLTELVTSIPGVSAVGAAAILAETGDPTRFDSPRAMVKHAGLCPRENTSGTYTGRSRISGRGRPRLRAAAWRAVWGALPTNPVMATRYRHLTTRKSNPLKDGQARAALAAALLRWIHVIVTQHVTWDAALAGAGALAAAA

SEQ ID NO: 477778 - protein, 310 aa, unidentified
MDAIYVGIDVSKDHLDVHVCPSGEAFAVSRDGKGLEELIDRLRIVVPRLIAIEATGGFETIAAAAIAGASLPLAVVNPAQVRHFAQALGKRAKTDPIDAEVIARFAQAVKPEPRPVPDEEARLLAELVARRRQIIEMIVAERQREKRVENVRVRKSLMRTIRTLEKELPEVDGDIDTLVRGSPAWREKEDLLVTFPGVKNTLARTLLAEVPELGRLTRREIASLAGLAPYTRRSGRWIGKSTIAGGRAPVRAALFMAALSAIRCNPVLKSFYQRLLSAGKPKMVALIAVARKTLTILNAMLRDQKQWQPA

SEQ ID NO: 477779 - protein, 344 aa, unidentified
MNQYVGLDVSLEETKIHVLDEAGGRVWRGKCASHPDELETAICKHAPGAVRIGLETGPLTTWLWTELSKRRLPMVCLDARAAQRALDMRANKTDANDADGLAHLVRAGWYKEVRVKSRDAMLSKAVSAARRQLLDISTNLSNQVRGLMKTFGLVVPKGKGRIFEANVRRLLDEEHALAAVVLPLLEAWRAIRNRAAELDRLLLRKVRDDANCRRLMTAPGIGAVVAASYVAAIESPANFKHARDMGAWVGLTPRRFQSGEMDYDGHISRRGDERLRALLYEAATVILTRVRSASALRSWALALKKRLGFKRAAVALARKLAVVLHVMWKTRKNFDPNHRLAARA

SEQ ID NO: 477780 - protein, 345 aa, unidentified
MEHYVGIDVSLESSSLCVVDTTGRIIREAKVASEPEALIDWFSHLGLTLTRIGLEAGPLSQWLYAGMQKAGLAVELLETRHVRAAFKAMPVKTDRKDARGIAQLMRLGWFRPVHCKSLPAQEVRALLTARKLLQAKNHDVEMSLRGVLRGFGLKVGPTTPRTFSSRVRELVTGHTTLSTIAEAMLAARDMLFSEWQKLEKRLRSLARDDDRVRRLMTTPGVGTIIALTYVAAIDDPGRFKSSKRVGAHFGLTPRKYQSGEIDVTGRISKIGDANVRTALYEAANVILTRPVKASTLKSWGMRLAARAGMRKAKVALARKLAVVLHRMLADKTSFLADKAAAATTH

SEQ ID NO: 477781 - protein, 408 aa, unidentified
MNPLFVGIDVSSKNNVAYLMKPDGSKHSSFSVQNNLGGAKLLSERIVSALGSMQLERVVIGLEATSIYGDSLVYALREDGRLGRFQRKIHVLNPKQVRKFKEAYSDLPKNDWVDAFVIADHLRFGRINREVYMDDYRYKALQTLTRARFDVIQNLTREKQRFANYLFLKCSGMAQDKDIQNTSATTIALMEHFETVDDLANADLEELTAFITETGRGKFADPDATAKAVRAAAKGSYRLPKTVNDTVNQAMAVSIASMRALKGQVKVLDKAIEQQFEIIPNTLTSIPGIGKVYSAGIIAEIGDIHRFDSQASVAKYAGLVRNRSQSGDFEAEHSRMIKSGNRYLRYYLLEAANSVRRCDSEFRRYYDLKFKEVNKYQHKRALALTARKLVRLVFRLLKDNRLYIPPEG

SEQ ID NO: 477782 - protein, 341 aa, unidentified
MSIITIGIDLAKNVLAVHGVDENGKAALLKPKVARDDLLPLIAQLPPCLIGMEACSGAHHWARLFRQHGHAVKLMAPKFVTPYRMSGRRGKNDAADAAAICEAVTRATMRFVPIKEEHRQIILCLHRTRQGFVEERTATYNRLRGLIAEFGIVLPQKVAGLRREIGAHLEDLPGYANQCIGDLLAHADQLDARIAEYDRAIAHAARDDARSKRLMQRPGIGPVTASALLASIGCGHDFKNGRQVAAWIGLTPGQYSSGGKARLGRITKAGDPYLRSLLVMGARAILAGLGDKQDGFSRWARSLQERRGYWRAVVAIAAKNARLAWAVLKYGEDFRLNPGAA

SEQ ID NO: 477783 - protein, 422 aa, unidentified
MRSVALDVHLDFCEVAIVEDGELRSAGRIETKPEQIELFASSLAPDDRVALEVTGNAWEIARIIEPHVARVLVVSPSDTGIRQARAKTDRLDARTLARLLAAGSLDGVWVPDRWTWMMRRRLSRRSQLVWARSRAKNQVHAVLMRQLVGRPPFSDVFGVKGRQWLSELKLAPEESETVGAAMRQIEFFDSEISEVERLIAQAALESGEIKRLMSVPGVNVIVAASFMAAIGDIDRFESPRKLAGYLGLDPRVRQSGVSPATHGHISKRGSTRARHALVEACWTTVRQPGPLHAFYQRIRARRGHSVAIVAAARKLACLFWCLLTREEDYAYQQPSLTRKKLRRLEITAGAERYTPEAAGVWSANDAVRQAERELARQAEVAYARTVSDWHATQTVKVGASVTPGRASKKPLKGEAARQTTSP

SEQ ID NO: 477784 - protein, 342 aa, unidentified
MYYIGLDVHKKTISYCVKDASGRVCQEGKVGATRWELDIWIKTLPQPWSVAMEATIFTGWIYDHLKTHAAEVKVAHPLMLRAIAAAKKKNDTIDAGKIADCLRCDFLPECHMAATEIRERRRTLRYRHLLVRQMVQMKNRVSGLLMETGVSHNKQRLHKVGYFPELLANADAVSASIRPLLQLSRESITRLQRTEGAIIRSLQRDPLLAERVRRLQTIPAVGKVTALTWALEMGDIARFRSIRQAISYCGLCGDEKRSAEKVMRTPLSKQRNKHIQRVLIEAAKLAPRRNPDLALIYENARQKVNANCATLAVARKLVAYLMAVDREQRDFEPVRMFAGTAA

SEQ ID NO: 477785 - protein, 343 aa, unidentified
MQTITTIGLDIAKSVFQVHGVDGAGQVVIRRQLKRRSVLTFFQKLAPCLVGIEACASAHHWSRKLQALGHTVRLMPPAYVKPYVKRQKNDATDAEAICEAVTRTNMRFVPTKTPDQQSGLVLHRTRHLFIRQQTAVINAMRGHLAEFGIVAPVGRHGVEELLNVVADPNDKRVPEIARACLSAFGAQLCRIKEQILEFDRLIKAWHRSNEMSMRLDEAPGVGPVLATAVVATVADPKSFRSGRNFSAWIGIVPKQHSSGGKNRLGNISKQGDRYLRGLFVTGALAVIRYAKIHGTKHRPWLTALLARRPTKVAAIALANKIARMVWAMMVKGERYKEPVALAA

SEQ ID NO: 477786 - protein, 360 aa, unidentified
MQTKSKSTTISFKGQNIYVGIDVHLKSWKVTIIVNDMEHKTFSQDSDAKILSNYLRKNFPEAEYFSAYEAGFCGFSVHRELEGYGIRNIVVNPADIPTTDKEKRQKEDKRDSRKIAKSLKNGELTAIYVPTKEMEELRALVRYRKALVKEITRHKTRIKSFLFTNGIKIPPELEGASSYWSGRFTNWLKEIRFLTRHNQLVLDGTLETVTFLRQKLLEINRYFLALTKEGEYALKLKMLKSIPGIGLVSALTILTETEDVLRFKNLDRLCSYVGLVPTTNSSGENEKIGRITGRSNRFLREILIESSWAAVRKDPSLMYSYGLLCQRMKPNEAIVRIAKKLLNRIRYVMKNETEYVLSVI

SEQ ID NO: 477787 - protein, 406 aa, unidentified
MNAVGIDVSKGKSTVAILQPFGVVVAAPFEVSHTDSELDQLAKNIKKLSGETRVVMEATGVYYEPVARRLHEHGIFVSVVNPMLISDYGDNTLRKAKTDKKDAIKIASYALNSWLDLTEYKPEEDIRRSLKTLNRQVKKVIKVTNMLKNNLISLTDTAFPGINKLFSSPARASDGHLKWVDFVAKFPHRNTVARLSLNAFKKKYKSWCEKNKYHYQDSKAEEVHAHARKCVAGVSAEETFCLMIAKAAEFVNAACENENALKKEMNRLSSTLPEYEVVMGMYGVGESTGPQLMAEIGDTRRFHNRRAITAFFGYDTEPDDSGQHISKSRPITKKGSSSLRRTLFIIIRAISTQKPIDNPVYVFLDRKRSEGKHYYSYMTAAAAKFLRIYYAKVNEVLNEKGTSMCT

SEQ ID NO: 477788 - protein, 466 aa, unidentified
MKTLLAQLGTNLPQRYYLGLDVGYKEHVTSVISLQTFVRGDDRWKRSRCLHFPTTQAGLKKLQHYLNRFSPDPADFLGICEPTGGFYGAATYQYLLDQGYPMQLVENATTRHMREKIFGQLPKTDEMDARVMARIAYLHEAVGEEFGLRPLELPRSGDADLLALCRDHQKLTSLICRGRNQFAQLMAATFPELKTFFTSSVSTMVPVSLIAAYPTPALLAEAPAKEVHTVLWKARGYHHARRVQELQELARYSSGLLPDPGRAWRLKWLTEFLLSNFRYQAELEKRIKELVTQREDYALIATVPYTGPITLGVILAVTGEVQRFSNYRQYVAYTGYFAGLETSQTIDRTRMSKKGNRNMKRALFLIAAPLVWFDQGNNPYKALYERKVAAGRAWYKAMPFVCAALARHIYHCLKFKDPYDVEKAFKGSRLVPVSEQALLNLRDDLDERFEVMDAHLCQIEQKTAPT

SEQ ID NO: 477789 - protein, 320 aa, unidentified
MLSYCGIDVSKDRLDVAVLPDGECFSVRNDAAGWAELVERLCSFSIAAIGIEASGGYERGVMRHLLAAGMPVRQVNPFRLRQFAKASGVLAKNDPIDARMIASFVAIMPTRPAQRHAPALERLTEILAIRRQLSAEKVAAENASRLLENAMLRRLSRRRIARLTADIDSLDKYLLEIVVSDAALGHRYELLTSMPGVGPLLACTLIALLPELGTMSRKQVAALVGVAPYAFESGTLKGKRCIWGGRAPVRHMLYMAAMSASNWNPVLRAFHARLKGAGKLPKVAIVAVMRKMIVALNAMVRDDVAWADRYRGRHPVPSAR

SEQ ID NO: 477790 - protein, 361 aa, unidentified
MASMRWVGLDVHARETCAAVFDQESGEVRSQRIRGGSQEVLAHLAAIEGPWRAVYEAGPTGYGLARRAAGRGMQVAVCAPGLIPRRPSERIKTDPRDALRLARLLAAGELALVRVPEPAEEQLRDLVRAREDVRVDLMRARHRLSKFLLRREIAYPGPGRAWTRRHRDWLVGLRLGDPASEIAFADMLHAIDGLLARRDRLEVALAELVPASPWAAQVGRLRCLRGIDTLSAVGLCAEVGDFARFAHPRHLSSYLGLVPTEDSSGERRRLGSITKAGSRHARRLLVEAAWHYRRPPRTSAALAARQRGQDAAAVDLAWRAQRRLHGRWRRLETERGKRSTLTAVAVARELGTFCWELGRMG

SEQ ID NO: 477791 - protein, 385 aa, unidentified
MAQLNDLSRSLTSLEPDSTIIAVIEMSQSSWLVAGIVPGIERHPLKKIEPSEEELICLLMRWRAEATKHGRTITRIAVAFEAGRDGFWLARWLRARDIEIYVIHPTSVAVSREHRRAKTDRLDTGLLKRVFIGWLRGEPDHCHMAAIPTLAEEDAKRPNRERERLVRERTRLVNRMKSCLVRFGVRNFKPTLRKAPERLETLQTPEGVPLPPNTLLELRRDMARLRFVMDQIKQVEEARAQRLEQAPQEKSHAMVRLLARVIGVGIETADMLVHEVLARNLRDRRAVARYAGLTGAPDESGSKRREKGLAKAGNARVRRGMIQLAWRFLIFQKDSALARWYQTRTASVGKKRKTMIVALARKLLIALWRLVTTGEVPAGVVLRAA

SEQ ID NO: 477792 - protein, 372 aa, unidentified
MSDSNKTLFVGLDVHKDSIVVAVAEAGRGPARVVATVPFEWKALKKVLEKLGPKSAISCCYEAGPTGYGLARSLRAAGWACDVIAPSLVPKKPGERIKTDRRDAAKLAVNHRNGDLVAVVIPDEASEAIRDLERARDDAKKAERVARQQLSKFLLRQGRRYPGKTTWNDAHRAWIVSQQFAEPAQTHVLADGLATVESATLRVSQLTGRLRELAETWDRAPLVKALQALRGVEFVTAVTVVAEVGDFRRFRTAGDFMGYVGLIPTEQSTGETRRRGPITKTGNAHVRRLLVESAWHYRRQPRMSKALRERSVGVAPGVCAIAWKAQTRLHNRLKKLIGRGKHPAEAVTAVARELAGFIWAIGREETLLAAPK

SEQ ID NO: 477793 - protein, 356 aa, unidentified
MEYIAFDAHKRYTRASVIRPDGQRVREQRIAHERGALREFLERCDRGSPVAVETIGNWYWIVDEIEAAGCVPRLVHARKAKLMMGSINKTDKLDARGLNRLQQAGTRPTVWIPPGELRDQRDLPRTRMVRVRQRTRLKNGIHATLAKYALHDVEVSDLFGVQGRALVRQRLTLLPPHTAYATQQLLEQIEGLDGQVRGFEQRIQAVFTPTPAIQPRLTLPGVGLTLAGVIALEVGDVTRCATAEKLAGYAGTTPRVHASGGTTRVGPARPDVNRYRKWAFVEAANAICLTRGRTPRRHVSRLYERVARRQGHAKAIGAVARHVAEATYWMLSKGEAYREPKASGRVRPRGISAEAP

SEQ ID NO: 477794 - protein, 341 aa, unidentified
MNIITVGIDLAKNVFAVHGVNDSGKPVLVKPKVSRADLLPLIAQLPPCLIGMEACSGAHHWARLFRQHGHTVKLMAPKFVAPYRMTGKRGKNDAADAAAICEAVTRPNMLFVPVKEEHQQIILCLHRTRQGFVEERTASYNRLRGLIAEFGIVLPQKVTCLRREIGAHLEDLPGYANLCVGDLLAHTSELDAKIAEYDRAIAQAAKEDARSKRLMKLPGIGPVTASAMLASIGGGHDFDNGRQVAAWIGLVPGQYSSGGKARLGRITKAGDNYLRSLLVMGARAVLNSIGDKQDRFSRWARALQERRGYWRAVIAIAAKNARLAWAVLKYGEDFKLELGKE

SEQ ID NO: 477795 - protein, 403 aa, unidentified
MNSVGIDISKGRSTIAVMRPFGEVVISPFEVRHTGSELSKLAKQLKSLDGETRVVMEATGNYHASVAKLLHDAGLYVSVVNAKLVHDYGNNELRRVKTDRKDAVKLANYGLDRWLTLPRYIPEEDTRLLLKNCYRQYRQYSKVQTVLKNNLISLLDTVFPNANRLFSSPIRGDGSEKWVDFVAEFWHCRCVSEKSERAFTSKYLRWCRKHGYNFREAKAHTIYTEASGHIGVMPKSETTKLLVEQAVAQLRATSTALAALKHEMQSLASQLPEYPVVMDMFGVGPTLGPQLIAEIGDVRRFYSKKALVAYAGLDAPPNDSGDVTGRHKSMSKIGASSLRRTLFLVMSVYLQTAPLDEPVYQFMDKKRAEGKPYRVYMMASANKFLRIYYATVKAYLESLEHTA

SEQ ID NO: 477796 - protein, 479 aa, unidentified
MTPHKDYGLDPRPSAPTPLLPLSPLLSDALQVCHPHAAGIDIGEAEHWVAVPPGRDPQPVRRFGTFTADLDALADWLIECGVTTVAMESTGVYWIPLFELLETRGLEVLLIDPRQAKRAPGRPKTDRLDCKWLQRLHAYGLLAAAFRPAEQVCVLRSYLRHRQMLLTYGAHHIQHMHKALQQMNLKLSQVVSDLTSVTGMAILHAIIAGERDPLTLAKLRNPHCQHSEEEIAKALQGTWRAEHLFALQQAVELYHFYHQQLTVCDQHIQAHLGTFADKSDGQPLPPKPRRHKKVNEPRFDAHTPLSRLAGVDLTTIEGIEEGTALVILSEIGTDMSRWPSVKHFCSWLGLAPQHKISGGKVLARHVRPGAQRVTVALRLAARTVHHAHTALGAFYRRMRRRLGAPKALTATAHKLARLVYSLLKHGSAYVQQGIEAYESQYRERKIKALARQARAFGYTLMALGTPEVPSLDAVAVPTP

SEQ ID NO: 477797 - protein, 418 aa, unidentified
MVDPLQIYLWRYSMLNAVGIDVSKGRSTVSVLRPAGEVVRKPFNIPHSAKGLAELISYVRSLDGETKVVMETTGHYHEPVLNAFLDAGIFVTAVNPTLIKNHDSDENPLRKVKSDPADARKIAKYTLDKWEYLRQHSAMDTTRVKLKTLNTQFHFFMQQKVSLKNNLISLLDLTYPGANSLFDSPVRTDGSEKWVDYVHSFWHVDCVRKIGLKAFTERYQNFCKHHGYNFQPGKPAELFSAAKELVAIVPKDPVYKQLILSNIEQLNTVSKQIEEFRRTMNELASTLPEYATVMSMYGVGPTYGPQLMAEIGDISRFDHRSAITAFAGVDPGVDQSGTVNHESNRASKHGSPRLRKTLFQVMTTLLQLAPADDPVYLFMMKKKSEGKPYQVYMTAGANKFLRIYYGKVKECLAAQSAE

SEQ ID NO: 477798 - protein, 408 aa, unidentified
MEVLHSRCAGLDVHKDTVVACARLVTDAGVTQDVATFATTTQGLLALSDWLSERACTRVAMEATGVYWKPVWHVLEGSFELVLANAAHIHNVPGRKTDVNDAMWIADLLAHGLIRGSFVPPGNIQELRALTRTRKQLVREQVQHVQRIQKVLEDANIKLASVVSNVVGMSGRAILNALIAGETRPERLVDLTTGRLKASRITLIEALRGRVTHHHRFLLKLHLDQVDSIRRAIESVEAEVGSIIEPFRERVELLTTIPGVSDTVAQAIVSEIGIDMNRFPTVGHLIAWAGLCPSNDESAGKRRSTHVRKSGAWIKTILVQAAWAGSHKKDSYLHAQFLRLKSRRGPKKAIMAVAASILTAAYHMLRDGVEYCDLGPDHFNRCDRSKTITRLVRKLQDLGCNVEIKPAA

SEQ ID NO: 477799 - protein, 358 aa, unidentified
MNRNTGMNAGQIIGTMGGKQVIGLDIAKHVFQLHTVNMGTGEIINVQIKRAKVLEHFVNMPQCLIAIEACGGAHHWARELTAQGHSVRLLHAKIVRPFVSGNKTDATDARAIWLAVQQPGVKLVGVKTAAQQATLTLHRQRELMMKMRTMQTNALRGLLYEFGATFAKGRKALFQDVEQTLEDLSTQLPQMVRDSLREQVARIKAISEDMLAIEKRLGLQLKADPQMQRIAQVPGVGLLTATAAIATMGEPSAFKSGREFCAWLGLVPKQTGTGGKDRLGGISKRGDSYLRTLLIHGARSVLAHAKEPGPWLEQIKTRRPVNVVIVAQAAKMARTIWAVTAKEQSYQRGFKSVRPQTV

SEQ ID NO: 477800 - protein, 377 aa, unidentified
MKRIKFVGLDVHAETIAVAVAEQEGEIRSLGVIPNREESVRKLVKKLGPVEELRFCYEAGPTGYALYWQLTRMGAKCEVVAPTLVPVKAGDRVKTDRRDALKLARNYRAGELTAVWVPDAEHEALRDLVRAREAAKKDQLRARHRLSKFLLRHGRRPPVGATPWTVKYLEWVKRDVHFAVKAQEATLLDYLHEVEHMAARIVRLDSAIEEAVKVAPAKMRAVIEGLQALRGIAQISAVTIVAELGEVTRFTKARELMGYAGIVASENSSGERQRRGGITKTGNAHLRRVVVEAAWAYRHRPAIGFTLRKRQENLSEEVKEIAWKAQHRLHARYGKLMAKGKNKGVVVTAVGRELLGFIWAIGVQVEAQQKESLRQAA

SEQ ID NO: 477801 - protein, 383 aa, unidentified
MSNIQQDFCKGKPIYVGIDVHKQDWVVTVLCQGEEIFHGTVTPSPGGLIQRLKGYRASEVHVVYETGPTGYWLHQALVEVGFDSMVTPPSLVPHVTTRVKTDHRDSRKLATMLAGGFLKRVHILTPEELAHRQLLRTRNQIEKHRKQTQNQIKGMLLFHGKTVPASLRERWSQEYIRWIESIQWEYEALKISMKTLLELFHHLDTQYKALTLQIEHMALTEKYRERVRLLTTIPGIGIFTAMAILIELQDVERFRRADQLASYIGLTPSQRSSGEKIRLGRITHCGNGRLRDRFVESSWTLIRYDLDTRATYERIKHQTGSGKKAIVAIARRLVLRVRRVLIDKEPYKLAGAGSLPEGRDKRRETKRLVLRRVPASEGVGIGT

SEQ ID NO: 477802 - protein, 341 aa, unidentified
MKNLFIGVDFSKEKVDVAIIFADGLTETAPRVFNEFKTTVSGYKQLVKWVEQNSYGIDSSLWLFCGENTGDYSKGLCNFLYGKGYDMWLENAKSIKDASGLRRLKSDRADASMIAEYAMRNYDKAIMYEPLSESLAQLRELFLYRQMVVRHRCSFQVRRGEKRLTMEKSPVKTMISQSGRHIVSELNKEIEKIDKRIAELIKSDEELTEVFTIVTSVPGIGTQNAVCLMVYTDNFRRFNYDSRKIACYYGIAPFGKDSGTSVHSDPHVHYMANRQIKAMLTQAALAAVNFNPVMARYYMRLVERGKKKQVALNNVKNKLVHLVTAMVRNRQIFTPEYKISA

SEQ ID NO: 477803 - protein, 344 aa, unidentified
MKHYAGIDVSLEASSVCVVDAEGRIVREGKVASEPEALIAWFAALGFPLERIGLEAGPLSQWLHAAMTQAGLAAELLETRHVRTAFKTMPVKTDKKDARGIAQLMRLGWFRPVHCKSASAQEVRALLTARRLLQGKLHDVEMSVRGVLRGFGLKVGATTPRTYTARVRDLVEGHEVLEAIAASLLKAREVLAEEFRSLDRRLRAIARDDDRTRRLMTTPGVGALVALTFVAAVDDPERFRSSRAVGPHFGLTPRKYQSGETDYTGRISKIGDVGVRAMLYEAANVILTHAVRGSDLKAWALAVARRAGMRKAKVALARKLAVVLHRMLRDQTVFVAHRGAVMAA

SEQ ID NO: 477804 - protein, 388 aa, unidentified
MIKYSLGIDISMKTFQACLSVIDNQQQVKVKASRKFTNNLTGFKELHTWIMKHYKQQDIPLQIIMEATGVYYEQCAMYLYKKKFTVTVVLPNKAKKYLQATGLKSKNDKIDAMGLAQMGAEKKLEPWQPMDDYYYTLRSLTRHYESLQNLKTNINNQLHADNAGMYANKQVGKQLKKLIETLDKQIEVMKQSINDHIACDETVQRKVNGIIKIKGVGLITVATVLAETNGFLLFENIPQVVSYSGYDIVEDQSGKHIGKTKISKKGNAHIRRILHMPAFNVVRFQVSPFVQLFDRTLKKHNMKMKSYVAVQKKILIIIYSLWKNNQEFNEKHYKGYTTRDEELALPSRLSFEEGVKIQQKNSSDANQSYTRCTTVEVSSFAPSRLLQK

SEQ ID NO: 477805 - protein, 411 aa, unidentified
MDKVYDICCGIDVHKKLIVACLRKGNKHEIREFGATTRELLEMADWLKENSCQMAAMESTASYWKPLYNILELSGLSAIVVNARHMKAVPGRKTDVKDAEWIADLLQHGLLQPSYIPDKDQRELRELVRYRKSLVGERTRELNRLQKMLEGANIKLSGTVSNINGKSARSILEYLLTGESIDDAKYDEMYEQKIIAHNLKASKEQIIDDLNGVMTPLQRRMMKELLSHLDELNVHIRNLDDEIDNFMKPEEKQASQTIQDVTGIGNTSAQAIISVIGTDMSRFKTDAHISSWAGLCPGDNQSAGKRKSGKTRKGNSLLRTTLITCAHAAVKKKSSYFYAQFMRISAHRGKKRAYVAVAHSMLVAIYHILNDGVVFKDLGADYYNQFNKERKINAYLKKLKALGWVAPAVAS

SEQ ID NO: 477806 - protein, 312 aa, unidentified
MIQQGYGGIDVSKDRLDVMVLPERQFFSVENSTAGCGELVQRLRGWSVATVGLEPSGGYERGVIRALLAAGLSVRRINPNKLRQFARARGVLAKNDHLDARLIAEYVAIMPTRVVQCDPVTERLAEVVTMRRQLCDEHVAVENQTAHLEDAMLRRLNKRRLARLEADILLLDRRMAEIVASNASLARRYELLTSMRGVGPTLAFTLIALLPELGQMGRKQIAALVGLAPYDFDSGRLKGHRCIYGGRLPVRNVLYMAALSACRYNPALTAFHLRLADANKKPKVRIVAVMRKMIVILNAMLRDNVAWQPNST

SEQ ID NO: 477807 - protein, 340 aa, unidentified
MKVYTGIDLHSSNNYLGIIDETGKRVFKRKLPNDPEMLLAALAPYKNDIVGIVVESTYNWYWLVDLLMAEGFTLHLANPTAIQKYSGLKYSDDQHDAFWLAEMLRLGILPEGYIYPKEDRPIRDLLRKRSHLVRLRTSLVISLQNIINRNIGFKLRGSKMMASTTDHVAPLLEYNEDLALAGKVSKDSIDFLTLQIKALEAKIEGKVVLREPYAKLITIQGVGKILGLTIMLETGPISRFDKAGNYASYCRKVSSKWISNDKGKGKGNKKNGNKYLAWAFSEAAELARRYCPEARAYYNRKMKETNTVIAHAALAHKLARAAYYIMRDQVPFMPEKLFES

SEQ ID NO: 477808 - protein, 316 aa, unidentified
MAMRVLKSVIGVDVAKIELVTYQADSDLLALIPNEKPAIKRWLKTLPRPAALAVEATNIYHVDLVELAYQAGFDVYIIDGFQLSNYRKGVGGRSKTDASDARLLARFLKNEGECLRPWTPPPAVYGKLQSLLRRRASLIQAKTSLTQSWANDASLKASFAAFLKSIERLDLLVKKKLKDALREAGLLEQVARCQAVEGIGFLTATALVMAYSRGDFNSSDSYIAFLGMDLRVTDSGQKNGRRSLTKRGCSEIRRLLHNAAMSASRTSAWKEFYNHHRSRGKATTEVLVMLARKLARVAFALMKNQSEYQPRGSVMA

SEQ ID NO: 477809 - protein, 380 aa, unidentified
MKKDTMVNLQVSKSQIRRMAAKQRLTVGLDLGDRSSRYSILDEAGEKANEDQLPTTKTGLEAMFGKMPACRIALEVGTHSPWVSRQLKAMGHEVIVANPRKVKLITESVKKNDRMDAEQLARLARVDPKLLSPIQHRGAEAQADLAVVRARMALVDARTELVNSARGLAKPMGERLKKCDTDYVKESLADGLSEAAQNAIRPLLKSVEEINQQIGVYDQRIEEIAKRYPEMKLLKQVYGVGTLIALTYILTIEDAERFAHSREVGPYLGLTRKLRDSGDSRPELGISKAGDELLRRLLVQGAHCILRDGAPDSDLKVWGKAMLQSGGKKVSKARKKKAVVAVARKLAVLLHRLWVTGEVYDPQYNRKAAQQAAKGKGKAA

SEQ ID NO: 477810 - protein, 365 aa, unidentified
MTTRQRSTSSSTDPPVRREVVLGVDTHGEVHVAAVISPLGKVLGTDSFPATAAGYRQLLVWARKRGTVRRAGVEGTGTFGAGLSRYLLAQHILVFEVNRPDRSARRLLGKSDPLDAQAAARAVLSGRAQARAKSGDGPVHSARICKLAKDSAVKARTQVINQLKAVLVVADPALRERLSSLGNAELFRTCASLGPPDGGGDGDAVAQATHMTLRMLAERIEQLTAQIDELKQHLTRLVEHHAPQLLEPVGIGPDSAVTLLITMGDNPERLNNEASFAALCGVSPIEYSSGRRSTRRLNHGGDRQANAALHRIVFTRLRHDPRTRAYCERRTQEGKTRREITRCLERYTAREVFNLVRTVSSVPPF

SEQ ID NO: 477811 - protein, 401 aa, unidentified
MFVGWDWASTTHDVTVLDDTGTVVDRWALQHTEQDLAGALERLARLGEPAALPVIIERTSGLVVDRLVAAGHPVVPVHPTAFWAARPRWGASGAKSDAGDSYKLADYLRTDGHRLRRLDRSDPGRQELQALVRLRQDHLRARTAASNQLGALLEAHWPGPKAVFSRLASPIALAFLADYPTPQAAAHLGEARMANFCRRHSYRGGKPPAALLARLRSAPTAPVGIPPATLATLVHAQVQLLRTLLVTIAELEAKIAARVAGHPRAKLLASLPGVGTINLAQLLAEVGPILDRVPSAEQAAAECGAAPVTKASAKTSGVYFRWAANRRARKALTAFAHNARLASPWAGRLYADARARGKRNPHATRILARAWLRVIWACWQQATPYNPALHTAALRAAALPT

SEQ ID NO: 477812 - protein, 342 aa, unidentified
MSVYVGIDVHRKRSQLAVIDAKGEVLANRNVPNGAEPILKVIGGLPTGTPAAFEAAFGTTWLVELLEDYGFDPHLVHPSRCKAIASARLKNDKVDAAILAQLLRADLLPEAWIAPPPVRELRALLRHRVHLVRVRTLLRNRIHAIVADHGHDRPHGGYWTGPGRAWLASLPLPAVSRELVDDNLGLIDAIADRVDRLDGEIRQRARSDPRVKVLTQLPGVGPFTALVILAEVGDVSRFASARKLASWAGLTPTVRGSDRVAHYGHISKEGSVWLRWVLCEAAQTAKRHPQFAATFQRIAKRRGKKIATTAVARKLLTRAWHLLTDAESIASPHPAAPQIAAR

SEQ ID NO: 477813 - protein, 355 aa, unidentified
MTSTKYIGMDVHKESISIAVMNAVGKIVMECVIETKASMILQFFDGLRGDLHVTFEEGTWAAWLYDLLKAHVTKLVVCDPRKNKSMREGNQSDKIDARRLAELLRLDHLTPVYHGEHGLRTLKELVRSYLTITQDLSRVMTRVKAIYRSWAIPCTGKQVYASRHRAEWLGKISEPGVRRRAEFYYQQLDALRSLRQEVRRDLLAESKKQQAWKRLCGIPSIGPIRAAELLGILQTPHRFRTKRQLWTYGGVGIETSSSADHHVVKGQLERKKKQVEIRGLNRNYNHDLKNLFKGAAIVAATKPGPFAEFYAELLAKGMRPEMARLTLARKIATIVLTVWKRGVCFDAQHLKPQTA

SEQ ID NO: 477814 - protein, 367 aa, unidentified
MKKVSTTATKQSRNISRQGLTIGLDLGDRNSWYCVLDEAGQVQLEQRVRTTAKALGEVFGAMPRSRMALETGTHSPWISRLLSELGHEVIVANARKVRLIGESRKKDDRLDAQTLARLARIDPALLCPVKHRSAQAQADLAVIRARAGLVRARTGLVNTARGMAKSYGERLRGCNVRNLNPEKAEGLSPELQRALEPLLSAIEELSERICEYNDQIEALAEASYPQVTLLKQIKGVGTLIALTFLLTLEDPHRFRKSRDVGCYLGLQPGRRNSGQSEPQLHISKEGDPYLRTLLVQGAQHILGPFGVDCDLRRWGLKLAERGGRIGKKRAIVATARKLAVLLHHLWVSGEVYEPLHNSSRMTTAVAA

SEQ ID NO: 477815 - protein, 415 aa, unidentified
MEVVHPRCAGIDVSKKDAKVCVRIQGNTRRKTSSTVTTWGSMTNQILALRDHLLGAQVTVVVMESTSDYWRPFYYLLESDFQVMLVNAREVRNVPGRKSDVSDSAWLADLGAHGLVRASFVPPEPIRQLRDLTRARTHITRERTREVQRLEKLLEDAGIKLSSVASDITGVSGRLMLQALIDQQSYAQPAVIADLAKRRMRSKIPELTEALNGHFTAHHAFMTRLFLDRIDAHTKDIGLLSTRIDELMEPFLPARALLESIPGFSKTVAEIFIAETGADMAQFPTAGQLASWAGVSPGSNESAGRVKSTKTRPGNRYLKGALGVASLSQAKSRKTYFSAKFRRLAPTRGPMKAIVAVEHAMLIAAWHILTNGDFYRDPGPDYYSRRDPAKARARAVKQLEALGYTVTITALQQAG

SEQ ID NO: 477816 - protein, 435 aa, unidentified
MQDVEDEPLLAGRAAGIGIGKATVTATVRVPGGTRKGRRQPETREPGATRRELPAMADRLRCWQAERAGMEAASDYRKPVYFLLEQEGPDCDLYQASQAKALPGRPKADKLDSARLAVITGRGALHGSFVPPGDIRRLRACTRCRRHLARERAAEKQRAEKLPEDARLELSPVLPDIHGVSGRAMLEAVTAGERDPKALARLARTRARRKTREPEEALGCAFLAPGRARVLKAVLRRAGQLTADIAEVTARTGGLCRPWQDKTARLCTVPGFPAVTAQDLIAETGTGMSVFPAPGHLASRARQAPGASESAGRRKNKGAGRGNPCPGGTPGGASAAAARTRSFLAAKFRRLVRHMPKGKARRAIMRCQLAIVWHILSGDDAVCNDLGADYYERRTDISRRARSHATAIGRPGCKVTTEPLNPQDGGGTLPAVGAG

SEQ ID NO: 477817 - protein, 320 aa, unidentified
MNATQQGGGRVGIDVSKRTLDVCLLPDGEPFVLPNDQEGVEELLSRLEDSPPELVVLEATGRYERLAATSIAAAGIPVAVVNPRQARDFAKAIGRLAKTDRIDAFVLARFAHAVDPSASVIPDEEASALQAILARRRQILSMLVAENNRFQMAPKPLQKRIRAHVEWLGKELSRTDGDLDEAIEASTTCIKENEALLKSVPGVGPILARTLLAELPELGEITHKRLCALVGVAPFNRDSGQSRGKREVWGGRAPVRAALYMGALVATRHNPILKEFYERLLAAGKPKKVALVACMRKLLSILNAMMRDRVPWHLAHLRTP

SEQ ID NO: 477818 - protein, 448 aa, unidentified
MSNGNGVSRGDRNRNARLSRLRVLVPVCNAIVGIDLADNKQMVVVTDHDSKVLARRTFRCRAWDLGLALDWAGQQASKAGFAGVTVACEPTGHRWRVLGQLAADRGMAFVCVQTLLTSWARRSEDLTFDKTDEKDAVLIARLTAQLRCYVPEPLDETWGRLRHLGARREQLLGETVSQVQQIRDLLECVWPAAVDTAKQPFRSRTWLAGMCVVLARTGGDPARLRRLGPARFEAAVRREVVARQGKRPCLRIVRLLFAAATDPRGVTAHRPGALERVQLLLDDFRDTGRRLAEAEARMVDVLDELQLSELVCSIVGLSALGGATILAETGDLTRFASARAVVKHSGLAPREKSSGTYTGRTRLTGQGRPGLRAAAWRAVWGAQKANPVYAAKFTHLTSRTENKLNRGQAHAAIAAALLRQLYAVVTTGQKWDAAIAAGGRCEVIEPAA

SEQ ID NO: 477819 - protein, 405 aa, unidentified
MSQNFSIFVGIDISKDKFNACAIQNPNSIIFESAFDMSKQGVSSFVQKLSVFPKSSVLIAMESTGCYHLNLLSFLSLNDFSCVVLNPLLVNKSLPVGLRKTKTDKIDARSIALTIFYTHHLLPASSFLNSDFRDIARKKESITHQISRVKNDIEKLLSLLFPELEKVTNIYNDAILDLLSSFPSAKAIQKASIDSLRVFFSKTIGRKLKLTPETLKELANNSIAQYWPVKEKILIQTIKELRFLQEQLNEFDEMLKEYCKCASLNQDVEILTSIDGIGENSALYFLAEVGDISRFSTYKKLIAYCGLDPSVDESGKHKGESRISKRGNAHLRRIIWLMSVNVVRHNEYFKAYFQRKRSQGLVYKKAMMSVAHKLLRTIFTMMKKREKFNIEHTFSSSTQNLILHS

SEQ ID NO: 477820 - protein, 413 aa, unidentified
MNYEPITAVGIDVSKGKSTVAVRRPGGEVVLTPFSVEHDAVGLSSLVKTLRSIGGDIRIVMEHTGMYWRPIALALKEAGFFVSVVNAMLIHDFSDNSLRKVKTDKADSMKIANYALSFWAELRDYSPEDETRQMLKMQNRLYLRTQKSSVVLRNGLISLLDQAFPGVNALFDTQPKRSNGHFKWVDFVKRFWHRDCVAGISLAAFSDAYRKWCAKSGYRFSQSDAEKLHTTARNTVATFPKNDSTKLLIAQAVNSLNAVYDALYILRGEMLRLASLLPEFDIVMAMQCAGEVTGPQLMAEIGDVRRFTHKGALVAFAGMDAPPFQSGTFDSKSRRISKRGSPNLRKTLFMVASTILQHSDPDNPIFQFMDKKRAEGKHFYVYMVAGAAKFLRIYYARVKAHLLALDAEASTAA

SEQ ID NO: 477821 - protein, 461 aa, unidentified
MSKKTKHRRAKMIAGTPSQAALNPQTHPDAAGIDVGATEFVAAVPPGRVGPQHVKTFTTFTSGVEALRDWLLGCGIKTAALESTGNYWITLYATLVRAGIDVYLVNARHVKCVPGKKTDVLDAQWLQQLHAAGLLKKSFRPAQDIVPLRYLMRHRSGMIGDVTRQLQLMQKALTEMNLQIHHVFSDIDGASAQAIIDAILQGERDPDRLAALRDKRCRSSLSDIKEALRGDYRTEYLFVLHQSQSTWRHLLAAIASCDEQIAALLAMVTCTVSAALPEAPARQRRLTKNSPQGPIFEEAMRFYGVDLSPVPGVGAGLLSVMMSELGTREQLLEAFRSPGALCSWMGLCPDNRISGRKVLKAKTRKVPSRMAAALRLGVFGLQKADNKMGDHFRRMKARLGKAEGTVATAHKLMRILYGMIETRRAYDESEAFRITPQTAARRRRNLEKQAAALGLQLVAAA

SEQ ID NO: 477822 - protein, 420 aa, unidentified
METPQVSFKQVVSRGCGLDVHKKVVVATIDGEGLKKQTREFGTVTSSLKELRDWLLENGITHVAMESTGVFWKPVYNILEPAGITVWVVNAAHVKYVPGHKTDKKDSVWLCKLLLAGLLKPSFVPAKEQRELRDLTRYRTKLVQSNASNKNRIIRILEDANIKLSSVLSSTSGAVGTKLIDKICDGEEITKQDVDEVYHKKLAATKEEIFEACQGFITDHHVYMLQIIRQEIANTNLTIENMNQRIKEVLSPYENALELLKKVPGISSKSVEELVAEIGLDMGVFPTAKHLASWAGMSPGNNESAGKKKSGRTTRGNKQVKAVLTEIAWAATRTKNTFYHARYHKLAARRGKKRALIAVGHSILKSVYHILKGNCDYKELGAEYLISRTEAKRKAYLKSELGKLGYVVELKELSPAEKTG

SEQ ID NO: 477823 - protein, 370 aa, unidentified
MACRGCNPRQAAGDRIEPTQSSLRLPRSVIVVSTFIGPGWLPEQLGSLHKAGSTKMTQTNMTTAGIDTSKAKLDIAVHGRTERWQVANGLSGWRALAAEFVRLGVTRVGIEATGGYERGVVEYLRAAGLIVLVLQPTQVKALGRMHLRRAKNDALDAVLIAACAAALDPPAIAPDPRLADLAENLTFLEQVEEDIRRCKTRLEHIEEPRLRRFVLGDIARLKARRATQIRDIARLLRCHHDLAVRLDLVLSIPGIGERTALALLIRMPELGRVSREEAAALAGLAPFDNDSGQYKGQRRIAGGRARLRRSLFAAALPAAFRWNKALIALYARLTAAGKAHNAALVACARKLLIYANTVVQRGTPWTDRAA

SEQ ID NO: 477824 - protein, 384 aa, unidentified
MTKHNILFIGLDTHKEFIEVAYIEDNRGAQPIHFGRISSAKVTIKKLIRQFESKYPNTTLHFVYEAGPCGYWIYRLITSLGHCCYVVAPSLIPKKPGERVKTDKRDALKLAKLLKSEDLTPIYVPEPEDEAIRDLSRAREVAMKDLKDAKYQLKAMLLRNNINYAGTANWSLKHLRWLTELVLPHPAQQIVLQEFIQTINERTARLERLDNELSHHVYQWRYYPVVKAIQAMRGVRLLVAAGIVAELGDLTRFDHPRKLMGYLGLVPSEHSSGGKRHIGAITKCGNGRARRLLVEGAHSYRHAANISTELQKRQEGLPKQLIDILWKAQLRLCKRYKKLINKGKHYNLVVTAIAREMIAYIWAIAKQVVLSPVNPKLRLSRVPA

SEQ ID NO: 477825 - protein, 405 aa, unidentified
MPYILALDVSMGHSYSVLYKDDTCLFEDEIEHTQRGFHALLEEIQHLPERPLIVFEATGIYSRPVEKFFQDHHFSYCLLNPLEAKKQMEESTLRSWKTDKSDAHRLAQTHLKNQRQPKEVQSNFYLEMRDLARFYQEIEKKITRLRMDLHNCLQLTFPELEQFFSNRLTPYALTLIRLFPHPDFVLASTRTKIKNKLINETRKKISANRAEQKADQIIHYAQCAYPAVEKDSIHCQKTIYYAELLQDLLEQKEALATQMIKKAEGSPCFLLYQTFPGIGALTAALLLGELGDITRFETHKQLNAFVGIDIRRYHSGKYTGQDRINKRGNPKARKIIFFTIRNMIRQQRAAPNHIVDYYYKLKKQPIPKKDKVATVACMNKLLKCMHAMVRAHTEYDYAYAVSVDH

SEQ ID NO: 477826 - protein, 358 aa, unidentified
MRIIGVDLHTRQQTIAMWDTETRELIERTLTHDGDEVREFYSALPGQVLVGIEATGSMHWFLELLEKLGIDHQVGHPSEIRKAETRKQKHDRRDAALLLKLQIENRFPSIWMPSTELRDLRTLLMHRHQWVRMRTRVQNTLQAMAIGRGLRRGKALWSQTGQHAIESLPLPPHTAYRRTELQDLYQKLDAQIDELDKRVGDQALQRPGAKLLMSHPGVGPVTALATDVFLGDPARFADGKAVVSYVGMIPSEYSSGGQQRLGGLSKQGNPFLRFLWCEAAVHAVRRDPELQRFYRRKLAQKGLGKARVAAARKLGIRLWIMLRDQIDYQEFCRRGQMRQKNGGACAGMPEVGHSPAMQ

SEQ ID NO: 477827 - protein, 424 aa, unidentified
MKLTYQTCCGVDVHKSFLVATIIKTSSGIEPSYQKRRFSTFNNSILEFKKWLLENECLYVCMESTGKYWIPVFNLLEDQINVTIANPKWVKAVKGNKDDTKDSKWIGDLFRLGLVKGSYIPCKKVRILREYTRYRYKLVSCRSSEKNRYQNALTVCNVALDSVVSDIFGKSSTSIIDYLLEQSGTTINHEEIASKLLRRLKSKEDAVIESVEGYQMTDAQKYRMRLVRAHMDYITAAINDVDSEIESLIASDPDYENAVELLCTIPGVKYDSAITIISEIGIDMSQFCSSKRLCCWAGLTPGSNESAGKKKSVRITRAGVYLKPALVQCAHAAVKSDKSPYYKKKYESLVKRRGKKRAIIAIARMILTAIFQMLTTGETWNPCDLYKIDMPEALLEKQKQKAIKQAQKLLIREGLLPPTEPIAS

SEQ ID NO: 477828 - protein, 362 aa, unidentified
MPQPKSVVGLDVHATQTHACVLHPETGELRSRRLNGPPRGALDFLEGIQAPVLAVYEAGPTGFGLARGGAERHLDVRVCAPGSIPKAPSDRVKTDRRDAERLARLCLAGELRFVRVPSPEEERFRDLTRCREAIRADLMRARHRLGKFLLRRELRWEGPGSAWTQAHLRWLEAIRFPDGASRAVLEDYLAAVVALEQRRGASERAIEELWPESPWAETIARLRCLRGINTLTALGLCAEAGDLRRFERPASLMAYFGIVPSEHSSGERRQRGPITKAGSPHARRLLVEAAHHYRHQPRVGGALEQRQRGADPRACAIGWRAQRRLHNRWQRLRLERGKPANVVRIALARELGSFVWEVGQLS

SEQ ID NO: 477829 - protein, 397 aa, unidentified
MYIVGIDIAKRKHEAAVIDGEGTVIIKPFSFTNNCSGYNRLLAMLTKAKLPLDEVSFAMEATGHYWLALFTRLQKEGFRVQVINPVQTNSIRSFYIRQAKTDPRDALLIAEVIRFGHFSESTLHPENIYELRELCRGRHAIVSMQADVKRKVVALLDQVFPEYETAFTNMFSDTSMAILQTCPTPKELSEMPLEELCHLIEVSSHKRFRMAKARELQELARSSFGFAMAGDVFSTMIRLYAKHLDFLKQQVREMDRKIAEIMDTLDTPITTITGIGPTLGAYILSEIGDISRFSSAAKLAAYAGIDPTMRQSGEYNGVRNRMSKRGSPYLRHAIWLAASSAVLHDPALKLYFQKKRDEGKPYMASVGHACRKMVSIIYAVMRDNKAYTPCIPNEISA

SEQ ID NO: 477830 - protein, 394 aa, unidentified
MRFVGIDVGAERHVVASVDVAQAVELKPTGFTEDAAGYHQLLTLLGPATGTLVAMEATGHYWKNVFAVLVAQGFAVALLNPLRTRRFAAEELQRTKTDAIDALGIARFAAQKRPATSRLPDPATEELRERLRYRDRLSQDFGDRERQLHRLLDLGFPEFPRQVRDVGSELATAILRAYPTAAAFQGVTVRRLGGLRYAGHQKVGPELAAALLEAAAASIGQHHGAAYRVQVQDICEDLDVLRRRLRTLDRDIEGLLARHEIGTLLTTIDGIGPQTAARLVATFGDFSGMRSGAALACYVGAIPGLRQSGKRTSARASLTPIGAARRRAKLYMPVLSAVRYNPWLRAYYEGLIARGKLPKVALIAAMRKLLHAVYSVATHRRPFVPHVVAQEARP

SEQ ID NO: 477831 - protein, 408 aa, unidentified
MPKPNRYIGLDVHKYYLIAIAVDADLNKVYGPQRVELSRLGEWIEKTIFKQDAVVLEMTGNAWQIHDELVAHAQSVTVVHPPHVALIVRAQVMNDKIAAMQLARLHAKGLLVSIWVPPREIRDLRTLTAQRQKMIQLKTQAKCRLQATLHRYHILPPEAVKLFSKDNKTWWMELPVRALEKVRVESDLATLAFAEGQIQSLEKRMAEWAAQEADVTRMMQVTGIGLVTAVTLMAAIGDIHRFPSASQLVGYSGLGAKVHDSGLTTRTGGITKAGRKDIRAALVEAAQTAVIHDPHWKAELKRLEPRIGRSKAIVAIARKMLVVVWHLLTRDVLVHKADPDRLARKFLEFAYSMEKDQRGKSAHEFVRERLDLLGVGTEMEFIRQGRRRIPLPKSSLPVKTELSGVPNT

SEQ ID NO: 477832 - protein, 369 aa, unidentified
MKQVTTIGLDLAKKVFQVHGVDAAGVVVLRRSLRRRQVLAFFAKLPSCLVGIEACATAHYWAREITKLEHQVRLIAPAYAKAYVRRNKNDPADAAAICEAVSRPSMRFVTIKTEAQQAAAGVHKVREMLVKQRTMLINTLRGLMAEFGVVVAERPRHVSELMAILADPTDRRIPTPLHEGLSALVKTLGGLERRIEIVDKQIVGWGRDNATCRHLITIPGYGPVLSSAMAAMVVAPAVFAGARHFSASLGLVPRQDGTGGKIKLGPISKRGNGYLRRLLVNGAMAVLCSKRAKEDPWLAQLLESKPRKVAACALANKMARIGWAVMMRQEDFSRRQHDQPRPTPSQPGTVLPAVKTAARAPAAVAIGQS

SEQ ID NO: 477833 - protein, 350 aa, unidentified
MIIIGCDYHPGVQQISFVDTDTGEFQETRLQHREPAEQFYRELALRGMQVRLGMEASGQARWFERLLAELQMELWIGDAAEIRARRVRKKKTDREDARHILRLLMEDRFPRIWVPSWENRDVRQLLWHRHRMVQMRTRVMNQLQAVALNEGLRCKKRLWRERGRQQLESFPLAAWGSRRRRDLLELLDRLNPTIAELTQAIEAEVATYPAAQRLMTHPGVGALTALAFVLIIGEAERFQCGKQIAAYLGLVPEENSSGESRRLGHISKQGSGFMRFLLVEAAQVTVRSDGQWRSRYFHLAMRRGRKIANVAMARRLAVRLYWMWRRQWDYEQWKEFGPHAGQPGMSDGVK

SEQ ID NO: 477834 - protein, 376 aa, unidentified
MNSVAVVPLDIHKRFSKAVEMGEGGEVLGEARVSHAGRDEMKKYFSRFPAGTDVVMEATFNWPWIADAAEEAGLRPHLAHPMRAREMAKGMAKSDRKDAIFLGKLWLAGDIFPESYLAPPEVRRMRGLFRLRLTLVSMRTALKNAIHGQLHRQGMLISECSDLFGKSGLAILEKLPMKEHERWQLDTKLSVLGDIGLYVKEMEQKIRRELKTDPRAQLLMSLPGVGEITAYSMLAEIGEIERFHNSRALASYAGLLPLDNESAEKDFGKRTGAHCNRFLRWAMIEAVTGAVTASGRMKSLYMRVKNRNKDKPQKARIAVARELIELSHLLLTRKVKYEEKRPPRPGSKEAGDETRPNRASQSALCARSPQASQAAL

SEQ ID NO: 477835 - protein, 408 aa, unidentified
MNTLYVGIDVSSKSNVVYLMLPNGDKHSNFSVANSHEGSTLLVKKIYSALTSHSLDTVLIGLEATSVYGDNLVYFLREDATLAPFNRKIHVLNPKQVKKFHDTYNDLPKNDYVDSFVIADCLRFGRINKEVYLGDYRYKALQNLTRARFFAVQNLIKEKQRFMNVLFKKYSTMTQEKVFSDTFSTTALAVYDEFDSAEALANMDLHELTDFIIEKGKNRFPDPDAVAKAIQKAARSSYRLPKTVNDSVNQVLSISITSMKALESQIKEFDKAIKAQMELLPNVLISIPGIGPVYSAGIMAEIGDINRFDNQAALAKYAGLAWKQHQSGSFEAEVTRLIPSGNRFLKYYLYEAAFSLVRCDKEYSDFYHLKYKEVNRCQHKRALALTARKFVRLVFRLLKDNRLYVPAK

SEQ ID NO: 477836 - protein, 334 aa, unidentified
MEKITTAGIDLAKRVFALHGVDGAGRVGLRKTVRREQLMQTVAALPPCLIGMEACSGAHEWARRFQELGHTVRLMAPVFVAPYRKSGKNDGNDAEAICEAVSRPNMRFVPVKSAEQQAILALHRVRQGWIEERTATINRLRAVLTEFGVVLPNRAQYVRRGAMAAAEGLPALARRALEDLRSHLGTLDERIAAYDRELQAQARQSEAAQRLMQIRGIGPITAVAIVATVGNARDFRSGRQFAAWLGLTPRQHSSGGKQRLGHISRRGDAYLRCLLVQGARSVLLTATRHSDRLSRWVLSVQARRGYHKALVATAAKNARIAWALLSKNQTLRAA

SEQ ID NO: 477837 - protein, 309 aa, unidentified
MEHFVGIDVAKDRLDVHLRPSGESFTVIRDGEGLVELVDRLRRLAPRLVVMEATGGYETIVASAVAAAHLPLAVVNPRQIRDFARATGKLAKTDAIDAAAIAHFAEAIRPPARPIAGPEAQALGELVARRRQVIEMMVAERNRRRRATQRRVVRAIDRHLELLQTELSELDGDIDGAIRDSPAWQADADLLASVPGIGPATLRTLIAELPELGRLDRRKIAALVGVAPIHRDSGTMRGRRSIAGGRPAVRTALFMAALVASRKNPIIAPYYAKLRAAGKTAKQALTACIRKLVVILNAILRDRKPWQPA

SEQ ID NO: 477838 - protein, 373 aa, unidentified
MHTIFGNVEGSASVDGVVLGVDTHLDVHVAVALDHLGRRLGELTVPTTARGYERLLRWAEGFGPLGCAGIEGTSSYGAGLARHLKAAGVSVVEVERPKRRRLRHKGKSDPIDAEAAARAVLAGEALGEPKSGDGKVEMIRTLRSARHSAVKARSQAANQLKALLVTAPEELRHRLRELPTKELVATCARFRLGNDPDDVQTATKFALRSVARRHEALSEEITELDMQLDRLVGEVAPGLISLPAIGTHHAATLLVVAGDNPQRLRNEASFASLCGVSPIEASSGKVVRHRLNRGGNRDANRALHMICVVRMGSDRRTKTYVARRFAEGKSKWEIMRCLKRYIAREVYRVLLSSDAVRTSPIEPTNRAVGADIA

SEQ ID NO: 477839 - protein, 383 aa, unidentified
MTTPSPTPPDLTTTLVVAVEIAKNRWLTAAHVPGLAALKARQQVEASGEALADAVARLTRRATTKGASVTRTVVCYEAGPTGFWLARFLQQRGVEVLVVQPVSVPVDRRMRRAKTDAIDVDLLLRTCLAYLRGEPRVCSMVPIPDEADEDARQPGREREELIAERVSLTNRIGAILATLGVSGYDPLRRDRRERLKELRTPLGAPIPENTRARIARQLDRIELVLRQIAEIEHARDMVLVRPHAANAAERMIRDLSSLRGIGVQTATLLVREGFVRCFGSAKALGSYAGLVGTPFASGNAAREQGISRAGNRRLRTAAVELAWLWRRYQPGSALARWFAERLGKTGGRMRKVLIVALARKLLIALWRFAVHGLLPEGAVAKPT

SEQ ID NO: 477840 - protein, 405 aa, unidentified
MGQTSVGIDIAKEFHWVSVTVPDPGTGKAVEVLSRRVGNDPGDIAAMIEQIEAVAGEHGPVTVGIDVLGGIARLVEVMLLQAGLVLVHVPGLAVKTTRRATRGGEHKSDPRDARVIADLVRTRDDLRVISEASDADVALGLLVSRRRDLVVDQTRRIGRLRNLVCSIHPGLERVVDPTHKVDLVLLARYVTPAEIRRAGTTRIAAQLLRSGRQRRDVVDRLAAAAVAAAEQQRITLPAEQVAAAIVKDLAGEALDVRAKIDALDAQIAELLDHHPDAALIRSLPGMGATLTAELLAVAGGLNRFATGDQLASAAGLAPALQQSGKVRYLQRATSGDRTLKMIFYQSAFCALQRDPASRAYYDRKRREGKTHHQAVIALARRRINVLHAILRSRQPYRQPAEQAAA

SEQ ID NO: 477841 - protein, 392 aa, unidentified
MGAAKKHGPAAYLGIDVGKSRHSACALDAAGGVVFRADLDNRPDAIDRLLERAGDAALVVVDQKRNIGALVLARAHALGRRCAYLPGYAEKRARDMMPGIAKTDAIDAEVIARTAMGMPQALRPIAAEDAAARSLRALSSQREYAVASRTRAKNRFRAVLLEADPELERAVDPSSPWQMAVLSELGGAPGCSAAGWGAFADAARRAGAPAARARELWEALDASAGSGRGAGAGEDVSVRMLAREISALDSDVAELDGLIGEALAGDEVYESLLTIPGIGPKTAAALVTAVDISLFGSHHELASYCGVAPADSRSGTSIRSTSPQRGGNKQLKNLLIFSCNSLVGTGNRFGRYYDECRARGMRHNKALKAVARKRMKVVYAIMRDAVPYEPRR

SEQ ID NO: 477842 - protein, 269 aa, unidentified
MSIITIGIDLAKNVFAVHGVDHNGKPVLLRPKVPRAELLSLISQVPPCLIGMEACSGAHHWARLFRPYGHTVKLIAPKFVTPYRMSGKRGKNDAADAAAICEAVTRPNMRFVPVKEEHQQIVLTLHRTRQGFVEERTALYNRLRGLISEFGIVLPQKVVCLRREIGAHLEDLPGYSNRCIGDLLAHADRLDALIADYDRAIAQAAREDARSKCLMQLPGTGPTTASALLASLGDGHEFGNGRQVAAWIGLVPGQYSSGGKSRLGWRGHP

SEQ ID NO: 477843 - protein, 396 aa, unidentified
MTAIWAGIDAGKTHHHCVVIDDTGKRLLSRRVANDESELLKLLGDVLALDDEAVWGIGLADGGAALVIAVLLNHGQQLLYIPGRVVNRASEGYRGDGKTDAKDAAVIADQARIRHDLTPLRAGDELVSELKVLTRHRRDLSDDRTRTINRLRGHLTEIFCGLERELDLGNIGPLVLLSGYQTPAAIRRTGRRRLATWLRNRKVRSPDELAGKAVQAAEGQHTAVPGEDITAHVVHSLAGEVMALNEKIAETDKLIEGRFRRHRNAEVIASMPGIGVLLGAEFLAATGGDMSAFASPDRLAAFAGVSPVPRDSGKVSGNLHRPTRYSRRLQRVFYTSALISIRCCDESRRFYDRKRAEGKRHSQAVMALARRRVNVLWALLRDGRCYDPTPPVTLAA

SEQ ID NO: 477844 - protein, 350 aa, unidentified
MNVNHYIGFDVHKKSISYCVKLADGKIVEEGKLRATHEALRQWAAKRQELWHGAMEATLFSGWIYDTLKPFAAELQMGHPAMMKAIGASKKKNDKLDARMIADLVRCNLLPACYVAPAEIRELRRMLRYRNLVVAQSVRMKNKMGGLLMEAGAEYNKQQLHGKKYFTEMLETLEEVPESVKDLLRLSRGAMEMFESTQQQLLARLRKEPLIAQRVTLLNSIRSVGPVTALTWILEVGDPHRFSSAAKAMSYCGLTSALVSSADKQQRCPISKQRNAHLQTVLIEAAKLAPRWNPELAAVHARELERGNRNRATLAVARKLVSYLLAVDKSGQPFQVRTLAAKETEVPTTA

SEQ ID NO: 477845 - protein, 400 aa, unidentified
MRVVFGIDVSKASSEVAILINGEKVHGYTIPNDAIGFNRLLGDLKTVHEPEIVFEATGVYSRRLQAFFEDNSYAYTRLNPLESKKQLDSLRVRKTDKIDAEKLASSQFILNRKPSYVQEALYQELRDLSRFYQNLTEDIVCAKNHLHKVLQVTFPELENILSAPTGEQYWNLVITFPCNSFVLELDDATLTAIIRQSTAKRISEKRVTYLVDKLTKLANQSYYAVKKTSPVIEEVKYYARELLRLSEHRQGVLEEMVTLAQSLPEYEILLSIPGIAETTATSIIGELGDIRRFHSANQINAFIGIDLRHYESGNFLAKEHITKRGNPYARKILFKCIHNIASASHTNPCHIADFYEKRKRQSQVTSTKPHTIASIHRLIRTMYYLITHNKLYDYTSIQNR

SEQ ID NO: 477846 - protein, 427 aa, unidentified
MVRSIGMDVHRDFCEVAIAEAGAVRAAGRILTTPAALELFARSLAPTDEVAIEATANALAIARIIEPHVARVVLANPKAVRDKSPRAKTDKVDAKTLARLLAVGFLDEVWTPDEAARARRRLISRRCALVRQRTREKNQVHAALQRNLIERPPMSDLFGVKGRAWLSVRLGRLPLDERLSVEACLRQIDFVAGELAALDKIIAADALSDVDALRLMTLPGVSAVTAIALRGAIGDISRFRTPRHLVAYLGLDPRVRQSGNEPAKHGKISKQGPGEVRGLLVEAAWHAARTAGPLRAFHQRLAGRRGANIATVAVARKLVIIAWHLLSRGEKYAFMRPALYRQKIRRLGLMTGATRQQGKRLAEPSYLRASDPRRHAEDELVEAHEAAYRRLVADWQASRPSRKAGAGATPGRASQRPSKGKAARQAV

SEQ ID NO: 477847 - protein, 379 aa, unidentified
MEGFNSFYNSVVELMQKNELKEALVGIEPTGHYWFDLGQFMGEKNIKFVMVNPHHVHKTKELDDNSPSKNDRKDPRVIAGLVRDGRYFYSYMPTGVYAELRNASNRRFVLVEEQTRAKNRLQKWMAVYFPEYKGIYTHIDAKGGLLVLKQAPTTEEIVRLGVEGIIKIWKDAKLRGNGHKKAMLILNAAMKSIGLKAGLTEARMEIQDLIEDYELQTKRLERVNDLIKELCQQVRYADKLLEIKGIGITTVAGFIAEVGDITRFDSTKELQKLAGLELVADSSGKQNGKTKISKRGRKRLRYLLFEAAISVVGKNEEFKEIHRYYTTREKNPLKKMQSLIAVACKLIRVFHVILTKGISYDASKMLKDIRHPGEQLKAA

SEQ ID NO: 477848 - protein, 400 aa, unidentified
MLSIGIDVSKGKSTVCGMKPGGEIVYTPFEVQHTREGMSELVSLLRGSGEEVRVVLESTGSYHCPVVAALLENGIFVSVVNSLRMKRFCSQSIRRVKTDQIDAMQIALYGLAYWQELQPTRLPEDTYRELQLLARQYYQMTSMLIKAKVDFNALCDQVLPGMQELMSDHAGRHKLSDFVLRYHHTTHILEMGETRFRKDYCKWAEKKGYRNRERMAALIFATAQNGIPVLPNAPSTQIVITEAIRVLHTVEASRDAILTQMQALAKTLPEYSLVREMPCIGDTLAPRLIAEIGDVRRFHSKRALIAYAGIDAPPYQSGKFRANNRHISKRGNRYLRKTGYEVMQSYVMHKPANDPIFTFIEKKRGEGKSGKLAMVAGLNKFLRVYYGKVTELYRSLPAIE

SEQ ID NO: 477849 - protein, 400 aa, unidentified
MGQPLWAGVDAGKSDHYCVVIDADGKRLLSRRVANDEAALLELINAITALADGDELTWAIDLNAGGAALLIALLIGAEQRLLYIPGRTVHHASGGYRGEGKTDAKDAAVIADQARMRRDLKPLRPQDDIAVELRMLTSRRTDLVTDRTRAINRLRAQLLEYFPALERAFDYSASKAALILLSGYQTPDGLRHAGAARLAAWLRKRKARNADAVAATAIEAAKSQHTVVPGQQLAAAMVARLAEEVMTLDTEIGDTDAMIEERFRRHRHAEIIMSMPGFGVILGAEFLAATGGDIAAFGNTDRLAAVAGLAPVPRDSGRISGNLKRPRRYNRRLLRACYLASHIAIRTDTASRIYYDRKRAEGKRHTQAVLALARRRLNVMWAMLRDHKPYQPTAPNTAAA

SEQ ID NO: 477850 - protein, 354 aa, unidentified
MSQTLNTAIAVVGIDIGKNSFHIAGHDKHGAIVLRQKWSRGQVEARLANLPPCLIGMEACVGAHHLSRKLNSLGHDARLMPAKYVRPYSKGQKNDFRDAEAIAEAVQRPTMKFVATKTADQLDLQALHRVRERLVSQRTGIINQIRAFLLERGIAVRQGQRFLRAELPRILATPPDVLSPRMVRVIEDLAGDWRRLDERIEGLSSEIETVARQDAGCERLMSVPGIGPIISSAMVAAIGAGDAFTKGRDFAAWLGLVPKQMSTGDRTILGKISKRGNRYLRVLFVQAAWVVLIKPKIWERSGLKPWIQAAKKRLHHNVLAIALANKLARIAWSVLARGRVFEVRKMDEAAAQSA

SEQ ID NO: 477851 - protein, 317 aa, unidentified
MKRGKTSTKCAGIDVGKRRLDVAVHGEAERLELANQADGFGKLIAWLRSMGVGRVGLEATGGYERAVRRALEAAGFGVVVHQPMEVRLFARLRRLKAKNDRIDAVLIAAVTAQVDTVRAAADPRLQDLAERMTAYEQISDQLAQLKTFMEHVSLKDLRRRLTRQIATLESLKTTLAAEIRSRIAAHEDLEARYNLLLSLPGVGPIVAMSLVIRMPELGRMRRGQPAALLGVAPFDRDSGQHKGQRFIAGGRARPRRLLYLAAITARRWDPAFKALSERLAANGKPAKVAIVAVMRRLIEAANLILARGTPWLVQAQA

SEQ ID NO: 477852 - protein, 347 aa, unidentified
MVTVGSDSHKRTHTVVAVDGNGRELGSRTVTATSAGHLEALRWARQWPERRWALEDCRHLSRRLEGDLLAAGEAVLRVPPKLMAGARRGGRELGKSDPIDALAVARAALREPGLPVARLEGASREVKLLLDHREDLVAERTRIQNRLRWHLHELEPGYEIPLRGLDRKVVLGALVELLNKHQGVVAEIASELVAEIVSKTERINQLERRVAGLMTELAPSLLALQGCAALTAAKIVGETADVSRFNSRAAYAMNNGTAPIPVWSGNHTRYRLNRGGNRQLNAALHRIAVTQIRLTCPGRAYLERRVAAGNTKTEAIRALRRRISDEVYRRLWQDHLVASARPAAVAA

SEQ ID NO: 477853 - protein, 324 aa, unidentified
MSDAIVGIDVSKKTLDAYCAKGQMQQGRTFANSPDGWKLVRTWLKVMGSKQAHVCMEATGRHSLGVALALHEAGHVVSVVNPAQIRDFARTKLGRNKTDKVDAALIREYAELFKPEPWTPPSPAMRRLCELQTMRAGIIRSRAEWKNRIGSGLGDISATKLAAATIDHFTTQLEAIDRAISETIDQDAELHGRRDLLVSVIGVGDTLAALLMAKMPEPGVLRRSGEIVAYAGLNPSHHRSGTSIDRPTRISKIGNAELRSALYMPALSAMRFNPAVAALVARLKSAGRLKPKQIVVAAMRKLLVLCFGVLKTGKRFDPAIAMSA

SEQ ID NO: 477854 - protein, 343 aa, unidentified
MDHFAGLDVAVKETSVCVVDDTGKIVLEVKVASEPAALLAVLKDGTYRFKRIGLEAGPLSQWLYSALAEADLPVSCVETRHMRAVLKAQINKTDRNDARGMAQMMRVGLYRPVHVKTLRSQKLRMLLTHRKLLQSKAIAIENDLRGTLRNFGLKVGIAGKVKFEARIKELVESFPDLVVLVEPLLAVRRVLREQIGVLHRRLLAVVRDDDVCRRLMTVPGVGPVVALTYRATVDVPARFRKSKSVGAVFGLTCAKYQSGEIDRSGAISRCGDEMMRTMLYEAAQSMLFHSTKWSWLKAWAMKIARHRGMKKAVVALARRLAVILHRIWVDGTEFRWTREAVTA

SEQ ID NO: 477855 - protein, 439 aa, unidentified
MPTPSLPVLDPTAAAIDVGSEQLHVSIAGGPPKVFGTTTGELHALRDYLLAQGVRSVAMEATGIYWLCPYEVLEKAGLAVVVVNGKYVKNLPGRKTDMSDCQWQGTLHAHGLLKPGFVPPEHIRRLQDYLRLRTDHIVMAGSHEQHMQKALERMNLKIHDVISDLTGVSGLKMVEAIVAGQRNPVALLALCDRQIQKNKAGRLRAALEGTWKDEHLFALRQAYELWQFYQKKIAECDQAIAAVLQVVAGPEDPKNPAPPATKRGGVNAPHITGLHGMLWRLCGGKDPTQLPGVADYALLQLLSEVGTDLGKNWKTEKHFTAWLGLAPGSGQSGKRRGSQRRSRNRAGRLFCVIARSVGRSVDKALGGFYRRLKGRRGGLVANLALARKLAELFWRLMVHGVNYVEQGLKKYEEKVAQTEQRLLQKLAKKYNLVLQPKVA

SEQ ID NO: 477856 - protein, 311 aa, unidentified
MFVGVDISKARFDVAVRPTGELFAQPNSPAGITEMVQHLQGLGPTLVVVEATGGLEELLVIALAECGLPVVVVNARQVRDFARATGRLAKTDKLDAMVLALFAEAVRPQLRPLPDAAQRALGALVARRAQLVEMTVAERNRLHASHDPAVRGDIQSHLAFLEGRLSQMDRELLEAIVANSALKTRFDLMVSAPGVGKVLAFTLLSDLPELGRLNRRQIAALVGVAPLNRDSGQLRGHRGIWGGRASVRRALYMAAVAALRWNPVVSRLYRRLVAAGKPAKVALVACMRKLLVILNAMLRSGTSWMPRAAVA

SEQ ID NO: 477857 - protein, 410 aa, unidentified
MEVIHPRCAGIDVSKRDAKVCVRIAGGGRRGATSTVTTWGAFTNQVLALRDHLIEAQVTLVVMEATGDYWKPFYFLLEDSLNVMLVNARHVKNMPGRKSDVSDAAWLADLGAHGLVRGSFVPPAPIRHLRDLTRTRTAITRERGREVQRLEKLLEDAGIKLSSVASDINGVSGRAMLEAMIAGQSDPKVLADLAKRGLRSKIPALTEALTGRFSEHHAFLARLHLDLIDRHTTAIKELTDRIEVVVEPFRGFRELICTIPGISTLVADVITAETGADMSRFPTASHLASWAGTCPGSNESAGRVKSTKTRPGNPYLKGALGVAAMSAARSKNTYLSVKYRRIASRRGPMKAIVAIEHAMLTAIWNMATTGALYDDPGSDFYTRRNPDKAKRRAIEQLRVMGYTVTLEPTG

SEQ ID NO: 477858 - protein, 375 aa, unidentified
MNNNNTLYVGLDVHKESITVAYAINSEPVELMGKIGTSPTDIQNLCKRLRSKSSQVSIVYEAGPCGYGLYRRLVKSGFDCMVCAPSLIPKKPGERVKTDRRDAIRLVRSLRAGDLSAVYVPGVEDEAFRDLSRAWASARDDLRHTRQRLKSFLLVHGVHYVGRADWGPAHRRWLSKYSFESPWRQLAFDEHRRTIEERQAQCERLESALKEAVTEWRLYPVVEALQAMRGIQFITAVGLISELGDLTRFEHPRQLMSWFGITPSEYSSGGSRHQGSITKAGNSYARKLLVEAAWSYRHPARISPAIQKRQENLPRPVIDRAWDAQLRLCKRYRKLQAKEKNVNITIVAVARELAGFIWDMGRIAMSVAQQPQCHK

SEQ ID NO: 477859 - protein, 341 aa, unidentified
MDIVVLGIDLGKNSCSLAGLDASGRVILRRRMRRSSVESFVKGLGRCIVAMEACCGAHHLGRVFAAQGHETRLMSPEYVRPYVKAQKNDELDAEAIAEAATRPTMRFVAVKSQTQSDIQALHRARERLVSERTALINHLRALLLERGIVAPQGRRRLQEELLVFADEDRIEALSPRIHLLIEDLRSEWRALDERIAAFDAEFVRMAREDEAVRRLTTIPGIGTINATALAAAVGNARAFRRGRDMAAWLGLTPRQMTTGGKPRLLGISKRGNRYLRKNLIHGARAVLPYLVERETPLGRWARGLLARAHKNVVVVALANKLARIAWAVLARGRTYEAAAAV

SEQ ID NO: 477860 - protein, 403 aa, unidentified
MCTRRVGIDWGSEAHQVCRIDAGCEPKQRTFPHTGEGLKALVEFVVEGGIDRDQILVAIEVSQGPVVEALLTLGLRIYSINPKLQDRLRDRFSLAGAKDDRRDAFVLASCVESDMHAFRRIEPGREENVRLRGVTRLREELKTERRMNTNRLWSELRDYRPELLTLCPGADEEWLWSLLEKAPRPSEGARLTKAQIGAVLKQHRIRRLKTEEVQAVLRRDLLWLSSAYIETHVSRVLVLIARLKLAQTQVAEVERQIQKAVSERLKTEEQSERRDLTILLSLPGVGPLTAATALAESGNAFERRDYNALRALCGAAPITKQSGSTRLVEMRGMCQPRLRASWHQAALVACQIDPKLRALYLNARARGQSLGRALRNIVDRLLYLAVQLLRRNELYRIELRQVT

SEQ ID NO: 477861 - protein, 337 aa, unidentified
MASQYVGIDLHRRRSVIVRQTPDGEVVDTVRIDNDPVALSCAVAEAGPNPEVVIEATYGWYWAVDVLEACGATVHLAHPLGIKAFAYRRVKNDVRDASDLADLLRMGRLPEAWIAPPYLRQLRELVRYRAKLVALRSGLKAQVHAVLAKEGVAVRMSDLFGKEGMDLLAETRLGTCYRMRVDSLLELIDAFDAEVAFLTDAIAARLRHHPGYHTIQQIPGVGPTFAAVFVVEIGDISRFKRPAQLCSWAGLTPKHHESDTTVIRGHVTKQGSRLVRWAAVEAVQVLPHDWKLRADRDRIAARRGRAVGKVAAARKLLTLVFYGLRDHHIRCLDNAAA

SEQ ID NO: 477862 - protein, 361 aa, unidentified
MAQAKTWAAFDVHVSGVVAATLDRESGELRVQRLPGGSDAVVEFVAGLSGSVRATYEAGPSGFVLARKLEAIGVDCLVCAPGLIPRGASDRVKTDRRDAERLVRLLAAGELHRVAVPSVEAEALRDLVRAREDLRGDLMRARHRLAKLLLRHEVCFDGPQANWTQAHLGWLAGVRLAQPASQRALEDYRGAVASLMIRREQLEAEIARALPCSPWAQTARRLMCLRGIDTLTAAGLCAEIGDFARFSHPAQVMSYLGVVPSEHSSGERRRRGPITKSGSRHARRLLVEAAWHYRRPPRVAGSLARRQRGGEPQILALSWKAQRRLHHVWNRMEQRHKRRTIIAVAAGRELAGFCWAVATTD

SEQ ID NO: 477863 - protein, 461 aa, unidentified
MPKRNASPSSSRRPKTGGRIIKANPNTDLHLLNQHAAGIDIGAERHYVAVPPAAAAHAVREFSVFTKDLYAIADWLDHCGVKSVAMESTGVYWVPLFEVLDERGFEVKLVDARKVKNVSGRKSDVLDCQWLQQLESYGLLTPAYRPTDEIIVLRGYMRQRAMLVKNASSHIQHMQKALQQMNLRLDNVVSDITGQTGMRILKAILGGERDVQKLGAMRDRNCKATAEVIAQSLVGNYRQEHLFALKQAVELFEFYQEKIGECEAEMEAYLQNLSGKRADEPPPLVGGGKRQRMNFNVRDYAWKLLGVDLFRVQGLNSQTVLQIISEVGVDLSEFASEKQFASWLSVSPNRRVSGGKVLSSRTQASRNRAAIAFRQAAVSVARSKSELGAYYRRMQARKGPGAAITATAHKLARLYYSLVKNGQEYDEGRARADEERQRERMVTNLRKRAKGLGYELVALAA

SEQ ID NO: 477864 - protein, 358 aa, unidentified
MHTQIKDLDFTGQNIYAGIDAHKKSWKVSIYTDVLYHKTFNQPPKPEVLYHYLTKHFPNGTFYSVYEAGFCGFWIHERLQSLGINSIVVNPADVPTTDKEKKQKTDHVDSNKLARQLRNRDLEAIYIHKRDILEDRSLIRMRRTLVKDLTRYKNRIKSKLYFFGIEFPEQFNRDRFYWSNRFMDWLSQLKLNRESGTDSLRILINHVIILRKDLLEVNRKVRKLSQNEYYREKINLLMSIRGIGLTTAMIIQTEIDDIHRFDNQEKLASYVGLTPTSHSSGDKSIHGEMVNRGNKFLKSAIIESAWIAVRVDPVLHMDFIGYSKRMKKNKAIVRIARKLLNRISFVLKNKVPYKDGII

SEQ ID NO: 477865 - protein, 336 aa, unidentified
METKTKFIGIDFSKATFDATIYEGEHCKFTNDDQGFKEFLEWVKTHIDGLSLQDCLFCGENTGNYSVRLSNFLYVHHCTMWLESALRIKRTMGLVRGKDDKIDSAYIARYAARNAEDAVSYEPCCKNIGELRHLFARRQLLVSQRTALMNAGKEANVLGEKSKYDRALEKQNTKLVTMLAKEVLRIEKMMLEVIQADERLSRQYQHITSIKGMGPINAIALISVTEGFTKYASDAKKLACHAGVAPFKKESGTSVNGGTHVSHLSNHILKPLLTQAALSAILYNRQIIAYYERLISRGKKSQVALNNVKNKLLHIVIGLIRKDEDYDIQYQPAPKI

SEQ ID NO: 477866 - protein, 340 aa, unidentified
MTATTYGLDIAKSVFQLHWVDAQTGEIVNRRFSRGELIKFLSFRLPGRVALEACGSGHWWARKIRTMGHEVVLLHAKFIRPFVQTNKTDAADARAIWTAVHQPGMRTVAVKSEEQQAMLSLHRMRTLLLKFRTMQVNQLRGLLYEFGATFRAGRVAGLAEIRARMAELESQLPGTMLSCLQEQLGRIDGLQQDIDRLEARIAAWQKQDQACRAIADVPGIGRLTATALVATMGDAAMFKSGREFAAFLGLVPRQSGTGGKVRLGSISKRGDPYLRTLLIHGARSVMYHTKVPTPWQREIQARRPANVVAVALASKMARTAWAILARGQAYQRNFVSVKPA

SEQ ID NO: 477867 - protein, 341 aa, unidentified
MSESALIGIDLGKHTFHLHGQDKSGREVFRRKCSRAQMMQFFGNVPSCVVVMEACAGSHFVARQLMAMGHTAKLISPQFVKPFVKGNKNDFVDAEAICEAASRPSMRFVTPKTESQQTLSVLHRMRESLVHDRTKTANQMHGFLLEFGISLPKGLAIMKRLASVLAEHDLPVRLTVLLQRLHDHFVYLDEQIKALDKELAGQLANDDLGSRLLSMPCVGPITASLLAVEMGDGKQYRCGRDFAASVGLVPRQYSTGGKANLLGISKRGDKHLRQLLVQCSRVYMQRLDHQKGALADWVKTLLSRRHSNVVACALANKLARIAWAIAARHTQYEAGPDALNA

SEQ ID NO: 477868 - protein, 315 aa, unidentified
MLYDGIKGRIKTRNIQNNRHSVENILRWLRLQHCGPEDVHVVMEATGVYHERLATELHDAGFYVSLANPHRSREFSRGMGIMTKTDKVDAYMLACYAFLKNPHRWEPPAPEIRYLGALLRRRDVLLGDALREENRLEKYLSTDTPADIISSCMHMAQLLREEVSNIERQIKAHIKASPALRRDYTLLTSIKSVGPQLGMHMLVVLRSHDFSSAEQAAAFLGVVPIEKRSGTSVRSRPRMSKIGPPQLRAKLYMSALCGKIYNKRMRNIYDEMCLRGKPKMVAIGALMRKLVHWCYGVLKTGIVFNDEGLKQVLST

SEQ ID NO: 477869 - protein, 365 aa, unidentified
MLGVDVGKAELYGTWRDPVTEKVRWHGAVPNTVAGIRQLLRRAPESPVVVEPTGRYGEVLIRAAQAEGRTVLLAPTRRARAFLNAVQTRAKTDRVDSDGLALYGLRGRLRPYTLPSDEVDELKQLLAARRGLSQSRSALKQQQEALPRAAATLAPAIVALTQQIDTVDRQLAKLSVAPKPPRVSKKTTTTSAAVAAAPASIPEAAEPVAPAAPPPSPVLAAARTLRTVPGFGPVTAAALAACLVDKQFTHPDQFVAYLGLDIRVHQSGKRHGQFGLSKQGDAELRRLLYIAALSATQSREPSFAQRYAREKAKGLANTAALNAVARKLAKVAWSLIAHNTTYDPQRVDRQPSKDVAQPRMLDTQA

SEQ ID NO: 477870 - protein, 433 aa, unidentified
MNTPHPFDLVIGLDRSDRTADLHFIDPRSGQTGKQTIATSPEALHGWLAHLRQQHPEGRIALCLEQPAASLILFLETYSWITLYAINPLTLQKFREAFVTSRAKDDGKDAQYLAELLFTHHAKLKAWQPDDGQTRQLQQLVRHRRAVVDERTGLSNRLKALLKQYFPQALELCGEDLWRPLATAFLRKWPTLQRVQQAKPAAVKTFYHRHGSRSQKLIEQRLERIAKAVPLTDELAVLQSHSLRVHLICQELELRHRTLEEFDRQIAEVFGQHADREIFRNLPGAGPVLAPRLLASLGSERARFERAQSLQNFSGIAPVTKQSGGKRHVHRRYCCPKFFKQSFHEYAKESILHSRWAAAHYWQQRQKGCGHHTAVRSLAYKWQRIIWRCWQSRTIYREEIYEAALKQSGSPLVALLDQIQVGKSPMNTLAKKS

SEQ ID NO: 477871 - protein, 410 aa, unidentified
MKVAGIDVHKKVLMVVVVDASTPEEKPARRRFVTMPSELHRLLTWLREQGVEEAVMESTAQYWRSVWLELEPHMRLHLAQAFSNRAPRGRKHDFKDAERLVRRLIADELILSFVPSGEQRIWRSLTRMKLQLTRDRVRLQNQIECLLEEMRIKLSIVVSNLLGASGLRILHALANGETDPKRLAQLGGERLQCTEEQLVDALTGRAQPVHGAMLALQLERLQLINQQMERLNSMIAAAMKPQQDAVMRLAEVPGLGVDSAQQIIAEVGAQAGTFASAAELTSWVGTCPGKEESAEQNHSSRSAKGNKYMRRVLNQAAHAAAAKKGSHFQIVFRRLLPRLGYQSAIWAVAHRLCRLVWKILHEGVRFIEKGAEVHPREKKKRAQMLARALRKLGYEVTITPLNQLVPKPAV

SEQ ID NO: 477872 - protein, 367 aa, unidentified
MEKSSKVFVGMDVHKESIDINLAEVGGEVRRLGQIGGDRGSLLKMVRKQQSQGGERVFVYEAGPCGFWIHRELAALGERCMVVSPALVPKRAGDHVKTDRRDSERLASLARAGELEAIHVPDIRDEAIRDLVRGRDDAVIAQRRVRQQLKALLLRNDIRYVGKTSWSGAHRRWLSELKLPEPAQQIVFEEYVDAITVATGRIERLTRAIETQVLTWRFAPVVGALQAMRGIQFVHAVTLIAELGDLTRFASARALMGYLGLVPREDSSGEHRHQGSITKAGNSYARRALIEAAWAYRHPARVTRIIATRQTGLPKAACDIAWRAQLRLSAKYRRMNARHLHHNKIVVALARELSGFVWAIGHSVRPQ

SEQ ID NO: 477873 - protein, 385 aa, unidentified
MAPIRMPEAVIGLDVGKSSHWACVATRDGEVLLSTPVANREDDLDSLFGRFPDALVVVDQSRNIGALALARARAAGMSAAYLPGLAAHGAARLFAGDAKTDERDAMVIAKTALGIPDALLPVGDPGPTIAAARALAAQRNFLTCENTRNKNRLRSILLESCPAFEALVDLSDGSQLRLMASLGGAWSVADAGPRRAAALTRGAARGKIEALVRSTTSSTRPDASVVAAEDRAVKLLARRISENSAEIEAITAEISALLEGDDTYRCLLTVPGIGPKTASELAISIDIEDFPSHDRLASYFGLAPRNRQSGTSISSVTASRQGNKRLKNLLIFSCNCLTRTEGRWGDYYTRCRERGMSHGKALKALARKRLKVIYAVMRDRVPYAA

SEQ ID NO: 477874 - protein, 361 aa, unidentified
MKHHLKDTESVFADQMFYVGIDVHKKQWTISIRSNQTAIGKVLSVEPSAEKLSHYLRRSYPGGRFRAVYEAGYSGFWPARDLSSCHIPCMVVNPADIPTKQKELANKTDQVDSRKLARSLENQELKGIYIPDRAAEECRMLNRYRSRLVREETRLKNRIKAVLAEFNYRPPIDLEGNRWSGVYLRWLADIRFQTPYAQTAYDEQLGQLAETRARQARIVRQMKVMAIEDPTISIQMKLLQSVPGIGFLTAMLLMNELIDINRFKNLEALASFIGLVPSIHESDERSYSRGLTNRRHKELRSRLIESAWIAVRKDPAMSLKFGQLCQRMHRNKAIVRIAKGLLNRIRFVWKTQTAYAYGVIE

SEQ ID NO: 477875 - protein, 349 aa, unidentified
MTEQRISYAGERVYVGIDVHKETYTVTCVCHQQIVKTATVPAEPASLAASLLRWFPGATLASAYEAGFSAFVLHRALTQVGIANIVVNPASIAVAANDKVKTDRRDSKRLARDLADGRLRGIYIPTEAEELARLLPRTRAQIVKHRATIARQIKAKLHQFGLIAPSNRRLLSSRYLREIATWPLPRELGVSLTLLAEQWRFATRQLIEMRRLLRDQAKAQEEIEKVYRSVPGIGEVVARTFATELGDMTRFANERALFSYTGLTPSEYSSGTSVRRGHISRQGSSRVRHLLIETAWRALPRDAVLKEIFDRIAATRGKKRAIVAIARRLTGRMRACFRQGTTYAVGTYA

SEQ ID NO: 477876 - protein, 349 aa, unidentified
MIIIGCDYHPSFQQIAWVDSETGECGDQRLAHSDGEAEKYYRGLNGHGVRVGIEATGHARWFERLLAELKYELWVGDPAQIWAMRVRKQKTDRQDAQHLLKLLVEDRFPRVWVPSAENRDLRQLLWHRHRLVQMRTRIMNQLQAIAMNEGVRRKKGLWSKQGRRQLESFSLAPWATRRRQDLLELLDRLNPSIQELSIAIEQEAMQRPEVKRLMTHPGVGPLTALAFVLIIGSPERFRCGKQIGSYLGLVPCEDSSADHQRLGHISKQGNALLRFLLVEAAQATVRSDPEWRHQFLHLAMRRERAIAKVAMARKLAVRLYWMWRKGWDHQQMVQFGSHVGQPVVSHGVK

SEQ ID NO: 477877 - protein, 365 aa, unidentified
MNMASVRKEKRKQKKEIKIEALMSIGIDIGKDVFHLVGFDPNGNVVVRKKIKRMALEKTFEDLPLCIVGMEACLSAHFVSRSLRKMGFEPRIIPAIYVKPFNKGQKNDYNDAEAIAEAALRPNLKIVPEKSQDQLDLQALHRVRSRLVSRRTATINQIRAFLIEQGITVRKGLRALKNSFLTILEERKDEISPRMRKILIGLYGDWMWMDDRIDVVSKEIEQISHTEENCVNVMTIPGIGPMISTAMVAAIGTGDAFDRGRDFAAWVGLVPRQYSTGGRTVLGRITKRGSRYLRMLFVQAAKVILMRPHRWPDFSFGEWLIRAEPRMHRNKLAIALANKLARTAWSVLHHGTTFDAPRDEVAVGV

SEQ ID NO: 477878 - protein, 343 aa, unidentified
MSKISIVGLDLAKNVFQVHGVDASGGVVLRRQLRRGAVEKFFAQLPPCTVGVEACGSAHHWARVIGHYGHQVRLMPPAYVKPYVKRNKNDGRDAEAICEAVSRPTMRFVPVKSVEQQATMAVHTTRALLVRQRTMVANSLRAALSELGIVAAQGIKGLRELMAKLEAPYEEVPEIMRGALLLLARHWQSLEADERVLEQQIAKAARSDREARRLMEVPCVGPIIASTVLAKVPDATVFRSGRNFAAWIGLTGRDHGTGGKHCPGRISKQGDRMLRALLISGASAYLRHQRTRGVSDPWLRDLLARRPYKVVMVALAAKTARIIWAMLVKGEPYRDRASAPAAA

SEQ ID NO: 477879 - protein, 408 aa, unidentified
MKVLNRRCAGLDVHKDEVVGCVRLAGRGKANQAVRRFSTTTRGLLDLADWLEASGVTHVAMEATGVYWKPVWHILEERFQLVLANAAHVRNVPGRKSDVNDATWIADLMAHGLIRASFVPPAPIQELRDLTRTRKQLGREIVQHTQRIQKVLENANIKLSSLLSDMLGASGRNILKALIAGESDAEALAALGGPRLKCSRQELKDGLEGRITAHHRFLISQHLRMIEELEAAQGAFDARIEAALAPFRAAADRLTSLPGISDVAAQTILAEIGPDMSVFPTAGHLLSWAGLTPRLDESAGKRRSTRVKKGAPWLKPVLVQCAFAAARTKESYFRAQFLRLKVRRGPKKAAIAVAASILNAVYYMLRDGTDYVDLGPDHFIRYDKTRAAMRLVRRIKDLGYHVDIKVAA

SEQ ID NO: 477880 - protein, 355 aa, unidentified
MNSIKYVGLDVHRDTISVAVLNAEGKLVMQLVIATQASAILDFLQGLRGTLHVTFEEGTHSGWLYDLLVRRVAYLVVCNPRKNALLKAGSKSDAIDARKLAELLRAGMLSPVYHGQNSTAAVKHLGRSYAALTEDTTRIMGRLKALYRSQAIACAGKKPYGSRQRDEWLAQLADNGLQRRARRLYQELDLLQQLRREARQDLILECRKHGEAKLLRTVPWLGPIRAALLIGRVQTPHRFRTKRQFWAYCGLALETRSSTDYQMVNGQLERRKKPVFIRGLNRNHNHDLKNLFKSAATAAGGSDGAFGVFYENLLKKGMRAEMARLTLARKIAAITLHVWKKGEAFDAEYVKPQAA

SEQ ID NO: 477881 - protein, 356 aa, unidentified
MSQNLDVSPAAIGIDIGKNSFHIVGQNQRGAIVLRQKWSRGQVEARLANLPPCRIGMEACVGAHHLSRTLKALGHDARLMPAKYVRPYSKGQKNDYRDAEAIAEAVQRPTMKFVATKTADQLDLQALHRVRERFVGQRTGIINQIRAFMLERGIAVRQGLRFLRAELPGILATRSDALSPRMLRILEDLAGDWRRLDERIEGLSSEIEALARQDKGCERLMTVPGIGPIISSAMVAAIGTGDAFLKGRDFGAWLGLVPKQLSTGDRTILGSISKRGNRYLRSLFVQAAWVVLVKIGPKHWDRYGLKSWIEAARKRLHHNVLAIALANKLARIAWAVLNKERAFECVKTEETASRPA

SEQ ID NO: 477882 - protein, 376 aa, unidentified
MISIGIDVHKKKCTATLKRDSKRIVEQTSFCNNSYGINEFIQHIKGCYKEDAIAVCESTGNYWIRLHDTLEDNGINTLLANSLKTKIIAQAKLKDDKIDSNVLVDLLRADLVYESFVPDKEYRELRQLVRTRLNLVTERTVLKNKVHALLAKYEYQCPVSHIFSNKGTEWLKTIDLSWIDRMAVDAYLDALEAIQKQIGIFTAKIAFVSKEDQRVKLLMTIPGIDYFTALTIVSEIVDIKRFSTPWKLVGYAGLAPSKRDSGDAHRNGGHITRQGSKWLRYAIVEAANTSTRCDDRIGRFYKRIAERRGPQKARVAAAKEMLVIIWHMLIKNEPYRTMNREMVDGKRWKENQIWSETATVQCTKRLAVSKDFVWEW

SEQ ID NO: 477883 - protein, 403 aa, unidentified
MIFVGIDWAEAHHDVCLVDESGQVLAKRRVDEGLEGVGKLHALVAEYAQEPASVVIGIETDRGLLVGSLLAAGYQVFAINPLAASRYRDRHATSGAKSDPGDARVLADLVRTDRHQHRAVAGDSELAEAVKVLARAHQSLIWSRQRQVNQLRNTLREFYPGALAAFEDLDSPDAIAILELAPTPNRGRALSQAKIASALRRGGRARNLETKVTSIQSHLRQPQLEAPALVAQAYGHSVAANVAVIKQLNQQIAALEQELAASFETHPDAEIYLSLPGLGRVLGARALAEFGDDRTRFAHPKARKNYAGTAPITRASGTRKVVLARVARNRRLADACYRWAFSAITTSEGARRRYDLLRARGQTHHQALRALGNRLVGILHGCLANRDIYREDVAWHSALEVAA

SEQ ID NO: 477884 - protein, 419 aa, unidentified
MDVVVERCAGLDVHRDNVVATVRVPGAGRRRWDQHTRTFRATLGGLAELGEWLAGFEVTRVGMEATGVYWKTVFQALETRVECWLLNAQHMRNVPGRKTDVKDSEWICQLVAHGLVRPSFVPPPEIRRLRDLTRLRKAQSNERTRTIQRLEKVLQDAGIKLTSVASQTYSKSARAMLEALLGGVTDPDQLAELAKARMRSKIPQLREALANRFDVAHHGILVAQLLAHIDSLDMAIQTLDERIALMLEDHQAVVGRLCTIPGVATRSAQVMIAECGLDMARFPTVGHFASWAGMCPGHHESAGRRRSGRTRPGPRWLTEALTESAKAASRTKGTYLAAHHAQIRGRRGEAKAIGATRHDILVAYFHIVRDEVEFRELGPDWQRKRYSPERRAQRLQRQIEALGYQVTLQPADEKTAPTA

SEQ ID NO: 477885 - protein, 356 aa, unidentified
MQRTILNFINQHFFIGIDVHLKQWKVTIRSTGIELKTFSMNPSPLELFQYLQKHYPGGTFHLVYEAGFCGFWIQRAFTELGIQCIVVHPADTPTSAKEKVHKSDPVDSRKLARELENGSLKAIYVPQVASEQLRSLMRLRFRLVQQQTRTKNRIKGFLRVSGIVIPQQYLSNPRWSGAFILWLQSVKPSFNAGRFTLENLIVQLEQTRGHLANVLRQLRCEAASKNLASTVEAINTAPGVAFITTMTLVTEIIDVRRFSRFEHLCSFVGLVPSVYSSGDTSYDRGMSFRHNQYLRPLLIEAAWTAVRKDPAMTLRFNELCRTMSKQMAIIRIAKKLLRRIFHLWKQQDRYAYALVA

SEQ ID NO: 477886 - protein, 350 aa, unidentified
MNIYFGCDAHKRYSMFASMNERGQTGRPVRVEHTRAMYREFLRGLPPGSPIAIESVGNWYWMIEEMERAGHEPRLANAGKAKLMMGQINKTDKLDATGLATLLRNGTLPSVWIPPRDLRDERELPRMRMSLVWVRTMLKNRIHATLAKYAIEIDEVSDLFGVKGRELLKTRLEELPPYTRQSVETQLELLDEVKAHIDQAEKEIREVVKTTPAMTLLMTIPGVGPILAVVIGLEIGDIARFPSPEHLASYAGTVPRVRSSGGKTSFGKVRSDVNRYLKWALIEAANIIMMNQRPWSGTHLGQLYLRLRERKGHAKAVVAVARHLAGAVFWVLKKNEAYKEPQRSISSSQE

SEQ ID NO: 477887 - protein, 422 aa, unidentified
MSYCPVAGIDVSKRFSDMCILSPDNKIFAQEKIYHDETSINRANALLQKAERLFFSKPVIVMESTSHYHLILFQFFSEHGYDVIVVNPLQSNSMKDFSIRKRKTDRVDAFKLAMMYRTKTLRPSQIPQTATRALRQLCRHRAELLNDVSSYKNRLTALLDQTFPGYDKVFSDVGGVTSCAVLVRFPTPTILLVEEESELVEVIAAASKSGYSFAKKKAGLLISAAQKAQTLGIHSCADETLIVCTIQMLRTLSESVLQIETAIDNLLAQIKEMRNNVSLLQSIPGIGSHSAALLLGEIGDISLFKKPKQLAAYFGLDPTERQSGSFRGTKNKLSKRGSSYARAALHMGIVNSICKRGKDSAANPVLLSYYEKKCKNKPAKVAQAASMHKLVFIVFAVLRDQMPFELKTPEQHAVEQEFVKAA

SEQ ID NO: 477888 - protein, 361 aa, unidentified
MIHLARCHGIKVPSMVQSSELSTLGVSKMNSHVFGIDIAKQVFQIHWVDQETGEIHSDKVKRKDFVQYFANQQPSMIGMEACGGAHHWGRLFEKMGHTVKLLSAKKVKPFVVGNKNDVVDARAIWTAMQQPGMKFIAVKTEEQQSILGIHRMRELLVKHRTAQINSIRGLLAEFGLVMPKGKQAFKEKLPDCLAKLENKVPNAFLCALQVQVERLAQLDEDTKQLEKQIQSWFKHNEDCQRIAKVPGIGPLTATALIASMGNPSAFKSSREFAAWIGIVPRQTGTGGRVHLHGISKRGDVYLRTLLIHGARAVMSHSKEKSEWLESLQARRPKNVVTVALANKMARTTWSLVTNQTEYQPC

SEQ ID NO: 477889 - protein, 339 aa, unidentified
MTHIAMDVHKKRSKLAYVTPSMAEPKVVGCYTTPEGFAKVLRGLPGPWVVCIEATRQSPAVVRWLRELGVDEIHLVDPHELHRYLKGKPKSDARDAKEMLDLHLMGRLPECYLATQGVQDQRALSRGRDGLRRISTQLRNLLRALLTQQGLDLPIRDLRGKAGQEQMAAVIPQLPEHTQFVVQLLWALLEHVELALQRADARIREAVAADPVGQALTELNGIGPIGAFGLMAEIAEIERFEDPAHLISYAGLAPRANDSDEHHGPRRLPMRCNKRLRRWSVLGAQGAVRCCEDSNARRTYHRIVQRLKPNTAKIAAARALLKDVYYAWQQAIASYDAAA

SEQ ID NO: 477890 - protein, 344 aa, unidentified
MNTIRVVGIDIAKSVFQVCVWMADGSVAWNKKVSRQKLLDTVRQFPPSTLIAMEACSTSHFWGRTLQSMGYEVRLIPAQHVKAFVRHQKNDANDALAICETACRPELHFVSVKSTEQQDIKALRSARQLMVEQRTALANQLRSLLAEYGIIIPVGIQRLQQQLPDLIEDASNSITSTLRRLLSTLREDMLALNDRITGLDSEITALSAQQTSYCHLLTIPGVGPLIAAAFISEVNAAEFSSGRDLSAWCGLVPRQHSSGGKQKLSSLTKNGNRSLRTLIIHGARAVMRCVQKRDDSLGRWLKGIESRRGFLKATVALANKLTRIIWRVLTDSVDFNMNKAFAMN

SEQ ID NO: 477891 - protein, 408 aa, unidentified
MLKLYEKVCGLDVHKASITACIVGPEGKEIKTYGTMTADIIEMIEEIKNKGCTHVAMESTGVYWKPIYNLLEAEDVETLVVNAAHIKAVPGRKTDVKDSEWIAELLQHGLLNGSYIPKRDQRELRELVRYRRSLVQERSREVNRLQKVLEGANIKLSNVVSNVLGVSGRKMVEELIKEKDEKDLEVIAQLARGRMQEKIPQIIKALNGTIGKHQKMIIAAQLEHVDFLTKKIEDIDKEVEERMLPFKESLALLDGIPGVGLRVAQEVVAEIGTDMERFSDSSKLSSWAGMSPGNNESAGKRKTGKTTKGNKHLKSALTEAARAAAKTKNTYLSAQYKRIAARRGKNRAAIAVGHSILVIVYHILKYNKPFKELGDEYFIKQREKVVMKSAVKRLELLGFKVSLEPKAS

SEQ ID NO: 477892 - protein, 352 aa, unidentified
MMIIGCDFHPRFQQIAFVDQETGEYGERRLCHPGEAEQFYRSLAGRQVRIGAEATGNFRWFRRLMDELGHEFLLGDAAAIRAACPRRQKTDKRDARHILNMLVEDRFPAVWQPAVENEELRQLLLHRCRMVRMRVRVKNQLDSMAKNEGLLSSRVWSPRRRQQIETLPLPGWYALRRKDLFVLLDELDKQIRPLDESVRKAAEDNQEAGLLMTHPGVGPIVSLAYVLTIGDWRRFPRGKQVGSYLGLIPAEESSSDKRRLGHISKQGNTLLRWLLVEAASTAQRYDPSWHRQYVRLSMNKHHGVAKVAIAHKLAVRLYWMLRSGQDYKQVMERGSHVGQSAMPSGRGCRPKN

SEQ ID NO: 477893 - protein, 350 aa, unidentified
MKIVGCDFHPSYQQIAVLDTETGEVLEKKLMHANGEAQKFYHELQGPALIGMEATGNARWFELLVEKLGHQLWIGDAAKIRASYVRKQKTDKRDAAHILKLLVEKRFPRLWVPDGQQRDIRQLLTHRHKLVSVRTRLKTELQHLALNQGVQKKRQLWNAKGRALLASLPLEGWAQQRRKDLLQLLEVVEPQIVQLDKAVEQAAKADPQAVLLMSQPGVGPNTALAFSVTIGDVSRFERSKQVSSYLGLIPTEHSSGSKRRLGSISKQGNIFLRALLVEAAQSAVRHDPGFRKEYQHRCHHKEKGIAKVAAARKLAVRLYWMLKSNKSYSELVLNGGSPRHPVAGKAKPLS

SEQ ID NO: 477894 - protein, 442 aa, unidentified
MNPIPNDPNPASTLVAAPALPRPEPAFAAFIAIDWADEKHAVALQAAGHTQIERTTLEQKPEALTQWIAGLRQRFAGAKIALILEQKRGALLWALQPHEHLVLYPINPQMSAKFRQAFHPSGAKDDPLDADLQLDILLHHRARLTAWQPDEATTRQLSLLVEGRRRFVADQVRATNRLRDALKSYFPQALALVGEDLSSRMACAFLKKWPRLASVQAVKPAVLRQFYYAHHSRSAELLAERLQIQAQAQPLTTDEAILAAQSLLVQSLAQALATLHPVLARYDQQIARLFATQADFAIWESFPGAGPALGPRLAVAWGTQRDRFADRQAMSAYSGIAPVKEASGKALWIHMRWACPKFLRQTFHEMAKCSLQRCAWALCYYRMQIERGKGHHAAIRALAFKWQRIMWRCWQDRTRYDDAKYVASLKRSASDLYARLSAAPAK

SEQ ID NO: 477895 - protein, 320 aa, unidentified
MSQPQTIVGIDIAKSVFQIHEVDKETGEVTSRQIKRARLLQHFINREPCFIGMEACGGAQHWARQFVAMGHTVKLLPAQSVRPFVGGNKNDAADARAIWTAVQQPGIKAVAIKTEAQQAVLALHRMRQQLVKFRTAQINALRGLLAEYGEVMPLGRDAVAKALPSVFARLVDRLPGVLIESLREQYTRIAQLDKEVSNIERRLQEWHRDDESCRRITAIPGVGLLTATATVAAMGDPGAFSSGREFAAWLGLVPRQTGTGGRVKLLGISKRGDRYLRTLLIHGARSVLMTSKTPPAWAANLAKRRPLNVAVVALAVAQGT

SEQ ID NO: 477896 - protein, 391 aa, unidentified
MTYYVGIDLAKYHHECLVITQEGEVVSNSFTFDNNKQGFNSLLSVLSSLDASKQIKIGFEATGHYGTNLKSFLIHHGYDFMEIHPVLISRFSKVSSLRKTKTDKIDVFLISSYLTTVEYKPYLTESYHITSLKSLTRSRDALVKERSLQLQRITNLLDYIFPEFKPFFNHSLTSATCQYLLINYATPSKMSRMNQNSYDKMRSKLRRTMSYAKFLKLRELAKNTVGVENPILEFQLNNYLTLYSTVNQLISDTDTLIEYEFSQFNTHLQSIPGIGIISAASIYCEIESFDRFIHPDKLVAFCGLDPAFYQSGESEFTGKMVKRGSSYLRQHIMNCAQYVLLHNSTFYDFYLKKRNEGKKHRVALSHVAKKLLRIIFKLEHHHINFDSTKMI

SEQ ID NO: 477897 - protein, 464 aa, unidentified
MKTLSVINPNAAGIDVGSEKLFVSIAGDEPVVFGTVTDEVYRMRDVLKQKGVTGVAMEATGVYWLYAYGVLEAAGLEVIVVNGRYVRNLPGRKTDMSDCQWLATLHAHGLLRGGFVPPAQIRRLQDYQRLRADHISEAASQVQKMQQALERMNIKFHDVISDLTGVSGMKVIKAILAGERQPERLLQLCDKQIQKKKSERVLESLHGVWAPEHLFALGQALSVWEFYQKLLAECDRQIEAVLKDLAGPPPASPPSSPESGEAKAKRPKPPGKNAPQIDDLHALLVRICGGRDATSLPGVADYLWLQLVAETGTDLSAWTTEKHFTAWCGLAPGTRQSGKRKGSVKRQRNRAGRLFCAGARSLVQSVDKGLGGFVRRISRRKGGLVATKALARKLAELYYRVLRYGLEYAERGLREYEQKYEESQRRLLAKLAAKHGFQLVSEHALALHAAISQAASPNPSPSHA

SEQ ID NO: 477898 - protein, 389 aa, unidentified
MLLDHPADGPTAIRTHIGAIFVSLELSRSNWLVTSLSPGKGEKMSKHSVTAGRVAELLTLFAELKRKVMVRTGQSYPIITIQEAGLDGFWLHRVLQQEGIESHVVDPASIAMPRRRRRAKTDKLDGEALLRALLAYKRGEPRVCAMVVAPSPDEEDRRRLCRERATLIEERIRHVNRIKGLLFSQGICDYAPLRRDRRARLAALRTGDGRELPSHLRAQIGRELDRIELLLGQIKAVEAERDALLAAARKPASKGAMPDPVTTLLALKGLGANFTAALWSEAFYRQFANRRQVAAYAGLAATPWQSGGVRHEQGVSKAGNPRLRTTMIQLAWLWIRHQPQSALTRWFKERSPQGRKRAIVALARKLLVALWKYVAHGVVIEGAVMKPAA

SEQ ID NO: 477899 - protein, 346 aa, unidentified
MEYFIGIDVSLEASSVCVMDQGGAVVKETKVLSEPDALITFVHGLDHEVSCIGMEAGPLSQWLYKHLTEAGLTIVLMETRQVKGALKAMPIKTDRRDALGIAQLLRMGWFRPVHCKSVSSQEIRALLATRKTLQGGAIAIELSMRGLLRGFGLKVGLVSKGLLDARARELAEGNSTLKASVTSMLRGRAALRAELIRIDKRLRDVARTDDVCRLMMTVPGVGPLVALTVKAGIDDPGRFRSSKMVGPHFGLTPRRDQSGERDVVGGISRAGDAGGRTALYQAATSMLYHSAKNSWLRAWGMRVAQRRGMKRAVVAVARRLGVVLHRMWADSTVFRFSLTDHPAKSV

SEQ ID NO: 477900 - protein, 326 aa, unidentified
MAEEKKMDMVGIDVSKEKLDVALLRDQGKFRDKVVANSRKGFLELAAWLAKQGVTQAHICMEATGAYWADLAEFLVDAGFEVSVVNPLLIRKFGESLGERSKTDRLDARVIAKFCAERAPDRWQAPSKAVRGLRALVRRREALIELRTEELNRRDSASEPRVLESINKVIAMLDEQIAQIERQIRDHIDCDPTLKDQRKLLESVPGIGPVVSAMLLSYYGGDLRFNSSKQAVAFAGLDTSRRESGSSVRGKPRLSKKGHSNIRGTLYMPAVVAMTKSDWGKAFAGRLVAAGKPKLLVIGAVMRKLVAIAYGVLKSGQPFNPALHSA

SEQ ID NO: 477901 - protein, 418 aa, unidentified
MRNTGDKAVELLHRRCCGIDVHKETVVACLRLVSDGQITTEVRTFQTTTAELLRLSEWLATSECSCVAMEATGVYWKPVWHILDDGEFALVLANARHVKNVPGRKTDVNDATWLAELLAHGLIRASFVPDSQTQEMRALLRTRKQLVRERSRHLQRVQKTLEDANIKLDSVVANVIGKSGRAMIEALIGGETNPVKLASLADRRIKASPQELREALRGRVTNHHRFLLRLHLNQIDTLDAAMAAVDAEVGANLGPFRTAVDLIKSIPGCDNLSGQVIVSEIGTDMSRFPSHAHLISWTGICPRNDESAGKRRSNRLRKGAPWLKTILVQCAWAAIKKKNSYLQAQFHRIKARRGPKKAIMAVAASILTAVYHMLKNGTLYQDLGDSHFDRRSVEQQKNRLLKRLADLGFAAEIKPLAA

SEQ ID NO: 477902 - protein, 415 aa, unidentified
MKVVFPTCCGVDVHKTFLVATIITTPADSLQPNYQKKRFSTFNSDLNRCADWLLEHNCLDVCMESTGKYWVPVFNILEKRGIRVVIANPKWVKAVKGNKDDTKDSKWIGDLFRIGLVKSSFIPDLNIRILREFTRYRYKLVSMKSSEKNRFQNAFTVCNVALDSVVSDMFGKSATAITDYLTSDESFDAEHCVSLLQRSLKKKAEQALESIEGFSIADEQKARIKIIREHHDFIEEMIATVDTRVNEMVAKYEGNINLLCTIPGIDRRSAITIISEIGTDMGQFGSSKRLCCWAGLTPGNNESAGKKKSVRISRAGVYLKPALVQVAHAAVKDNDHPYYKLKYERIAKRRGKKRAIIAIARMILTAVYSMFCTGEVWNPVDLYKVDMPGCLKEQQLAKAIKQATRFLEKQGLSVA

SEQ ID NO: 477903 - protein, 441 aa, unidentified
MPHGKRSRPRRDLSPIHPAAAAIDIGATMHVAAVGPDRDADPVRTFRTFTDDLHRLADWFARCGVKTVAMESTGVYWIPVFEILEQRGFEVMVVNARDAKHVPGRKTDVSDAEWLQRLHEYGLLRPSFQPQAEIAGLRAYLRQRERLLDYAAAHIQHMQKALMQMNLQLHHVVSDVTGVTGMTIIRAIVAGERDPNILASHRERGCHASVETICQALIGNYREQHVFALSQALELYDVYQTKVAACDKQIEAILKRLKKSATPASKLLPPRHRSCQPNAPAFDARAALHAILGVDLTQIHGLGPYLALKLVGECGTSLTAWPTAKHFTSWLGLAPHNKISGGKVLSSKTRRTSNRAASLLRLAAVSVGRTDTALGAFYRRLSARAGKAKAITATARKIAVLFYNMLRHGMSYADRFWPFLILSLRQAKSPQNEGMTKLFSR

SEQ ID NO: 477904 - protein, 345 aa, unidentified
MVVLGADLHKRSHTVVVIDATGRQLAEKTIEATDAGHLELRRWAAQWPDRTWGLEDCRHLSRRLDAELVRAGEAVVRVSPKLMAGARRSGREPGKSDPIDALAVARAVLREPDLPVATLDGPDREVRLLVDHREDLVGERTRHEQRLRWFLVELAVPEPAPRSLGRVVVQVALGAALVGRTEPVARFARDLLARIVELSATIRALEREIEILVRTSAPTLLALPGCGALTTAKIIGESAGISRFRSKEAFARHNGSAPVPVWSGNVVRHRLNRGGNRQLNAALHRIAITQIRLAGPGKTYLDHRQASGDTRTEAIRSLRRRISDEVFRRLRADEAAGSTGLAAAA

SEQ ID NO: 477905 - protein, 402 aa, unidentified
MTYDYVIGMDACKYFHHACVLDIDGTQVLSKRINQNEQSLRALFSAFSAYDHKVLVVVDQPNNIGRLTVAVAQDIGIDVRYLPGLAMRQLSRIHAGNAKTDIRDAYIIAHAAKNLPESLRSVDRVEEAFLQLKVLNGIDEDLARSYTRLINQIRSALVGCYPQFEQALRGQIIHRKWVLHLLARYGGPTKIKRLGKAKAAAFARRYKARNPEPVLDAIFAAISEQTVTIAGAHYAEMGVAMSAKDALLKLEHRQQIEKEVIKLINDIPHTQFLLSMPGIGPKTAAQILMTAGDMSDFPSAGHLASYAGLSPRTNQSGTSIMSNSLNRAGNKKLKNALWQSSFASIRFHERSRQFYERKRREGKRHNAAVVALARRRLNVLYAMMRNHEHYHDPAPSQEDLAA

SEQ ID NO: 477906 - protein, 370 aa, unidentified
MGKSALYVGLDIHKMSVDVAIAETGPAGEVRFYGRIGGDLEALDKVTRKLQAQGAELRLAYEAGPCGYQVYRHLTARGLECLVAAPALIPRRPGDRLKNDRRDALALARLLRAGELTPVKVPDADDEAMRDLTRAREDAICVERRARQRTVAFLLRHGRVYPGKTTWGRGHWAWLLQQVMDHPAQQIVLQEYLDAVREASARVLRLTGQIRDLVPQWHQAPFVAAYQALRGVSFIVAATVVAEVGDLDRFNNPKELMAYLGLVPSEHSSGASVRRGRITKTGNSHARRVLVEAAWAYRLQARVTRHLLKRQEGLPECVRQLAWKAQLRLCARYRRLLARGKTRQTIVIALARELAAFLWAIGRAVAPATA

SEQ ID NO: 477907 - protein, 403 aa, unidentified
MNAVGIDVSKGKSTVAIFQPGEKVVLKPRDFRHTQSGIGSLIEIIRGLDGDTKVCMEHTGRYYEPVATWLSDAGIFVSAVNPTLIRSFGDDSLRAPKTDKADAKKIARYTLDRWTKLKQYGHMDETRNQLKTMNRQFGFYMDQKTAMKNNLIALLDQTYPGANAFFDSPARSDGSQKWVDFVYTYWHADCVRGKSLNAFTEHYKSWCKRKGYNFCAAKAEKIYNDSADLIAVFSKNANTKMLVHQAVEMLNLVSKTVESLREEMNRLAATLPEYPVVMAMNGVGPTLGPQLMAEIGDVTRFEKRGSLTAFAGVDPGKNDSGQHSQKSVPTSKKGSPHLRKTLFLIMESLIQRAPEDDPVYAFMDKKRAQGKPYYVYMTAGANKFLRIYYGRVNEYLASLSESN

SEQ ID NO: 477908 - protein, 407 aa, unidentified
MAVTIGIDPHKGSHTAVALDEHETVLGQLRVRSGPEQLARLLEWAKAWPARTWAVENASGLGYLLSQQLVGAGEKVVDVPPKLAARARLLDNGDVNKNDPNDARSVAVAALRAKRLSEVTKEDHAAVMRLWARRRKDLTSSRTRVANRLHAVILELVPGGYTGEIYANKVERLLEAFGPVGAVAGARKELAEELLEDLRRLDTQLKELKERLAAVVAASRTTTTKVFGVGPVVAAITVGLTRDVGRFPDKDHFAAYNGSAPVEVSSGPKKLYRLSMRGSRQLNHALHMAAVTQVRHRHSEGRAYYDRKIAEGKTGKEALRALKRRISDALFAAMVADARRERQESQASGGPGGQTGNGSVACAAGSHPAKPALRPSHSQANPKARPLRQAAPTLGTRENEKKIPKAS

SEQ ID NO: 477909 - protein, 347 aa, unidentified
MLHLGLDLSRKRLDVCVLDERGEKLAVTAAPPDTDGLRELVRRTATYGGPVHAVIESMTGARFVHDTLELHGWDVDIADAQKVKGLAPLACKTDKIDAWVLAELSRRDLVPAIWLPDPDVRGERERARFRLHLVRHRVMLKNRIHASLMSFGQPCPVSRLFGLAGREMLATLDLPEPWTKNITTVLGLIDDVDEEIKSIERELRTLGADHPYVSLLQSVPGVAWILGYTIASEIGDISRFASPKQLVGYTGLCPRVIQSGEKDWRGPLAKNGPKYLRWALIEAAVHAARHPVYAEHYQRTKTRLGRQRGANVARVEVARKLAEAIWHMLQTGSYFSPTRSHCVSGRA

SEQ ID NO: 477910 - protein, 427 aa, unidentified
MSERKSLELRVSVDVGCRRHSVAVGLSDGQVLEEFEIRHRREGFQEFFSRIEKHQKAQGCQVAVAMEGYNGYARPLERLVRQRGYRLYNINNLKLARFKEIFPGAAKKDRIDARKGLELFQLRDHLPLAKDVLQEVTGTPKENEILKRLTRRRRRLVNERVGVVNNLQADLQAVCPGLLEITTEASNQWFLHFVISGDTILQLARLRKSTLLKIPAVGRKYASLIQQWQKRAHFSEEAQWVSEMIQEDARRCLELDERIKTLETKIKEVAKSSKIANTLLSIPGFGAVCTSELAGEIGTVERFSKEGSLALYLGMSMLDNSSGKYQGTKQPKHVNTRAKAAMMTAVDRHRKYVPQSQKYYEKKRTEGKTHNQAIRALGRHLCRIIYKMLKEQREYRVRSEKGDTQGRVDSRSCVKTKIRRPKISANS

SEQ ID NO: 477911 - protein, 346 aa, unidentified
MLYAGLDLSRKRLDFHLLDAGGATVDVGASPPDADGLRGLTRRLECHGAPVRAAIESMNGARFVHDRLELAGWQVEIADAQKVKGLAPLACKTDRIDAWVLAELARRDLVPAIWLPDPRVRAERERARWRLHLVRHRSSLKQRVHAVLLTHGKPCPVSDLFGVRGRQLLAQLGLPEPWQGTIEASLRLIDELEREIGECERELRRLGAGHRYVPLLCTVPGISWVLAYTIAAEIGDIGRFPTPRKLAGYSGLCPRVYQSGERDLRGPLSKQGPRYLRWALVEAATHACTSAAYRDRYQQTKARIGKQRGAKVAQIDLARRLSEAIWHMLSRGERFAPKGATDPLAA

SEQ ID NO: 477912 - protein, 341 aa, unidentified
MAQKLSVLGIDLAKQIFHLVGMDVHGTIVVRKRLYRAQGMTFIAQLPPTRIGMEACGGAHDWARRFREHGHEVRLMAPQFVTPYRKANNNDLRDAEAIAEAVTRPTMRFVPVKSVAQQDLQALHRVRERLMKARTALINETRGLLHEYGIVVPQGASTFRTHVLEQLAREVTKLTPSGLALFQQLLEELAALDARVATYDAQLAQVAQTHPVCQRLLTIPGLGELTATALVAAVSDAAQCKNGRQFAAWLGLVPRQHSTGGKARLLGISKHGDLYLRKLLVHGARSCLRWVDRKPDRRSPWVRSLMARRGWNRAAVALANKNARVAWALMSTEQVYRTAAA

SEQ ID NO: 477913 - protein, 347 aa, unidentified
MRYFAGLDVSLEETTVCVVDDGGLIVREARVASEPEALVAFFRGCGLVMERVGLEACSLTAWLHQGLTEAGIVAICIEARQAKAAMGAMPNKTDRNDARGIAQILRTGWYRAVHVKNPSCRSWRALLTARRMVLNKRRDVENGVRALLREAGLKVGTPSRKNFAARVGELVADDPVLAGLARSLLSVIDVMTQEVDRLTKRVLDEVRVEPTCRRLMTVQGVGPLTALAFRATIDRPDRFRRSRDVGAHLGLTPRRYQSGETDVQGRISRCGDELARTALYEAAHSLLIRSTKWSVLRAWGMNVAKRRGMARARVAVARKLAVILHRVWSDGSEFRWGKQVVTTTAAA

SEQ ID NO: 477914 - protein, 342 aa, unidentified
MEFAVTIGLDLGKSVFQVHGVSAAGAVVVQRRLTRSRLLQFFAKHPACLVGMEACAAAHHWGRELSKLGHRVRLMPPRYVKPYVKRQKNDAADAEAICEAVTRPSMRFVEIKTCEQQGTLVLHRVRLMLMRQRVQLSNAIRGHMAEYGLVAPVGRNGLQRLIAILGNPNDERVPAVARASLAPLVCQLGLVNDQVLENDRRVRVSARSTELGCRLMEVPGVGPVLASAMVATVPDPTAFKSGRDLAAWIGLVPRQNSSGGKEKLGGITKQGDRYLRQLLVAGALAVIRYAQRHGTKRPWLVHLLARRTPKIAAVALANKMARMIWAMMMTGERYREPVVAAT

SEQ ID NO: 477915 - protein, 317 aa, unidentified
MMEAIVERCAGLDVHQETVVACVLAGPLDRAPKSELRTFGTMTHELEELGEWLTEQGCTQVAMESTGVFWKPVWNVLEAFEFELVLANAHHVKNLPGRKTDMKDAEWLAKLLRCGLIESSFVPPVEIRELRDLTRYRRKLIYNATTEKNRIHKVLQDANVKLTTHMSDIFGTSGRLLLQKIVNDEVVTMEFLQTEMRGALKHKSPKLLQSLNGRLRKHHRNLIRMSWEHLMYLEQAIEQVEAETRRRLEDKQNALELLISIPGINEQSAMIILAEIGLDMSQFKSDGHLAAWAGMCPGNHESAGKKNEFEPDPVTAS

SEQ ID NO: 477916 - protein, 439 aa, unidentified
MDLHSPDQPSPPSQPFAAFIGIDWADQKHAICLSDCASNKTEHSTLPQQPEAIATWVGELRARFGGRPVAVCLEQSKGALIHALMAHDFLVLYPVNPATAALYRKAFATSRAKDDPTDAQICLELVRFHREKLRAWRPEDAPTRELRQLLEKRRRAINLRTKLTNSLRDELKTYFPQALELVGEDLHSPLACAFLLRWPSVQALQKAKKETLRKFYYAHNARRLDLVERRLENIATMKALTADAAIIEPAILTVTMLTRQLVPLRDAIAAFDQRIAQLYAAHPDHEIFHSFPGAGPALGPRLLAAFGRDRERFEGPASIQQYSGIAPVTERSGKSTWVHRRWTRPIFLHQSFFEYAGQSALHCDWASAFLQDQKARGKTHPTAVRALAFKWQRIMFACWQERRTYDDALYLQALKTRGSHLVHKLDKLQLEAVQKLTGE

SEQ ID NO: 477917 - protein, 455 aa, unidentified
MYFEKRDLPQYNSIVLVRARKAQIPIGECLYMKRTQNEKILQIKNETLIVGVDIAKKIHHARAFDNRGVELGKLLKFENSAQGFAAFDAWLAKIQQKHGMTEAVVRFEPTGHYWFNLGDHLAECGHKLAILNPYHVKCARELDDNSPSKSDQKDPKTIAMLVKDGRYRDVYIPDGDYQELREMVRERERLQERLGSLSSQIIRWLDIYFPEFVTVFKDWRGKAAWIALRRFSTPKRMAEVGAQEILLAWREEMKRPSLKKAEALCSTAEQSIGRTQGSGAAVRSLQNIMTEYELLTMQMEQLEEEMQECLFRIPHAAELLAIKGVGMVAVAVFVSEIGDIRRFKDPRQLIKYAGLNLRTNSSGEFKGKTKISKRGRRRLRHALYKAMIPILATNEEFRSLHQRNLTRTQNPLTKMQSIIALCGKLLRVIFALLTKGVEYEPSKIKVVTTDVAQAA

SEQ ID NO: 477918 - protein, 405 aa, unidentified
MFVGIDWASTEHAVCVLDQTGTTVRAFRIPHSAAGFDDLVARLRRLGAPAGLPVALERPDGRLVDRLLEAGHPVVPVRSNAIKAWREGEVVSGAKSDAGDAKVIAEYLRLRHHQLRTLTPFSDATRALRAVVRARGELVRQRVAAINQLTATLDAFWPGAKAVFPDIEREIALAFLQRYPTPESAAGLGEQCMAAFLTRHRYCGRTPAAELVARLRAAPAGLAGGAEATARRDAVLAFVGVLRALNQAIRDLDRSVIARLGEHPDSKVFASLPRSGQINAAQMLAEWGDCRDAYQSPEAVAALAGIVPVTKQSGKHAAVSFRWACNKRFRNAMTTFAHNSRLASPWAAKVYADAIARGHDHPHATRVLARAWVRVIWRCWVDQVPYDPVKHAAAQRLAEEEATAA

SEQ ID NO: 477919 - protein, 311 aa, unidentified
MATYVGIDIAKHGFDMAIDSEQNVQHFDNDAKGIQTCGKRLKQLKPDLIVMESTGGYEKALVDQLQTLHLPVAVVNARKIREFARAAGQLAKTDKLDALIIARFAAMFQPPAQEALDPQTQQIKALVSRRHQLVQMHTAETNRIEHAHDKAVARSIRTILKTIEKQIENVDRQIRDHIDNNPELKRKTEQLESVPGIGETTASLLVTELPELGHLNRRQIAALVGVAPINRDSGTYRGKRMTGGGRRHLRARLFMPTLVAARHNPIIQQFYQRLVKKGKSKMTALIAAMRKLLTILNTMLKKNEAWNPKTT

SEQ ID NO: 477920 - protein, 334 aa, unidentified
MNTIALIGIDLGKHSFHVHCLDHSGKALLRKKFTRTKLMEFLAGCSPATVVMEACAGAHFMARRIADLGHEARLISPQFVRPFVKSNKNDFIDAEAICEAASRPSMRFVQPKTEAQQAMRALHRVRESLVRDKVKTTNQMQAFLLEFGISMPKGIAVIKQLSTVLGEHELPPYLVQVLLRLQAHYHYLVKQITEIETALSQEIAQDDTGQRLMTIPGIGPITASVLSSQLGDGKQYAHSRDFAASTGLVPRQYSTGGKTTLLGISKRGNKTLRQLLVLCARTFILHIEHRKGKLADWVKQQLERKHSNLVACALANKLARIAWAITTQHTVFVA

SEQ ID NO: 477921 - protein, 359 aa, unidentified
MNLTQNDRLKQVTSDTLIVGVDVGSQTHFCRAFDWRGFELSRRVFKFSNTGMGFLTFLRWTEEIMNKTEMKKVIVGCEPTGCYWLTFQKFLQDHDVQLVTVNPFTVNRSMELDDNSPEKSDLKDPKTIALLVKDGRFSTSYLPSGVYAEIREASVCRDQIMKQHVRLSNQIQGWLQKFFPEYFECYADWDSTSGLMLLREAPLPQDILKIGAGGINQIWRDAKVRAAGIKRAQTLVEAAQNSVGLEAGEAARLEIWDLVNDYILKAEQLKRLDEYLEEKVKEVPNVEKLLAIKGVGMSTVIGFIAEVGDIGRFTDPKQIQKLAGLEIVKKSSGKKKGQPRISKRGRRKLRRTMYESAKD

SEQ ID NO: 477922 - protein, 339 aa, unidentified
MGLYTGFDLHSTNTFVGIIDEGGARLWKKKLRNDPSLISETLRPFKKDIVGIVVESTYNWYWLVDLMMEEGYQVHLANPSRVQQYSGLKHGDDEDDAFWLAEMLRLKILPEGFIYPKEQRPLRDLLRKRGHLVRLRTSLILSLQNILARNMGTKMKTNRMKALRTDYVTPLLAGNDDLSLAGRVSKAAIDSLTRQITAIEVVVEKKMNLRRPYDLLLSMPGVGRVLALTIMMETGPIDRFADVGNYASYCRKVPAGRFSNDKKKGTNNRKNGNKYLSWAFAEAGELARRFDSEARAYYDRKRRRTNAPIAHSALSHKLARAAYYIMRDGVPFMPEKAFA

SEQ ID NO: 477923 - protein, 506 aa, unidentified
MKVQASKPTFTIDYNPIGQYGSNICRQDIGRKRPYRSLLRQRYWAWSFTSKLITMAKVAKRKQTSKGLRLEVVNPNAAGMDISPKEMQVCVPSDRDGECNRTFGVYTEDLHYIAEWLKACCIDTVAMESTGIYWLPVFRILKESGFDVILVNASDVKNFSGRKTDASDAEWLMMLHSYGLLKPCFQPENIARTMRNLVRHRDNLIRSASREVLHLQKAMEQMNLKLDNVFSDILGKSGQSVIKAILNGERDPKVLSDLADPRCRTSKEEIEKSLQATWDEEHLFEMRQSDSLYQFYQQLIAECDAKINEIAMQYSATVDAPKTELLRSGKYNAKKNRIGFDVEKVAFELWGVNVMRIPGMSRGALLRLVGELGAGFTTKFVDVKHFVSWANLVPNNKISGGALLSSKVPKKKNPVGIIFRQAANTLKAAKNPLGNYFRHMRAKGGHLQAMVATGKKLASIFYCMVQRKVEYNEKVYCNHRKQELQNKVAYLHKRLQRMESELANCG

SEQ ID NO: 477924 - protein, 341 aa, unidentified
MSIITVGIDLAKNIFAVHGVNEAGKPELVKPKVTRDQLLPLVANLPPCLIGMEACTGAHHWARLFRQHGHTVRLIAPKFVTPYRMSGKRGKNDAADAAAICEAVTRPQMRFVPIKDEHQQATLTLHRTRQGFVEERTALYNRIRGLIAEFGIVLPQKVERLRHEIGAHLEDLPGWVNRCVGDMLSHADRLDERIHEYDHAIAEIAREDARCRRLMQLPGIGPTSATALVSSIGQGHDFDHVRQLAAWLGLVPGQYSSGGKARLGRITKAGDGYIRSLLVLGARAVLNSLKDKQDRFSRWARNLLERRGYWRATIAIAAKNARLCWAVLKYGEDFRLNPSEA

SEQ ID NO: 477925 - protein, 344 aa, unidentified
MEYFAAVDVSLKLSSVCVVDGTGRILHEAKVASEPEALVAFLRGSGLAFTRVGLEAGPLSQWIHAGLTGAGFEAVLLETRHVKAVLRSAAVKTDRNDARGMAQMVRMGWFRPVHAKTIPAQEVRALLVARKQLQAWLNNLERCLRGILRGFGLKLGEVAKGRFEARVRELVAGQRTLEGLAGPILRARAALLAEYSALHREVLRTVRTDTDCRRMMTVPGVGAIVAMTFKAAVDDPNRFKHSRDVGAHFGLTPRRHQSGEVDRSGYISKSGDGDVRTALFEAAHVMLLRVQRFSALRAWALRVAKARGLKRAKVALARKLAVVFHRLWVDGTEFRWSREAAASA

SEQ ID NO: 477926 - protein, 342 aa, unidentified
MKNVKLYAGLDMHTETTTGTIKDEKGNPVRVLKVETSSEGMKKLFERLKKKNISAVFEASRNWPRYAGLVKPYCDNVVMAHPLKVRAIASARIKTDAIDSNILSDLLRANLIPESYMPSTDIVELREILRYRCFLSRQRANFKIKVRNILSREGKKCEFNDVTVKKARLWIDNLELQELNQKELDYVLSLIDNLSKEIMNMDKIIDKYQYKYPEVDLLKSIAGISTYSGLLILSEIGDVSRFPTPQKLAAYSGLVPSTYQSSNTCYQGRITKRGSKWLRWILTQCVHASIKTRRTHRLKHFYLRLQRKKGKQKAITATSRKMITIIWHLLNKNEFYAYQKNV

SEQ ID NO: 477927 - protein, 403 aa, unidentified
MNNVAGIDVSKGKSMVSVLRPFGEVVAKPFSVGHTGSELKELADYLKSLDGETRVVMEHTGRYYEPVARFLHDEGVFVSAVNPKLIKDYGNNTLRKVKTDKADSRKIARYGLDNWAELRQHTPMDTIRMQLKTLNRQQSLYSKTKTMMKNNLIALLDQTYPGVNTLFDSPVREDGSQKWVDFATTFWHVDCVRNMSLTAFAERYRKWCKRHGYNFRQSKAVEVHTGAQDLIAMLPKDALTKTMVRQAIDALNAVSASLERLKAEMQALAAQLPEYTVVMAMHGVGDSLGPQLMAELGDVTRFTHRNAITAFAGVDPGADQSGTHEAKSTRVSKSGPPELRRALFLVMDCLLKTMPQDDPVYRFMDKKRAEGKPYLVYMTAGANKFLRIYYGRVKEYLASLEGN

SEQ ID NO: 477928 - protein, 369 aa, unidentified
MNKVLYVGLDVHADTIAVAVADEGRLGEIRYFGTISNTADSVLRLTKRLVEAGKVPTFCYEAGPCGYGLYRHLTKLGFECAVVAPAMIPRKAGDRVKTDRRDAEMLARLWRAGELTPIWTPDEEQEAMRDLIRTRKQALDALKIAKQQLLSFLLRHGLRYQNGSYWTTRHRRWLAEMRRFRYPHQQLAFEELKRAIDQIEARIATLDNAIEEAVPRWHFAPVVDALRALRGVNTLIAATVVAEIGDVTRFGNPRQLMAWLGLVPSEHSSGSTTRRGRLTKSGNALARTMLVEAGWSYRHMPKEGQPYLKRSAHLPQEIRDIGWKAQTRLCKRFRHLSNAGKPQPRVLAAIARELAGFIWDIARKTPLST

SEQ ID NO: 477929 - protein, 327 aa, unidentified
MAKQKQPKEVTFEEVVERGCGLDIHKKEIVATVNGTGIIQETRTFQSTTRSLTELKEWLLTLRVTHVAMESTGVYWKPVLNILETGGFTIMVVNARHIKYVPGHKTDKKDSAWICKLLRAGLLKGSFVPCRSQRDLRDLTRYRRKLVQQQAAEHNRMIRIFEDANLKLSSVFSNIRGKTCTAVIDAVIAGETNPEKLSELCTHWKLKSTKEEIALAVEGKFTEHHIFMIRAIRTSISNIEAEIDHLDKEIERRMQPIEERIRKLCEIPGMSTNSLRELLAEIGVDMDVFPTAEHLTSWAGLAPGNNESAGKKKVHTPTTETKLLRLS

SEQ ID NO: 477930 - protein, 345 aa, unidentified
MQLMYYIGLDVHKRIISFCVKEGSGKLHSEGKIPATRFDLNRWMKTLPQPWSAAMEATMFSGWIYDHLKPHAAALKVAHPLMLRAIAAAKKKNDRIDANKICDCLRCDFLPECYMAPTAIRERRRTLRYRNLLVRQMVQMKIKIGTLLMEAGVSYNKQKLHKAGYFRELLTSNPDINEGLRPLLRLCRETVVRLSKLESALVRSLERDQFLVERVERLMSIPAIGPITALTWALEIGEVQRFSSIKKAISYCGLCGAEKSSGNTVQRTPLSKQRNKHLQTTLIEAAKMAPRNSSQLAMLYDKERQKGNANRATLAVARKLVAYLMAVDRGQRNFQVVETNNCIAA

SEQ ID NO: 477931 - protein, 416 aa, unidentified
MKEWKEMTHYAGFDWARDHHVVVIVNQQGQIVADFEFEHSVEGWKSFGEKTAGFANLAVAIETSQGAAVDQMLQRDYTVYPVNPAAAASYRQRKAPSGTKTDHIDGWSLADALRVDGQGWRALQPADELSTQLRLLCRDEVALIAQRTLLVNQLQQALVEYYPAALEAFEDWVSPATWDFVLEFPTPQALTKAGKRRWEKFLHTHRLWRPETVEKRLAIFWQADQFKASAPITKAKSQLALSLCKLLRTLQQQLDQYREQIEALFKNHPDHDLFGSLPGAKKMLAPRLLAAIGSDPGRYGTFQALQSFAGTAPISFESGKIHKARIRWNCDKFMRHTMHLWADCFHRVSPWGQAYYRKKRQEGMTHACALRCLGQRLLKILFRMISDKKPYDAELHARNQKKHGSWVLALIEKPAA

SEQ ID NO: 477932 - protein, 392 aa, unidentified
MIYVGIDVAKEKHDCCILGPDGEVFKNSFTFTNDRKGFNELLAAILNALQDDLPDKVCAGLESTGHYCTNLVAFLRANGFEPVVLNPLSVNLFRKSQTLRKTKTDKADARFIAAMLLTSDSIPRTSVSYHIEELKVLTRSRSRLVGYRSRLKISLTRLLDVVFPELSDLVWSTNQKSVYCLLLELPNTQAIAHCRIDRLTNILSSGSHGKYDREKAFEIRQAATDSIGSNSPALAFELQQTIRLVQNVQIELDLLDKRIKEVVKSTKTPLLTIPGIGHTLAGIILAEIGTIERFRTPAQLLAFAGMEPSTFQSGKFNANQTPMVKRGSTYLRWAVLQAARLVAMRDQTFRDYLLKKRCEGKHFNVALSHVGKKLIRVIFHMLQNNRAFVPQS

SEQ ID NO: 477933 - protein, 416 aa, unidentified
MNAVGIDVSSRKSTVAVLRPLGEVVCLPFDVTHDIAGLASLVEKLKALDGETRVVMEHTGRYYEAVEKALHEAGLFVCAVNPLLIKEYGANSLRRVKTDKADAVKIARYALDNWADLRDFTPMDAIRYDLKTLNRQFQLASKQRTASANNLIALLEQSFPGIRKCFDSPVRSDGTQKWVDFAHSFWHVDCVRKQPFPAFCERYRKWCKRHAYLFKLSNAEEVYALAKRAVVLTPKSKVVKVLVQEAANQLISISRSVEVYRAEMDRLAAMLPEYPVVMAMYGVGKSYGPQLMAEIGDVRRFERKQALVAFAGIDPMPNQSGDKNVRSNKSSKRGSPYLRKTLFNVIRTYLQCAPQDEPVFQFLNRKRAEGKPFYVYMLAAANKFLRRYYAKLRDYFASLDTLQPVAPIPTILKAAL

SEQ ID NO: 477934 - protein, 367 aa, unidentified
MSSIAHRGFVHLGMDVSKDSISVAVLSPDRDTAEVDKIFHDADSVRRLVKRLGKPKGIWACYEAGPTGYDLQRLLTSMGVRCDVVAPSLIPKSSGDRVKTDRRDARRLAGLHRAGELTPVAVPTPAQEGVRDLCRTRGDMVQDLTRARNRLSGFLLRHSVVWRGGSKWTERHRRWLATLSFDDPAIATTYSHYLATVKLRDTELESVEADLVPWCTKDPFGDQVTRLAAYRGVTTIGALCLAAEVFDWRRFPRARPFMSFTGLVPGENSTGLTQRRGSITRAGNAHLRGQLCEAAWAYQHSPNVGVAIKERQVNVPPETVARSWAAQVRLSRRFHQLGAHKNVRSVVAAAIARELAGFLWAEMVAQG

SEQ ID NO: 477935 - protein, 316 aa, unidentified
MESVSFPKIVSRGCGIDIHKKVVVATINGEGLRKETREFNTFTSSLTELKDWLLANNITHVAMESTGVYWKPVYNVLEPCGLKVWIVNARHIKYVPGHKTDKADSAWICKLLLAGLLKPSYIPSKEQRKLRDLTRYRTKLIQQIASEKNRRIRILEDCNIKLSSVLSNTNGVVATSLITMLCEGRKITMSDIESVYHGRINASKEDLFEACNGIMEAHHVYLLGIINNDIKQTRTLIESLNVHIKDMLSEYENILELLKGVPGLSTKTVQDLVAEIGLDMNTFPTDKHLASWAGMCPGNNESAGKKKVEELPTEIN

SEQ ID NO: 477936 - protein, 415 aa, unidentified
MSLKIVYKICCGIDVHKTFVVACIASTNDKGITSYESHRFSTYTSGLKTLLQWLLNRNCKDVCMESTGKYWIPVYNILENDCSIVLAHPKYVKAIRGKKTDKKDAKCIADLFKHDLVAGSFMPPADIRQLRDLMRYRFKLTCFQSSEKNRLQNCLTVSNIQLGNVVSDTFGKSAQAIPDKLLENPADTSFNLEPLVYKSLKKKLHELRDAIDGYITPEQVGKLKVIKAHYESLESRKAELEELILALAAPYQQELAILQTAPGIRSIFTAIGIISEIGTNMEAFPSAKHLCSWAGLTPTNNESAGKKKSVRVSKAGCYIKPLLIQCANAVVTSKKHPEIRNRYLRLKKRRGHKKAIIAIARMLLTALYHMLKNGENYNAELYRKSDLPPADWEITVEQAIIIARNQGYKIKSATA

SEQ ID NO: 477937 - protein, 340 aa, unidentified
MSDYSLFVGVDIAAKTATVSWGSIAEVLSKPLTIAQTQKQWSKLATKLLEICPNPEDCLVIMEVTGTYWMQMALYLYEAGFHLSVINPIRSRYFARLMLQKAKTDAVDARLLAQLGMMIDLPRWSPPPAIYYELQQRLAYRDDLVAMRLQERNRLHALQQQSTIIQSVHQRLTTHISYLNDQITALDQEIEALLSAEHEWATSATLLQSIPGIGCNTAAWILTTTLNFTACSTPEEAVAFAGLAPHARQSGTSLHGNLSIGNGGHKRLRRALYMAALPASRFNPILSTFYARLIERGKPKKLALCAVARKLLHLAWTIVTKQVPFDPHYGQYPTIAHNST

SEQ ID NO: 477938 - protein, 356 aa, unidentified
MANPCDLNKEVVMVTTIGIDPHKATHTAVAINETETILGELTIPADRSQTKTLLDWAQNLDGDGRVWAVEAAGGLGYLLSQQLVACGETVFDVPPVLASRVRLLGSGKSDKNDPNDARSVAIAALRQPGLAVVRREDHTQVLRMLAKRHLELTSLRTQAACRLHAVLTQLRPGGMRQRLSAKQASRMLQGLRIVDPVGEQRRSMARTHLGDIRRLDRELKANKVLIRKAVVASNTTVTDVYGVGPVVAAFLIGYTGDPTRFASADHYAAYNGTAPVEYSSGGKTKHRLSMRGNRMLNHAIHMAAITQIRHDTAGRVYYHRKQAEGKTGKEALRALKRRISNVVYRQLLKDQQTKKS

SEQ ID NO: 477939 - protein, 356 aa, unidentified
MNNAHNAAIGLDVSDRKTQVCVMAKDGKSPKIVMETTIPTTREGLAKFLSTQDRSTPVAFETGTHCRWMDEVARKLGFKAYVANPCRLRMINDARMLARLALLDPELLHPVKLRGPEHQKMINLHEARNLAVKQRTEAIVQLRAMAKSMGFRIAKCQAASFHNLDRRAWPEAFRCIAWPMLKNLEQLAITIKTYEKQIRELAETPTFKAQVERLREIHYVGLYVATGFIAATGGDMDRFEKPRDVGPWLGITPKQDQSGDVDRQCHITKAGSPFMRRLLVESAQMILRDGAVDTDLKVKGLRICARGAKIAKRKAVTAVARALAVLMVAMLKKPDAPYVPLSERCEKELLAMRAST

SEQ ID NO: 477940 - protein, 349 aa, unidentified
MKYFAGLDVSLEETAICVVDEMGSIVKEVRAASEPDALVEALQGMGLVLERIGLEACSLTAWLHEGLTQAGLSAICIETRQANAAMKMMPNKTDRNDARALAQIMRTGWFREVHVKSRQCRLWRSLLVARRTVLNEMRSIENVVRAILREAGIKLGTPSRTALADRVRELAGCDALVMPLVEPLLAILSTMLRELARLTKQVLDIVRAEKVCRRLMSVPGVGPITALAFRATIDRPDRFRRSRQVGAHLGLTPARYQSGETDIQGKVSRCGDELARTALYEAAHTLLVRSRKWSSLRAWGMKIAKHRGMARARVAVARKLAVVLHRMWVDETEFRFGKEPGTTARLAMA

SEQ ID NO: 477941 - protein, 371 aa, unidentified
MEQSNKTLYVGLDVHKDSIAVAYAPEDRDAEVVSLGPVGTRQCDIDKLIRTLQAKGATLVFVYEAGPCGSWLYRYLTRKGLSCHVVAPSLIPRKPGDRVKTDRRDAVMLARLMRSGDLSSIYVPGVEDEAIRDLSRGREDAMRDLKATKYRLKAFLLRQDIRYEGRANWNAAHLRWLAEVVCPTRAQQIVFQEYVRGVTEQHERLQRLESELHAEVKGWRLYPVVAAIQALRGVELTGAVILMAELGDITRFDTPRQLMSYLGLTPSEYSSGARRRQGGITKAGNTHARRTLVEGAWAYRYPAKVSRHLQLRLEKLPSEVQAIGWKAQVRLCKRYRQLTARGKHVNQVVVAIAREMAAFAWAIARTVPLAP

SEQ ID NO: 477942 - protein, 344 aa, unidentified
MKIKLLGIDLAKNVFQLCALNQANKVLFNRAVRRPRLAATIAQLPATTIAIEACSSAHYWGRMFQTMGHTLLLIPAQHVKPFVRGGKSDARDALAICEAAQRPGLHPVPIKSIEQQDILLLHRLRQRQVHHSTALANQIRSLGREYGVIFPLGIHRLIAQLPAALEDGSNDLSPVARSALAEQLQQLQAVRQRIKALQQQIEQLVMHRPAYRDLQVLPGIGPLTASAYIAAIGDGRQFHCGRQVSAWLGLVPRQHGSGGQIQLKGMTKNGDRYLRTLLIHGARAVITRGQDNCPPLVTWVQPIIARSGFNKAVVALANKLARIAWVIVTTGEAFDLKQAFKPAA

SEQ ID NO: 477943 - protein, 320 aa, unidentified
MAQRSFCGIDVAKDRLDVMVLPEELCWSVANDAAGWAELVARLRGLRIAASGIEASGGYERGVVRALLAAGMSVRQINPFKLRQFAKACGVLAKNDRLDARMIALFVATMPTRSAQRYAAVERLAEIVTARRQLSDDKVAAENASRLFEDAALRRLYRGRIARLAADIALLDKRLAEIVAGDAMLARRYALLVSMPGVGPVLAVTLLALLPELGQMNRKQVAALVGVAPYDFDSGRLKGMRCIWGGRAPVRRVLYMAALIACRCNPQLRAFHDRLAATGKKAKVVLVAVMRKIITILNAMLRDDASWIDRSIGRHIVPAA

SEQ ID NO: 477944 - protein, 339 aa, unidentified
MDLYCGLDLHGDNVYCTVMDKEYRPVFERRLPNDMKVILEAMAPYQKRMAAVAVESTFNWYWLVDGLQAQEYPMRLANPARMQENVGLKDANDKTDARFIAKQLAMGVLPEGYIYPKEERPVRDLLRRRMRLVHTRTGEWLSLESLVARHSGKDLGIRALNGLEAEELSTLLGNDPMVLASAQICFRHIAFLNTEIRQIEESVEGRVKLANNYERLLNVPGIGRILAMTIMLETGPIQRFPGPGNYASYSRAVKAVHTSNDRKKGEGNSKCGNRYLAWAYMEAANFAVRYSPELRAWYQRKASKTKRVVALKALANKLAKACFFILRDGVEFNVKKLVG

SEQ ID NO: 477945 - protein, 419 aa, unidentified
MTQREDSKIIEIVHPICCGLDVHKESVSACVIFPGKDGADQYDIKEFGTFTDDLQRLRSWLLEHECFVVAMESTGIYWRPVHNVLEDVVDVVLVNARDIKNVPGRKTDIGDSKWLAGLLRHGLLRGSFIPSKTVREWRDLTRLRKKYVQTVGDYKKRTHKLFESANIKIDSVVSDLFGVTGRNLMNLLVSDGRRLTLLDIEGCVRGKLKGKEKELYRSIQGFFCDHHRFILKRLLKTVAMLEEEIAGLDHQIRRLMENQKDLLDRMKKAAGISDVSSCDILAELGPDLSRFRAGATLASWSGLCPGNNESAGKRKSGRSPVRKHHLKTIMIEVAWAAIKKKGSYFKDKYYRLKARRGAKKAIVAIAHRILLGIYHVIKHGVEFRDLGADYLTQRNKSQKMSYLRRQAQLIGYDLVPQTT

SEQ ID NO: 477946 - protein, 345 aa, unidentified
MKKIIIGIDFSKETFDATLFDCRNSELSEALQSAVHEKFTNKKEGFQAFLTWIKSFVKKINSAELLLCGEKTGKYSLALSNFLYAKGYSIWLDSGLRIKRSLGISRGKSDKADSLKIALYAYRYQDMAVCYVPLSKNVSRLKELFLYRQHLVSQMKAMAVRKNVTDDFKKELGDVRFIVDSATEIIQQIKATIKKCEEKMQELIEEDEELKTTHDSITSVKGISLINATAFIAYTNNFKDFGGNAKKIATYWGVAAFAKESGTSVHKVARVSKIASKMLKSLLTQAARIAVRWEPKFRQYFEHLISRGKHQGVALNNVKNKLIHVITALAVSKEKYNPEYECINR

SEQ ID NO: 477947 - protein, 330 aa, unidentified
MSVFVGVDIAAKTFDLVNRKGGKASKVESFSQSPQGHAKAIKRLHNLKPTLITMEATGIYYFDLAVALVQAGLPVAVINPKSFHHFAKLKLAGSKTDGVDAALLAEYGERIEPSLWTPPDEVRLALRDIGRQINRLTGTRTQAKNRLHALQAKNSTRSLLVEDEQEGIAYLDRRIERLSQAALALIAECETLSRYLTHMCAAKGVGKAAALIVLAELCVLPSSLKAPQVSRFAGLDVRLTQSGSSVNRPARLSKAGNAYLRAALYMPAMSAVQHDPRVKAFYDALVSRGKKKIQALCAVMRKYLTGLWACIQTETAFDSAMLFSEEHLKA

SEQ ID NO: 477948 - protein, 354 aa, unidentified
MSQQLSTTIAVIGVDIGKNSFHIVGFDQRGAIVLRQKWSRGQVESRFANMPPCLIGMEACVGAHHLSRQLKGLGHDARLMPAKYVRPYSKGQKNDFRDAEAIAEAVQRPTMKFVATKTADQLDLQALHRVRERLVSQRTGIINQIRAFLLERGIAVRQGQRFLRAELPRILAAPPDVLSPRMVHVIEDLAGDWRRLDERIEGLSGEIEAIARRDAGCERLMSVPGIGPIISSAMVAAIGNGDAFAKGRDFAAWLGLVPKQISTGDRTILGKISKRGNRYLRVLFVQAAWVVLIKPKSWERHGLKPWLEAAKKRLHHNVLAIALANKLARIAWSVLARGRSFEARMTNEANAQPA

SEQ ID NO: 477949 - protein, 404 aa, unidentified
MNSVGIDVSKGKSMVAAMRPFGEVVLTPFEVVHTDSELGKLANLLKSLNGETKVIMEYTGSYYQPIAYALHEAGLYVSAVHAKLIHDYGNNSIRKVKTDKADAVKIANYGISNWMELPKYIPEDNVRRMLKAYSRQYTKYNKLKVMLKNNFISLTDQTFPGVNELFTSLPRKSDGHEKWMDFAVKFWHCECVSGLTPKAFAERYQKWCKREGYHFKPEKSDEIYAAACGHWSVMPMNETTKLLVTQAVSQLNAIAESIAVIAREMKRLAEMLPEYPIVSAFYGAGDILCPQLIAEIGDIRRFRHKGTLVCFAGLEAPPYQSGKFEAESRNISKKGSPHLRKALFQVMDCILKHSPADEPVYQFIDRKRAEGKHYYSYMTAGSAKFLRIYYARVKEHLNKLDTGG

SEQ ID NO: 477950 - protein, 363 aa, unidentified
MPNKVHDHPTADPAAHGSSIAWLGLDAHAQNCVLAQLDDDGTQRRFWRLPTQGDKLVAQVQAIAASDKRLALEESNLARWLWQLLRPHVQQLVVCDARHNKLISSHPNKKDERDAFNLARLLRLSELKPVWQVPTDTRALFKSAAQSYEEAVLRQTQLKQQIKSTFQHWGLFPTGTRLYSEEGRGAWLKQLPHPDLRAQVQLLYAAMDQAVQAQRDTRKLLVRLGKNFPEVKLLATAPGLGVVGAHIFAAYIADPKRFAAAAGLIRYCRLGIRDRSSDDKPLGYEQLDRHGHGILKAISYRAWLQAMKRRDSAVYQFFLWSKKNTGSATHARLNTQRKLLRAWWTLWQEGKEWDEEKFFPTAK

SEQ ID NO: 477951 - protein, 429 aa, unidentified
MKKKRAAAGTDVAKEFSKVCIMTPDMQVFKTLHVTHNKLEDFEKLFVLLDQVKEDFGCSTTVVLEATGHYHKILLRALVKRNIEVVVINPIQSDSIRNLNIRKVKNDKVDAKKLAALFHLKEGDFQIVTQVDTEIDALKDLVRQYYAYQDEITVHKLRLGSFVDRVMLGYDKILPLTSVSGLTVLKAYPSPRALLRARKPTLLRLLRESARKGPTWAETKYDKLIALARIMVELGEPGLHLIEMIRREIAQIEYIQGLCDQIVADIKALINESRRSDISDLAQVIDLLDSIPGIGILAAATLVAEFGDLDAFRSAQAMTAYAGIDPNVVQSGKFKGTRVRISKRGSRFLRRVLFHIASANIRKLRNGTYTNPPMKDYYERKCQNKPKMVALVAVMHKMIYIIFAVLRDRKSFELRDPNKHAATLMGKVA

SEQ ID NO: 477952 - protein, 404 aa, unidentified
MLLVGDDWAEDHHDVYLMNDTGGRLASRRLPEGLAGIRRLHELIAEHAEDPAQVVIGIETDRGLWVDALTAAGYQVFAINPLAAARYRDRHHVSGAKSDASDAKLLADLVRTDRHNHRLIAGDSGQAEAIKVLARAHQNLIWARTRHTNGLRSALREYYPAALEAFEDLTDRDTLAILGRAPTPADAGRLSVSKIRAALKAAGRQRNLDIQAVQIQEMLRRQQLAAPASVTAAFGASTRAAVSIIAELNRQISDLEAELATHFEAHPDADIYRSLPGLGVILGARVLGEFGDDPNRYTTAKCRKNYAGTSPLTVASGKKRAVLARHVRNRRLYDALDQWAFCALTTSPGARALYDQHRATGDLHHQALRALGNRLVGILHGCLRHHTAYDEHKAWAHRQPAKAA

SEQ ID NO: 477953 - protein, 323 aa, unidentified
MTLVVGIDIAKRTFDLATLQPNGKHRTKSKLSNDQAGFAVFEDWLQRHAEPGAWIVMEATGIYHEALAEHFHALGYRIAVLNPAQIARYAQSQLQRSKTDKLDAKLIATYGQRHLDHLRAWQPEPLSLRQLRALTRHLEDLQALRQMELNRLDVSRENVKDSIQAIVQRLNEQIEWTLKQIKQHIDDDPDLRGKRDLLVSIDGIADKTAALILAELGEIERFTHSRAVTAFAGLDPRLQESGAYYGRTRISRTGSARLRSALYLPAVVAMTYNPAIKAQVERLRARGKKGKQTVCAAMRKLLSIAYGVLKSGKPFDPALAIAH

SEQ ID NO: 477954 - protein, 333 aa, unidentified
MKTVTLGIDVSKATLDAALWLGDRSKWHTKAKVDNQPAGVHTLIEWLRTKTALAPSACRVVLEATGVYHEAAAQVFHDAGYEVVIANPKRVRDYAKGRGLLTKNDAVDARLLARYGAEGDELVAWLPPTPEIRTLRALVARLDAVSQDLQREENRLEKAQATDTPGPVRDSLQRSLSALRAERERLLRAIDAHYDQHPPLKQARDQLKTIPGVGDACARRLLCLLKRHRFESARQAAACAGLVPIEYQSGTSVYKRPCLSKQGDPRLRATLYMAAIVASRHNPPLRKAYLDLIGRGKTKMSALGALMRRLVHIAFGILKHQAPFNPALVAKIA

SEQ ID NO: 477955 - protein, 619 aa, unidentified
MLITATRLEDTSLAIGQGNRGTVKIHKIKRISENKMKKENSKKNQEGKEAVGKLQYSLGEDNTDALLGSTELRKLSTASLYSLLKLKNVPSRSKLRKKDARVKALEGMVQRSDLKKAGIEAPPGMVLECKPIHPVIVPDYIREHREIHDKINPGSGKRLNDPVGSIDVHAETLVYAIADPSGIIKKGIVANERGGIDDLARVLHHHGVVYVALESTAEYWLKLYWALREHGIHVLVANPRQTKDTQGKKTDTHDAKRIAIAFRDGRLNPSVLCTPEQYERRKISRTAIKWKQDATKHVNNIKVIFHRLDSPKWIRDLNKSERGCRILSALTSRVSLGEILALVTKEYSHGNGNISDPVILEQKTRDLHSMLQAMADVKGLEARFRQHFESYIRCREMAREMQLEIIKGIQDDAAFKANLELLLSCPSIGVDTALTILVEMIDVNFFFHPKALSRWAGLAPRVNQSGHKKRSNGHIHKAGNKYLRRVAWLSAKVDHAHHKKGGHPIGDFVARLRDKGKAYKVAVTAGARQLLSIVYHVLAMQKPFQEVYAHLESETQEKNRVQKLRALEGLMKEASLVDLLKISSKVLPRRCITMIEAERKYALAIYEMFSMHLEFAEFG

SEQ ID NO: 477956 - protein, 355 aa, unidentified
MAVYIGVDFHPYEQTLAFVDEADGEIRYKRFLHSDKAGIKAFYRKCGKDAVIGTEATGSLWWFEKLLFDNGMTLKIGDPRMIRRAALSRHKNDHRDAETILDLLMRGTFPAITPRNEQSREMLDLLNYRHSLVSKRTSVVNQLQAFARSKGLPRFRLPAVKARKKIEEVETTQVERLLVSSRFVLCDELTRQIKAVEARLEEEANKEERAQLLMTHPGIGPINAMALVHTLGDVRRFRRKEEVVAFVGLDPLEKSSGETRRIGSISKRGSRLARYLLGQAAQASRDKKIRKFYSEVSRRRGRPKAKVAAARKLLINCYVMLRDNISYEEFTRRGEVGLYEGSGEVTGKPAQSLKV

SEQ ID NO: 477957 - protein, 451 aa, unidentified
MVKKKRGNKKKKVDSLHIIHPAAAGIDIGSSEIYVAVSDDRSDNPVRRFDTFTEDLHNAAKWLKECGIESIAMESTGVYWIPVFQILECYGFDVILVNARHVKNVPGRKTDVQDCQWLQYLHAVGLLTGSFRPDQDICAVRSLLRHRDNLVKSASSDVQRMQKSLTQMNLQIHNVISDITGVTGMKIIDSILAGERDPYKLAELRDPRIKADKETIAKSLTGDYRREHLFTLNQTVASYRHYLELIRGCDAEIESHLKEFESRVEVDEPPSSSCGSRRKPKGNAPDFDVKTHMHRLFGTDLTEIDGISGLTAHVFFTEVGPDLSKFKTVGHFCSWLGLCPNNKISGGKILSSHTRPGSNRLAHALRLSANSLWNSKSYLGDYFRRMRARHGAPKAITATAHKLARIIYHLVKEQKAFDETIFAEQEQAHQARLRKRLAKQAKSLGLQLVPA

SEQ ID NO: 477958 - protein, 340 aa, unidentified
MNIKTIGLDSAKIIFHLVGLNEHGKQVLKKKLRRSQLLTYFANLPPCTIAIEGCASAYYWKRELIKLGHRVKILPAQHVKAYVRGNKNDYNDALALAEASRVPEMREVTPKTIDQQSIQALHRLRESATGDRTALSNQLRGLLAEFGIIFPKGIKHIRGGLYGVLEDAENDLTHSLRAALALKHAQFVQLDDLVRELKQLINESSEAHQEIGLLQSAPGYGDILSSAFYSVIGDGKAFAKGRDASASLGVVPKQHSSGDKTVLLGISKRGDSYLRKMLINGARSVVNHAHKKDDALSVWVTQLVERRGKNKATVALANKLARIGWAIITSGKAYEENYAV

SEQ ID NO: 477959 - protein, 400 aa, unidentified
MNAVGIDVSKGKSTVAIMRPFGEVIAEPFEVSHTDTELRKLACFLEKLPGETRIVMEYTGSYWQPIAKVLHDAGFFVSAVNALLIYKYGNNSIRKGKTDKLDAVKIANYCLDRWTDLERYSPTDQIRQTLKTCRRQYDQYIRLKVNLKNNLIALLDGTFPGINTLLKSAPRDTDGHEKWVDFAGKFWHRQCVCGNSEKAFANQYRKWCAKAGYRFNAEKAVAIYSHAGSQVDTLPMSSAIQSLITHAVAQLNMIIETISAIQHEMLTLASQLPEYPIVMRMFGVGPVLGPQLMAEIGDVRRFHCKQSLVAFAGVDAPPCQSGTFESKNRHISKRGSPRLRKTLFQVMSTIIQHAPADDPVYQFLDRKRREGKHYYVYMTAAANKFLRIYYGTVMAYFEKP

SEQ ID NO: 477960 - protein, 332 aa, unidentified
MKFKSIIGIDVSKSTLDVYLKICQSHAVFDNNENGYQELVEWVMENSGLVLAKELLFGFESTGIYSSELALFLEKQSLPFCIISGLELKRSLGLRRGKSDKADSKDIAEYLYEKQEKIIPTTLPKKIIQDLKKLFNYRERIVKDRAAYITRIKEYEAVVSGNKLKVYQKSNTEVIACLDKQIETVEKEIDKLLRKDELLLNQYKLINSIKGIGPQTAVALIVLTEGFTLFDSWRKFASYAGTAPFPNQSGTSYRGRTKTSTLANKRIKTLLTLCAGTAIQYSTEMKTYYKRRIDEGKSKMSTLNIIRNKLLARAFAVVNRNSGYVDTLKYAA

SEQ ID NO: 477961 - protein, 415 aa, unidentified
MALKIVYKICCGIDVHKTFVVACIASTDSKGVTTYEHHRFSTYTKGLKDLLQWLLKHNCKDVCMESTGKYWIPVYNVLENDCTIVLAHPKYVKAIRGKKTDKRDAKWIADLFKHDLVAGSFMPPADIRQLRDLMRYRFKLTCFMSSEKNRLQNCLTVSNIQLGNVVSDTFGKSAQAILDKLLENPADTSFDLEPLVYKSLKKKLPELRDAIDGYITPEQAGKLKVIKAHYENLESRKAELEELILALAAPYQQELAILQTAPGIRSDFTAIGIISEIGTNMEAFPSAKHLCSWAGLTPTNNESAGKKKSVRVSKAGCYIKPLLVQCANAVITSKKHPEIRNRYLRLKKRRGHKKAIIAIARMLLTALYHMLKNGENYNAELYRKSDLPSVDREITVEQAIIIARKQGYKIKSATA

SEQ ID NO: 477962 - protein, 350 aa, unidentified
MLYTGIDYHKSFSYLTTMNEKGEIINQKKLPSNGEIVDFLKEFGEDMEIAVEATPSWYWLYDHLEDEGFQVKLSHPLKTKAIASAKVKTDKVDSATLAHLLRSNLLPLSYVPEKTVRLNRELLRYRASLVKIQTRVKNKIHTILAKNNITHSYTDLFGKQGIAFLHSLTFIENYKIALEGYLTVLDAVRQEIRAASKKVRQIAEEDTDTLLLMTIPGMGYYSALLTKSEIGDVRRFQSAKQLCSYAGLVPSTYASGNTCFHGHITKQGSRWLRWILIEAAIHAVKRPGVLRRFYFKIERKKGGQIAKVAAARKLLEWIYHILKDGRTYQEMERIAELLGRGEPGNPSGSA

SEQ ID NO: 477963 - protein, 336 aa, unidentified
MTIIRIGLDTSKHVFQIHGVDENEQPVLRRKLRRSEVEKFFATLAPTRIGIEACGASHHWARVLRGLGHEVLLMPPQYVKPYVQRGKNDAIDAEAICEAMSRPKMRFVPVKTAESQAALTMLGVRDLLVKQRTMLINAIRGHAAEFGVTAPKGPQQVPELLRRVAAEESAPALAREMLGLLASQLEALNAQLKAIEARLMAWHRQDQASQCLATIPGIGPIGGVSFSLKVPDPKAFRSGRHFAAWIGITPRENSTAGKHRPGKISREGDESLRRLLVLGATAVIRQAKAGRASAWLLGLLARKPKKLAAVALANKMARIIWAMMVSGETYRRPKEA

SEQ ID NO: 477964 - protein, 447 aa, unidentified
MSRAQVIDDQDHERVHDRVAAVDVAKDTGMVCIRTPHPSRPGARRATVWTVKARTGAVRALGRQLKAEAIQIVTLESTSDYWRIWFFVLEACGLVVQLVSPAQARQLSGRPKTDKLDAQWLARLTEWGMLRPSFVPPRAIRDLRDYTRALLVRERTRCWQRLEKLLEGALIKVSSVASKLTTLSAQDMINAMIAGQRDPQALAGLARARMKAKHDDLVAALDGTFDEHHGELARLLLDHIAFLDERVAQLGARAAQLTAALPAAWGIDADGTTGPAAGTAPGAPVLPAVARLAEIPGISEDLARTIIAEIGLDMTRFPTAARLVSWAGLCPSARQSGPRTRAGKKGQGDTWLRSALGQAVPGAARTPTFLGERYARIARRRGKAKAQVAVARSILIIIWHLLADPAARFTDLGPGYYQTRTDTDRKIRNHIRQINALGYDVTLTKTT

SEQ ID NO: 477965 - protein, 391 aa, unidentified
MIYVGIDVAKDKHDCFITNSDGEVLFKAFTISNNLDGFNELYQKIESVMEDTTKVKVGLEATGHYSYNLLGYLIDKGLPTYVINPLHTNLNRKSLSLRQTKTDKVDARTIASMLMSDVNLKSYSDTSYHNEELKSLTRYRFDKVKERAKLKTSVSRLVCILFPELEKLVPTLHIASVYAMLSEFPGAKQVANAHLTRFTNLLSEASKGRYGKETAIAFRDAARTSIGSNMPAKSLELKHTIKLIQELTSEIDEIEHEIKLIMDELNSPILSIPGINYRMGAMIIAEIGDFTRFDSPDKILAYAGFSPSTYQSGQLDGAYSHIEKRGSRYLRYALYNAAKYVCIWDPTFAEYLAKKRSEGKHYTVAISHAVKKLVRVIYHLEKTNQQYIKAA

SEQ ID NO: 477966 - protein, 423 aa, unidentified
MEVIHKRVAGLDVHKATVVACVRLMANRKVSRECRTFATTTEGLLALLAWLTESRCTHVAMEATGVYWTPVWKILSEGRFELIVANAAHIKQVPGRKTDMNDAMWIADLLACGLIRASFVPEEEIQELRSLMRTRKQVVREQTRQVQRIQKTLAEANIRLDSVISDTLGVSGRRMIEAMIAGVRNPHQLAALAHRGIKASPKELYDALHGRLTDHHRFLLQLHLAQWDAADASIQQIDREVDGRIERMDAAAEDGAVPFRTLILLLCSIPGVSGLSATTILAEIGRDMSRFPTAGHLVAWAGLCPGQNESAGKRKSSRLRKGAPWLKTMLVQCAWAAKRQKNSYYAAQFHRLKGRRGPQKAICAVAASILTAVYHMLNDGTSHHDLGADYFDRRSPEVKARRLVAQLSRLGFEVQLQPLAQAA

SEQ ID NO: 477967 - protein, 343 aa, unidentified
MKITTVGLDLAKNVFHVVCFDEHSKEVQKRMLQRKQVRLFFTQLQPCKIAMEACAGSHYWGRELRALGHEVKLIPAQHVKPFLLGNKNDFNDARAINEALSRPSMPSVAIKTTEQQDIQATHRMRSQCVKDRTALSNSMRGLLGEYGIILPKGLSVLRKSIHGLLEDAENGLSLIFRNLMSRRYEQLVELDGHINFFTHELEVQSKQDDACQRLQEIPGYGPIISSAFYSVVGDGGAYKCGRDVAASIGLVPRQHSSGGKDVLLGISKKGDGYLRSLLVHGARSVVTQAGKKKDRFSLWINRIVAERGWNKAVVATANKMARIGWAVLRHSSHYQTALTVSSL

SEQ ID NO: 477968 - protein, 341 aa, unidentified
MDKELYFGVDVSKKTLDLAYYDGEIIDWKNAHIRVSNDDAGFKKIGSWVAKVGKDFDTFLFCLEYTGLYNQNFRLWLESKEYIYSMVEPRKMHRFEPDLDDDQRSIDRIKTDELDAFRIAIYCEQNHKKILRNPSKLPSPVYFKLKRLLAERKQNTKQSVLYKQQLHDICAYDTDLSVERKKLLLKNMKENQKAIDKEIDSYMNEDASISKNFNLLTSIPGIGLIIALETIVLTENFTAINNPRKYACYIGIAPFKKESGTSVRKKTGVSKKGFSEAKADLSIAVLSAIRNNPSIRDYWIRKRKEKCGGIVLNAIKFKLVLRMFAVIKRGTPYVETDAYKN

SEQ ID NO: 477969 - protein, 413 aa, unidentified
MFNHPKMRFVYCGIDSHKETHTAVILNCFCEMLTEITFKNIPSEFEAFLNKANRHKSNDLSIIFGLEDVSAYGRNLAVFLHSKGYSVKHVNSSLVAHERNSVNTLNKSDDYDAECAARVLINRFDALPGFNPYDKFWTLSKLVRRRNSLVKTGMSLKNHLHDYIMQHYPSYKKWFPTIESKSSLAFFEKYPSPAKLKGVTETDIVELFQKESKHSFYKDKKAKLILECVRKDGYIKTDHQEFIDEMIISTVKELKSVIAETKEVEKLIREFLPEFGYKLQSMRGIDDIAAANIINEIGDIERFPTAAKLSKYAGISPVSYSSGKTDLQFANERGNRKLHGILFKISVTLCNTGGRHKRITNPIFYDYYQKKISEGKTSKQALKCVQRRLVNIIFSMMRNKTEYQNPPTRKLED

SEQ ID NO: 477970 - protein, 373 aa, unidentified
MKYTTVYVGMDVHKESFTLACYTNEKEEAEYVQRTEAHYSKVISYLEAMRFHYGDDVTFICGYEAGCLGYTLYHQLTNHHVRCVIIAPTSMPVQQGKKKVKTDRRDARKIAKCLAHHEYSAVHIPTARDEETKEYLRMRDDHKLALKKIKQQILSFCLRHGCSYTGGSQNWTKTHLKWLRELKLDGMYQEILEEYLLTYNNLVDKLERMDKRIEEMAAEEEYSEDVRKLSCFPGIKTQIALSLITETGDFKRFATAQQYAAYLGLVPGEDSSGNEENKLGITKAGNRHLRMLLVEAAQHYGRGQIGYKSKALKKRQEGNTPEVIAYADKANERLHRRYYRLVLAKNKRSNVAKVAVARELACFIWGMMTGNVA

SEQ ID NO: 477971 - protein, 357 aa, unidentified
MKKLFIGIDFSKEKLDATIILACGMNEIGSREYGCFPNNTTGYRKLCNWVKTNAWNTIAEEWLFCGEDTGSCSIGLSKWLYRKGYDIWIENAYAIKHSSGIQRVKNDKADSAIIAEYAWRQQDKVVPFEPLNESLAQLREIFLYRHKLVGQRVAMELRKEDKSQSNKSKAISFINRKSKHLIAEINKTIAECDKAIDSIIEADEELKENYAIITSIKGVARQNATCMLVYTNNFKKFGYDPRKIACYYGVAPFGKQSGTSVNTPAHTSHFANKLIKSLLGQAAHIAKIYNPEIRDYYQRLISKGKKPQVALNNVKNKLIRIIVALVRKKVPYDQNTYKYYEEREVIERKKNEKLIYC

SEQ ID NO: 477972 - protein, 341 aa, unidentified
MSELVLVGTDLGKHSFHLHGQDKSGREVFRKKLSRQQMMRFFGNLPACTVVMEACAGAHFVARELMIMGHQAKLISPQFVRPFVKGNKNDFVDAEAICEAASRPSMRFVSPKTEAQQTLSVLHRLRESLVRDRTKTANQMHGFLLEFGISLPRGLAIMKRLSSVLAEHELPGRLTVLLQRLHDHFVYLDGQIKELDKELAGQLANDDLGSRLLSLPCVGPITASLLAVEMGDGQQYGCSRDFAASVGLVPRQYSTGGKANLLGISKRGDKNLRRLLVQCARVYMQRLEHQKGALADWVRSLLMRRHSNVVACALANKLARIAWAIATHHTEFEAGPDTLSA

SEQ ID NO: 477973 - protein, 374 aa, unidentified
MSFTSDTILVALELSNSLWLVGTRMPSAQKSHVHRVAAGDIAALLTIFDRLQSRQMAMSGHPAPIACCFEAGRDGFWLHRLLTAKSIPTYVVEPTSILVNRRAKRAKTDRLDAEGLLRVLAAYLAGDSQVCSMVRVPTPDEEDGKRTHREREYLVQDRTRLENRILALLATQGIRSRPSLRNWERDLAGLRTGDGRQLPPRLAAEVNRLRRRLGLVLDLIRELDAERDEVLAATPDDTVTSKVAALRSIYGVGDNFAAVLAREVFYRPFGNRKQLASYVGLAPVPHQSGDMDRDRRIGRAGNARARKTLVQLAWLWLRYQPESELSAWFRQRVGNLQGRTRRIAIVAMARKLLIALWRFTETGEVPAGSALRAA

SEQ ID NO: 477974 - protein, 348 aa, unidentified
MSMVCGLDLHRGQVTFDAVDVTSGEVWRGRIWQPDRLRFRRWLRDELAPRAHGEPVAIAVEGCTGWRYVAEEIRAAGFDAHVAEPADTQAARGRKRRAKTDRTDARLLRELLAGGELPESWIPPTLVLEWRERVRLYKALLDQRTQWTQRIHAELFQHGVGVPEDAIASAQTRQRLAEPGLAISPAGRERIDTGYAMIDATNAQLEPLRAEVVRFGTRQPACRALVAAHYGIGGLTAVAIWAELGDCRRFSRSMQVVRHTGLDVTVDSSDRHRAGGHLSRQGPETLRWALYEAAKSSSRKGSPDHVYYSAVKQRHGGKIAAISMARKLALRCYHTLRNLDPDTIYAMP

SEQ ID NO: 477975 - protein, 521 aa, unidentified
MESVAAIFSLVARKRFGVFEDPVCETASIFRRLSQAASLSQGNQTMKKHKKTKPNPEAAKPLHEPKPDAAGIDLGATEIWVAVAPDRCQMPVRRFGAFTQDLLAILQWLLECGIRTVAMEATGVYWIPLYQLVADAGIEVCLVNARHVKNVPGRKSDVRDCQWLQYLHSVGLLMASFRPAQIICQTRSIYRFRQNLLTQVGQHLQHMQAALDQMNIKLHHVINDLSGQTGMAIIEAILNGERDPLRLAQYRDRRIKATQETIAKSLEGDWRSEHLFVLRLAWENGKQVQEQIKKCDQELMQYTRQLEAKTMVAQPIVPVKIMSLNVEPGVPELTPAPAVRPAKPRKKTSKNEPDGPWRENLHRFFGVDLTLIPAISVLTGITLMTELGNDLSAFKSVHHFCSWLCLCPDNETSAGKVLHKSTRRSQNRVRQALRMAASSLHHDKSYLGDKYRRLRAKLGAPKAITAMAHQIARIIWYLITHQVAFDMSIFAELEKANQKRHLNRLNSAAHQMGYQLTPIAA

SEQ ID NO: 477976 - protein, 375 aa, unidentified
MHRRRVLDKAITYVGLDVHKETIAVALAEAGVRGDVCEYGKVANTPGAVKALATKLSRVGNALRFCYEAGPCGYGIQRQLTLAGHDCVVVAPSLIPRKPGDRIKTDRRDAINLAKLHRAGELTAVWVPDPAHEAIRDLVRARLAAVRSLRQARQQLSGFLLRHGRHYNRPAWTLMHRRWMAGLRFEQAAHHIVLEDCIAAVEAATVRRDRLEAHIEAALPDWSLAPVVRALQALRGMALVAAATVIAELGDITRFANPRQLMAYLGLVPSEHSSGATRRQGGITKAGNSAARRMLIEAAWSYRFPARISREQLLRQEGLAKPIRDTAWKAQERLCRRYRKLSRAGKSPTVVTTAIARELAAFAWAIAKHVQTANP

SEQ ID NO: 477977 - protein, 334 aa, unidentified
MELKRIAIDTSKYLFTLHGVDHDDRVVLRRELRRDKLKAFFAALPPTEIVMEACGSSHHWGRLLIALGHVVKLIPPQYVKPFVKRGKNDRIDAEAINEAASRPSMRFVPVKGAEQQAATLILKTRDMLVRQRTQLINAVRGHAAEFGVIAAKGTARVEPLLARIAEDDTLPAAARAMLAVLGGQIATLDAQIAELETQMRAAHKANPLSRLLEQIPGIGPISALSLALTIDPAQFRSGRHLAAALGLTPREHSTGGKQRMGGISRAGDERLRRLLVVGATAVIRQAAAGRGKASAWLLNLLQRRPRKVVAVALANKMARVAWAMMTSGEAYRAA

SEQ ID NO: 477978 - protein, 341 aa, unidentified
MKNKSFIGIDISKNVIDVSIFCEETPIKDFSHDVFNNSRKGFGEMCTWLKKNHVVLSNCLFGMEFTGSYSMELEKFLNARSYQFCMLSTHVVKHYPMGPKDKSDKIDSAKIADFLYRYNGTECVKPYNMPDKTMQKLKALMNERKFLVEQRTCFMNRRQLCITKEDAQLYDGYIKKFSRDIENIELEEQKLLATDDSLLSTYKNLLTIPGIGFVNAINVIVITRNFTAFETARQYASYVGVAPHFRTSGTSVKWRPRPSARCDGQAKADLSMAATVVVQYDAELQSFYNRKLGGKQDSDTKRKALNAVKFKLVLRMFAIGKQNRKWEPLDSKSSNEKLAIS

SEQ ID NO: 477979 - protein, 328 aa, unidentified
MDNPLYYVGIDIAKAKFDVAIKLQNGKHKHKVFKNNPEGFQSLMQWLNTFGETFHCVMEATNIYHEALADFLFQQQITVSVINPKCSAHFTKTDNLRSKTDKIDAKMLADYADEKRHKLPIYQPISPAQRELLRKNRQLDHLKKQLAQEKTRLTMLLDSDCIASTQQMIAFIKAQIKALEKTIKQCINADNTLKNNVKLLCTIPAIGFATAVQLIAHLGDGNRFKNAKAAATFAGLTPMIKSSGKSLNTVIGISKIGQSDIRKALFCPAMNFAFGSYKNSVYRSFVLRLLECGKPKMVIITALMRKLVTIAQAVLQKQTAFNLDTFMK

SEQ ID NO: 477980 - protein, 375 aa, unidentified
MTTIGAKRLETKVEVILGVDTHLDFHVAVAIDHLGRRLGEASVPTTAKGYEKLLCWAEGFGPLRCAGVEGSSSYGAGLARHLRARGIEVLEVERPKRRQRSSRRRVKSDPSDAESAARVVLAGEASGAPKSADGRVEMIRTLRAARRSAMKARTQAANQLQGLRVTAPEQLRQRLRGLSTMELVSVAARFRLGDDLRDVPSATKFALRSVARRYEALSAEIAELEAHLDRLVAQVAPELVSLAGIGTDNAATLLIVAGDNPQRLRSEASFASLCGVSPVEASSGKVVRHRLNRGGNREANRALYMICLARMRRDLRTQEYVSRRTAEGKSKREIIRCLKRYIAREVYRVLISRGARCSPTVPMDEAHIVTGSSAA

SEQ ID NO: 477981 - protein, 347 aa, unidentified
MQMIGCDLHARQQTLAILDTETGVLEERVLEHTGNNVRDFYRSLPRPARVGIEATGSMHWFLEMMEELGIECRVGHPAKIRACEPRKQKHDRRDALLLLTLLSEDRFPSIWMPSLDQRDVRALLTYRHQWVRIRVRVQNALQSIALSHGLRRGRAMWSKAGLAAIRSLPLPPYSTERRDALVDLYLQLQEEIDELDKTVAECAAERERARLLMTYPGVGPITALATESILGDPARFADGKAVASYVGLIPSEFSSGGRRQILGRLTKQGSPMLRFLWCEAVGHAIRKDEQLKRFYRRKLAQKGFAKAKCAAGRKLGIRLWIMLRDNISYQEFCRRARQQTDVPCGDA

SEQ ID NO: 477982 - protein, 337 aa, unidentified
MKVCLIGIDLAKNTLQVCGVNQAGKPIFNKALKRNKLLPFLLNYPDAIVAMEACSGSNYWGRELEKQGIRVRLIPPIHVKPFVKGNKNDRNDAFAITEAAVRPSMYFVKPRRLEQTESSMLHKVRSRWVSQKTRLTNQLRGLLNEYGIIIAPGDKALKQTLPEVLEDGENDLSSGIRHLIDNIRQEWLEMEARLSEVDSLMRSQVKSDEDCRRLMKIKGVSTITATAIKAFAGDGKHFKNGRHFSSNLGLIPREHSSGGKQKLSGITKRGNQYIRRLLIQGAWSVLRYAKQSDDDLSNWAEKVMERRGKHKAVVAVANKLARIIWSMLVNKTEYKTT

SEQ ID NO: 477983 - protein, 344 aa, unidentified
MKITRVGVDIAKSVFHVHGVDRHDQLHWQANLKRGRWLDALSQQVAPGAEIGMEACASSHHWARELQCRGCTVKLIAAQFVKPYVKSNKNDRVDAEAICEAMGRPGMRFVAVKSVGQQDIQAAHRIREGLVGQRTAKVNQIRGLTGEYGLVAPVGINKLRQTLPLWLEDATNGLSDEFRGLLAELAQDLRYLDDRVSNLDERITRMAKTDPVAKRLLELRGVGPLTASALAGALGDGKGFRRGRDFAASLGLTPRQHSTGGKDRLLGISKRGDSYLRKLLVHGARAVIRHAKDRDDGLSQWLNELKVRKHVNVVTVALANKTARIAWALAHNGTSYDPVLASDG

SEQ ID NO: 477984 - protein, 429 aa, unidentified
MHSTQNERINQITFSTLIIGVDIAKFRHVARAQDFRGVEFGKPLTFENNREGFELFVSWFRKIATEQGFKDAIVGMEPTGHYWLNLAHFLKEEQVKYGVVNPLHVKKSKELDDNSPTKNDIKDAKVIAQLVKDGRYAVPSLPQGVYAELREAMKIREHLTTDLCVVQARVHNWLDRYFPEFLTVFKDWECKSAIQMLSLNLLPHELVAVPDETLLQHLREAAKRGLGLGRIQNLKAAAGRSIGIRQGSELAKMELKLLLTQYEWLQNKLVELEAKLDELLAQIPHVKQVLAMKGIGRDTIAGFLAEVGDIDQYRHPKQITKPAGLNLKTNSSGTHTGQTRITKRGRKRLRALLFRVMMPLVAKNPAFRILHEYYTKRPVNPLKKMQSLIALCNKLIRILFGILQKGHEFSEEKMIRDIPRFTTEIPHAA

SEQ ID NO: 477985 - protein, 403 aa, unidentified
MNNVVGIDVSKGKSMVSVLRPFGEVVAKPFSVGHTGSELKELADYLKSLDGETRVVMEHTGRYYEPVARFLHDEGVFVSAVNPKLIKDYGNNTLRKVKTDKADSRKIARYGIDNWAELRQHTPMDTIRMQLKTLNRQQSLYSKTKTMMKNNLIALLDQTYPGVNALFDSPVREDGSQKWVDFATTFWHVDCVRNMSLTAFAERYRKWCKRHGYNFSQSKAVEVHAGAQDLIAMLPRDALTKTMVRQAIDALNAISASMERLKAEMQALAAQLPEYPVVMAMHGVGDSLGPQLMAELGDVTRFTHRNAITAFAGVDPGADQSGTHEAKSTRVSKSGPPELRRALFLVMDCLLKTQPQDDPVYRFMDKKRAEGKPYLVYMTAGANKFLRIYYGRVKEYLAQLENS

SEQ ID NO: 477986 - protein, 364 aa, unidentified
MTCGTSSAQTRDDSRVNEEREEAQVMIACGFDVHRAQITFDLVDHETGELRRGRIAPATRERLRVWLAGMDSVRLVVAVEGTTGWRFVAEELEAAGARAVLAEPGETRALRGRKRRAKTDRADARWLRELLERGELPISWIPPAHLLELRCRVRLRQTLAAERSAWLQRVHAQLFHHGVPVGGELAAPARRGWLDGSELSPAAEAVIDTALATVDFLDGQLTALDQQLRSFARAHPATRALARLYGVGDLTAVAIYAAVGDARRFSSARKVIRLAGLDVTVHESDRKRQPGRISRQGPPMLRWAAYEAGLAACRPSSPDHADYLALRERLGHKTACLTVSRRVLRRAYHALVAVGDAALEPLPS

SEQ ID NO: 477987 - protein, 377 aa, unidentified
MLHAGLDLSRKRLDVCLISEHGELVEEFAAPPDADGLRVLVRRVGRHGAPVRAVIESMTGARFVHDTLEQFGWEVLIADAQKVKGLAPLACKTDKIDARVLAVLSERDLVPTIWLPDPRIRSEREQARFRLHLVKHKSMLKHRIHSTMLSFGHPCPVSDLFGAAGRELLDRCEIPDPWRQTVDASLELIDYLERQVAEINRDLKASGAEHPYVPLLLTVPGIGWVLAFTIASEIGDITRFPTATKLCGYTGLCPRVHQSGEKDRRGPLTKQGPKYLRWAMLESTMHAVRHPVYAEPLPAQQETPGQTARRPGRPDRHRKKAHRSDLAHAHQQPALRTHSCPGRRRFSSGRVTALLELRPRGRPPMSPGPPAEEAIER

SEQ ID NO: 477988 - protein, 361 aa, unidentified
MTGTMTSAGLDVHARSIDAAAICVQTGEVTRRRFGGAPGPVIGWLGRLPGPMRACYEAGPTGFGLYRAAREAGIAMEVVAPSKTPRAAGERVKTDRKDAELLARLLIAGQLTSVRVPEQRMEARRELFRCHEQARGDLQRARHRVSKMLLRHGQVWSGPTAWTQAHRRWLARQRFEQPASELAFADYLATVDSAAARKAALAERLSRLAQEPDLWPAVARLRAFRGVETMTALGLHLELGGDWERFERPAQLSAWLGLIPSLRQSGESSNAGQITKTGSLYARRLLVESAWHYRRAPYLGTTLKQRQEGLPDHVIAGAWRAQHRLHRLFTRLTARGKPSNVATVAVARELAGFLWAATVTD

SEQ ID NO: 477989 - protein, 339 aa, unidentified
MRLYSAFDLHSSNSYLGIIDENGKRVFKRKLQNDEGLMVKVLNPFKSDIAGIVVESTFNWYWAVDHLMEEGYKVHLANPSKIQKYSGLKYADDEDDAFWLAEMLRLGILPEGYIYPKEDRPIRDLLRKRSHLVKLRTSLIVSLQNIMSRSLGGKMKASDIKVLAEDRVTPLLAENDDLALAGKVSKDVIDSLTRQIKAIEGAVEKKMDLRKPYDYLLSMPGVGKVLGLTMMLETGPIGRFEKVGNYASYCRKVPSIWKSNEKKKGTGNKKSGNKYLAWAYSEAAQFARRFDDDARAYFDRKRRKTNDPIAHSALAHKLSRAAYYIMRDGVPFMAEKTFG

SEQ ID NO: 477990 - protein, 341 aa, unidentified
MQISTIGLDIAKNVFQVHGIDGDENVVVRKQLRRSQVMRFFQELGPCLVGLEACATAHHWARELAKLGHEVRLMPAKDVKAYVKRNKNDAADAAAICEAVRRPSMRFVPVKSAEQQAQLMQHRARDLLMRQRTQLINAIRAHMAELGITAPQGREGIKELLAIIADDEDTRLPIDARTSVMVLAAQLQAMQTTIGSLERRIVARHRSNQDSKRLQTIPGIGVIGATAIMATVTDPTAFRSGRDFAAWIGLVPRQDSTGGKPRLGPISKQGDRYLRRILVGGAVSILRRAKLNPQRYPWVTRLLARRPFKVVAIALANKMARVAWALVAKGGTYRVPRLAAA

SEQ ID NO: 477991 - protein, 348 aa, unidentified
MVVIGIDSHKSTHTAVAVDGNGRKLAERTVTARSAGHLELVRWAARFPERRFALEDTRHLSRRLSTDLLVAGQSVAWVPTRLMAGARRSGREPGKSDPIDALAVARAALREDLPVAVLDGSEREVRLLVDHRDDLVAERTRMQNRLRWHLHELDPGNEPVARSLDRSVVLDALAERLADLPGTVARIARELVVRIRELTRAIDALEREIAGLAATLSPTLLELVGCGSLSAAKLVGETARVGRFRSAAAFARHNGTAPLPVWSGNVERHRLSRMGNRQLNVVIHRIAITQIRLGGAGRAYFEKRRAAGDTKTEAIRALRRRISDEVFRRMGHDERLRAAPRATLAAAA

SEQ ID NO: 477992 - protein, 350 aa, unidentified
MEQYVGLDVSLKMTAICIVDRTGKIAREGMVTSDPDAIAAFVRLHAPRVARIGLETGATSTWLWTELNRRGLPIICIDARHAKAALKMQINKSDRNDAVGIARIMQCGWYKEVHVKALDSHAIKALLVSRALLVKIKRDLENQIRGLLKNFGLIIGRAKMNMFVVRATELIEDEPELAAAVEPLLKAREAVERQIADLNRKVMKLARHNVQVRRFMTVPGIGPITALCYLATIDDPTRFKRSRSVGAYVGLTSRRYASGEIDWTGRISRCGDQMLRSYLFEAAGVLLTRVEKWSVLKAWGTRVAKRSGLGKAKVAVARKLAVILHRMWMDGSEFKWTSKEANQSTYMTAA

SEQ ID NO: 477993 - protein, 483 aa, unidentified
MKRKSIPSSRGPKTSRPSKSKKQAWKVVHPHAAGIDIGATEHYVAVPPDAVAAGESTVRSFGCFTQDLDALVEWLKACGVDTVAMESTGVYWIVPFQKLEAAGLEVVLVNAHTLKHVPGRKTDVQDCQWIQQLHTYGLLRASFRPDELTCRLRTLVRHRANTVSSGAEYILQMQKALTQMNVPLHHVVSHLTGETGLRILRAILNGQRDPLMWVELRDPQITRSTKEEMRKALVGDWRPELLFVLKQSLRGWEFCQEQMRECDGQIEQLLKEMPSAVAAKTPAARPQPDPLASTNPRPKGKQSRKRNDPEKDLAPELARICGVDLTAAHGLRLLTVLTLVSEIGVDVSKWRSAKAFVSWLGLCPNNKISGGRILSSRTRKVINRAANAMRMAAVGVGDTDTWLGSFHRRMRAKLGPAAATTATARKIGTVVYHLLKHQEPFIDRDLMAYEAKVYRHKLARIKKQAAALGYALVKTDEEKQLTE

SEQ ID NO: 477994 - protein, 345 aa, unidentified
MPIVGGMDIHRKQITFDYVDLATGEVVCGQIAPADRRHLRAWLERFEGIPDAAFAFEACTGWRYVAAELARAGMQAHLAEPADTAAARGRKKRAKTDRADSRLMRDLLLQERLPECWIPPEHVLECRALLETYHALRREHTAWVQRAHAVLFHQGATRLREGGTGTAEGRELLREIAAGQLSPAGQQQIGLYLRMLEVTEAELDALRGQLTGAARRLAGAKALREQLYGVGPVTALALTCWLGGAGRFSSTRKAVRFTGLDITVYSSAGKRSPGHLSRQGPPVLRWCAYEAGKVHAHGQAPDHSYYAQVKDRIDGKRAALSEARKIIRQACHLLAELGDDALATG

SEQ ID NO: 477995 - protein, 318 aa, unidentified
MPQITWLVGIDVSKNKLDWCIRGAAGATAGNTAAGCAALAKELERRGVRLAVMEASGGYERPMAAALRQLAIEVLIVSPKRVRDFAKAAGRRAKNDPIDADTIAWFGEIFIRQGSARPDPAREQLAALVAERQDVVGMRVQCLNRDEHQSPALCRKLRKDMIKFLDQAIAKLDAAIAALIAQTPPLAERAALLASVPCLGRQTVAALLAWLPELGQIPNTQVAALVGVAPFDDDSGKHRGARHIAGGRRELRNILYMAVLGGATQHNPTLKAFYQRLLAKGKLAKVALVACMRKLLTILNIMVTRNQPWQPQPTPALA

SEQ ID NO: 477996 - protein, 382 aa, unidentified
MQASRKSTPTADHCGTIFVAIELSQKTWLITVHSPDRDQFSRHRLEGGDHAGLLALIEKVRARATQQLGSTPRVVSCYEAGYDGFWLHRLLEAAGISSLVFDAASIAVEQRSRRAKTDRIDGELLLRTLMAHLRGEPRVVRIVRVPSVEEEDARRASRERDRLITEQTAHTNRIKSLLRLLGMAVGNPRRRDWLAWLKRQRDWQGHPLPPHLLAEAQREHARLMLVREQLAALEQVQAAQASPVPAPMAERRDLLQRLKALGPAFTATLVNELFYKDFRNRREVASYCGLAPSPWQSGGIDREQGISKAGNRRARHKAIELAWLWLRHQPNSALSHWFRTRTANAGRRAKRIAIVALARKLIVALWRYLTAGLVPEGATMKA

SEQ ID NO: 477997 - protein, 315 aa, unidentified
MTGPAVWVGIDVSKATLDLALRPTGERWTLANDEAAIQSLVQDLGPHAPSLIVLEATGGFEHAVVAALAAAGLPVVVANPRQVRDFARATGQLAKTDAIDAQVLALFAERVRPEPRPLPTEAAQALDALLTRRRQLLDMLVAEKNRLGFARAVVRRGITQHIRWLERRLGDVDHELGQMIEQSPIWRAKDDLLRSVPGVGPVLSRTLLGELPELGQLNRKQIAALVGVAPLARDSGTLRGKRLVWGGRAPIRTVLYMSTLAAARCNPVIRAFYRRLRAAGKPAKVALTACMRKLLVILNAMVRSNTHWQKAPAVV

SEQ ID NO: 477998 - protein, 422 aa, unidentified
MAFKIFRKNCCGLDVHKTWIYACIGITDPNGRTEYKQARFSSFTKGLQELADWLAKYDCTDVCMESSGKFWIPVFNILEKTCWVTLAHPKYTKPQKGNKTDRKDAKWICDLYMCDMVKPSFIPPPDIRQLRDLMRYRMKLTNMVTSEKNRALNCLTVSNLKLDDVFSDVFGKSSRSIIHYILEHPGESFNVTPFIDRRCKHPIEEVQAAVDGAISHEQAVKLRECLQHLDELETHKANVEKEILRLAQQYPYQLELLQTVPGFSGNVMTAIALISEIGADMSVFPSAKHLVSWAGCCPRNDQSSKKVKSTRISRAGVYLKPLLVQVANAVIKSDKYPECKERYRRIKARRGHKKAIIAIARMMMVCIYHMVSEKKPFSPTDYEELMDPQNHVERVVLNENNVFAYLESLGYDSSQLVKRNDY

SEQ ID NO: 477999 - protein, 450 aa, unidentified
MQLVAERILIRGWRFVSVRGVSFNRLFKLLRKGVKLMLDTIFIGIDVSSQNNAVHVMNHNGDKLWQDAFSNSRKGSEDLVKKVLLTPESKHAFLRFGLEATGCYGEGLFMFLRETERIPNTRKAIHRLNPKQVKRFHDSYSDLPKDDFTDAFVIADSLRFGRLGMKEAVVEDRFLALQRLTRWRFQNAKELTREKNRYLQNLFLKFSSMAQLDGTQDSLFSNLFGATAMDFVDDFESVDQIAYTPLEELVEYLKIHGKNHFVDPEALAKDIKKAARTSYRLPKALQDSVNEVLAMQCNTIRFYEKQLKEVDKVIERQMDAIPNTLQSIPGIGPVYAAGLIAEIGDVKRFENEAALAKYAGLTWKKHQSGKFEADSTHLIQGGNRFLRYYFCQAANKVRQHDPDYQAFYNKKLRETKSTPHKRALVLTARKLVRLVYVLLRDQKLYQLRIR

SEQ ID NO: 478000 - protein, 458 aa, unidentified
MTPRQDHFPHPTPRRRRGTLPVTNPDAAGVDVGADAHWTCVPTDRDPEPVRRFGTCTADLEALADWLQRCGVTTVAMESTGVYWVPLYELLESRGFTVLLVDARQVARAPGRPKSDEKDCQWIQRLHSYGLLSAAFRPPEQVVVLRAYRRQRDMLVTYAGQHIQHMQKALEQLNVKLTEVVSDITGVTGMSIIKALLRGERDPAQLAKRRDPRCQESQATIARALQGTWREEHLFALRQALALYEFYHQQISACDGAIEAQLQTFADQSAGQPLPYRPRRRKREANEPRFDARARLYCVCGVDLTASEGIDETTALVLLSEIGTDMSRWPSVKHFCSWLGLCPQHKISGGKILSRRVRRGSSRAKRALRLAARSLHHSKSALGAFFRRIKSRHGTPAAITAAAHKLARLVYSLLQHGTDYVAQELGEYEAKYRERKLQGITRQAQALGFVLVPVAVGG

SEQ ID NO: 478001 - protein, 420 aa, unidentified
MKIATKLRIPKRAGEARPVGCDTYLAPPPPLKGRIIGLDCHPDTFTAAVFQGTTPHNAQKLSNHPDMSLAKFLAWAAKEFTWNDLFLMEAGSNSFEIHRRRLTLGLRAVVMESCHVGKHAKTYADNDKMAAARIALVYLQGNVPCVWVPDALTCERRELLHAYNKAVEDRTAASNSLKSYLNQFAIRTGSRKLEKSEAWVMAKRDWTPLQIKLLAGYFQNLRAQTERRKDLLRLIGTAICDEPLMLRCMKLLGIGQINAFALLAVIGDVRRFERPEKLVAYIGLNPGQRDSGHGKRIKLGVGKRGRGDMRNLLVQGAHAVLRKGRATPLGKWGWKLFARKGQRNIAVVAVARKLLVQVWHLLSGNPPVALESEKSLRVKLMKLATMLGKKLREELSLPPRPSDCVEHLCKRISQIPAAAG

SEQ ID NO: 478002 - protein, 366 aa, unidentified
MKKTSTVQAYGNEILKEQKLTIGVDLGDRWSFYCVLDEAGKIILEQKVPTTPEAMKQTFSRIAPSRIALETGTHSPWVSRLLTELDHEVIVAHAQKVQLITKSNRKDDRHDARTLARLARIDPELLGPVRHRSVQAQIHLTVIRARAELVSARTALVNAARGLVKSYGQRLPKCGTQQVSRELAAALSTELRDVLEPLLKEIESLNERIQEYDERMEKIAKEVYPEVCLLKQVKGVGTQIALTYVLTIEDPHRFLKSREVGCFLGLKPGRRNSGESEPQKKISKEGDRYLRTMMVQGAHYILGPFGEDSDLRRWGLKLAERGGKNAKKRAVVAVARKLAVLLHRLWVSGEVYEPLRNSQKAMRAVA

SEQ ID NO: 478003 - protein, 352 aa, unidentified
MKEFIALDSHKYYSLVEREEVKSCEAKQCRIEHDRGAIRGYLSRCEPGTVVAVEATGNWYWIVQEIEDARLCPALVHPRKAKLMMGMINKTDKLDVHGLNRLQRNQTLPTVWIPPGDLRDLRELTRTRMVLGHQRTRLKNRILATLSKYGLLLSREVSDPYGATARPIMNQAVAQLPEQAQYVTMALLKQLDFIQEQIRELEQRLKQLVKVTPAMILLMTLPGIGWLLAAVVALEIGDVTRFASAERLASYAGTTPRVHSSGGKTRYGGLRPDVNRYLRWALAEAGNSVAVNHTRQPQRHVSQLYRRLRERKGHAKAVGAVARHLAEASFYVLSKNESYRDPALKEGQSMEG

SEQ ID NO: 478004 - protein, 319 aa, unidentified
MKDGDSVFVGIDVSKDWLDIAVLPSGEHSQVPYDRRHVGSLVKRMTELRPVRIVLEATGGYEVLVAAAFSDAALPVCVINPRQSRDFAKATGELAKTDRVDAGILALFGQSIRPPLRPLPDAHARRLREIMDRRGQILEMLLAEKNRLQRTESKIVKASLRSHIRYLERQIEKTETALSDQILASPAWQADVDLLVSVPGVGQLTATNLTILLPEIGTIGRRQIAKLVGVAPLSRDSGSRRGSRCIWGGRAQVRRILYMPTLVAIQRNPPISALYTRLIERGKPKKVAIVACMRKLLIITNAMVRDRTPWCPELAAALS

SEQ ID NO: 478005 - protein, 466 aa, unidentified
MKPFYLGIDISKGYADFMIINLKKHPVVQGFQLDDTFDGHRSLYNILSRFLAEHPDSTIFAGVESTGGYENNWYNSLIEFQGSLNIQTARLNPLGVMHNSKADLKKNTTDKISAQNIAEYLIAHPEKVVYQQHDKLSGLRKQWGFIKMLTKQNTQFLNQLNTLLYTANPGLLSYCQNGMPDWVLKLLVKYPSAANLKKAHVKTVARIPYVSRQKAQQLIALAKRSVASATDATTKQLIMATARQVLHLKKTIGEQIKHILRECSIPEVELLKTFPGISDLSAVGLIIEIQTVKRFAEVKKLASFFGVHPVYKISGDGVGGIKMSKQGRTAPRQILYMIALSAIQCNPLIRAIYQKHQQQGKHNMAAIGICMHKILRIIYGMLKHNKPFDPHIDIANRRRSVRIKNDTPVDNTNRRFQDYDRWAPVSRRQRKKRLERERSHSVRDTRVGITAPAPLHDIIANILPKV

SEQ ID NO: 478006 - protein, 419 aa, unidentified
MSLNVVGASFFVGIDWAAATHAVCVLDTDGQKIAAFTVEHSAAGLAGLVRRLARLGEPDTMPIAIERPDGRLADVLLEAGHPVVPVKPHAIKTWRESEAGSGAKSDPGDAEVIADYLRCRQRKLTIAVPYSPETRALRTVVRTRDDLVDMRVAATNQLSALLDAHWPGAKAVFADVESPIALEFLTRYPTARHAAHLGAKRLATFCAKHGYSGRRSGEQLLARLRAAPTGTTDQTLCEAIRDAVTAMVTVLKTLGTALKDLSRSVTATLGEHPDAEIFTSLPRSGQINAAQMLAEWGDTRQAYDSPDAVAALAGATPVTKESGKHRAVHFRWACNKRFRRAVTTFADNSRHESDWAAQVYADARARGLDHPHAVRVLARAWIRVIWRCWIDRTPYDPSRHGNAARLTKTGQTEKPVARG

SEQ ID NO: 478007 - protein, 338 aa, unidentified
MGEVSTIGLDIAKSVFQVHGVDVAGSVVIRKRVSRAKLLEYFGGLPRCLVGIEACPSAHHWGRELQALGHRVRLIAPSYVKAYLKRSKNDAAAICEAVTRPSMRFVPIKTKEQQTVLMLHRTRQLLVRQRTMLSNALRGHLAELGIVSAKGRNGTAELLRIIADRRLSPAVCGILEVLARQYGAIGTEIASIDKNIMVLHRACEASRRLAEIPGIGPISATALVAEIGDWKAFGSGRSLAAWIGLVPKQYTTGGKDKLGRITKQGNRYLRWLLVVGAMAVIRYARNHGTEKRPWLGRLMQRRPTKVAAVALANKIARMAWAIMVRDERYKEPKPLLAA

SEQ ID NO: 478008 - protein, 337 aa, unidentified
MNYIGMDIHKQFTVAVAKDEFGNKIIEEKFENNKENIVKFLSVFHSNETKVVMESTCVWQYIYDIIDEQGFETKLSNPGRTKAIACARMKTDSIDANTLADLLRANLVAESYVPNKDIRNLRDVVRQRKSLVKERTQIKNKIHACLNMHGIQLPFSTLCDKAIEWTFSEIEHTTFKTIIKVYINILEQFNAEINIIDDKMEQIALQDKQANLLMTIPGIKSTRALEIVSEIADISRFETSGKLCSYAGLVPSIRQSGNTLRFGRLVQQSSRSLKNALIEASWNIVRVKEPNQLQVFYKKLCKKKSKQKAICAVARKLCCIIFAMLKKQEEFKDFIIL

SEQ ID NO: 478009 - protein, 353 aa, unidentified
MSDYYVGLDVHKASICIAVLNVDGKLVMESVIETSASTILDFLKGLRGQIQVTFEEGTHAAWLYDVLKKTKAKVIVCDPRKNRLLQDGNKSDQVDARKLAQLLRAGLLSAVYHGEHGTRDLKELVRSYEYLVEDSTRVMNRIKALYRGRAIACAGVDVYKLRQREVWLAKLPEAGARARAQRLFSELDHLAGLRREARQALVVECRRHPATKLLLAVPTLGIIRIAQLISSVVTPHRFRSKRQFWSYCGLAVVTKSSADYRVVGADVRRTRKAATTRGLTRSHNRTLKYVFKSAALTASRCEPFKAWYAELVERGLRPELARVTIARRIAAITLAVWKRGESFDANKLLKHPT

SEQ ID NO: 478010 - protein, 395 aa, unidentified
MVAVDIAKRGHWLLIQGPDGIREQPRRIANTAAGFAALLAQAAAARHRWPEAPLVVACEPTGHYWLPLAYWLQARGVPVVTVNPAHTKRAKELEDNSPAKTDRKDLRVIADLVAAGRSRPCHLRTGVYATLRALAMLRARVARDLTAVTNQLHQLVDQLFPELLPCFGDDLRRATCRRLLAVAPTPAAVQALGVARLTALLRGASRGRYGATLAERLLAAAQTSIGIREGTAPLVARLTYLLDEDARLRAYRRALERQQAAALEAVPYARALLAIRGLGVGTVATLLGEAGDLRGYRRARQLLKLAGLNLYEISSGEHQGQRRITKRGRPGLRRILYMAALRLLKRGAPYCGYYHRLRARVANTQAVVAVMRKLLRVVHALVHSGQAYDPVRLAA

SEQ ID NO: 478011 - protein, 428 aa, unidentified
MSNQEIIRRKQYCQIAKEITGSDQYLVVGIDVGKDTHHAFMGSATGKALFRKLIFENNLDGFSRLLKTADEIKSQNGLCKIVYGLEPTGNYHKPLARHLIRCDSNVVLVSGEAVNKNRSLLDGRWDKHDTKCAANIADLVSRARCLYYDSPSPSIMELRALLSLRRRLKREEHGLRMRIRNNLLAQYFPELDRFYNACESESLAIVQWFLNPDTIAAMEFGEFFHLVTKTRRGIAQTLRLRKIHGLATESVGCPMGPTAEYEADLLVEKLKQVRQQIQKTADLIEDFCLEFDEYSYLLTIPGFGPYISARVLASIGDPFRFENRKQLIKLAGYDLCAKRSGKTSDKAVPVISKKGNGELRYALYQAASVAAARVDLFRTYFTRLLRGRERERGIKTKMRVKLAVKMLVIAWTLMKKREVFDPAHLNIE

SEQ ID NO: 478012 - protein, 344 aa, unidentified
MEQVYYVGLDIHKKIIAFCIKQADGTIVAEGKIDASRKALKQWAESIPGPWIGAMEATIFTGWVYDFLKPYARQLQVGNPLMMKAITAAKKKNDKLDARTIADLVRCNLLPCCYMASEEMRDLRRVLRYRNLLVRQAVRMKNRRATLLMETGQEYNKKKLHGAKYFRGLLEKIQDVPESFKEILQMSRGALELFESCQKRLLKELVNNEVLRERVQRLMSIQGVGEVTALSWALEIGDVQRFTSIRKASSYCGLCSAQVESGGKITRMPLSKQRNKRLQSVLIEAAKLAPLYNQELADVYNKEQQRGNNHNQATITVARKLVAFLLAVDKSGKAFIKKAEQQAA

SEQ ID NO: 478013 - protein, 363 aa, unidentified
MPVRGCLPLVGLERNGVLDPTTSAPTLFVGVDIAQHSAQASWLRAGQPPSAAVAVAQTAAGFAALRARLAATGVPAAHTLVVLEATGTYWCRLALDLHTAGYGVAVINPAQAHYFAKAQLRRSKTDALDAQLLAQFAERMRPSRWTPPPAIYHELEPLLQLRQQLLDARQVARNQLHALRAGAVVIAPVAARLAAVVAFYDEQIASLETELAAALPTEGAWAGNLGLLLSINGIGPWTALWLLVATVNFTSCATGAEAVGYAGLGPRQYQSGTSVRGRERLPRGGHARLRTALYMATLSAARYNPAVAALYQRLVAAGKKPKVARCAAARKLLLQAWAVVRKQHAYEADYGQRAAPAGDAVAA

SEQ ID NO: 478014 - protein, 406 aa, unidentified
MEGFTMPPKASRLVTLAPDTEISEMSSKKSHQNGSPKSSQNIATSYASFVGVDLHKCTVTLSAVDPDGEPIGRLKIDTKCVSKIEDWLTALPRPCWMAIEAVGFTEWFIDRFRDCVDRTDIADATELALRRGKRRKSDDNDALDIARRLARGDCPLGFIADDDLMALRKLGRHWRSLSRTLARAKQCMKSLLNAANIRGPKFDGASAQRWLLAHGCLLKEVQRNAFSDHLDIILLIERQREKLRRHIIAANRKQCPTKMALLQSVPGIGDIWSCIIAAEIGPFDRFPNADALEFWAGLTSDLKESAGRTQSGPITKAGSATLRWALGKAAVTLCQHDAAQERIRQRLISRTGNAKANVAMARRLLRTLYAMMRDGTFYQRTEPTHHLHAANQAKRTRKGGIQKKIA

SEQ ID NO: 478015 - protein, 385 aa, unidentified
MEDCSSEIKQCEYFTESREVTTDRFSCFIGVDLHKTTVTLRAVDPSEEIISSLRTHTQCVNKIEKWINELPEPKWMAVEAVSFTEWFIDRYRDCVDRIDIADATELARRRGKRRKTDRNDALDVAVRLVRGNCPLGYIADESLMYLRKLGRHWRQLSKILTRSKQCMRSILDAANIHGPKISGATAQAWILGHGDLLKDVQRESLANFIDVISLLERQRETLRRKIIFANRNEEFSARITMLKSIPGINDVWACIIAAEVGPFDRFPNADTIEFWAGLTPDNKESAGRTQSGRITKAGSQTLRWALCQAAVALCRSDVRQEAVKQRLVKRIGKVKANVAMGRRLLRIIYAMMRDGTLYERSEPTDRLKRNIKKTRYVKRKKREVA

SEQ ID NO: 478016 - protein, 423 aa, unidentified
MEVMHERVAGLDVHKETVVGCVRIVAGGKVSRECRTFETTTDGLGALLVWLTQSGCTHAAMEATGVYWKPVWNILSDGKFELILANAAHIKTVPGRKTDVNDATWIADLAAFGLIKASFVPEEKIQELRSLMRARKQLVREQTRHIQRIQKTLEEANVKLDSVISDIVGLSGRRMIEAMIAGVRDPRKLAQLADRRIKASPKALYDALHGRLTDHHRFMLRLHLGQYDALASSLAEIDGQVDEAIAKIDEEAAAGRGSFRELIALLDAIPGIASLAATSILAEIGTHMSRFASDGHLVSWAGLSPGQNESAGKRKSSRLRKGAPWLKTLLVQCAWAAIKKKDSYYKAQFNRLKARRGPKKAICAVAASMLTAIYHMLKDGVEHNDLGASHFDRRPAVIKANRLVAQLAKLGFRAELRPLAEAA

SEQ ID NO: 478017 - protein, 356 aa, unidentified
MNTRRIQDFVVEGKEVFVGLEDSKTTWKIAVRSEKMLIHQVAMEAKYPVLKKYLGNKFPACTIHVMYEAGFKGFNLYDQLTEDHIDCVVIPPHLVTEPKVNKVKTDKRDAKRLALILENHDFKDACHVPDKERREDRQVSRTLIAIQKDIVRTRNRIRKLLHFHGIEVSFPDRWGRKEFYALRELPLSEPLKISLNVLLTVLEQLWTHQQHLRASLRQFCRRERYRKAFEIARSVPGIGWFTAIRLVLEIGEDLTRFTSGKKIAGFVGLTPGEYSTGETTWKGRITGMGSGFIRAALVENSWVAIRKDPVLLGKFKRIWKGTGSKKKALVAVARMLIVRLRACIISGTPYVIGVAR

SEQ ID NO: 478018 - protein, 366 aa, unidentified
MKKISTVVLEGMQIFKENQLTIGLDLGDRTSRYCILDEAGEIILEQELPTTAKGIEQVFSKIPRSRIALETGTHSPWISRQLGQYGHEVIVAHARNVRLISESSRKDDRLDARTLGRLARIDPALLSPVRHRSAKAQMHLTVIRARAVLVSARTALVNATRGLTKSNGQRLPQCGTEQIHREIAQGLSQELRDALDPLLREIESLNERIAEYDTRIEQVAREMYPEVARLKQVKGVGPLIALTYVLTLDDPFRFRRSRDVGCFLGLRPGRRNSGRSEPQLHISKEGDRYLRTLLVQGAHYVMGPFGQDSDLRRWGLKLAERGGKNAKKRAVVAVARKLAVLLHKLWVSKEIYEPLRNNRNAMAQVA

SEQ ID NO: 478019 - protein, 404 aa, unidentified
MTSAVADDTTDQIVFGGVDSHADTIHVAVISDNGGHLADAEFATAAAGYAAALAFLSAHGHVRATGVEGTASYGAGFTRAARSAGLDIVEVNRPDRAERRRIGKSDPIDAYAAARAALSGRASSSPKDDTVAGIRALHNAARSAVKARTAALNQITHILVTAPETIRAKFGQLIGADRIDALARLRPAGDAVHTAVLTALKSLARRVRELTAEHQALTRALDSEVTVHNPGLRAVYGVGPDTAAQLLVTAGGNPERLRTEASFAALCGAAPVPASSGRTNRHRLSRGGDRAANAALYRIALVRMSGDPRTRDYVARQTAAGRTKKEIIRLLKRAIAREMFRCPTTTATIPNIADLRPLRQSKNITLTAAARHFGVWHATISTLERGIRRDDDLANTYRDWLTAA

SEQ ID NO: 478020 - protein, 405 aa, unidentified
MGSETHFARAFDWRNYEYSKKPLEFSNTEAGFMTLKAWMADFAEKYGKNVVIPGMEPTGHYWFNLGAYLQDNGMKPVHVNPHHVKKSKELDDNNPNKNDRKDPKTIAALVNEGRFSYPYIPTGIYAEIRSLSNLRLQTQEEITRIKNRIARWFSIYFPEIKDVYRNPDSVSGLMILKEAPLPQDIVKLGVDGINKIWRDAKLRAAGLKRAKTLVTAAEHSIGSQEAPDSARIELKNLLNDYEIYKNREEDLMSLTEEKLSEIPHIDKLLEIKGVGLKTVSGFVAEVGDITRFDNPKQLQKLAGYAIVECSSGKHKGESHISYRGRKRLRYVLYEAAISLIARNEEFKEVHRYYRTRKENPLKKMQSVIAVACKVLRIFYTILTKGVTYDGAKMMQDIKRPQMLAA

SEQ ID NO: 478021 - protein, 369 aa, unidentified
MTELTLFVGLDVYKKTISVALIDAAASATVRFYGTIANTPDALRGLCKKLANDGQALHFCYEAGPCGYGVQRQLTRLGHRCDVVGPALIPRKVGDKVKTDRRDAMMLAQTLRAGQLTAVWVPDEAHEAMRDLVRLRAQAVRDLRKTRQQLLSFLLRHGLVSPYGHWTKMHRRWLGELVFAHPAQHLAHEEMLHRIERAEALCDRLKGAILELVPQWSLAPVVQAIQALRGVSLIVASVIVAEVGCFSRFDNARQLMAFLGLNPSEHSSGATIRRGAITKTGNALARTCLVEAAWTYRFPARVTQIIRDRLAGLPEPIRNVAWKAQVRLSARYRKLVAAGKAAPKVVVAIARELAGFIWAIARMVEPKFA

SEQ ID NO: 478022 - protein, 348 aa, unidentified
MGEVITIGVDIAKSVFQVHGVDADGAVVIRKRVGRAKVLEFFVNLPPCVVGMEACATAHQWGRELQKLGHDTRLMPPTYVKAYVKRGKNDAADAAAICEAVTRPSMRFVPIKSVEQQSTLMLHRTRDLLIRQRTQLINALRAHLAELGLVAAKGREGLHQLVTVVMECSDERLPSNARFACQAIVAQLQAVQTQINELDKRITQAHRANEDSKRLDDIPGFGLILSTAVVATMTDPKAFKTGREFAACIGLVPRQNSTGGKERLGSISKQGDRYLRRLFVVGAISIVRTARMQPDKYPWVVELLSRRPAKVVAVALANKMARIAWAVLAKGEPYRALARPSKIAIAAA

SEQ ID NO: 478023 - protein, 427 aa, unidentified
MKEQSRTIVGIDWSADSHTCYDLQTDKSFKITDSVEGYEKLLKNYPEAVFVIEEANNRIGDYLLINNREVYVLPPCRSKEARKYHFSSGTKSDGLDAKAIALTFKEHPSYCLKARYSKVGVKITKLVTAYNIVSKMHSQQCNRLYSLLLRYFPEYLHIMDKQYRSDTSLRILSVCPTITELKKVSNEELRKILNKENYRMTSILKNKLDRIRSEGISWEDTSCEGKLILLLVNTLLSLRKGLEVLKKEMEKTLKNSPYRIILSIPGVKAVIGSYIVKAYLTHDFKSYQEIQKYAGTAPLLFQSGRKSIMLMRKKCDNDLKGMIHMAAFASLKTCGWARNYYRRKRKEGKTYGHALRALGNILLKIAFSMLSKMKEYDETLFLNAKGIKTTQLNDTSFSETFPYPEYSQDAQLSLAATKDVVDNLIVT

SEQ ID NO: 478024 - protein, 365 aa, unidentified
MRRLTCGMDLHSDNLVVGLQDQDGKRIAHRRLECDLQKVLEFLKPFKKEMEAIAVESTFNWYWLVDGLKAAAYPVVLANPAKIDQYTGLKHADDTSDAFFLAELLRLKILPTGYIYDPKLRPVRDLLRRRMSLVHQRTSLILSLKSLFTRTTGQSLKLGAVKAMSVVEAEKLFKHPANQLIAGLQKKHIEALDESIDQIEKVVLQVASHLPYYPKLKTLPGVGIVLGLTITMETGDIERFPSPEDFASYCRTVDSKHISNGKKKADNNQKCGNKYLAWAFVEGANFAKRYDELCRQWYDRKAGKTSTVIATKALACKLSKVAWYLMAENSDYDPGRVFPELATARAAKFKKQEAQKLKKMTMNEP

SEQ ID NO: 478025 - protein, 519 aa, unidentified
MAKKSKRRCDTLPVLHPDAAGIDVGASELFVAVSADRDPRPVRSFPTFTRDLHALADWLEQCGIHSVAMESTSVYSIPIYQILEARGLEVYLENAQHMKNVPGRKTDVYDCQWLQYLHSVGLLRASFRPPGFICAIRSLWRHRASLIQMAAEHVLHMQKALDLMNLQIHRVLNDITGVSGLRILDAVLAGQRDPLALARLCHGGVKSSEDIIAKSLEGDYLPEHLFALRQSLEAFRYYQQLVLEADREIQLQLGELKTAETAQPTTPARTKVNSHCARHYEPKTFDLRGELYRIFGVDLTNVPGISALTAQTILCEIGTDVSRFRNASAFASWLGLCPERKISGGTVLFTKSRRVRSRVATALRMCAQSLHHAKDYHPQTRQTSGDHSHRPQACSHCLPPFEHKGGIRRERLSQVRSRHHKARGISPPQEGCPTRISGHPGREHLIVPWESSRRREYPDRRSASCRRFWGVILTTTRAGLERVCWLVASGDQQWSNDNEFSLLIRAETMHANRIGSLQF

SEQ ID NO: 478026 - protein, 343 aa, unidentified
MQTVTTIGLDIAKSVFQVHGVDAAGQVVVRRQLKRRYVLAFFEKLPPCLIGIEACASSHHWSRELQALGHKVRLMPAAYVRPYVKRQKNDAADAEAICEAVTRANMRFVETKTPEQQSCLMLHRTRHLFIRQQTAVINAIRAHLAEFGIVAPVGRNGVEELLGVVADASDKRLPEIARACLAALGAQLRMLKAQILEFDRMINAWHRSNETSKRLDEIPGVGPALATALVASVADPRAFRSGRDFSAWIGLVPKQHSSGGKDKLGGISKQGDRYLRSLFTAGALAVIRYAKIHGAKHRPWLTALLARRPTKVAAVALANKIARMAWALMARGERYKEPVALAA

SEQ ID NO: 478027 - protein, 323 aa, unidentified
MPEPSERFVGIDVAKAELVVSERPSLAQWSIPNTEAGIRTLTERLEAAAPPALIVLEATGGYEFAVVGSLAAAGFTVAVVNPRQVRDFARATGQLAKTDRLDASLLALFAERVRPTVRPLASDAQADLAAVLARRRQLLEMLVAERNRLGQPRSRQTTVVKRSLKQHIAYLERELRITDAELGEQIHASPAWQAQADLLRSVPGVGQVLAVTLVAEVPELGQLTRKTIAKLIGVAPLNRDSGTLRGRRVIGGGRASVRAALYMGALVATRHNAVIRRFYQRLLAAGKPKKLALTACMRKLLTILNAIVKTHTRWQAPEALTTA

SEQ ID NO: 478028 - protein, 382 aa, unidentified
MKKHRYVGLDVHKESISIAVAEAGRRGEVRDYGRVGGSLIAVERALRKLKQSEGDKEVLLHCVYEAGPCGFVLYRRLKQIGIDCAVVAPSLIPRKPGERIKTNRRDAIKLARSHRAGDLTPVRVPDARDEAIRDLCRARTDAVRDQRRSRQQLKALLLRLGYRYTGKSSWTEAHLRYLRELEMSHPAQKAVLEEYLIAISQAGERIARLSTQIELHVASWRMKGAVEALMAMRGIQLIAATVLISELGDLRRFAHPRQLMDYLGLVSREESTGDRQHRGAITKCGNTHARWFLIECAQHYALPPKVSKELSKRQEHQSQGIKQLSWKAQIRLHRRFFALMQRGLCRQKVVVAVARELSGFIWALLRQVPLDLGNHGSPNPSS

SEQ ID NO: 478029 - protein, 348 aa, unidentified
MDHYAGIDVSLEQSSVCVVDAGGKIVRESKVASEPAALIGYFASLGLAVVRIGLEAGPLSQWLYAAMKQAGLAVELLETRHVHDAFKAMPVKSDRNDARGIAQLMRLGWFRTVHCKSIAAQELRAVLTARKLLQSKLRDIENSLRGILRGFGLKVGKTTARSFPGRIRELVAGQANLEAIAQAMLSVHAVLLREFNGLEKRVRTMAREHVQARLLMTTPAVGPIVALTYAGAIDDPARFKSSKQTGAYFGLTPKKYQSGQTDITGRISKIGDAAVREALYQAAHVMLTKPVKGCTELKSWAMRIARRAGMRKAKVALARKLAVIMHRMLANHKPFNPSARTAPVAAAA

SEQ ID NO: 478030 - protein, 495 aa, unidentified
MIQIPAVIERCAGIDVGKRELAVVVIAGPADEDGEIKTRTFGTTVPALEELREWLIQEGCTSVAMESTGSYWIPVKNVLEPSLKIVLVCPKKHKPARGDKTDFRDAKNLAHLHRHGLLKGSFLPLRTVVELRDLTRRRKKLLANLAAEKNRIQKVLEVANVKIGSIMSDLFGVSGQAMVSALVSGKEISAEQIAGMSKRRLRQRIPELTEALQGHHMNDHHRWLIAQSVEHTVLLDRQMEELEAKIEEKLQPYREPYELLQTIPGVKGMTAATILAEIGPDMSQFETAKHLCSWAGISPGNNQSAGKSKHSRIKKGSKFLLSALVEAAWAAARKRDSIFQRKFHRWMHKLGAAKANVALAHSLLELAYVMLKERRPYQEPDPQQMHELEKAKLVRHHAKRLQQLGADDGLVNELVAKMNQPEVCSSIETNQTAIPRPIRKVCPAKVCRGALGFRARQTGKREYSTVKKPAPEALLPTRSQSKRRKHPETNAQRPE

SEQ ID NO: 478031 - protein, 344 aa, unidentified
MKIKLIGVDLAKNVFQVCALNQANKVLFNRAVRRPQLCKTISQLPPSILAMESCSSAHYWGWAFEAVGHQVVLVPAQHVKPFVRGGKSDARDALAICEAAQRPGLHPVPIKSVAQQDILLLHRLRQGQVQLSTALANQIRSLGREYGVVFPAGVRTLIARLPEVLEDGGNELSPVARHALADQHRHLCSVRVTIKQLQQQIEQLLAAHPAFAQLQALPGIGPLTASAFIAAVGDGRQFRCGRQVGAWLGLVPRQFGSGRPVQLKGMSKNGDRYLRALLVHGARAVITRGLKNRPELAQWVQPIIARRGHNKAVVALANKLARIAWVIVSSGEPFDLKRAFKPAA

SEQ ID NO: 478032 - protein, 355 aa, unidentified
MEMHVGLDVSLDETSVCIVDNDGKVVRETKVASEPETIRSALESYAGRLCRIGIEASSLGIWLHRELTAAGLPVIVVEARHMRVSLSAMRNKTDRNDARGIAHMMRMGWYRAVHVKSDENQRMRTLLANRRLLKRKLIDMENHIRGALRTYGMKVGQVSRSSFDDRVRELLDGGDYVFGVMISTMLEVRKTVLEGYNQLHKIVLQVVLHDPLCRRFMMVPGVGPIAALSFKVAVDDPRRFTRSRTVGAHFGLTPRRHQSGTSIDFAGHITKMGDINTRGALCEAAASLLLRSKRWSALKAWGMRIAKRASMMCAIVAVARKLAAILHRMWIDGTEFQWTAGAKITEKVRLKPATV

SEQ ID NO: 478033 - protein, 425 aa, unidentified
MNYKQNEKINQVKESTLVVGIDIGSTTQYARAFDWRGIELGKVFPFSNSREGFEAFKAWMQHLQDKYRKSDVIVGIEPTGHYWFDLGAYLEDEGILLVMVNPYAVKQTKELDDNSQSKNDRKDPKVIAKLVTEGRYSAPYTPDGVYADLRIMVANRKRLIREMTQIKNRFARWFAIYFPEYTDVFRDYEAQSSMLLLKKVCTPEAIVELGAEKINQIWRDAKLRAVGMKRATTLCETAKRSIGLKKGSSAARYEMKLLLEDYEYKKAQLDAVMEEIEKLCRKIPESEQMLAIKGIGVITVAGFLAEVGDVRRIESPRQIQKLAGLSLRENSSGKHKGQTTISKRGRSKLRAVLFNAAIPLIAKNPEFKSLHEYYTTRANNPLKKKQSVIAISCKLIRVFYAILANGVTYDAQKMLSDIHRQPQAA

SEQ ID NO: 478034 - protein, 429 aa, unidentified
MDNTTTPNTRPARTPPNTPPVTLVGVDAHSKKIVLCLTHWQHGSDPVVLKTITTTLDALEGTCQNNIPPDATTVLEASTNAFSIVRRLRKAGHPNVKVLAADTLAGRARRDRVNDNIDARNLANAYARGGTREVYVPSEEGTRLRDLFYGHHTAVENATRASNRLWAFCSAHGFDVPPPQRKEKACAIQTQLDAHAWDADARFHITRLLADYAHALETRGAYRRRIERSVATTPDMLRVMQVLGIGVLCAFGLLAFIGDIERFESAKRLVSYFGFNPVVDTSGESTGTRRLSRFGQRTLKSMLVEAAHSAFRHGDGPMHGWARRKVASGKPRNVVLCALARKRVVCAWHILKGHPAPVCEASLSYRRKLAKLATGVRKHAPGVLEDKTAAAFALRICAFLYPATSRSRPLESHTVLREPLDSCILAPKP

SEQ ID NO: 478035 - protein, 341 aa, unidentified
MEGVYIIGIDLAKNSFQLHGARADGSVAFRRKLGRAGLLNFLAKQPRCVVAMEACAGAHHWGREIGKLGHEVRLAPPAYVKPYVKRHKNDAADAEAICEAASRPTMHLVAVKGEGQQTEGMLYRTRDLLMRQKTQTINALRGHLAEFGVVARRGPVGLTRLAAAVRGAESGLPVAVRELGEILLEEIARLNEKTQELERRLRASARDDEEARRLMGIPGVGPVTASAIRAFAPPMESFRRGRDFSAWLGLVPRQHSTGGKPRLGRVSKMGQRDVRRLLITGAMSVIRQALRRGAPPGSWLARMLARKPRMLVAVALANKMARIAWALMRNKDDYREPAPLA

SEQ ID NO: 478036 - protein, 386 aa, unidentified
MKEHNTSQGKKAKTKKPTLQEIEAMSKKEKLTIGIDIGDRSSRYCIVNSTGAPLIEGKLATTREDLSTGFQSFAKTKIALEAGTHSPWISRHLAAMGHEVVVANPRKVALIGQSSRKNDQADAAKLAMLAQTNQRLLFPIRHRGERAQADLALIRARELLVESRTSMINGARGQAKSFGCRLESCDADAVKPEMADILPEAMRFSVKTLLETAAELTAKIHAADQQIHKNAERYTELNVLTEVWGVGELTALALMLTVDDKERFEKSRQIGPYLGMVPGQDQSGDSDKPQRITKEGDRLVRTLLVQCAHCILKKNAPDSDLKRWGLKKIDDQVKRGKKPNKKKVLIGVARKLAVLLHRLWANGEVYDPLYNAKKQEALAKKKNQVA

SEQ ID NO: 478037 - protein, 328 aa, unidentified
MYSIGLDISKATINIYIPINKSNAQIDNNIKSIKSFYLKLKQLYEKDINKLVFVFEPTGSYSNLIKVFCSKNEIKCFIVNPKKSCNFAKVIGQRNKSDIEDSIMLSKMLVIALDKEISVPTINNVVEELHEFISYYKFLLKQRTQNKNHLEAISIKNPNSLVSKHIIKEIKSLNLKIDKLIDSMKGLIKKDKYLYEAFTNILTIQGVGDISAIVLLHHFIKYPNTNQKEIISLAGLDPISKSSGTSVQSRTKISKAGSKLCRSTLFMAVMVAVRFNGELKDYYERLKERGKHTTVTQIAVMRKIIIIAHSLYKNNEQYNAEKYKKFVA

SEQ ID NO: 478038 - protein, 409 aa, unidentified
MNVIYERCCGLDIHKKTVVACLLTPGADGQPVKAVRTFGTVTQDLLALAEWLETARCTHVAMESTGVYWKPVWNLLEARFTLLLVNARHVKAVPGRKTDVKDAEWLADLLRHGLLRGSFVPDRAQRELQELTRYRTSLVQERTAEVNRLQKTLEGANVKLGDVATDILGVSGRRMLRALIDGATDVAAVAKLAQGKLRSKRPALEAALRGQIGLHQRFLLAQQLAHIEQLDATIAAVSAEIETRLRPVSIEQERLQTIPGVGLRTAQVLLAEIGPDVSRFPSAGHLASWAGMCPGNDESAGKRRSGQTRKGNRWLRSALVEAAHAAARSKGTYLAAQYRRLAARRGAKKSSVAVGHSILISVYHLLRDAQPYHDLGGHYFDERDRHAVERRLVRRLEALGHKVILEPAA

SEQ ID NO: 478039 - protein, 340 aa, unidentified
MNQSTTIGIDLAKTVFFVVVLDQRGKQARRKKLRRSELLPFLANYPEAMIAMEACSGAHYWAREMESLGHVVELLPAQHIKGYLRGQKNDYNDAEAIAEAAQHGRIRTVAVKSVEQQLDQSLHRLRQALVAEQTRLVNRARALCAEHGLIMPEGKHRFRHSLVALLEDAENGLPWRLRELLGRQYQLFLGLEDELAWYEREIKKQAAENETCQRLMSIPGYGPIVSSAFYGWMGSGQQFRSGRDVAAALGLVPKQYSTGGRAVLGGISKRGDKHLRALLVHGARAVARYAKRHDDRLSRWVCNLIERRGYNKAVVALANKLARIGWAVVTKEQAYAAIPA

SEQ ID NO: 478040 - protein, 343 aa, unidentified
MYYIGLDIHKKTISYCVKDASGQIHREGKFGSTRCELDSWIKTLPQPRMIAMEATIFTGWIYDHLLPYAEKVKVANPLMLRAIAAAKRKNDRIDSNKIADCLRCDFLPECYMASTEIRNRRRTLRYRNLVLKQMTQMKNRISGLLMETGVSYNKQRLHKLGYFMELMSCNEEVNESIRPLLKLSRETVVRSQRLDYALVHSLERDPLLAERLKRLRTIPGVGPITALTWALEIGDVSRFQSVKQAVSYCGLCSAERSSADKLVRMPISKQRNKHMQQVLVEAAKLAPRYSHELALVYERERLRGNKNRATLAVARKMVAYMLAVERRQQDFVPVGELGGTAAA

SEQ ID NO: 478041 - protein, 381 aa, unidentified
MLDQTAHNPVPTVYAAIELSKKSWVVAIVQPAKGQPSIYRIKGGAFSDLVMRLRTATPGGERLLVCYEAGYDGFWLARSLQTEKIDCRVLDPASLQVNRRARRVKTDRIDVLMLVRALIAVDRGDRHVCSIVRVPTVEEEDARRSHRERQRLIRERTAHINRIKGLLFGQGIRGVEPRLRRSRIDFSDLRTGEGLPLPARLRAELKREYARLDLVETQLRVTEAERDTADAQDPSIEYKRNMLIQLRGVGPASAAILTREIFGRRFANRRQLGSYLGLTPSAYDSGSTTRCQGISKAGNSFARRVMIEVAWLWRKYQPNSALAKWYEERAAGQSPRIRRIMLVALARKLIVALWRYVEIGLVPAGAVSCANIGAALDAAAA

SEQ ID NO: 478042 - protein, 353 aa, unidentified
MIWVGLDLHKRYITACALDEAGTVVAEHRRLPTDAEALIAWLQELGGPVTVAMEATLYWAWLHDRLSAAGIAAVAAHPYQVKLIWQARCKTDPIDARKLADLGRTNLLPVIWAATPAVRAQRTLLRGRAYLVQMRTSVKNRIHGLLLAENQWADVSDLYGRAGRAWLQTVPLSPMARVQVDLLLDLVDGLDQRVARLDQRVQRAMKGDPIVQLLQTWPGIGIFGAALLRAEIGTIDRFTSSHELAAYAGLIPSTQSSGGKTTHGGVGRAGSPWLKWILIEIVQSLKLAPGPIGRHYQKLLRAKGKPKATVAAARKLCCYLYWCWKEKWSYDEWLRQHEESREVRPRHALGTAA

SEQ ID NO: 478043 - protein, 374 aa, unidentified
MKKQTNKKTNPPSVLPTLTPAPVMTGGCTLGLDLGDRSHYVCVLDAAGEIIQEGPLPNDRAVLAGLLTKYPAATVALEAGTHSPWISRYLTGLGATVIIANPRKLHAISRHERKCDRRDAVMLARLARADAALLHPIQHGSAQAQHDLLGLKLRDSLVRTRVNLINTVRFTLKSLGHAVSNPSSEAFHKHILTAVPADCLPVVQPVLTVLALLTGQIKILERGLVARSKKDYPVTQRLQLIAGVGPLTALCFVLKIGEPKRFGRSRDVGPYLGLCPGRDQSGGTDKQLRISKCGDGLLRRLLVSAAHYILGPFGPACALRAYGQHLIGTSAREKKRAVVAVARKLAVLLLSLWKHGTDYEPRVPAPAPLVLVAA

SEQ ID NO: 478044 - protein, 395 aa, unidentified
MKNSTARKLRQVPKGYLVMGVDPHKKKHAAVAVTQDFNAHSKFKFNNSREGFEIALEKARAEMVRTGSGGVIFAIETGGHYWRNMAYFLDERGIPFHFINQFTLKRRREGKDLNRRKNDYRDSEVAAQLLCTGEFTDTKLQHGVYAELRAAYNAYRRLVKERTRITNLIKGLLDGIFPEFTRVFKDPCGLTALSVLSSCSVPNIIAQMTEEEFVDAIRAKHQGRLMRRKLRALHYAARTSIGIEAGAWSVSSEISFLVEKLCLIRRQICSIDETLARLVSFRSYRSAKQLIKMAGSNPTESESGGKRSAHTPMSKKGRPVLRYCAWTAVIPMLRFNPDFSAWAKKLRERPVHANPLSGREVVGAALNKLLRLAFALVKKRAFYQVPQPEVAQVAI

SEQ ID NO: 478045 - protein, 441 aa, unidentified
MLGFRFFSICAFRPGFGSKPSFLGRYSPTFSARRPACLLAPLTFSGTTILKAELSFIGIDYHKRYSVFCVLDAQGMILERGRIDHLCPEQFVWLVRRWPGCRVVFEACMNWHWLLEILEEAMPREDIVLANAFKTRIIAEAQIKTDKVDARILADLLRANLIAKVHICGKATRELKEMLRQRCFFVRQRTMVRNRIHRLLGAQHGLKLPQCSDLFGAKGLSFLDKLELAAPAGLLLTQQLTLLRELALRIREDEKALEAMIQVSRALHHVRSLPGMGPILAAVVVTEIDTIERFPSAQKLCGYAGLCPSTSSSGGKTFQGKLLPRCNKWLRWAFVEAAWVAVGCSPYFGDFYRRKRSVGKKANSAILATARLMGRITWQLLTQERDYASFPVEQELRCRPAGGSFSPAGPAKERKDFRTPKKLISSPQTFPSRSHTRLVGR

SEQ ID NO: 478046 - protein, 356 aa, unidentified
MYNAKYIGLDVHQATISVAVMDSTGKVVMESILETKATTILEFIHGLRGSLYVTFEEGTSAAWLYDLLVPHVSKVVVCDPRKNATLKVGNKSDRIDARKLAELLRGGHLSPVYHGENGVRTLKELARSYLAITKDLTRVMNRLKAVYRSWAIPCAGTRAYAAHCRAEWLKQLPETGVRRRAERLYQQLDVLQPLRQEARRDLLAESRKHRANRLLRQIPCIGPIRAALLIAVIQTPHRFRTKRQLWAYCGLALETRTSAEYRIVAGQLRRSKKLLAIRGLNRNHNHDLKYLFKSTATLASSRCSGPFREFYDALLAKGLKPPMARLTVARKIAAITLTIWKKGERFDAEYLKRQAA

SEQ ID NO: 478047 - protein, 419 aa, unidentified
MSFKILKFNCCGLDVHKTWIYACIGITDSNNRTEYKQARFSSFTKGLHELCDWLAKYNCNDVCMESTGKYWIPVFNILEQRQIWVSLSHPKYTKPMKGNKTDRKDAKWICDLYMCGMVKSSFIPPADIRELRDLVRYRYKLTCMITGEKNRAQNCLTVSNLKLDDVFSDVFGKSSRSITEQILQHPGEMFDVTPFVDGRCKTPIEEIQAAIDGAISEEQAVKLRQCLDHIDELGKHISEVEQEILRLSNKYEAALNLIRTVPGFDKNPMTAIQVLSEIGGDMSVFPTAKHLVSWAGCCPRNDKSDRKIKSTRISRAGSYFKPVLVQVANALIKSKKHPEFTDRYRRIKTRRGHKKAVIAICRMILTAIWHILTDLSPYTPDGFLESRPVNKEKVLTTSQALSLLRQRGYLIKDDPLPAS

SEQ ID NO: 478048 - protein, 339 aa, unidentified
MEKIYDICCGIDVHKKLIVACLQYPRKKEIREFGATTRELMGMAEWLLKNNCQIIAMESTGSYWKPIYNIMESYGLHAIVVNPAHMKAVPGRKTDVKDAEWIAELLQHGLLQPSYIPSKDQRELRELVQYRKSLVGERTGELNRLQKMLKGANIKLSGTVTNINGKSARSILEYILEGKEIDETKYDEMYEKRIIAHNLKTSKEQIVDDLKGFMSPLQKRMLKELLQHLDELNIHIENLNDEIDHFMKPEEKHASQVIQDVTGIGNTSAQTIIAVIGTDMERSPTDRHISSWAGLCPGDHESAKRRKSGRTRKENNLLKSTLVLCAHAAVRHKSSYFHA

SEQ ID NO: 478049 - protein, 382 aa, unidentified
MTGTEPQAWGTGLMDDITFVGLDVHKATVCIAVAEGGRGGDVRQLGVFENRPEILSKVVSRLSKGGRRLSFCYEAGPCGYGLHRLLTGYGHECVVVAPSLIPMKAGDRVKTDRRDALMLAKLHRAGELTAIWIPDAGHEAMRDLVRARATAVRVLVKARQHLQGFLLRHERIYRGARAWTLAYRRWLSTVHFEHPAQQIVLQDYIHAVQEAETRRDRLTQQIEELLPNWSMAPVVAALQSMRGVALIVAVTVVAEVGDFRRFANPRQLMAYLGLVPSEHSSGPSVRRGGITKAGNALARRVLIEGAWTYRMSARVSRKLYDRLEPLPAAVRDIAWKAQLRLCARYRRLAAIGKPKVVVTTAIAREMVGFIWAIARLAQPALV

SEQ ID NO: 478050 - protein, 333 aa, unidentified
MLPPNCGTATPYILRNTVGLDISKLTFDATAIVGNAEYSAKFDNDSKGLNQFSDRLKSLGCQNLHICMEATGNYYEEVADYFAQYYSVYVVNPLKISKYAESRFKRTKTDKQDAKLIAQYCRSAQESELVKRQKPTDEQYRLSRMIAAYAQIKSECAAMKNRHHAAKDEEAAKAYAEIIKAMNEQLEVLKEKIKEQTEKPNCKEGVKRLETIPAIGRMTAAVLFHHLTSSKFETSNKFAAFAGLSPQQKESGTSVRGKGKLTKFGNRKLRAVLFMPAMVAYRIRAFPDFIKRLEEKKKPKKVIIAALMRKLAVIAYHVHKKGGDYDPSRYKSA

SEQ ID NO: 478051 - protein, 369 aa, unidentified
MDNDIRFYVGLDVHKDSTAVAVCEPGREASRFVGSVGPDLQQVLKVLHRYGNAAQVSVVYEAGPTGYGLQRALAARGYRCEIIAPSLIPRRAGERVKTDRRDCARLAELSRAGELKAIWVPDAAHEAIRNLWRAREDAVDARVKARQQLKAFLLRAGRLYEGKTAWTKMHERWIADQRFDEPADQIALTEYQLAVQAADERVRRLTNALEQSAADWQFAPTVAALRALRGIDTVSAIGLVCEIGDINRFATARQLMGYLGLVPSEHSSGGTVRRGSITKTGNAHARRLLTEAAWNYRFPARMSNVLRMRSRDLAPEIRNHAWKAQLRLCARFSQLAHRGMQPNKVCVAVARELAGFIWAIARQGAIRQQ

SEQ ID NO: 478052 - protein, 400 aa, unidentified
MNKMIHYLGLDVHKETIAVSIAPQHSTEVRRYGLINGSLDAVDKLLKKLSADGVELRVVYEAGPCGFVICRHLRAKGIACEVVAPSLIPKKATDRVKTDRRDADQLARLFRAGELTAIHVPDQEDEAVRDLVRARTAAMTDQRQARNRLKGFLLRLGFRYTGQSSWTDAHQRYLARLIMPQPPQQIAFQEYLHAIHDATERLARLTQAMEDALPGWKRAPVVRALMSLRGVQVLTAMTLVAEVGDFNRFTDARALMNFFGLTPSEHSSGGSRVQGGITKCGNSHCRRVLTEAAWQYRLKPKVSEAMQKRQEGQPKEVQLLAWKAQQRLHTRFGRLAAQKKSVIAATAVARELAGFVWAIACQVKPTEQAAAPEIIRTCKGRVYRLDAPKKFVAGKKPELK

SEQ ID NO: 478053 - protein, 393 aa, unidentified
MVCVGIDVAKDKHDCFIISSEGEILADVFTIPNNAEGFDTLLQAIRRSTRPEDKIKVGLEATGHYSYNILGFLLDKGLPTYVINPLHTNLYRKSLSLRKTKTDRVDARTIAAMLMSDVDLKSYTDTVYHNEELKSLTRYRFDKVRERAKLKQSVSRLVTILFPELEKLVSSLHSASVYALLSEFPGAKQISSMHMTHLKAVLKNASQGRYGQEMAETIRNAARSSVGSVMPAKSLELQHTIRLIRELDAEIEDIETAIQAIVDEMQSPITTIPGMGVRMGAVILAEIGDFSRFDSPDKILAYAGMSPSTYQSGQLSLSGAYSHMEKRGSRYLRYALYNATKHVCHWDPTFAAYLAKKRAEGKHYNVVLSHAAKKLVRLIFAMEKSQRPYCAAA

SEQ ID NO: 478054 - protein, 345 aa, unidentified
MDHFAGLDVSVKETSICIVDDAGKIVREVKVASEPEALLAVLKNLAYHFKRIGLEAGPLSQWLFSALAEAGLPVICVETRHMQAVLKAQINKTDRNDARGIAQMMRAGLYRPVHVKTIRSQKLRMLLTHRKLLQSKAIAIENDLRGTLRNFGLKVGMVGKVKFEARIRELVENLPDLAVLVEPMLIVRRTLREQIVILHRRLLAIVRDDEVCRRLMTTPGVGPVVALTYRATVDVPARFRKSKAVGAGFGLTCAKYQSGEVDRNGRISRCGDEMMRVMLYEAAQSMLRSKKWSWLKAWAMQIARRRGMKKAIVALARRLAVIMHRIWVDGTEFRWTREQATAAAA

SEQ ID NO: 478055 - protein, 372 aa, unidentified
MTKDTLNVGLDTDKNAIDIAIAEPLPKGEVRYYGKIANDKTALLRVVKRLQKEGRPLRVCYEAGPCGYAIHRWLTDVAGVTCEVVAPSLIPRRSGDRVKTNRRDCLSLAKLLRAEELTAVWVPDPAHEAMRDLTRARAAAVADLVRCRQRLGSLLLRQHVRYAGKPWTKKHRAWLGRLAFPAPAHRLLMVELLEALDQTQARRDRFNAPIAELAPRWSLAWLVDALQVLRGYALINATTIVAEIGDVRRFANPRQLMDYVCLTVSEHSTGERVRRGRITKAGNGRARKALVEAAWTYTHPAKGAKTTAAQATPALRAIADKARHRLSARYRKLRARGKLAPVAVTAMARESLGFIWAIAQAAAPAPAPHGRR

SEQ ID NO: 478056 - protein, 349 aa, unidentified
MNIKRIGIDLAKTVFQLHGVDSHEQPVLRKKLKREQMLSFFRTIDPCLIGMEACSGAHYWARELQKLGHTVKLMAPQFVKPYVKANKNDAKDAEAICEAVSRPTMRFVTIKTIAQQDLQASHRIRKELVGQRTAKVNQIRGLLAEYGIVVGQAIEVLRKALPCLLEDAENGLSADFRILLKGLQEDLLALDERVAELDKRIHTLAHTHEDAKRLLQIPGVGPLTATAIISAVGDGSQFKRGRDLAAWIGLTPRQNSSGGKEQLLGISKRGDHYLRTLLIHGGRSVLRMAGSKDDPRSRWLKGISERRHKNIAAVALANKNARIIWALLTKKTDYEQKAGELSSGESVCA

SEQ ID NO: 478057 - protein, 466 aa, unidentified
MTKHVGKRKAVPEKGARQENSLPVLNLNAAGIDVGSEEHWVAVPKDRDDEPVKRFGCFTADLNAMAQWLKKCGITTIAMESTGVYWIPLHQILEHYGFEVRLVNASHVKNAPGRKSDASDCRWIQQLHTFGLLSGSFRPDDQVCVLRSYWRHRENLVRYASDHIRHMQKALTQMNLHLHKVLSDITGVTGMNIIRAIVRGERDPRKLALMRERGVKNSPEVIAKALEGDYREEHLFALQQSVELYDFYQRQIEACDQQIASCLDGFNSKADLASQPLPPSKRGGRKRTRNEPYIDLRSELYRISGVDFTQIPGFDALTVQTILSEIGLDPGRFPTEKHFVSWLGLCPNNRITGGEVKSSRTRKTNNRAANAFRMAGQSAGNSNGAFGGFYRRIKARLGAPKAITATAHKLARIFYRMWATGRAYVDMGADYYETRYKDRVLRNITRRAKELGYELVPQPLAAEGVA

SEQ ID NO: 478058 - protein, 402 aa, unidentified
MNAVGIDVSKGKSMVAIMRPFGEIVSAPFEIKHTASGINSLVELINSVEGESRIVMEHTGRYYEVLAHQLSEANLFVSAINPKLIKDFDNDSLRKVKSDKADAVKIARYTLDKWQNLKQYNVMDELRNQLKTMNRQFGFYIKHKTAMKNNLIGILDQTYPGVNTYFDSPARSDGSQKWVDFASTYWHVDCVRKMSLNAFIDHYQNWCKRKKYNFSQSKAEEIYGKAKELVPVLPKDAITKLIIKQAVDQLNSASTTVESLRTLMNETASKLPEYPVVMAMKGVGTSLGPQLMAEIGNVSRFTHKSAITAFAGVDPGVNESGTYEQKSVPTSKRGSADLRKTLFQVMDVLIKTHPQDDPVYQFLDKKRAQGKPYYVYMTAGANKFLRIYYGRVKEYLSSLPES

SEQ ID NO: 478059 - protein, 299 aa, unidentified
MACIPGDMAWRVGNDEEGIKELVGKLREMAPALVVMEATGGYEILPAALLSHDGLPVVVVNPRQVRDFAKAAGILAKTDRLDAKVLARFGEAMKPTLRPIPDLQQQELSDLVLRRRQLVTMIVAEKNRLEKAKKAVRDSILKHLSWLEKELGNLDKGLEDKIKSSPVWQEKNDLLRGVKGVGPIFAATIIADVPELGRLNRKEIAALVGVAPLNRDSGTMRGHRRIWGGRSRVRTVLYLATLSAIRFNNVIFSFYQRLVTKGKAKKVAITACMRKFIVILNTMLKTGAPWNDMLVAENP

SEQ ID NO: 478060 - protein, 403 aa, unidentified
MAKVFIGVDPHKLSATIEVVDDQETVLAAGRFGTDKAGYSAMRKTVSGWSDRVWAVEGSNGAGRPLAQRLLADGEHVVDVPAKLSARARLFDTGHNRKTDAHDAHAVAVVAVRTNGLRVLSYDGELETLRMLADRREELTRTRVQTVNRLQRLLAELTPGKAKRDLTALQAKAIVASVRPRDLAGKTRRRLAAEQLTELVAVEKKIKTLTKELRALVLARGSRLMDLPGVGPVVAARILADVGDVARFADRNRFASWTGTAPLDASSGEQVRHRLSRAGNRKINHMLHIAAATQVRLDTPGRGYYQRKLAAGKTRMEAMRCLKRRISDAVYRQLVADARAARAEPVEAGPGGHCGASQESSAVDLPPHIDTSDQPLPGPAKPTLQPTSHSGKTTKARALTSTS

SEQ ID NO: 478061 - protein, 338 aa, unidentified
MDYFAGLDISMDQTHICVLDHEGDVVLEAKVASTPAAIAAELQEAPDCRRAVFETGRMAPTLYHGLTALGVPVICIESRQAYQALKTLRTHKTDRNDARGLAQLARTGFFKPVHVKSLPAHALRALLAARKKLVGQRVMLENQIRGLAVVFGVRLPHARSRGFVEGALRASEGINGLAEAMRGLVDARIGVMSAVAAIDADLKRMARNSEACGRLMAIPGVGPITSLAFAAAIDDPTRFRRSRDVGAYLGLVPRRYQSGEIDYVGSISKCGDRRLRTLLYEAANVLLTRFKGASKLKDWALAIAARSNMRRARVALARRLAVIMHAMLRNRTSFSPAA

SEQ ID NO: 478062 - protein, 338 aa, unidentified
MNINVVGLDIAKSIFHLYSLTAEGKPVKKKLKRNELLIYIANMPVSLIGMEACGGAHHWAREFKKLGHEVVLLNARFVKAFVVGNKNDFNDAEAIFAAVTRPNKRTVEVKNLEQQEMQMLHRLRQDLIYQRTALTNRIRGFLSELGLVMPLGVNQVRKQLPLILEDAENGLPSLSRELFAEMYEALSKLDDDIKAQDRRINRLCQQNSLSRRFLDVPGIGPITATIMASDIGDGKGYAKSRDYAASLGVVPRQHSSGDKQVLLGISKRGNRYLRTLLIHGARSVVKYCSGKTDPLNRWLQALVERRGFNKAAVALANKNARVLWAMAKKDSAYEAAAA

SEQ ID NO: 478063 - protein, 353 aa, unidentified
MIRTIGGSIMMTHFVGLDVSQKMTAICVVDNAGRRLWRGQCPTAPEQIAAMVRRHAGDESCIGIETGAMTPWLVHELRALGLEVICLDARHARAALKMQINKTDQNDAEGLAQIVRTGWFRSVHVKSFDSHRARALLGARAQLVGMTTRLSNHIRGVLKTFGLLPGAMRGLRFDRKVEVLLEDRSDVAPIVRPMLVAWRQLREQISAFNKAIRVLVRSNSPCRLLMSVPGIGVLSALAYVSTVENPARFSQSRSVGAHLGLTPRQYQSGDVDRSGRISKCGDTLARTLLYEAAVVIMTRVKKASELKDWAVAIAKRSGVGKARVALARKLSVILHSVWRSGKPFRWAERAIAA

SEQ ID NO: 478064 - protein, 314 aa, unidentified
MTHHIGIDVAKDRLDIAVHESGERFACSNDSTGFPELIERLRALNPRLFVLEASGGYEQEALFALLAAGLPAALVNPCQTHNFAKAMGYLAKTDRIDAGVLAHFAKAVHPKLAEAPSPGQLALSELVHRRQALMEMLTAEKNRLRLTRTAPARGHIERHIAWLHDQIDNMDGELRSLIRQSETWRELDGLIESVPGVGVMAAATLLAMLPELGRLNRREIAALAGVAPFNHDSGKQRGTRRIAGGRTAVRTVLYMCAVAGLRCNPALQAFYARLKAQGKPSKVALIACVRKLLVTLNAIVRDHQPWDAARYAMA

SEQ ID NO: 478065 - protein, 355 aa, unidentified
MSIVNKLDFTGQHIYVGLDVHKKSWNVSIRSAHLEHKTYSQPPDPQVLGNYLRRNFPGACYHCVYEAGFSGFWAYDRLKEQGIDCLVVNPADVPTNHKERVTKSDRVDCRKLARSLRNGELKGIYVPSSIKVEDRGLLRIRHNLVKKQTRCKNQIKSLLHFYGKSISEEMVFSHWSRRYIQALENIRMERPAGATALQTLLSELIHLRDLIAKTTREIIVLSRTDDYRESVQLLRTIPGISTLGAMTLLTELVDISRFSTFDHLSCYVGFIPNIHDSGEKERHTGLTNRRNPTLRTLLIEAAWVTVRKDPAMMMAFNRLCLRMKKTRAIIHIAKKLLSRVRFVLKNRAAYQLAIV

SEQ ID NO: 478066 - protein, 389 aa, unidentified
MLLDHPSDGPTAIRTQFGAIFVSLELSRSNWLITSLSPGKGEKMSKHSVTAGDVAGLMRLFADLRRKAEARTGESYPIITIQEAGLDGFWLHRVLQQNGIESHVVDPASIATPRRRRHAKTDRLDGETLLRALLAYKRGEPRVCAMVVAPSPEEEDRRRICRERRSLIAERITHVNRIKGLLFAQGISGYEPLRRDRRARLEALRTGDGRELPSHLKAQIGRELDRIELLLEQIEAVETERDALLAAARKPASEEAAPDVVTMLLALKGMGADFAAVLWSEAFYRQFSNRRQVAAYAGLAATPWQSGGIRHEQGVSKAGNPRLRTTMIQFAWLWIRHQPQSALTRWFKERSPRGRKRAIVALARKLLVALWKYVTQGVVIEGAVMKPAA

SEQ ID NO: 478067 - protein, 359 aa, unidentified
MEQNLKYAVGIDISKDSFHACISVINMIQKVTIKASHSFFNTPTGFNELLIWVKKYHKESALPLVYLIEATGVYYEQLAWFLYHQDAYVSVILPNKAKKYLEGLGQKSKTDKKDSIGLARMAAEQNHTAWKPFSAKIQQLRALTRHSQALNEQKTVANNQVHAIEHSQYQSKMVLKQLNSFIKLIDKQLDEIHKAIIETIQQDEQLNNKVNNILHIKGLGILTIATIIAETDGFALFENQRQLTSFAGYDVIENESGKHIGKTKISKKGNHRIRRALFMPAFNIVKYQQTPFLTLFERVFERTKLKMKAYVAVQRKLLVLIFSLWKNNQKYDQNYQYKQVAPTSGATQNEVLNEVLLLM

SEQ ID NO: 478068 - protein, 401 aa, unidentified
MKRLSGGIDIGKDFHHMMILDEKEQVIYQKRIPQKLKEMKEIMKELTCLEKKEKAKLSFVLEGKNGYSNPLDRLLLLAGFTLYNVDNYKLKRFREAFAGEWRDDNRDALMLSKMLHLKEHINTPTEKVFVQITKPSVITESLKLLSRHQEILIEEKTRLTNRLGKKLLEVCPELLALGKLKDHKLIAILSRYPDCSRYSRITLDSLLKIPGIGKKQAPHLLAGLHDLAYMPELTAIYKTIISSHAKRILQLQKEIKEIDKKMDQIGEHNQTIQHLKSMPAVGTKLASRFTGEIGNISRFPSEKKLAIYCGIACVNNASGKMNKTKAVYKANKMAKQALIMMAGGSIRVNPQCRNYYLKKRTEGKKHNHALRCLARQMIKVIYRMLNEYRDYQIKKEALKVA

SEQ ID NO: 478069 - protein, 346 aa, unidentified
MEHYAGIDVSLELSSVCVVDAQGKIVRETKVASEPEALVAFFASLGFAVKRIGLEAGPLSAWLHAGLKRAGFDTVLLETRHVKAALSAMMVKTDRKDARGLAQLIRMGWFRPVHAKSMGSQEVRALLVARKQLLGRLIDVELSIRGILRGFGLKVGVVTRKGFEGRIRELVTGHITLERIAGAMLSARATLKVEYEKLHKIVLTIVREDAVCRRLMTVPSVGPLVAITYKSAMDDPNRIAKSKSAGALFGLTPKKYQSGEKDVTGGITRAGDEMVRTALYEAANVLLARITRFSKLKRWGMDVAKRRGSKRAKVALARKIAVILHRMWVDGTTYRWTDAQPTAVQV

SEQ ID NO: 478070 - protein, 391 aa, unidentified
MVSVGIDVAKDKHDCFILNSEGEVLANGFTVPNTMGGFQCLLQKIRECTTPQDKIKVGLEATGHYSYNILGFLLDNGLATYVLNPLHTNLYRKSLSLRKTKTDRVDARTIAAMLLSDVGLKPYTDIAYHNEELKSLTRYRFDKVKERAKLKQSVARLVCILFPELGNLVSSLHTASVYALLEELPGARQIAEAQLTHLKTLLSDVSRGRYGRDVAVAIRDAARNSVGSRMPAKSLELQHTIRLIRELDTEIAEIEDTIDTLMDELQSPITTIPGIGTRMGAMILAEVGDFSRFDSPDKLLAYAGMSPSTCQSGQLKNCYPHMEKRGSRYLRYALYNATKYVCLWDPTFAAYLAKKRAEGKHYNVAISHAAKKLVRLIYALEKSREPYRPAA

SEQ ID NO: 478071 - protein, 328 aa, unidentified
MLEETKIKEDRVLEVTPIYVGIDVSKAQLDIAIRPSGERGSVSNDQAGIKTLVKRLEEIQPPLIVLEATGGVERQLTCALASAELPVVVVNPRQVRDFAKATGQLAKTDRIDAEVLARFAEAVRPALRPLPDEVTLELRALIGRRRQLVEMIVAERNRLSGASKGVRNRIDAHIRWLEAELERADKDLDQSIRQSPIWRENEDLLRSVPSIGPVISRTLIAELPELGQLTRKQIAALVGIAPLNRDSGTLRGRRAIWGGRASVRAALYMAALVASRRNSVIRAFYRRLRNAGKAPKVALVACMRKLLTILNSMIKHKTRWSGIVIQTS

SEQ ID NO: 478072 - protein, 343 aa, unidentified
MHTITTIGLDIAKSVFQVHGTDAAGQVVIRRQLKRRAVLTFFQKLPPCLVGIEACASSHHWSRELQALGHAVRLMPPAYVKPYIKRQKNDMVDAEAICEAVTRANMRFVPTKTPEQQSCLMLHRTRHLFIRQQTAVINSIRAHLAELGIVAPVGRKGVMELLQVVADPSDKRVPEIARACLAALGNQLLSLKEQILEFDRMIMAWHRSNEPSKRLRYIPGVGPMLATALVASVADPKTFRSGRNFSAWIGLVPKQHSSGGKDRLGSISKQGDRYLRSLFVAGALSVIRYAKIHGTKHRPWLTALLARKPTKVAAIALANKLARMAWAMMARGERYRNPVALAA

SEQ ID NO: 478073 - protein, 420 aa, unidentified
MKVHNIDNFAVLIGIDWADQKHDVCEYSLDSGKYKYSIIKSTPEALHDWAMSLKKRYPNQQIAVACELKKGPLIYALAKYNHLTLFTINPSAVAHYRKAFTPSNAKDDPSDALMQVEILTLHMDKLTVIEPESAAMRSLTQLVEYRRNLVQDSVNLSNKITATLKNYYPQALEWFKEKDTFIFCDFIIKWPSLTHAKRAKKQTLLAFFNSHNSHYAHVNEARIASIKNAMELTEDSGVIEPNQMLVEVLIKQFKVLLKGIETLDKAIKQAYKAQDDKVIFDSLPGAGPQLAPRLLVAFGNNRERYGDASELQKYAGIAPVIERSGKKMWTHWRYSCPTFLRQTFVEWAGFSIRYSFWAKAYYEQQKSKGKPHNSIIRSLAFKWIRIVFKCWKTSTPYDESKYLEALKRRGSPLLKFAINS

SEQ ID NO: 478074 - protein, 385 aa, unidentified
MGHQTFIPRDYDVFAGLDVDKRSISVTFTDHQGLLKSLRIPNNVEHLVNHVRKHFPNQRVAFAYEAGPTGYGLYDGLVAQEFRCLIASPSMIPKAPGQRVKTNRLDSVGLSENLRGGQLKGIHVPSPLYRELRHLTQLRDTFVNEMVGMKQRIKSLLLMEGVEFPPAPAGSQWSFMVKDKLRKLPCSSTVRFKLDQLLDSLEFNEKQVLKTTREIRRFCQNDPELSQCIKYMRNVSGIGWIVASQLLARIGDWRELRNIRQLGGFLGLVPTEHSTGERTDRGSITRTGDERLRSKMIQASWSAIRKDAELREFFRLICHRHPRREGPRVAIVAVARKLSVRISVVLMQQRPYVVREKVHSAPLTQEETSPQGTTRRQAEPGDKDS

SEQ ID NO: 478075 - protein, 416 aa, unidentified
MKKGQNTRGYQRYMALDIHREYILVGAQNAEQDWVLTPRRVSVEKFAEWAKKNIRAGDIVVLETTTNVWTIYDVVAPLASRVLVANAAEVGEIANARVKTDKEDVKRLLKLLIGGIVPEVWVPPLHVRELRAFTSYRGRLVKTGVMIRNRLQSLLHKHNLMLSEAGLLDQAWWEAQKNISPLEKMQIRQELVLLQEVEKLKVAVDEELQRQSTSSTWAKQALQIMQLPGVGYIVAMTVLAAIGDISRFENAKQLVGYAGIGAGVHDSGKTHKEKKITKKGRRELRWAMVEAAWRAVRMSPFWKEEFEKHLKRMRKPNQAIVVIARKLLVALWHVLSKEETDIQASEEDLAYKMLLLSWSLSEDVRLGLTYKQFAKYALMKLGVETDITRFVRKDVPRRLSPREEVLARMEELGIAQ

SEQ ID NO: 478076 - protein, 344 aa, unidentified
MNITVLGVDLGKNVCSVVGLDASGAVVMRRKVRRETLIALAEKLPPCVVGMEACCGAHHLGRVFAAHGHDVRLMSPEYVRPYVKAQKNDDRDAEGIAEAATRPTMRFVELKSQDQLDMQTLHRSRDRLVGERTALINQLRAILMERGFVAPQGKRKLQQFLAVLMDEQGGAGLSPRMVLLVADARTQWAELDRRISAFDAEFVGWVKENEDARRLATIPGFGAIVASALVAAVGRAETFDRGRDLSAWLGIVPRQFTTGGKPKLLGISKRGNKYLRKQLIHGARAALPYVAERDSPLGRWAKALLKRAHRNVAVVAFANKLTRIAWAVLRRGERFAVKGSLMAA

SEQ ID NO: 478077 - protein, 355 aa, unidentified
MEYGAIDLHARQSLIRIVTAEGTVVLERTIPTRAEKFHEVFAHRARLRVLVESSTESEWVAQCLERCGHEVVVADPNYALMYGHRGRHIKTDQRDVAALAEANRLGLYRAVHRVSAPQRQRRRTLRIREHLVRTRTQLINLRRAQLRQEGYRLPSGAAEAAVARYRRLSLPEAVTTALTPLITVLDSLAPVLDAADAAATAAAAADPVATRLMTVPGVGPITALTFRAALDDVTRFADAKAVSAYLGVVPREDSSGGRRRQGGITKVGPRSVRTLLVQGAWTVWRQRRRRTALHVWVEQLAARRGRRIAIVALARRLARILFALWRDGSTYQAAMLPVSSRPPDLRDVARESVAG

SEQ ID NO: 478078 - protein, 352 aa, unidentified
MTVTTLARRITGGVDTHLDVHVAAALDERGALLGVESFATTSDGYKKLLGWLSDFGIVELVGVEGTGSYGAGLTRHLQAERVRVVEVDRPNRQRRRRKGKSDPEDAITAARAAQSGDASGEAKSRDGNVESMRVLRVARASARKGRTQALNQMRGLISTAPEPIRAELRGLNVFHLLERASTYRPGAKRDVVSLTKFTLRMLARRAITLEEEISEIDAILKPLVVETAPRLVGAHGIGTDSASALLVTAGDNPERLRDEAAFAHLCGASPIEASSGKQQRHRLNRSGDRQANSALWHIVLTRMVYDPRTSEYIERRKAEGLTKKEAVRCLKRYVAREVYGLLPHEKLGLDSP

SEQ ID NO: 478079 - protein, 313 aa, unidentified
MAQILPTVGIDVSKDWLDVAVHPTKVQFRVANDAAGWRELCRRLKSIAPRAIGVEASGGYERDLTQALLAADLPVRMVNAWKLRQFAKAAGLLAKNDRVDAYAIAWFTATLPSRAVRYDPAREHLAELVRARRQLVDARQAFANQLEHMRDALLRRQMARRIRQLEADEARLDQRIVQTIAAEPDFAARQELVCSMRGVGPVFGSTLVALLPELGHVTNRQIAALVGVVPYDFDSGKMRGLRCIFGGRADVRRVLFMAAQAAAIWNPDLKAFKQRLRAAGKKPKVAIVAVMRKLIVTLNAMLHSGTKWQPKTV

SEQ ID NO: 478080 - protein, 321 aa, unidentified
MNNYIGIDVASQTLQVYDGKKNIEIPNSEKLLELKRLLQETFPTDWKKVRLLYEPTGVYSSYVEQFALRYSIQAFAINPKRSSNFAKALGNRSKTDPIDAKMLYEYHKLVAESEWKVPEIDKDLDALNHNLSTYEFIQMSRIQMGNHLHSLKRGKTFDAASVEFLEKEIDRMKKQEEAMVAAMEKKTKASETTKEDFARLTSIPGIGPLSAIMLLMMFRKYPETNRAEMTALMGLDPIQRISGTKLHKKDRISKQGNHFARKILYMATVSTLRGDNRMKLFYTHLIDNHKPPKVALIACMRKLVLIAHQLYTKKEYYKATL

SEQ ID NO: 478081 - protein, 359 aa, unidentified
MNEITTVGVDLAKEVIAVCCADRSGKTVFTRVFRREAFAAWAVRLPPSVFGMEACGAAHHWARWLTSHGHTPHLMAAEFVKPFRKSRAAKNDRNDAEAVLTAVRQPNMRFVTVKSIEQQAYLSWHRMRQGFSEERTALINRLRGLLAEFGVWRGRSAAVLTRALPLLEHDEALPLMVRRLLSEAKPHLARLDEAIAACEVEIKNHIKGNAVAKQLTAINGVGSLTAAAMLATVSDARDFKNGRQFAAWQGLVPLQDSSGGHTRLGHITKRGDTYLRGLLTQGARSALQAALTKEPLRRTRLQSWIVQLHARVGYHKTLVAIANKHARMIWAILAKGEDYDPDAWRRWSRPAAATSSVTP

SEQ ID NO: 478082 - protein, 384 aa, unidentified
MDVVVTSNPKPEGKHMKTEKYVGLDVHKDTTVIAVAEGDRCGEVRQFGAVSSDLRALEKALKKIGGEDITLHVVYEAGPTGYVVYRRLKRLKIDCIVVAPSRIPQANGARQKNDRRDALMLARLHRAGELTPIHVPDDVDEAIRDLTRARADAMHDLTRAKQRLKSFLLRQGLHYPGKASWSAEHQRYLRALQFPIPSLRAVLEEYLFAFDQIVQRVQRLEELLEVHVPQWRMYPAVQALMCMRGFRLTAAAMLVAELGDIRRFSHPRHVMAFLGLVPKQNSTGQTIRMGSITKAGNPHARWILVEVVQHALMTPKVSRQLGIRQEGQPALYRDLSWKAQVRLHKRGWHLLRRGIMKAKVNIALARELAGFVWDLLCHVPERAV

SEQ ID NO: 478083 - protein, 375 aa, unidentified
MHMMQHREIRYIGLDVHKLSISVAIAEEGGAPTSYGKIPNDPVAIRTLMTRLGDPNVELRVAYEAGPTGYALHRQLTGVHIQCLVAAPSLIPKQPGNKVKTDRRDALKLARLLRSGDLTPVWVPDEAHEALRNLVRARADAKADLLRAKHRLSKFLLRQGCWAPIGVRAWSKRYFTWLHQLEFEHLPDRVVFADYLTEVNAAGERVKRLEAALHECAQSSSQVALIRALQAFRGIGFLSAVTLVAEAGDLRRFRTAPQFMAYAGIVPSESSSGGKHQRGSITKTGNSLLRHVLGEAAHHARRAPRVTSKVKQRQKDVPPEIIDLAWRAQVRLHTRYRHLSARIGALKALTAIARELAGFIWAAGHVIQEEVPVAA

SEQ ID NO: 478084 - protein, 363 aa, unidentified
MDESTTVTVGLDVHARSVRLAAVRADELLEERTLPYDEEAVERTLRRWPGVRCCYEAGPTGFGLYRHLVERGIDCAVVAPGLVPQRPGDRVKTDPRDARKLARLLAGGLLEPIHVPSPELEAARDLVRAREDARLDRMRDRQRLSKFCLRHGRLLPTSAWTVVRGKWLGEQRFAYAAEQQTFDTYLHAVDLVDARIARLEQAIRETAEQGPWRELVARLRCFRGIDSLTALALVAEIGDFSRFRRAEEFMAFVGLVPSEHSSGERRRQGSITKVGNAHVRRLLVEAAWHARRRPKVGYELSRRQRGQDARVIERAWRCQQRLYQRWQRMAGRGKPQQKIVVACARELAGFVWAIATNQPLRTT

SEQ ID NO: 478085 - protein, 347 aa, unidentified
MLADELDYVIGVDPHRDTHALAVVDVRTGGVVFEATTVADGGGYACVLRLADQHAPGRRVFAVEGTASFGAGLTRFLISHEERVLEVGRPRRERRVGKSDALDAIRAARSVLGQTRPARPRAGGEREALRALTAAREGAVTAKRAGLCQLRGLLVSAPEPLRAELRSLTRAQLLRRLAAVRPERRQDPELRGTLLALRALARRVKALTVEERELAREIEALTRKLAPQLLDQPGVGPLAAAQILISWSHRGRITSEAAFARLAGCAPIPASSGQTIRYRLDRSGDRRLNRALHMILVTRRRSHPATIAYIERRLQEGKSRREANRCLKRYLARSLYRLLEHKTPVAT

SEQ ID NO: 478086 - protein, 359 aa, unidentified
MAKFIKMISTVMSAIGLDLADVWSDWAGLDESGTVVRRERVKTTESELRRVFGAIEPTTIAIEVGTHSAWISRVLSSLGHTVVVANARRVALIHRNKRKNNRIDAEFLARLVRADKELLFPIQHREERSQADLAVLRSRDVTVRSRTKLINHVRGTCKTFGVKLPRCSAEAFVVRCSGLVPVALHSAVNDVLALIADMTAKIKSYDSTIAAMIKRHPAAQLVGKITGVGPLTSLAYVLTIEDPHRIVHSRSAGAYFGLVPGSDDSGEKHEQRRITKEGDQFCRRLLVNAAQYILGPFGAKVDSDLRRHGEAIASRGGKNAKKRAVIAVARKLAVVMHHLWVHNEDYVPLFNAAQKPVAA

SEQ ID NO: 478087 - protein, 403 aa, unidentified
MTESSDYESVQVFIGVDVGKDTHHAVAINRSGKRLFDKALPNDENKLRSLISDLKQHGQILLVVDQPATIGALPVAVARSEGVLVGYLPGLAMRRIADLHAGEAKTDARDAAIIAEAARTLPHALRTLKLADEQIAELSMLCGFDDDLAAQTTQASNRIRGLLTQIHPALERVLGPRLEHPAVLDLLQRYPSPEKLASLGEKKLAAQLCKLAPRLGKRLAADIAQALAEQTVVVPGTNAAAVVLPRLALQLITLRKQRDEVALEVELRVLAHPLYPVLTSMPGVGVRTAARLLTEVACRAFASAAHLAAYAGLAPVTRRSGSSIRGEHPSRRGNKALKRALFLSAFAALRDPLSRAYYTRKMSQGKRHNQALIALARRRCDVLFAMMHDGTFYTRRVITCLTT

SEQ ID NO: 478088 - protein, 349 aa, unidentified
MPKYSTAFGMDVHLRSTTVCALDADTGEAVTRRFPGNPWGEIAGWMDGFPGPSLAAYESGYLGFAPQRELAGLGVECVVAAVSKIPRSAADSASKNDRNDAARMAKAILAHDISPAWVPSPEIEGIRDLAGAYDGATARLATAKQRLLAFLAKRGFAYGGTTPAGNPRRYWTYDFLRWLDKVRPEDDGGVRTLAALRNEVEAAAEARADLLSEYRAAVDASPIAAEVAALQSIKGCAFALAAAFSAEVGDFTRFRSGRQVTAYFGLAPSQRSSGDSVRLGGISGAGNALVRKLAVEGSWCYAAARHQPKLMPRDTGVPLEIRMHGRKGSERLLRRREEMLARGMLLALL

SEQ ID NO: 478089 - protein, 347 aa, unidentified
MKVLIGVDPHKASLAVAAVDEATGELVELASFPQNRAGLRCLERWAKRFPQRRWAVENAGGLGRHLAVRLATAGESVVDVPPKLSARVRVLSTGNARKNDGVDALATALAASRNERLAAVDPEAASEVLRLLSERREDLVAERTRALNRLHGLLRDLVPGGVTGKLSADRAARILRGIRPRGGASARLRRRLASEVLRDIRALDRKIADLSGRIEAEVEASGTTLTEIFGIGPILAARIIGTVGNVARFPTKAHFASYAGTAPVEASSGDVVRHRLSPAGNRKLNYALHMVAVCQARSEARGGAYYRKKIAEGKSRKEALRCLKRRVSDVVFRSLVTDSQAPSSSAA

SEQ ID NO: 478090 - protein, 320 aa, unidentified
MSRKKSKSFIGIDVCKQQLEVAAHESDYHFRCPNKANAFGELIAELITLRPALIVLEATGGLEIPVVSALHAAGLPVVVVNPRQVRDFAKALGQLAKTDRLDARVLAHFAAAIKPPLRPIKLKEERELDALTRRRGQLIEMLTDEKNRRGSAASDSVRDKIKEHIDWLEESIAELDEQLKALLQSSTCWQVKDKILQSVPGIGSVTSFSMMADLPELGTLNRQKISKLVGVAPLNRDSGQQRGSRHIYGGRARLRSVLYMAALTATRHNPVIKEFYERLRANQKPFKVAITACMRKLLSIINVMVRDSTCWKSKEELLSA

SEQ ID NO: 478091 - protein, 311 aa, unidentified
MKIICGVDISKARLDACIEPGGMFASFDNDAAGIAALAEFCHRHGAELVVMEASGGYERQAFLLLWEAGIPCALTNPRSVRCYAEAMGILEKTDRLDASVIARFAIAKDIKPTPLPSPQQRRLKALVARLRQVTEDLTIQKQRRATAVDGEMLASIDEVITLLKRQSRTLEGEIASMIDDDPLWARIADALRAVKGVAGRTIARLMADLPEIGIYSNKAVAKLAGLAPLADDSGPRNGPRHIRGGRASVRSILFLVADIARRFDQDLANFHRKLLLAGKKKMVVRIALARKLLVRLNAKARDARAQYANAT

SEQ ID NO: 478092 - protein, 403 aa, unidentified
MQQCTAGLDLASEEHRLVVVDGKGRRLEERRVSHSEDGIDALIRMLADLQVLRVAIEQPNGLVADRLLDSGIAVVAVHPNQLAAARDRYRTGGGKSDGFDGYVLAELARTDMHRLRLLEPDSDETKALRTLTRTREDLVEQKVALANQLRAQLDAFWPGARQIFFDVDSPIGLAFLERYPSPTDARGLGEKRLASFLARNGYSGRRSAAELLVRLRSAPQGRTGEAELEARRAVVLALVAALKPLVEQIRLLTSQIAGAVRAHDDGHIFLSLFRDPKSVVTAAELLAEIGDNRNRHPTSASLEAIGQAPVAVQSGKKKVACFRWACNKNLRAAVSVLADSSRKHNPWAQKIYADAIARGHDHPHAIRILGRAWLRIIWRLWQDQNTYDTQRHGSLNRLLAAQG

SEQ ID NO: 478093 - protein, 364 aa, unidentified
MHYVNNTELSSLEGTRRQFKGGRCAIKLGVDVHQDFCVVVLQEDGASPKPPQRFQKEAFLHWAARLKRKSGAEVHAVYEACGFGFALQRQLSALSIQCYVVCPQKLDEHNRRVKTDGLDAKALCLKLDRFVQGNRAALARVRVPSEAEEQLRAIHRQREQLLKARKQLEAQGRSLMVNHGLEPVQNWWKPRTFAALQVSDWMKQLLQNSQPILIGLQEKIAALTGQLQGAASPDQPRGLGKMTSVIIDREIGDWHRFRNRRQIASYTGLCPGEYSSGNTRLQSCVTKHGNPRLRAALVELAWRLVRFQPDYHPVRKWRQVLGKGALATGAARKKAIVAVARQLAVDLWRIKTGRLSAEELGLIN

SEQ ID NO: 478094 - protein, 353 aa, unidentified
MEQFIGLDVSLKDTFLSVREGGQRIWRGKCPSDPKLIAEVVRKRAPNVERVVFETGPLSIWFYHALVLEGLPAICIDARHAKAALDMARNKTDANDADGLAHLAEAGFYREVRVKSFESMLTRTLVTARNQLLKMTIQLSNQIRGLMKTFGLVVPKGAGRVFDGHVRSLLASNAGLEQIILPVLEAWRGMRARAAELSKQLVASARASEQCQLLSSIPGIGAVTASSFVAAIEDPGNFRKSRSVGAWIGLTTRRYQSGEVDYDGHISRRGDNHLRGLLYEAATVILTRTPADSALRTWGLKLREKIGFKRAAVAVARKLAVIMHTMLRTGELFERSVATLACMSTNTARTAIR

SEQ ID NO: 478095 - protein, 368 aa, unidentified
MSEQTKNLVMAMELSKRTWKLAFGDGTRERFRTMRARDREGLLKEVVTAKEKFGLAADAPVVCGYEAGRDGFWIDRLLKQYGFMNYVMDPSSIEVPRRARTRKTDRLDARKLLRLLLRAVLWGERDAFAAVRVPTAEQEAALRLHRERERLVQERTGHRGRLKSLLMLHGVELVHPGTAVLDRLRDWQGKALPEPLLAELQREQERLRLVEGQLKVVEAQQAAGLAQAETPARQKAVKRCRLKAVGPQSGWVLSHECFGWRSFANRKHLGSFAGLTGTPSDSGETRREQGISKAGSGRVRTTMIELAWNWVRWQPNSALTEWFVQHYVRGGTRRSKRKGIVALARKLLVALWKYVEHDVIPEGAVLRA

SEQ ID NO: 478096 - protein, 322 aa, unidentified
MAMLSFGGIDVSKDRLDVVVLPEEECSSVPNDAAGWAELVERLRGFSITAIGIEPSGGYERGAMRALLAAGMPVRQVNPFKLRQFARASGVLAKNDPLDARMIASFVTIMPTRPAQRQTPAAERLAEMLAIRRQLSAEKVAAENASRLLEDAMLQRLSRRRIVRLAADIDLLDKRMVEIVATDDALVHRYRLLTSMPGVGAVLACTLIALLPELGRMSRKQVAALVGVAPYAFESGTLKGRRCIWGGRAHVRQVLYMAAMSASNWNPVLKAFHDRLTAAGKLPKVVIVAVMRKMITMLNAMVRDDVVWADRLSGRHVLATAR

SEQ ID NO: 478097 - protein, 444 aa, unidentified
MISKAYRATRVNEVDWDRLARGKEGVDIALGVDVGKHTLWPVCRWADGRFERPWRVKNPEEIPALLALTQRMSAGRKLVVAMESSGTYGDALRQALADAQIDLVRVSNKASHDYAEVFDGVPSQHDGKDAAVIAELAALGKAQPWAYQPASPWEQELTDWVEWMVAHRQILTTWQGRLEGLLARHWPEATEVLKLSSGTLLRVLKHSGDPKALAADPEAAQRLARWGRAFLSPEKIEHLLAGARSSVGVRVGEWQRRQIQDYAEQALAARREAERAQRHLHGLAKGHAVLQAQGKVVGVPTACVLWASVGDPRKYHAAAAYRKAMGLNLVERSSGQYQGRLRISKRGSARTRQWLDFAALRLVQNCGVRPWYEAKKARDEDDARRVIMAVMRKLAMALYHVGVRNEEFQPRRLFGQICRRGGRSAGPRSGARNQPEAEGVSARG

SEQ ID NO: 478098 - protein, 347 aa, unidentified
MRFYTKQHKYYCGIDLHTKKMYVCVLNSSGEIMVHRNLNTDSNAFLEFIAPYREDIVVAAECMFTWYWVADLCAKEGIPFVLGHALYMKAIHGGKSKNDKIDSHKIAVLLKGGMLPQAYVYPAKMRATRDLLRRRNHLVRKRAELFGHIQNTGSQYNLPDPLGRIAKPQNREGVAQRFDDPSVRKNMEVDLKMIEAYDRILIPLEREIIKTANGHDALSYNLLQTIPGVGRILALVMLYEIETVERFETVQDFASYARLVKCARESNGKKHGTSGKKIGNAHLKWAFSEASVLFIKGNEPAKKYLDRLAQKHGKGKALSILAHKLGRAAYYLLKNKVAFEQDKFLSH

SEQ ID NO: 478099 - protein, 419 aa, unidentified
MKVEYGNVAEDAVWAGVDTHTATNWLSVVDARGSELFSGEFATDPEGYRKLCDEIRRLGSPVAAGVECTGTYGAGLVRAMAAYGIACYEVITPGRPRRGPGCDKDDAADALRAAKQALSGENLAVPKSQDGWVEEVRNMTVAREELVKQCTSLANLALATVRKGPDEIRARLERLGTAKMMGVLAGWDEAEADPICDAVMFSLAALGRVRAEARRSARLLEERIERTLKAGNPALASMYGCGPISAAMLAIAAGDNPERMGSEASFAALCGVSPIRASSGKVERHRLNRGGNRNASKALHIIAMHRMRTDPRTTEYVERRRAEGLSDREIRRCVKRYIAREAYRLIMHPYDVPIEGKGPEMRAERIASGVSQKDAAIALGVTASTLCDLELGHHQFRELALRYRQWIDDGFPLEAGIAS

SEQ ID NO: 478100 - protein, 339 aa, unidentified
MARYLGVDLHRNNFTVCTIAKNGRHYFRDYEIRELGSFARRLQPTDKVAVEVSTTTRLFYDAVAPHVERVVVVNSSQFDVIRKSVKKTDRNDAETLAVFLSKGLLPEVRMKDKLHAELASLTQTRDTLVKQRTALKNKINNMMAARGLSPRREQLSSEKGLRMVEALPWGPIVLAEVRALVGQIRSLNQTISELEKTIKTEGTKLPGHKNLKSIKGIGDTSATILLSIIGDINDFESEGKLASYFGIVPRIHNSNETEHSGRITKRGTKLGRTTLVQCSLIAMRYSKYLSRFFVRIAARRGKGKAIIALAKKFLGIIFQTLKNGWVFEDFPNFALAEGA

SEQ ID NO: 478101 - protein, 347 aa, unidentified
MSISMIGLDTAKTVFQIHGVDETGRAEIRRKLRRNDLIAFFEKQAACTVVMEACGAAHHWARMLTGLGHSVKLIAPEAVKPFVKKGKKNDAADAAAICEAASRPDVKFVPAKSVEQQGILALHAARSLLVKQQTMLANAMRGLATEFGITVPKGIHKLDELMAVVDADEIMPKQAKQAITGLHDYCNNLSEGIETFEAEIVAHARRDETARRLATIPGIGPITASLIAATVGDITLFKTARQFAAWLGLVPRQSSTGGKTRLGRITKTGNREIRKLLVLGATSMVYRADGWNSAVGAWLRSVLERRPVRLVTVALANKMARIAWAVMTRKEVYRPKGGVAAVAQATA

SEQ ID NO: 478102 - protein, 385 aa, unidentified
MGIETFIPRDYDVFAGLDVDKKSISVTFTDHQGLLKSMRMPYSVDHLVNHVRKYYGDKKVAFAYEAGPTGYGLYDGLVAQQYPCLIASPSMIPKAPGQRVKTNRLDSRGIAENLRGGQLKSIHIPTTLYRELRHLTQLRDALVSEMVAMKQRIKSLLLMEGLEFPPAPPGSQWSFLVKAKLRKLPCSSVVRFKLDQLLDNLEFGEKQILKTTREIRRFCHNDPELSQCIDYLKSLPGIGWIVASQMMARIGDWRQIKNIREVLAFLGLVPTESSTGERTTRGSITHSGDPRLRSKLIQASWSAIRQDGELLKFFRTVAKKHPRHLGPRVAIVAVAHKLCVRAAVVLMKQRPYEVREKVQSAPLTQEETVPQGTTRRRRVPGEKIS

SEQ ID NO: 478103 - protein, 344 aa, unidentified
MEHYAGIDVLLESSSVCVIDATGRVVCEGKVATEPETLIDWLGQSDVSFARIGLEAGPLSQWLYAGMREAGFAVELLETRHVRTAFKTMPVKTDRKDARGIAQLMRLGWFRPVHCKSMAAQELRAVLTARKLVQGKLHDVEMSLRGILRGFGLKVGPTTRRTFAGRVRDLVAGHPTLQMIADALLSASDELGRQLGQFEAQVRSLARRNPKARLLMSTPGVGAIVALTYVAAIDDPARFRSSRMVGAHFGLTPRKYQSGETDVTGRISKIGDVGVRTALYEAANVILTRPVKGSRLKSWAMRVAARAGMRKAKVALARKLAVVMHRMLAGDTAFDATMAAAPRA

SEQ ID NO: 478104 - protein, 454 aa, unidentified
MRKPQVIPDEDHEVVYERVAAVDVAKASGVVCVRTPDPARPGRYVNQIWDNVPATRARITELGQELLRHQVQMVTLESTSDYWRIWYYVLESTGLAVQLVSASQAKNLKGRPKTDKLDAMWLARLTQRGMLRPSFVPPAAIRAVRDFTRARTDLVRERTRCLQRLEKLLEDAMVKITSVAKEGMKAKSAVAMVAALIAGERDPRKLADLARGRLRAKRDALAEALDGMFDSHHGVIAQVLLDQVAFLDQRIAQMEAGAIEALAQVEESWGVDATGETGPGCGTGPDSLVLAAAYRLAEIPGISVWLAIVIIAEIGLNMAAFPTPAHLVSWTGLCRSAAQSGTRHGKGKQKKGNSYARAAAGQAAIGAFGTATFLGERYRRIARRRGGAIAQVAVARSIMIIVWHLLSDPAARYRDLGPDWHDTHVNRDKKIRNHIRGLQALGLTIAITADEQAA

SEQ ID NO: 478105 - protein, 417 aa, unidentified
MDSDKEIVCGADIHRDFLIATMISRSGLKLQERFNMNQDGLLAFRSWILTHRCQRLAVESTGGFWYPIFIILEGHVEFILANAYQIRNIEHKKTDKLDSERIAIYCLNNLITPSRIYSKDYRDLRSITRAREALVNARSKVKNQIHQSLSTCCIKLSSVISDSFGKSGRYIIDRLLEGKTIDQIISGIPSKRVQKKEDELREAIKNGIDPVQVFLIKANLDVIDDISKKIKILEAEIAVKVKPFEEDLEIALSLPGVGFISAATIIAEMGDYRDFSSADKMAKYFGIVPSVYQSAGKLRTGKITKTGSKHMRRILVEVAKAISRTKKNSRLKRFFQRILARCGKKNIAAVALARKVLCILHHLLMNHENYQEPEVKKNKPKIPSSVSPISMMGIDEMIKIISQAGYLVEKDLKEGCG

SEQ ID NO: 478106 - protein, 354 aa, unidentified
MNEAKYIGMDVHQATISVAVRDSCGNLVMEAILETKAETILQFIRGLRGSLYVTFEEGTWAAWLHDLLQPHVARVLASDPRKNALLKAGNKSDRIDARKLSELLYLNKLSPVYHGEQGIRTLKELARSYITITRDLTRVMSRLKAIYRSWGIPCAGQQVYAPRYRAEWLAKISEAGVRRRTELYYQQFDALAALRQGTRRELLAEARKHPAMRLLRQIPSIGPIRAALLIALIQTPNRFRTKRQLWAYCGLALRTYTSGEYRFVGGQLKRSKKVLAVRGLNINHNHDLKNIFKGAATRAAVAGPFQDFYQACVVRGMKPHLARLTLARKIASITLLVWKKGVRFDAEHLKQQAA

SEQ ID NO: 478107 - protein, 413 aa, unidentified
MSIPRDLGGVRVSAGVDWAKADHVVCVVGAEGEVIERFGVAHDGAGLKRMTARLLRAGVGQVGIERGDGPVVAALLAAGLTVYVIPPGQVKNLRSRYGSAGNKDDRFDAYVLADVVRTDARRLRPMIFDSEATTTMRASVRARRDLVSARVAVANQLLAHLQGVFPAASTLFSAMHKAVTLSFLEQFTTQEHADRLTVDGLGSWLTSVSYRGRVSPQVLHARLTAAPRGVVGATAAIHAVTTLALVAVLRSLNTQIQVLADSITEQLGTHPDRATFTSLPRSGTIRAARLLAEIGDARGRFPTPNSLAALAGVVPSTRRSGKSESVVFRWAADKQLRDALCDFAADSRRTNPWAAHLYDQARARGHDHPHAVRVLARAWVTVIWRCWQDHTPYDPTTHRALQTLLNQDQQEAA

SEQ ID NO: 478108 - protein, 314 aa, unidentified
MTHYIGIDVSKKVLNVFDGKKDLTFENKENLSSLKKYFKKRYPDFSSLVILFEATGIYAYHLKVFCAEHVIKAYIINPQASHNFAKSLGTRSKTDTRDARTIWAYHKLLKDKDIRIPTVNPVLITLASYLASYRLTLKQRLSLSNHLEGVKDKALCRLLKKERERLQKLEDDLLVRMDIYIKEYPELREDYRRLLGISGVGKKTAISLLVFFHAYPDTNRKQITALIGLDPVQRQSGTSVHGKSRISKHGNQIMRKCLYMPTLVSIRYNQKIKVFYDRLVLKHKPKKVAVIACMRKLLLIAHAIYQNKTVYVPG

SEQ ID NO: 478109 - protein, 322 aa, unidentified
MSVSVLGIDIAKQKFDIALLVDEKTKHKTCKNSVEGFETLMLWLEKQGIRKVHACLEATGNYGEDLAIYLHKAGHRVSIVNPARIKGFAQSELIRTKTDKMDAALIARFCLAMKPGAWIPPSPEIRSLRALVRRVDSLIDMRSQEKNRISTAHESVSLLIKEHIAYLDQEIERIRQQIAGLIEQDPNLKRKKELLDSIPVLGKATIPHILAELDDLEKFNHVRELVAFIGLAPKETLSGSSMKGKSRLCKIGHAQLRKALYMPALVSIQCNPVMIAFYNRLKDKGKNGKVIVCAIMRKLVHVIFGVLKSGKKYDPNYKPAFA

SEQ ID NO: 478110 - protein, 312 aa, unidentified
MTFCGVDVSSQVLDAKVWPGGAELQVPNTPQGVAELAAWCAGQGVELAVLEATGGYERQAFRLLWAHGVAAAVVNPRQVRRFAEALGLLEKTDRLDAGVIARFAAAKGVQPQSPPPQAQERLAALVTRLGQLTALKVSQENQRRLVEDPDVAASIGELLQALNRQIRGFEARIADLIQADPLWRALDEVFRQTKGVADRTVARLMAEMPEIGLLTGKEAAKLAGLAPLAQDSGKRQGRRSVRGGRPGVRGLLYLIGGLAARHDPDYAAFRDKLLAAGKARKVVRIALARKLLVRLNAKARDTRKALQTPLAA

SEQ ID NO: 478111 - protein, 370 aa, unidentified
MKKNNRKSNEEGCQSATKVAKGLPEITIGIDVGDEHSHFCWLDADGEIVKRGRVTSTQAGLEKEFGKIRPARMALETGTHCHWMCEVLSGLGHAVVVADARELKSISGSHRKNDPRDAEQLARLARADVRLLHPVSLRKRKTQQDRSVLKARDALVAARTQLICGVRGMVKADGSRLAGCSTEAFPEQVGESIPEGMRRALAPLMETLDVLNEKIRYYDQLVAHIAREEYPETSLLTQVAGVGPVTALYYRLTMEDAERFEHSRDVGAYFGLAPKQQDSGESTPQLRISKAGDEGARRLLVGCAHYILGPFGPDSDLRRWGLKLAARGGKNAKKRAIVAVARKLAVLLHRLLVSGEVYEPLRNSQAARAA

SEQ ID NO: 478112 - protein, 336 aa, unidentified
MEHLAIDLGGRESQICIRSSDGRIVEERRCRTSALPTYLAGRPRSRVVVETCAEAFGIADVALRVGHEVRVVPATLVRSLGVGARRLKTDRRDAQVLSEVSCRIDLPSVHVPSAQARQRKTMCGMREALVSARTKLVNTVRGWLRAEARRPRSGEVSTFADRVRALYADTTLPVYVERQLRMIDLLNQELAEADRELAAAAKADPTARRLMTVPGVGPSTSIRFVAALDEISRFSGAHAVESYLGLVPGEDSSSDRRRRTSITKAGPPALRWCLVQAAWAARRARRADPMQRWADEIEKRRGKRVAVLALARKLAGILYAIWRDGTEYEPARTGAV

SEQ ID NO: 478113 - protein, 373 aa, unidentified
MNNMAGCINQDSIIVGVDVHKYSHTAVAMNCFGQEKGRLDFSNDRLEEYVLWLSTLGSRNNLIVALEDVSGYGVHLVEKLSLSGFSMRYVPAILTERDRKKSTQHDKSDYLDAKRVGKVILTKYEETLPAKESIANQEEIGVATAMDLLLCERRDLVREKTCLKNQMHALLHQYYGDHYQDGFPKAFHKKALAFYRKDLAKAKRETTVKILLAKSIVRRIGRLDLVEEQIKIITKDLEKAGSKSPQVKAIASTIHGCGMVTACTIVSEVVTIKRFGNKAKFAKYAGAAPTQRSSGSKDRLYTNPFGNRTLNRAIHTIALSQIAIKGDQRGKIYYQKKLAEGKSKLWALRCLKRQLCNRIFQTLKNTGRETDRI

SEQ ID NO: 478114 - protein, 353 aa, unidentified
MTQLSTYRIGIDVAKGFFQVHGVRCEPGEPVAIKRRLKRAQLEAFFAKLPPSLIGMEACSSAHYWARLARSYGHDVRLMPPAYVKAYVKRNKTDAHDAAAICEAVGRPSMRFVPIKSEADQGMLMLHRIRASFVEKRTAAANQLRAAFAEFGIVAPVGAAGFSHLLKLIELEAETFVRLPQTLRLVLAELALQWKSCGGAVRTMEAEIAAGVKRSERAKRLMRIPTIGPIGASAIDCLLPNPHVFASGRDFAAWTGLTPREDSTGKTIKRGPITKKGDGYLRRLLVLGATSYLARVRRGQIKGASAWVLRMAAHPKRKLAAVALANKTARIAWAMLAKDTDYRAPAAALLEAA

SEQ ID NO: 478115 - protein, 476 aa, unidentified
MPKPKPEPSGTREPGPKVASSKRSCQRKQDEHPVFEPDAAGIDIGAREIYVAVPADRDEHPVRKCETFTGDLHQMAEWLVRCGVTTAAMESTGVYWIPVYDVLEQHGIKPCLVNPRNMKNVPGKRTDFHECQWIQYLHSIGLLHSAFRPDGDVCAVRSLMRHRNDLVEMASQHVQHMQKALTQMNVQFQHVISDITGVTGLAILDAIVAGERDPAVLAKLRDPRIKASEETIRKSLEGNWRAEHILVLKQRLSLYRSYLDQINDCDKEIERLLAAFDPKVDPEQKPMPADRKQKQRRRKKKSGSPDFDMRTEAYKLFGVDLTQIPGLMMLVLTLFSEVGRDMSRWPTAAHFVSWLGLCPDNDISGGKVLWRGARRTKNRAGTLFRLAAYALHHDQSPIGDYLRRMKAKLGPAAATTATAHKIAIIFYTMVKKQVEYDASLWAQRDAMREKRLEARLHKQAAQRGYKLVPMEDKPAA

SEQ ID NO: 478116 - protein, 378 aa, unidentified
MNRIIKIGMDVHTTNYTLCIFEPSFENKGTVHFVTQVKPNVKNIVRVIDTFKRKNENDELRITCGYEAGCLGYSLYRELKDKGIDCVILAPTTMKTEKGGRKIKNDYRDAKMIAECLAYGGYSAVHIPNELDNSVKEYIRMRDDIHENLKKIKQQIISLMTRNGKQFDGKSYWTKKHLDWIKATAFQEEFLNETLDEYMIEYHHLIDRVEALDKRIEEISTKEEYVEKVQQLQCLIGIKTHTALSLIVETSDFTRFTKGNVFAAYLGLIPGEDSSGEKENRLGITKAGNRHLRKLVVESAQGYTRGQIGFKSKDLKARQSKCSNEVIAYADRCNERLRRKYYRMIARGKSYNVAKVAVARELACFVWGIMTDRMELSK

SEQ ID NO: 478117 - protein, 343 aa, unidentified
MQTVTTIGLDIAKSVFQVHGVDAEGKVLIRRKLKRRYVLAFFEKLPPCLVGIEACATSHHWSRQLKGFGHSVRPMPPAYVKPYVKRQKNDAADAEAICEAVTRANMRFVETKTPEQQSCLMLHRTRQLFIRQQTSVINAIRAHMAEFGIVAPVGRKGVEQLLAIAMDASDRRVTEVARACLAALGTQLRMLKMQILELDRRIMAWHRSNETSRRLDAIPGIGPALATALVASVADPKAFRSGRNFSAWIGLVPKQHSSGGKDKLGSISKQGDRYLRSLFTAGALAVIRYAKMHGTRHRPWLTALLARRPTKVAAIALANKIARMAWAMMARGERYKEPVALAA

SEQ ID NO: 478118 - protein, 342 aa, unidentified
MLYVGIDVAKNKHDVTALNVPGKTVLKPLTFSNNKAGFELLDLSFRQLNQDCLIALEDTGHYAFNLLNFLHEQGYKVYTYTPLLIKEFAKSLSLRKTKTDKKDAHGIALKLLSDPNREQFQHDNRQVDLKILARHIHRLKKKQSDWKVQYTRCLDIIFPELDKIVGKHSEYTYQLLTCYPNPQKRLEAGFDKLIEIKRLTASKIQDILSVAPRSIGTTSPAREFEIIEIIKHYKRLIDKAETCVNDLMAEFNSVITTVTGIGGRLGAVILAEIRNIHAFDNPAQLQAFAGLDSSIYQSGQIDLAGRMIKRGSPHLRWALIQAAKACARFSPAFKAYLKTKLE

SEQ ID NO: 478119 - protein, 273 aa, unidentified
MSNYVGLDVSLKEVSICVMDGDGCVLASGSTPTDPSAIMAFIDKHTPQVVRIVHESGQLSTWLTRVLLARGAPVICIDARMAHKALSARLNKSDRVDAEGLAHLARTGWYRAVHIKDESSDQLRILIGARERLLRIRKDIEGHIRGILKTYGIRLAPVMAARQRANFRKQLRTVAKDHPALELIAASFIVAHEAACKECAVIEKELVRRARGNELATRLMTVPGVGPIVALSFIATVDDASRFAKFTQVGAYLGLTPRRYQSGEVDYSCHFSP

SEQ ID NO: 478120 - protein, 371 aa, unidentified
MPDVISNQPADVRLWVSLDVHKLSIVAATLPPTGGKPEVQRIETTEKAIRRFIEKLGGPKGLAVCYEAGPGGFELYRLLARLGVRCDVVAPSLIPVRAGDRVKTDRRDAKKLVSLYRGGLLRFVAPPTPETEGLRDLLRCRDDLRCARTAARHRVTKQLLRHGRIYRDGKHQWTGKHRDWLTRQQLDDPLAHAALEQMLVHLDGIERQLATLDARLEQIARSERWASQVQILTRFRGIATLSALGLIAEIGDFARFSHPRELASWLGITPSEYSSGDQQHRGHITKTGNRHARRLLTEAAWHYRHPPRRPKTGPEPDQRAWQAQLRLYHRHRHLTAQGKRSTVVNIAIARELAAFVWAAMTDQPHRQEAAA

SEQ ID NO: 478121 - protein, 349 aa, unidentified
MDQQTPVTTYVGLDISLAETHVCVLDQDGKRLFQGAVASDPDALTRIIQEKAPNCQRVGMETGATMPWLWRALRARGLPVICMDARHANRALSMRRNKTDKNDARGLAELMRIGWFKEANVRSPQTQYVRSLLSARYQLRLSRKDVLNQMRGVVKSFGLFTGSTATRTFPAIVREIIQENPQFGPLLTLLLAVHDALVAQITAYEDALKNIAASDPDARRIMTVPGIGYLVALTFMTAVDDPTRFSSSNKLGPYLGLSPRVRQSGEASWSAGIGHAPDRMMRSYLYQAATVVLTKTASWSALKAWGLRLYKRSGFKRAAVAVARKLAIIMHAIWVGGTEFKYGQKERTA

SEQ ID NO: 478122 - protein, 395 aa, unidentified
MLAEKEGTVPASSVATDPIFVAIEMSRSKWVVGTHIPTSSKVGIHILEWGDVDALLTLVDRLRLRAASMIGATDVPILCCYEAGYEGFWLYRRLTAAGLQLLVVDPSSLLVNRRAKRAKTDRIDAKAMVRALMAYNRGEDQVLRAVNVPGIEQEDHRRLVRERQCLVYECTAHTNRIRGLLMTQGIVGFDSRAVGADQRLDELITGDGRLLGPRLRDEIRHEIARLRVVIEQLKAVSAERNAIACVKKVEVLLADRRLVDADASMIVALTRIKGVGPNDASVLVREAFWRKFANRRQLAAWSGLAPTPWASGTISRDQGIAKTGPAIFRSHMLQIAWRWLQHQPRSKLTQWFNERTSGATGRMRRIMIVALARKLLVALWRYATAGLVPTGAIVA

SEQ ID NO: 478123 - protein, 371 aa, unidentified
MKKNSTVKQSPKRAAAREEGPLVMGMDLGDKTSRYCVLGGKGEVVGEGSVATTKKGMLQQFGRMRRCRIAIEVGTHSAWVSRLLKSLGYEVIVANPRQVQLISASSRKNDRMDAEILARLVRVDAKLLRPIQHRSEQGQIALMKIRVRAGLVEVRTKLVNMARGFTKAQGDRLPTCDTDSMGVEKLEGLTAELQEGLRPLLETVEALTAQIQAMDTVIEQIARTQYPETELLRQVSGVGILIALTFVLTVEDHRRFQKSRDVGCYVGLRPKQSESGQSQPQLRITKEGDRYLRKLLVQGAHCIVSRRGPDTDLKRWGLKLGGRGGKNAKKRAIVAVARKLGILLHRLWVTGEVYEPLRNSQARHLRRPVAA

SEQ ID NO: 478124 - protein, 255 aa, unidentified
MERGGFVGIDVSGDRLDVAFRPGGERLQVSNDARGITRLTRMLERSQPELIVLEASGGYEVALLERLFAKKLPVALLNPRHVREFARASGRLAKTDAIDAEVLAHFAQVMKPEPRQMADPETRKLRALVTRRRQLIQMVTAELNRRRHSLEVVREGFVATIRCCKRQIAAIDKQLATLIQQTPKFRQKAKLLRSAPGIGGIASATLLARLPELGTLDRKKIAALVGVAPYNRDSGKIKGKRAIWGGRGDVRRCST

SEQ ID NO: 478125 - protein, 408 aa, unidentified
MYNAVGIDASKLKSTITIIQPAGVVIRKPFDVLHTSDELNTLVTYLKSLEGETRAVIECTGRYHEPVVKSLSEAGIFISAVNPKLIKGQKRNTLRKVKSDPADARKIAKYALDNWAELREYSSMDTTREQLKTLNSQFTFFMKQKVAAKPNLISLLDNTYPGVNKLFDSPTRDDGSEKWIDYAYSFWHVDCVRKIGLKAFTERYEAFCKKHHYNYQKNKPALLFEESKQLVAVFPKEKSYKLLIQQSIQQLRLASEHIEIIRKEMNELASTLPEYETVMSMYGIGETYGPQLIAEIGDVSRFTHREAITAFAGVDPGVNESGQFKQRSNRASKNGSTRLRKTLFQVMSTYLQNKPVNEPVYQFLDRKRAEGKPYLVYMTAGANKFLRIYYGKVKECLRNLEQSQIEES

SEQ ID NO: 478126 - protein, 347 aa, unidentified
MVTLGSDSHKRTHTFVAVDENGKQLDYQTLPATTPGHLEALRWASQWPDRRWALENCRHLSRRLESDLLHAGEAVVLVQARLMATVRVTGRQLGKSDPIDALAVARAALREPNLPVARFEGKSREVKLLLDHREDLVGERTRICCRLHWNLHEIEPGMELSDSALIRWCVMDRVERVARQHSCLLAEIVLEQLESIRRLTRRIKALELQLRALMRQLTPNLLELQGCGTLCAAKIFAESADIRRFETRAAFALNNGTAPIPVWSGNNVRHRLNRGGNRQLNAAIYRIAIIQARDEGLGRTYMAKRLALGNTRREALRSLKRRLSDEVFRRLWQDLPLAVNVRFWAAA

SEQ ID NO: 478127 - protein, 416 aa, unidentified
MPFALPEALFFTGIDWAAETHAVCVLDAAGKIAAQFTIEHSADGIAALVRRLARYGEAGGMPVAIERPDGRLVDLLLEAGHPVVPVKPNAIKTWRDGEVLSGAKSDAGDAAVIAEYLRLRAHKLRIAAPYSDQTKALRTVVRTRGDLVEMRVAATNQLSALLEAHWPGAVAIFADVESPVSLEFLTRYPTPAAAAHLGEKRMAAFCVKHGYSGRRTAAQLLTRLRHAPAGAAGEALTEALRDAVLAAVAVLTALNASIRNLDRSTAAHLGEHPDGAIFTSLPRSGQVNAAQVLAEWGDCREAYAAPDSVAALAGVTPVTKASGKHRSVEFRWACNKRFRVAVTTFADNSRHASPWAAKIYNNARASGKDHPHAVRILARAWIRVIWRCWLDSIPYDPARHGAAAALARQATEQIAA

SEQ ID NO: 478128 - protein, 312 aa, unidentified
MIIGTDVSKDKLDIHILPMDKHFVVKNTQPGVSNFMKNTLRKLGSPELIVFEATGGYEKTLQIYLLKHDLPYHKAHPSRVHNFGKGKGYFAKTDRIDAKMLAEYGQQEDIVADQDTSEAQIEIRELSARKTQIKGLMEREKHKLNQVYLAKVIKRSIKRTIKLLEKELALIEKELEKMIVNDKMLSEKRELLQTVKGIGKEVSTLLITDLPELGRLSREKISSLVGVAPQTKDSGKKQGYRSTVNGRFYVRKGLYMAALVASRHNPRMKAIYEKLLSKGKKKKVALVAVMRKMLIMMNAMVKNNTHWQSTRI

SEQ ID NO: 478129 - protein, 412 aa, unidentified
MQVVTERCAGLDVHQASVVACLLVCVPGMQPRKEVRSFGTMTHELEDLREWLRQEGVTHVGMESTGVYWRPVHTVLEGHFELIVGNARHIRNVPGRKTDVKDAEWIADLVCHGLIQPSFVPAKPLRALRELLRYRRKLVEGQSAERNRLQKLLETANIKLASVATDVLGVSGRAMLRALIEGTASPQQMAELARGRLRRKRAELVRALEGHIEAHHRVLLSMQLRRVEAAEQDIEALDQYIASQLAPYDAEMALLITIPGVDWVAAAALIAEIGTDMSVFLSGHHLAAWGGVCPGNHQSAGRHRNGRARKGNVHLRTTLVGAAMSAVRTKGSYLKDKYYRLKARRGAMRAALAIAHKILIAAYHMLTRRVGYRDLGEAYLDQRDRSRTAANLQRRLERLGYIVSIQPNQPAA

SEQ ID NO: 478130 - protein, 337 aa, unidentified
MKYIGLDVHKGNTVACAISAGGKAVMSAKVRTNDIGLGELHARMNGSEYVVMMESSTYSYVVYRFFERLGIEAHVVHARSLRMITDSDKKTDRTDAEWIGRCLRLWKNKEIELAMSYVPTEAEAELKDLCRYKEELSNKLGDEVRRIRSHMHRNCEELPSQFHDLSAKRSREFISTTYSNDYTLLQRVSGYAALLKESDSVAKEIERRGNEDRNVELLESIPGIGRQTAVQLMSMIVDISRFVDPEKLCAYFGMAPRVRDSGGKEHHGRMTKSGDPMMRSIMERVTLSHVRYCDSTITAYFRRKSKEMGTKKALMSAARKMLAVIHAVLKRGTPFAA

SEQ ID NO: 478131 - protein, 360 aa, unidentified
MIVQGTSVGLDVHALSVVVHAVDEETGKVARTRLCPDHGEMLGWLRQLRAPVRVTYEAGPTGFGLARAIAEAGMECLVAAPSKLQRPAGDRIKTDARDAAHLARLRRLGEITAVRVPERDIEAVRDLLRAREDARADLMRVRHRLSKLLLRQGIVYSGGTAWTGVHEAWLRKQRFADHYLAAAFDHSFDAVLAATAARDRLDEQILDVAASPRFADPVNRLGCLRGISALTGLALTVEIGDWSRFTGSSIGAYVGLVPSEYSTGTSRVQGSITKAGNTHARRLLIEAAWHHRKSDSTSGPSLRARWAKVDPALRARGHAGNRRLHKRWRSFTDRGKNPLVANVAVARELAGWCWSLATMQ

SEQ ID NO: 478132 - protein, 422 aa, unidentified
MNESQQFKATIGLDWADQKHDLWIRPANGFKSEHLRLEQSPEALHEWAAKLRKRFDTGQVALGVETSRGPVISALMSYDFIVLFPINPKALKDYRAAFSVSGAKNDRTDAQLIEEFIRLHSEKLKALQPDTELTRKLSGFVQDRRHLVDERTRLVNQLHSKLKTYYPLAETLIGSEMNSLLGAEFLSRWPDLKSLMAAQAPTLRAFFYKHNSRSAKKMEQRLEAIKSAQALTTDPGIIEPARELVLALAGMLQCLHKSVLRLEKTIELAMDQHPDAPIFRSLPGAGPALAPRLLVAFGTQRDRFESAQEVAQFYGVAPVVIQSGNSELVRVRRRCPKFGRQTFHENASCVAKTEPWGRTYYEQQRKKHDDKHHQACRALAYKLIRIYFSCWKTRTQYKSNTYLNALQKHGSPLHSKLHGVGE

SEQ ID NO: 478133 - protein, 419 aa, unidentified
MQHRSQEEFAAFVGLDWAEATHDGCLQAAGTARREFGGLEHRPEAIDAWVQTLRTRFNGPPIAVCLELKQGPIVSALRKYDFLVLVPVNPLTLAKYREAFTPSHAKDAPTDAALQGELLLKHRDKRTPLTPQSPTMRALAQLVESRRRLVGDKVRLTHRLTSALKNYFPQVLQWFDDKDTPLFCDFLSRWPTRKAAQLARRSTLEVCFREHHVRSADLIATRLQAIKNATALTTDAGIVTPNALLAQALVAQLRVTWRVIADFDKAIAQHAQGHPDLPLFDALPGAGVVFAPRLLVAFGEQRERYTSADALQKYAGIAPVTERSGKKSWVHWRRQCPKFLRQTFIEWAAESIRHSFWAQAYYPQQRDKGKAHQAAVRALAFKWLRILYRCWQDRTPYDESVYLQALKRRSAPLLHNLAN

SEQ ID NO: 478134 - protein, 407 aa, unidentified
MSLRRRSQTARLSWEKFIRLVARFFPPIRTLHPLPSHRRCLFAIELSGMSWVIAFNTPLSEKISRRTLTGCKWERLFELIEEVRARVSREMGRTVEVISCYEAGYDGFWLHRQLSAHGIRNYVIDPASLQVNRRARRVKTDRIDTERLLRSLLAYLRGEPKVWSVVRVPSVAEEDARRLHRERDRLVSERVQHVNRVKGLCALQGIYDYNPLRPQAMARLEQLRTTQGGVLPPRLKSEIKRELHRLELVIGMIATLEAERSAIVADEASTHLNVRKIQTLHKLKAVGPEFAAVLVGEIFHRDFNNRRQLASYVGFAPSPFQSGNVAHDQGISKAGNRKGRTTGIELAWLWLRYQPGSDLSVWFRTRVGTTKGRIRRIAIVALARKLLVALWRYLETGVVPRGAVLKG

SEQ ID NO: 478135 - protein, 371 aa, unidentified
MNSILYVGMDVHKENYTLCCYSFDRDKVEYRQTAPSDYRLILKYLEQVRRKYPEEVEFICGYEAGCLGYSLYHQLTDHGVKCINLAPTTMGITNTNRIKTDRKDAANIARCLAFHTYSAVYVPDGEDNAVKEYLRMRDDQKLALKKIKQQITAFVLRLGKQYTGGKSLWTENHLKWLRGLDLTLLEKETLQEYLITYDYLTDKLERLDARIEELAGNERYGERVRRLGCFIGIKPHTALSLLVEVGDFRRFEKAPNFAGFLGLVPGEDSSGGGRNRLAITKAGNSHLRRLLVESSQSYSRGTIGFKSKELKKRQEGNPPEVVAYADRANERLRRRYYRMTLKNGAKRNVSIVAVARELACFIWGMMTDEIA

SEQ ID NO: 478136 - protein, 344 aa, unidentified
MVTIGIDAHKRSHTVVAVEEQGRQLAQTTTGTTSSDHLQLLAWRPSRGRTGCGRPRTAATSRAGWSATCSRPANRSFGCRPKLMANTRDGARTFGKSDPIDALAVARAALREPQLPVARVDGADRELRLLVDHREDLVAERTRMISRLRWHLHELDPSNEPAARTLNHLRNLDKLASRLDGAEGTVARLAREITERCRHLTVEINALEKEITALVEVLAPSLLAVCGCGPLTAAKIVGETAGIDRFKSNDAYARHDGTAPLPVWSSNRARHRLSRTGNRQLNAAIHRIALTQARHHPDAQAMIARRKAQGDGGLEALRVLKRRLSDVVYRALKTDAATEPRPAA

SEQ ID NO: 478137 - protein, 422 aa, unidentified
MSYCPVAGIDVSKQFSDMCILSPDNKIFAQEKIYHDETSINRANALLQKAERLFFSKPVIVMESTSHYHLILFQFFSEHGYDVIVVNPLQSNSMKDFSIRKRKTDRVDAFKLAMMYRTKTLRPSQIPQSATRALRQLCRHRAELLNDVSSYKNRLTALLDQTFPGYDKVFSDVGGVTSCAVLVRFPTPTILLVEEESELVEVIAAASKSGYSFAKKKAELLISAAQKAQTLGIHSCADETLIVCTIQMLRTLSESVFQIETAIDNLLAQIKEMRNNVSLLQSIPGVGSHSAALLLGEIGDISLFKKPKQLAAYFGLDPTERQSGSFRGTKNKLSKRGSPYARAALHMGVVNSICKRGKDSAANPVLLSYYEKKCKNKPAKVAQAASMHKLVFIVFAVLRDQKPFELKTPEQHAVEQGFVKAA

SEQ ID NO: 478138 - protein, 346 aa, unidentified
MPQHERFIGVDYHRKASYLTVMDSRGTIIKEGQIANQQEAVATFLQQAQCDGNATAVLEATRNWTVMYDWLEALVDEVKLAHPLKVKWIAEAKIKTDKIDARVLAHLLRTDLLPTAYVATPAAREVRAVLRQRMFFVRVRTMIKNRISVLLDRYPDLSAQQPAEDRFSQAGLAWLHQLPLKPTDQQLLAEDLQLYAAVAARIAQTEALVTTLAQDDWRVTLLRTIPGLGAFFAVLIAYELDDITRFAHEKKLCSYIGLVPSTYASGGRTFHGRLTKQGNRYLRWAFVEAVWPAIRTDASLRRYYEGIKTRKGSNPAKIATARRLVTLVYRVLRQRRAYEVRSSQLP

SEQ ID NO: 478139 - protein, 422 aa, unidentified
MPGQKGKEMETYKIAGIDVHKKMLAVVIGDAAAPGELRFENRSFGAEAEDLEKLRDWVRERQVSVVVMESTAQYWKGVWEVLEEAGFHLELAQAQSNKAPQGRKRDFADARRLVRRFLADELDLSFVPDPEQRLWRTMTRAKEQLVRERARLKGQLDSFLEECRIRLSSHVTDLLGVGSRRMMEAVASGMTDPVAIAERATDGLRATPEQLAGALRGAVAMNPVQRKMLAMLLERLDLIERQIEELDRNTAEALRVHQDAVARLAEMPGIGVDSAQRMIAEVGPQARAFDTAGKLAGWVGCCPGREESAGVSRNDRSPKGNRWMRTLLNQAANAAVKNKGSVFEIRYHRLKGKIGHGKAIWAVAHSLCRVLWKILHDGVRYEERGQILNPRAARYRRNRLVRNLRRLGYQVTLTPLLPEAIA

SEQ ID NO: 478140 - protein, 415 aa, unidentified
MKTNPYIIGVDVASQKADIDIHDADDNELGQFVMKTNNYNINNTLSKISTLVDKKNTIVIMEATGPYHRIFYYAFLNSGFQVTLINPYQSNAFQKASSLRKTTTDKISAHALANIYRLHQFSPKSNFEAHIELKKLARAYYTLIDDQSNFKKRIKSILSEIFPLFTSVFKNPFLKTPITLLNSYPTPTELLKENPKILFELMKNTARKNAHWTIHKLDSITSAAILSPSVEKGKNANILALKIFITTMQNLEAQIQNLKQQIKKLSKDYPQIKLLMSIPGIGPILAATILGEIGDFSAFNKPAQLTAFAGIDPSVKQSGKFKGSKNRMSKRGSKLLRRALYLAACASIRKNRTGNLNNPYLREYYDKKVSQGKPKKVALGACMNKIAGYIFATLRDNKRFILVDPKNHRLYKKAA

SEQ ID NO: 478141 - protein, 399 aa, unidentified
MFVGIDWAKESHDICVVDPAGKIRGRATIAHSQEGFDELAKHLGRWAEQGEVLVGIERPEGRLVDRILEAGYPIVLIPTFAMKDLRRRYAVGGAKSDPGDAYVIADVARTDGHRLRRLEPLSEETRALRSVVRARGDLVDQRVALGNQLRACLDAYWPGAAVIFADVCSEIALAFVERYPTPESAARLAETRLGSFLKKAGYSGRRSAAELLDRLRAAPEGVVGVEAEARADAMRSMVRVTRSLNRSIKDLDRAIAAHLGEHPDAEVFTSLPRSGRINAAQMLAEWGDCREAYPEPDAVSMLGGLCPVTHASGKHRDVAFRWACNKRLREAITTFADNSRHASPWAADIYRRAIARGRDHPHAVRILARAWVRVIWRCWQDRRPYDPALHGAAVLLEAA

SEQ ID NO: 478142 - protein, 343 aa, unidentified
MQAVTTIGLDIAKSVFQIHGVDAAGNVIVRRQLKRRYVLPFFQRLPPCLVGIEACASSHHWSRELKALGHTVRLMPPAYVKPYVKRQKNDAADAEAICEAVTRANMRFVETKTPEQQSCLMLHRTRHLFIRQQTAVINAIRAHLAEYGIVAAVGRNGVEELLGVVADPSDKRVPEIARACLAALGAQLRMLKAQILEFDRMITAWHRSNETSKRLDAIPGVGPALATALVASVPDPKAFRSGRNFSAWIGLVPKQHSSGGKDKLGSISKQGDRYLRSLFTAGALAVIRYAKIHGTKHRPWLTALLARRPAKVAAIALANKIARMAWAMMAKGERYKEPVALAV

SEQ ID NO: 478143 - protein, 351 aa, unidentified
MWIIGCDYHPSVQQIAWVDTETGEMEERRLKHSDGEAERFYRELKAKGFSVRVGMEATGHARWFERLLRELGFELWVGNPARIRAKQVKKQKNDRQDAQHLLKLLLKDDFPRIWVPTPENRDERQLLLHRHRLVQMRTRVMNQLQAVAMNEGIRRKRGLWTKQGWAELESLSLPTWTNRRRQELLELLDHFDPSIDQLSQAIEHQAEQQPEVQRLMTHPGVGPITALAFVLVLGTPLRFGCGKQVASYLGLVPSEGSSGDRRRLGHITKQGNALLRHLLGQAAQSVANSDEGWRRQYAQVAMRRNRSIAKVAMARKLAVRLYWMWRQGYDYEQWASSVRTRGKLEIAHGVK

SEQ ID NO: 478144 - protein, 318 aa, unidentified
MVYVGIDLHRKSSQLCALDEHGEQLLSRRVVNEPEALLAALAQLPERPAVALEAAFGWEWLADLLESEGIELHLAHPLRTRAIAAARVKTDAVDARTLAELLRARLLPEAYVAPRELRQQRQLLRQRICLTQLRTSLKNRVHALLAREGIQRRHATLFGPAGRAFLAGLPLRPPERARLEQLLRLITVFDTEIAALAAEMLVIAELGDVGRFASAAKVCSYAGLVPRVRASGQRVRLGAISHQGSPYLRWALVEAAQQASRRPGPLRHRYERIARRRGRNVAKVALARQLLTLCYYGLRDGEIRCLARASSAWDMAAA

SEQ ID NO: 478145 - protein, 335 aa, unidentified
MTVSNQAERVIGVDVSMSRLDIADSQGKIHKTISNTAAAIKKAIVQKLDDGDSVFVVCEATGGYEKDLVKTLQDAGIPVAIANPRQVRQFASAMGRLEKSDPIDAEVICQFGQTAELPAAPVKTAEQEARDAIVRRREQVLEMIGQENNRLQQESDPKMKKTIEQVLKTLKNLQKKLDAEISRFLAEEAKTNASVDVLMSVPGVGAVTTATLLSELPELGQLNRSEVAKLAGVAPIVHESGQSRGRRSVSGGRRPVRRVLYMASLVGIRRNPVLMEFHRRLVSRGKPQKVAIVACMRKLLTILNSMVRTKTRWRTKGEEKVVADQGPATTRAHGD

SEQ ID NO: 478146 - protein, 424 aa, unidentified
MKVTYQTCCGVDVHKSFLVATIVKTTGGIEPSYQKKRFSTFNNSILEFKQWLLDNDCHDVCMESTGKYWIPVFNLLEDEINVVIANPKWVKTVKGNKDDTKDSKWIGDLFRLGLVKGSYIPCKKVRILREYTRYRYKLVSCRSSEKNRYQNALTVCNVALDSVVSDIFGKSSTSIIDYLLEQSGTSINHEEIASKLLRSLKSKEDAVIKSVEGYQMTDAQKYRMRLVRAHMDYITAEINDVDKMIENMISSNPDFENAVQFLCTIPGVKRDSAITIISETGTDMSQFSSSKRLCCWAGLTPGSNESAGKKKSVRITRAGVYLKPALVQCAHAAVKSDKSPYYKKKYESLVKRRGKKRAIIAIARMILTAIYQMLSTGEQWNPSDLYKIDMPVALVEKQKAKAIKQAKKLLQREGLLPPDEPLAS

SEQ ID NO: 478147 - protein, 440 aa, unidentified
MANIVNLNAAGIDIASKEHYVAVPADRSEQHVRVFKSFTKDLHDLANWLKTCKIDTVAMESTGVYWFHLYTILEEYGFDVYLVNARHVKHVPGRKSDISDAQWLQQLHSFGLLTSSFQPDHLTRMLRNHVRQRKQIIQDMSRQSQRMQKALEQMNIKLNNVIRDLHGKTGRAIITSILEGERSAEKLAVHKDPRIKVSKATLIKSLEGNWRDEQLFNLQMAYEHYVFLANQLRKYDVESEKVIREIENNADHEPYKKKVAKTRRYKNQPQCHVEQYLYNILGVDVCQIYGFKATAALTVFSETGPDLKRKFPTEKQFLSWLNLVPDNKISGGKVLSSKVKKKKNKAGQAFKDAANTLWRSQDPLGDYLRRKKSKSGAAQAVIATARKMASIYYKMVTCQVDFNDEKIANNNKRYLEKKAQMLEKKLLETKILMSEYEKVA

SEQ ID NO: 478148 - protein, 363 aa, unidentified
MKKSNRRQQSAEWKERPAITVGLDLGDRFSHYCKLNQEGEVVEEGRIASSEAALRRQWESEPRQRIAMECGTHSPWVSRLLKKLGHQVIVANARKLRAISENESKNDRADAEMLARLAYSDPHLLSPIQHRSVERQRDLNLIHMRDALVRARTMLVNAVRGVVKSAGGRLPDCSTAYFGQHAAPALPAELRKATRPLLQQIMALTLQIRRMDQQIENLAERYPEIHLLRTAPGVGPVVAAAYVLTLDRTDAIRGSRGAGAFLGLRPRQDQSGDCDPQHRITKTGNIYLRMLLVQAAHYILGRFGPDSALRRWGLRLAASGGKRGKKRAIVAVARKLAVVLHCMWRSGRSYQAFPEPAAVRGAA

SEQ ID NO: 478149 - protein, 370 aa, unidentified
MAKSTPFYVGLDVHKESIAVAHATGGRADPPVFVGAIGTRQADLDKLIRRLQGKAPELRFVYEAGPSGYGLYRYLTGKGLAWDVVAPSLIPRRPGDQVKTDRRDAVELARLLRSGDLTAVYVPTVEDEAIRDRCRARDAARITLKDAKLRLKAFLLRLGLHYVGRADWNAAHKRSLAKVVCPTPAQQIVFQEGVRAVDEQVDRLQRIEAELQDLAPRWSRYPVVQALQALRGVQWVVALTVVAELGDLTRFDNPRQFAAFVGLVPSEYSRGTARRQGGITKAGNGRARRVLVEAAWAYRHPAKVSLHIQQRIDQLPKALQDLGWKAQVRLCKRYRRLIGRGKHPNVVVTAIARELIAFMWAIARAMPTRS

SEQ ID NO: 478150 - protein, 390 aa, unidentified
MIYVGIDVAKDKHDCCILGPDTEELFPVFTIRNNSDGYGELFHKIESVSKDKSQIKIGLEATGHYSYNILGSLLDHGYHTFVINPLHTNLYRKGQSLRKTKTDKVDARSIAEMLVTDKTLKPYTGTSYHSEELKSLTRYRFELVKERAKLKTSVSRLVNILFPELESLVPTLHMNSVYRLLQELPGAYFIASSNLTHLKALLADASKWHYGREKAIEIRETAKSSIGSLMPAKSMELRQTIRRIDTLTSDIKEVEQSIQKIMDECGSPITTIPGIKYRMGAMILAEIGDFARFSNADQVLAYAGLSPSTYQSGQLISSYARMEKRGSKYLRYALFNAAIYASVWDERFRLYLSKKRAEGKHYYVAISHVVKKLVRTIFRMEITHTSYQPL

SEQ ID NO: 478151 - protein, 419 aa, unidentified
MDVVVARCAGLDVHKDTVVACIRAPGPDGQRTSEVRTFGTMTVELLALRDWLVTHEVTRVGMESTGVYWKPVFYVLEEAVEETWLLNAAHLRNVPGRKTDVADAVWIAQLVEHGLVRPSFVPPPPIRELRALTRYRKTQVEERTREAQRLDKELQDAGLKLSSVATDILGKSGRDILDALVSGTRDAQVLADLARGKLRPKIPALTQALTGRFGPTHALIIGEILAHLDYLEEAIARVSAQIDEVIAPFVIERDLLSTIPGVDQRLAGAIIAEIGVDMTRFGTAGRLASWAGMCPGQHESAGRSKSGQARHGDTHLQKYLAVAAMGAARTKDTYLAAQYARLVGRRGKKRARKAVGHSILVAVFHILAGGVPYADLGGDYFLQRNSPARRARKNLNELKALGWTITETSDGITGTPPAA

SEQ ID NO: 478152 - protein, 428 aa, unidentified
MNEMDGSRLEEFRQFRKEIRGSEEYLVVGIDVAKDKHHAFFGTANGKTLFKRLVFENDMEGFQKLMVQAEAMKVQEGLKKVVFGMEPTGNYHKPLGEHLIRCGRQVVLVSGVAAHENRKTLDGRWDTNDARDAANVADLVSQGKCLFYEFPEGAIQDLRNLLSLKRRWKREEQGYRVRIRNHLVAKYFPELDRYYDQSASTGLAVVRWCLDPSVIAGWGYKKFVQTVSPGPRRVVSESRLRAIWQLAVASVGCEAGPAVEFEAQVMVEGLKQIRKVIQDIEEKILEVCSQFPEYELLLSIPGFGPDVSSKVLGAIGDPNRFQNGRQVLKMAGLDLSAERSGKSSESAIPVISKKGKADLRYALYQAAFIASTKNREFIVYYTDKLRGREREPGIKTKMRVKLAAKLLIIAWTLMKKKESFHPDYLAME

SEQ ID NO: 478153 - protein, 450 aa, unidentified
MREPEEIEDEAYERVLERVCAIDVGKASGKVCTRVPHPSRPGQRRTRVWDVEATTNAIVELGEYLAGEEIEKVTLESTSDYWRIWFYLLEAADLDVQLVNARDVKNAPGRPKTDKLDSVWQAKMTERGMLRPSFVPPVEIRQLRDYTRLRVDLTRERTRYWQRLEKLLEDSLIKVSAVASTLDTKSVRDMLEALIAGERDPKVLAGLARGRMKAKRAALIEALTGRFDDHHAELTRMLLDQIDQLNVQIGRLTTRIEELIAAIPAAQGADADGTTGPSAGRGADAAVLPAIDRLDQITGIGREGAQAIIAEIGLEMSRFPTAGHLVSWAKLSPRTIQSGATSRSGRTGKGNPYLKGILGEAAAAAARTDTFLGERYRRIVKRRGKLKALVAVARSILVIIWQLLADPTARYHDLGSDYYASRTNTDRRARSHIRQLEALGFTVTLTQAAA

SEQ ID NO: 478154 - protein, 340 aa, unidentified
MNVIIGVDPHKGSHTAVAIDGQEAALGQLMVRASRRQVDQLLEWAAGFEKRTWAIESAGGLGYLLSQQLVIAGETVLDVPATLAARVRLLGSGKSNKNDPNDALSVAVAALRAPRLASVERADHVTVLRLLAKRNVDLGRSRNLTACRLHALLAELVPGGMAGEIYVSSAEAMLAKIKPVDPVTTARRDLALEHLDDLRRLDAQIKASKKRVAMAVSASGTTLLELFGVGPVVACMLIGYTGDVRRFPNRHTYAMYNGTAPIDVSSGGRITRRLNRRGNRQLNHAIHMAAVSQLRHAHSDGRVYFDRKVAEGKIKKEALRALKRRISDAVYRQLLLDVAR

SEQ ID NO: 478155 - protein, 339 aa, unidentified
MKYTPVGVDIAKHLIQIHFIDENTGEVVDKQLRGRDFLEYFSNRESCLIGMEACGGSQHWARELTKLGHKVRLLQARFVKAFVMGNKNDVMDARAIWMAVQQPGKEIAVKTEEQQSVLVLHRTRMQLVKFRTAQINALHGTLLEFGETIHKGRAAMEREFPEALERMKERLPPYLITVLENQYKRLNELDSLIEDIEKQLASVAKQNETCKRLLDIPGVGPLIATAAVATMGEASAFKSGREFAAYVGLVPKQTGSGGKIRLLGISKRGDTYLRTLFIHGARAAALLTKEPGPWITELKKRRPASVAIVAMANKLVRTVWAIAAHDRKYVRNHVSIRPY

SEQ ID NO: 478156 - protein, 341 aa, unidentified
MESTKFVGMDVHKDAITIAVMNSAGKVIMESIIETKAVTILQFIQGLRGDLHVTFEEGTWATWLYDLLKPHVTKVVVCNPRKSALLTDGSKGDKIDARKLAELLRGGYLKPVYHGDHGLRTLKELSRSYLTISKDLTRVMNRIKALYRGWAIPCGGTQVYALCHRSVWLSKIPEAGVRRRAEHFYEQLDALQGLRKQVRRDLLAESRKHNATKLLRQIPSIGPIRAAELVALIQTPHRFRTKRQLWNYSGLGLETHDSAQYRYVDGQLQRSRKPQQLRGLNQDHNHDLKKIFKGAATMASISAGPFHGFYEASFQRCKDWSRCAGVTRISTLRRTYSLGTT

SEQ ID NO: 478157 - protein, 406 aa, unidentified
MKIEAEFAGALTGEQNVTLYASVEMGSTGWLLTSRPGGQDKVQRRRVATNDWRGTISTLRRQQKVFGAQRVVCCYEAGREGFWPYRALQAAGIESCVLDPASIAVNQRGRRTKTDRIDGVQEVDAVEALELGLRTAARAVVVPSEEQEEARQLSRTRSRLVKERTALITYIKSGLARVGVDLPPATQPGWREQLAKARQWDGERPLPRQLVRDIELSHERLMLVCRQIGDLEDEQRVAVISRESSGKRRLTKTRQAAQAWDAEASPAQRRLADQAERLSRLVSIAPVSGYVLAGEVYWRDFKNRRQVGGYVGLGGAQHSSGKQQRELGISKAGNRRARHVLVEVAWTWVEHQPDSPITQWFRRRAPKGASPRLRRVAIVAVARKLAVALWYYLNDGVVPQGARMKA

SEQ ID NO: 478158 - protein, 536 aa, unidentified
MNKHRRNGHGRGTKCRKRIDNGLRQRVRRIGGDKFGVLVVDSSKKNAELWLTDFYGEPLWEQSRTFPITNGHLTEMINVVGGTCRERGLKDLVVGIEQTGRYHRPIQRALAQRWEVKAIHPFVTKQLRQPASPGVKTDGVDLEAMSRAIISGYGDDPRAVPLLYTQWQLINRAREDAVDRRRRLKQQCQERLHAFMPGYAALFEHLWETPAAVATAELYGSAKRLLATDADAISERLRGEGLRMMRPTINRVLAWAADAPSPDPAGALNRRIWSDNLRLMEHLGRDILRYERSLAAYLVQTPFVVLLSVPGVNVVSASGYGSEVGPITHYLKPSHLNGRAGLFPSRYQSDETDCADGPMVGGRNARLRDAVMEIVTNLILHNDYFQGWSELRAQRGWSKKKIHVAIANRFNRIAYHMVAGRMLFDHPCLKKRHPVLKKVAVFSLAHGIKPETTMSLVAKAARQLPADAVAAELTALQDGLTNLPTSEGVPTATLKEARLLLPALVSRINHDDNHQGGEDHQAIKEAPYRVTAETLA

SEQ ID NO: 478159 - protein, 364 aa, unidentified
MSNVAQERVRGNHIFCAIDLHQRTMLAGIALDQGPVQFVSLDTDDEGGVAELIGLLHEEAQRHPGSQVWVSYEASGCGFRLADFLAAEGFGVSVLAPSHLPVSLKKRSFKTDKRDVIRILEVLRGHVLAGNDLPAVWIPSPELRDDREIVRRRLDLRERGAEVKNKIHGLLRRYGIKRPAGLKTLWSRKYVAWLRLTAAELEFGAATVLLSLLRELDFYLGESESVEAELVKLAESAWYQAAVEALTRIKGVGVLTAMVFLTELGDMDRFGNRRQVSSYFGLVPRSYESGEHNDHKGHISRMGPARVRKVLNQAAWSLVRWDESWREWFQSRTRGGNKDRRKKMITAVMRKLGVRMWHAAQDAA

SEQ ID NO: 478160 - protein, 368 aa, unidentified
MGYETINRRAHVMTRKNTLKSLPTDTEFRVVGLDLAKSDVSVAAIPVDDNTPSLVDRMTYADLLDWAGKISPTLFAMEPCNGYSLLCLQLENLGHEIKVISGSTVSMWINTHLSGQKTDLNDAIALARLAVSDAELTPIRHKSITEIRIQTVQAVRQQLMSQRSKSIVSFKALAQQWGIPCAAGHRNLKKLRESIEAKVDLITRPVANAMLFLLDAVKSLDRQIGQLNQTLQELVMSDERGRLLQSVLGVGTQISARVITVVGNVERFNSPRSLVAYVGVAPRNFITGHKNLTKKKHGNCPDLSHKGQGKISRRGDKLLRSLFIQGAAACICNFAKTNFRSANLSVGSSSSWQGKNPTANSWYRWQPS

SEQ ID NO: 478161 - protein, 361 aa, unidentified
MKSRLFGGIDVHKSRSTIFLIDDQGNKVKAKTIITHLEFFEEFFHPFANSEYEIEIAVEAGNLAFWLCNILHHFGIKTYVVNVLENKSISHSAKKTDKRDARVLALQLLKGYLPERVYEPNLRERELRGLVQHRYQIVRDRTRIVNRAYCLLTRAGILLSKKNLADYDRYWQDVLDEKIRDEESSLYFEFQFYFDQYRLQSKQLNEIEKKLAKKVKELFPEEHTLLLSIQGVGEVTATALLAYVGDMSRFKNARKFASYMGLVPFIRESGGKRNQSSGRITKKGVSILRGYLTQGIIALLTTKSRAKSSPQPLVEFYEHIKIKKGWRKARIAMARKLCHIIFGVLKSKRKFDPAYINPKAA

SEQ ID NO: 478162 - protein, 328 aa, unidentified
MNSSSTDQLAAALPVLGLDVAKATVQAELRINGNKIRFGFANNAKGFAQLARILKERNLTKVWAGLEATGPYSHALALWLHSQGHRVSLLNPRRVRQYACSAGNRNKTDLLDAAIIADFVCALKPAPWQPPTREVGQLRALVRRREELSLMLQAEKNRLEGIAPNVRSSLERIIVTLTAEKARLEKLITQQIRSHQQLSRDHQLLCTIKGIGSLTAAILLAEMARPGQVERARQAAAHAGLAPRRAESGTSVRRNRGLGKEGNRYLRKALYMPALVAIKYNAPLCHFASRLRAAGKPKMSIVCAVMRKLLHIAFGVLKHQKPFNPSLV

SEQ ID NO: 478163 - protein, 317 aa, unidentified
MNETSSVFVGIDVSKRALDVAVRSSGTTLCFSNDEAGMAALVAEMKSLSPTLIVLEATGGFETPAVAALGAAHLPAAVVNPRQVRDFAKSTGKLAKTDTLDAAVLAHFAEAIQPAVRPIKDADLQALEALVTRRRQLLEMLTTEQNRLSMASTQTRNDILQHVNWLKERLKDIDVQTRRGIKGTPLWLAKDQRLQSAPGVGPVTSSMLLVALPELGQLNRRQIAALVGVAPFNCDSGSFQGKRRVWGGRAHLRSTLYMATLAAVRFNGVIRAFYERLRKAGKPPKVALIACMRKLLTILNAMVKTDTLWTQPAPENA

SEQ ID NO: 478164 - protein, 399 aa, unidentified
MVNPVSLQLRVGVDVGSRCHSVAIGLSDGSLLEEFEIPHRAEGFREFFARVEASARRHAAPVAVAMEGYNGHVRPLDSLVRARGWQLFNVNNLKLARFKEIFPAAAKSDRIDSRKTLELFQLRDHLPMAGEVLQEVMATPEENNVLKRLSRRRRRLVNERGRVANALQADLQAVCPGLLEITRDVGNLWFLNFLTCRKGLLKLERVRRAGLLKVPGIGTHFADAIQAWQNRAYFAADASLVGDMIQQDAARILELKQQIKALEEQMAQVAESSSIAGQLASIPGYGSVCSAELAGEIGTVERFRNEASLALYLGMATLDNSSGKSRGAKPPRHVNTRAKAAMMFAVDHHRKLVPQSQRYYERKRAEGKKHNQAIRALGRHLCRVVFKMLTQDRPYRIDP

SEQ ID NO: 478165 - protein, 420 aa, unidentified
MAGIVDIVYPVCCGMDVHKDFLVACIATTDERGHTTHQIRRFSTYTGDLRKLAQWLLENRCCDVCMESTGKYWIPVFNTLELTCNVCLTHPKYVKAIKGKKTDKKDAKWISELFKCDLVRSSFIPPPDIRQLRDLCRYYVKLSYMGISEKNRAQNCLTMCNFKLDDVFSDVFGKSASRIIEQLIEHGNTDFDVASLIDGRCKATVEDVQAALDGELIPAQSEKLKFIRQHMENLNTLKDALEKLILRLAAKYQPQIDLLLTVPGISQPLTAIRILAEIGADMSVFETSKQLCSWAGLTPQNQESAGKKKTTRIARAGAYLKPLLVQIVLAVANSNKHPELKNKHQALKKRRGGKKAVIAIARKILTAVWHILKKKVPYNAELYRSADKPPVNREISHEQAFALLRSRGYIIKEKVSNSTG

SEQ ID NO: 478166 - protein, 352 aa, unidentified
MLAEVVDAVVGVDTHRDTHQAEIAYSSGMPIATCSVANTSDGYAQLLAWIREHAGEQRVAVSIEGTRSYGAGLARAVTTAGLRVIECEQPNRKARRGKGKSDVIDAHLAVLTALQRPIEKLPSPRADGDREALRILLSARDELTTATTAQTNRLRALLRDGDDDDRNLARARLTDATLAALARRRGPRHASRAHATRQAEMRRIALALREKRHELGANRVQLADIVNEIAPGLTDQRGIGPITAAQAIVSFSHPGRCRSEAAFATLAGTSPLEASSGQTTRHRLNRGGDRALNHAIHTIAMVRMRSCPTTRTYVARRNAEGKSSREIRRCLKRYIARQLYRTLASTVTPVTA

SEQ ID NO: 478167 - protein, 408 aa, unidentified
MDLLHPRAAGIDISKRDAKVAIRVQSEGGKVSTQVTTWGSMTGQVLELADFLRSQGVTTVVMEATSDYWKPFYYPMEATGLPVMLVNARQARNIPGRKSDVSDAAWLADLGAHGLLRASFVPAPDIRRLRDLTRARQMLVHDRTRVKQRLEKSLESSGTKLSVVVADLNGVSARRMLDALVAGERDPRSLAALAHPRMRATQDELAAALTGRFTEHDAFMVGQHLTHYDLLTGQIDALTARIEEEIAPFRLARELLTTIPGIAEPTADVIIAETGGDMSIFPTAAHLASWAGVSPGMHESAGKRKSSTTRPGNRYLKEALGNAASSNAKKGSNTYLARRQRRISARRGKMRALVATEHAILTAVWNMLSRGEAFTDLTPPPANTERQKKSHLRALEHLGYKVTLAPAA

SEQ ID NO: 478168 - protein, 360 aa, unidentified
MEVGQTMADHGVVGGVDTHKDLHVAAVVDELDRVLESRCFATTRHGYQQMLTWMRSFGQLRRIGVEATGTYGAGLLRYMQNAGVEVLEVTTPDTHDRRKRGKNDDLDAQNAAHAAFAGRRTVTPKSRDGMVESLRVLKACRKTAVAARRVALQMIHNTIVCAPDELRETLRRMTRMQLIRTLAAWRPDLTDYRSVVSAYRITLKSLGRRYLDLHDEIADLDTMIVAIVDELAPALVARNSIGHGSAAQLLVTAGENAERLQSEASFAALCGASPVPASSGKTTRHRLNRGGDRAANSALHIIAIGRLRTDPRTKAYIAKRVAEGHSKLEAIRCLKRYIAREVFSLISQRKREINQGRNAA

SEQ ID NO: 478169 - protein, 466 aa, unidentified
MRRHIPKRMMEDSLAQRNRTSPPRAGKARAALSLTHPNAAGIDIGSASHYVAVPPDRDDEPVRAFQSFTADLHRLADWLTACGVDTVAMESTGVYWIPLFELLDARGFTVFLVNARHVKNVSGRKSDVLDCQWLQQLMSYGLLRGAFRPADEVCVLRSLSRQREMLLRSQSRHVQHMQKALTQMNIQLANVISDIVGATGQKILRAIVAGERNGLTLAALKDARIQASVDEIAQSLQGAWRTEHLFALKQALALFDFYGTQLAECDAAIEAQLQVLATHTGTPQPGKKRSRARNAPKFDLRVQLFQMCGVDLTRIDGIDVTTALVVVSEIGTDMSRFPSVKHFTSWLGLCPGTKITGGKLLSGKTKRCANRAAQALRMAAAALRSSKSALGAYFRRMCSHMDKPKAVTAAAHKLARLVYTLLTKGEEYTDQGQDYFEERYRERVIRQITQRAAKLGLSVVPTAQAA

SEQ ID NO: 478170 - protein, 321 aa, unidentified
MSAILGIDVAKSKFDVALYRDGKYKHKVFENNRSGFDALVAWLQQHNVSEVHACLEATGAYGEGVARYLFAAGHIVSVINPARIKAYGKSELLRTKNDKTDAKLIARFCEAHKPLAWRPDPPEVEHLRLLGRRREALIEMRTQELNRLGGPDADVNESVEKVIAFLNQEIEQISAAIREHIGKHDGLRKKRDLLKSIPGVGEVTIEAILSEVNGFEDFDTVEKVVAYMGLSPKDHESGTSVKGKPKLCKIGNARLRKVLYMPTLSAIQHNPFVTALYNRLMAKSKNGMIIACACMKKLVHIIYGVIKTGKPFDPAYNIKTT

SEQ ID NO: 478171 - protein, 410 aa, unidentified
MRYHLGVDWADQTHAVWVVDKRGTKLTARTVPHTAEGLSEWGRELDEWRAQGLELWAAIERPDGRVVDFLLDHGVVVYPVNPKALDRARDRFRQSGAKDDPFDARVLADFLRTDHAHLRPLRPSSEAAQELKLLTEDYQRQVRQQTRLVNQLTITLKAYYPRALEVAELTTGLAQAFLQAYPTPAAVAALTERQWQRWARAHRLSATRTRELWEVLQRPQLPVPAHVVRAKARLMRSLVAQLTPVVAAVGEYREAIEDFFARMSTAQWIRTLPIGDHGITAPTLWARLGDAPGRWEAFRHLQAQAGAVPVTKRSGKQQRVVHFRVACDKALRYVVDQVAFLSLRSCEWARAYYDQQRGRGHSHRRALRALGAKWLKIIFVMWQRHASYDEPYHLATMARQQLRQPQTKIA

SEQ ID NO: 478172 - protein, 510 aa, unidentified
MGLLYRCAGLDVHRDTVAACIRTRMPGGKFEEQRATFPTFSADLKRLARWLQDHQIRHVAMESTGVYWIPIWNTLEASRYRFEPLLVNPVQVRAMAGHKTDQIDCGRIAEYLQNGRLAGSFIPPPAIREARALERHRVHLQQDRNRAINRIGRLLQTAHIKLSTVLSNIVGLSGLRILRAIAKGQTRREELAELAHARVSAQKPQLIESLAGCYSEHFRYMLGELLDEYDHLTVKLDEVTRRLGSYMAEHGELVERMCQVPGIEKLTAWTILAEVGTDLSQFPDAAHFASWAALCPGNNESAGKRKQGRTRNGNRYLRRVLVQAAWAAAHSKGTYFAALFLRFSRRQGMKKAAVSVAHRLLIVLYHIIRDGVWYREKGDDYFDRLHPERTAHRLMSRLQRLGYNTAGIAPVSPAAAAGSNQPSPLNPKRRGRPCKCAERGQACTHQHASAPPKPVDAAVPPSPQPKSPHQPIAPPAVPCRICARWGIPCIHLRPKLKPQSKSRPSISNTD

SEQ ID NO: 478173 - protein, 317 aa, unidentified
MKENGPYIGIDVAKAYLDVTAHLSGEPWRVANDEAGISTIVTHLREVGPTLVVVEPTGGLEMPLTAALATAGLPLAVVNPRQVRDFAKATGRLAKTDRLDARVLAHFAHAVRPTPRPLPDAQTLELAALLARRHQLVQMLTAEKNRLAATRPPVRQRVQVHIRWLKQELADSDGLLSNTIQESPLWRVKDDLLQGVEGIGRVVSITLLAELPELGILDRRQIASLVGLAPFNRDSGMLRGKRRIWGGRARVRAALYMATLTATRFNPVIRAFYQRLLAAGKMKKVALTACMHKLLTILNAMVKHNRPWNPQLNLRNP

SEQ ID NO: 478174 - protein, 408 aa, unidentified
MERVVERAAGLDVHTKTVAACVRVPTETGERTQHIQTFDATTAGLLALRDWLLSHGVTHVAMESTGVYWKPVYYLLEDAFTCVLVNAAHIKQVPGRKTDVLDCAWIAQLLEHGLLRGSFVPPPPLRDLRDLTRYRQTLLEDRTRQVNRLHKVLQEAGIKLASVASDVLGVSGRAMLAALVGGTTDPTALADLARGRLRTKRPALQEALRGRFRAHHAQLLTHLLAHIDYLDDTVTALSTAIEEQMRPFAEAIHRLDQVPGLNQRTLERVLAEIGVDMTVFPTAGQLASWSGLCPGNDESAGKRRSGRTRKGNRALRSALIQAAWAATRAEGSPFAARYRRLRHRSHKKAVVAVAHALLRVIYHMLASGTHYRDVGADYFDRRHVERAARRAIHVLEGQGYRVLLQPAA

SEQ ID NO: 478175 - protein, 503 aa, unidentified
MRPLAYVRGVEVSVSLRSELRGRFWSNHFGWQSLFDVGHAPSWEHWTKSRPADQSLTGHPMSFDRLKRTQGRKRLPGHKLKPSRATLFVQNSKPHLSMKPTYFLGIDAAKHKMRAALSNRSEHVLFEKDLSVQATGLRQLLAAIKRQVNDPQQLLVLIEATGLLHLNWSAALTKAGYAVAVINPLIARRLYTLQNSIRDNKSDPIDARGLCTIGLLHGEKLLVHYRFSLRPEQFRLQRAQSVRKALRSALSNLKKTYQSLMDLSFPELGGLLQLDGVGIRQLLIQAPTPAAIAGKRLSTLEKNWMVRPKAAALKALAADSMADPDLAAASGPALVALLEAVAAMEARLHALDQQIAELACTSVDPQTKALIETIPGFGPVNAAKTLAWLPTEILHSGSNRKVAARLQAFMGNDPRLRQSGQWKGHTKMSKRGVEMLRTAFFQSAFSAAHNDPELRTYYQCKRAQGKTHEVALSHLMRILTRRLVAVLRSGKPYQSHYNLKNAA

SEQ ID NO: 478176 - protein, 338 aa, unidentified
MEQQREYVGIDLHRRRSVIVRITESGEVLETVRVDNDPLSVVRAVMHDDPNPEVALEATYGWYWAADLLQAEGATVHLVHPLGLHWDSRRVKNDERDATELAKRLLRGDLPEAWIAPPELRELRELVRYRAKLTALRTSAKAQVHAVMAKEGVLPTYGRMFGPAGQRLLDEMPVQGVYRDRVESLRHLLEIYERELVLVESHLSRRLKHHRGFLAIQAIYGVGPIMAAIFVAEIGDASRFPSARHLCSWAGITPSHRESDVKVHRGHITRQGNNLVRWAAIEAVARYHGGAPIEATFERVAKRRGTMIARVAAARKLLSLVYYGLRDGEIRCLSREAS

SEQ ID NO: 478177 - protein, 431 aa, unidentified
MLKINPLSTLYVGIDVSSKSNYVCALDFFKNKYINSSFANNQPGAEELALKILECLKEHPDITTIVAALESTSVYSIHIANYLSSCEELMRFKPYVFVLNPKCTANYKKSYIGLGKSDPIDAFVIADYARAGNIESEPWRGSQFLALKRLTRHRLHLVECMTREKTYLVSNLYLKFSELQMLEGDDQPFCDIYGATSSSVLMEYFSPEEILDSSEEDLIAFLAKKSRNRIKDISKTADLLKKAARDSYRLDKALYEPLNVSIASSFNCIETFKREIKVIDNAIEKEIKGLNPNAFIILQSIDGIGPVFAGGIIAEIGDITAFHSSDALAKYAGLTWKSNQSGDFDGEDTPMIKAGNRYLRYYLGEAANSMRKHNVEYGAYYRKKYNEVPKHQHKRALALTSRKFVRLVYGLLARNQLYSGVSLDTSIKDSN

SEQ ID NO: 478178 - protein, 341 aa, unidentified
MQVTTIGIDLAKNVFQVHGVDANERVVFNKPLRRSQVLPFFAKLAPCLIGMEACASAHYWARELKKLGHNVRLMPAKDVMAYVKRGKNDAIDAAAGCEAVRRPTVRTVPVKTPEQQARLMQHRVRDLLIRQRTQAINALRSHLAELGIVAAQGYEGLKVLLAIVADASDTRLPEDARASLSALVAQIASCQAEIGTIDKRLLAQHRKNVDSKRLETIPGIGVLGASAIVATVPDATIFKKGRHFAAWIGIVSREDSTGGKQRLGPISKQGDRYLRRILIVGAFAVLRRARAHPEKYPWVTQLLARKPAKVVAVAIANKTARIAWAVLTKKEIYRVQTNAAA

SEQ ID NO: 478179 - protein, 344 aa, unidentified
MDHFAGLDVSVKETSICIVDDTGKIVREVKVASEPEALLKVLGNPGYRFKRIGLEAGPLSQWLFSALAEAGLPVVCVETRHMRAVLKAQINKTDRNDARGIAQMMRVGLYRPVHVKTLRSQKLRMLLTHRKLLQSKAIAIDNDLRGTLRNFGLKVGMVGAVRFEARIWELVENQSDLAALIEPLLIVRRTLREQIVILHRRLLAIVRDDEVCRRLMTIPGVGPVVSLTYRATVDVPARFRKSKSVGAVFGLTSARYQSGEVDWSGEISRCGDEMMRTMLYEAAQSMMHSKKWSWLKAWAMQIARRRGMKKAIVALARRLAVIMHRIWVDGTEFRWTREQAAAAA

SEQ ID NO: 478180 - protein, 359 aa, unidentified
MTKAVKYVGLDVHKNTIAVAVAEDGKRGEVREHGEIANTPAALAKLLDKLGGSGVERHVCYEAGPCGYGIQRQVAAGHHCVVVAPSLIPSRPGDRIKTDRRDAVKLARLHRAGELTSVWIPDGAHEAMRDLVRARLAAVRSLRHARQQLSGFLLRHGHHYHRPAWTQMHRRWLSGLRFAEDAHDIVLEDYIATVDAAKERRDRLTVQIEKRLADWTLAPVVEALQALRGMAMVAAATIVAELGDISRFSKAEQLMSYLGLVPSEDSSGRRRRQGGITKAGNGAARRMLVEAAWSYRFPARISREQLLRQEQLTASVRAIAWKAQERLCLQYRKLSRAGKPITTVTTAIDYLLEQATKSL

SEQ ID NO: 478181 - protein, 326 aa, unidentified
MQGKEASEQETKVQSNVGIDISKCWLDAHVLPGDDRLRVANNCAGIRQLKRWLSHYRIALVAIEATGKWHRHLHRSLVASAVPVAIVDPYRVRMFAKAQGILAKTDQLDARVLALFAAMMAPPVRPVAPQVMVELAELVVARASAVEAQAALKNQFAAAESTFLKRQLDRRISRAGKDIAALDREILKRIKADASLARRYAVLTSIPSFGFAVAATLIACLAEIGSATAKQIGMLAGLAPVADQSGDRDGVRVIWGGRPAVRRVLYLAALSASRFNADMKAFYKRLIDNGKPSKVALIAVARKLVVLANTLVSEDRTWQPRAPILA

SEQ ID NO: 478182 - protein, 445 aa, unidentified
MHPQAPASPRLVNMNCSPSSAIQTEMKTNDYAAYLALDWGDSHHAFALQMADTQKTEKGQFAARPEAIHDWLKELGSRCSHGRVACAIEAGGDALVSALLEHKWIVFYPVNAAMSARFRKALVPSGAKDDVPDANVLLTLLLRHGDQLKPLQLDSAKTRELAALVLARRGAVDRRSQLGNQLRAVLKGYFPQALALVGDDIHGVMALDFLERWPDLATLQKARAATVQSFYVLHRVRRPELIKSRLELVAQAQPLTQDSAVIGPAVLQVQMLTAMIKTLQRHIARFDESIQERFAAHAESALFRQLPGAGPQLAPRLLVAFGDNRQRYPDATSLQKYAGLAPVKEKSGRQLWVHWRWNAPIFVRQTFVEWAGQTVVYCDWAGVYYARQKRAGKGHHAIIRALAFKWIRVLWRCWHRQEAYDEARYLTALRQRRSPLIQDLDLALS

SEQ ID NO: 478183 - protein, 333 aa, unidentified
MSLFVGVDIGASCVDVVICEEGKFSKPKQYKQSPDGHNSLVSAMKKRQPKCIVMEATGVYYFDLAVALTVAGLPVAVINPKSTKHFANIKLQNSKTDSIDAALLAEYGMRMEPRLWTPPDQHRQAIRSLGRQINRLTGSRAQAKNRLHAMKATRSTPSLLVEDEQEAIEVLDRRIDRLKQAAMELLEQSAGLKRLYTHFCAAKGIAEATALALLAELCVLPDHLKSAQVSRHAGLDIRLHQSGSSVHQASRISKAGNVYIRSALYMPAMSAVRFDPNAKAFYEALVARGKTKLQALVAVMRKYLTGLWACIKTDTPFDSSLLFSDCHAKNACV

SEQ ID NO: 478184 - protein, 336 aa, unidentified
MKKIFVGIDVSKQWIDVCVTTDVKSIWHRQFENNIRGFKAMIKWIKEFSNQLNEWLICMEHTGIYALPLWHFLTDKNISYCVVAGSVITSGLEIRRGKNDKIDACDIAKFTMRYRDELKPHRLPTQVLQRLKMLFGYRERLVKAKVLISVPANEAKKFAAKESKEVRTDSSSLVQIIEARIKKVEKLILEIINSDEQTAKCYELIVSVPGFGLVTACYLLIITQCFTILTRSRELSNFGGTAPHPHKSGKSIEGKTRVSPIADKKLKALLSRGAGSLLQYNEEIQRYAARMMAKGKHENLVRNNIKNKMLHMVCAVVKRGTPYIENYVSPYQQNVA

SEQ ID NO: 478185 - protein, 410 aa, unidentified
MRLCVGDDWAQDHHDIEVMDEAGQVLAARRLPEGVAGIGQLHELIGRFVPADGDAEVQVGIETDRGPWVTALLAAGYVVFAVNPLQASRYRGRRGVSGAKSDGGDAHMLADAVRTDAHQLRPAAGDSPAAEAVKVLARTHKTLIWQRSAVVLRLRAQLREYFPAAVAAFEDLDARDALELLGKAPDPARAARLTRAQVSAALKRAGRRKIAERADAIVAALRSPQLGQPAALTAAYAATVRSLTAVIATLNEQVASLQGQVEAHFGQHPDAEIYRSQPGLGQVTGARVLGEFGDDPHRYATAKNRKNYAGTSPITRASGKKKIVQARFVRNDRLIDALMLQAFGALRVSPGARAFYDAQRARGCAHNEALRNLASRLVGILHGCLKTRTRYDEAIAWGHRENIPQSDAAA

SEQ ID NO: 478186 - protein, 357 aa, unidentified
MRRYRLAVDKRKGEEGEQIFIGIDLHKIQWHVTIRSEEVELFNGSIPGNWDALKRVLDRYEGCRKQVVYEAGYFGFWLYDHLVDYGVDCVVTPPSLVPQEYGNHVKTDRRDSRKLAHLLAKGLLKRVWVPSPEQRYERQVIRRRKQLIGDRVRTQNRIKAELRFYGIDLPDPTGQWSKAYFGNLQHLRFDNHWMQESFARLLEEYQFLTQQIERQTKLLRAMAETDQYQERVKILRSTPGIGLISSMEYLLELQDVERFRRGNRLAAYVGLTPSQYSSGEKLRMGRITAIGKNDLRGTLVEVAWRLIAKDPAMREKYERIKIRAGSKRAIIAIARTLLLRTRRMLLDRQPYVVGLAA

SEQ ID NO: 478187 - protein, 421 aa, unidentified
MIPAVIERCAGIDVGRKFVVVCVMCGDAHATPTLEVRKFSMLTEGLEQLRVWLHQNECTHVVMESTGSYWKPIFNILDDGQLEVVLANSQQVKNLRGHKTDPNDARWLAHLLRHGMIRPSFIPDRDTRELRDLTRRRKKLVECAAEERNRVQRVLQEANIQLGMVLSDVFGESGLNMLDALMNPDASAEQIADLAVRTARKKIPEIRKALEGHRMTEHHRRLIRHSMEHLAFLEEQIAELDREIDDHTHSRPALKSATELVKSVPGIQQTSAAALVAETGADMGHFPSGGKLASWIGICPGNHESAGKRKSGQTRKGNPWAKRALVECAWSASRKKDSETKRYYERLKPRLQHKRALVATAHLMTLKVFEALSTGQPYQVDQQPELTAAKLRRLVRHHTHRLRRLNKWLQGHKKRHAQAPH

SEQ ID NO: 478188 - protein, 345 aa, unidentified
MELHTIGIDLGKTVFHLVGLNLHGEIVVRKKCSRKQLLNFTANLQVELIGMEACGGAHFLGRALQEQGHEVRLMPAQYVKPYVKTNKSDYIDAEAIAEAVARPRMRFVPIKSDDQMDLQSLHRVRERWVMRRTAVINQIRGLLLERGITLRKGRCHVDAALPGILEDTTTKLSGALRLLLAQLKLELDHLALRIDEADAVIKKTAGENEACQRLDAIPGIGPITATAIIAAIGNGAAFRNGRGFAAWLGVVPTEYSTGGKQKLLGISKRGNSYLRRLFVQGARAVMLQRTKQSPGLSTWLAQLTARMHPNIVIVALANKLARMAWAVLAKEEVYRRPALGHGTTA

SEQ ID NO: 478189 - protein, 343 aa, unidentified
MQTITTIGLDIAKSVFQVHGVDACGQVVVRRQLKRRSVLTFFQKLSPCLVGIEACGSAHHWSRELQAQGHTVRLIPPAYVKPYVKRQKNDAADAEAICEAVTRANMRFVPTKTPEQQSCLVLHRTRHLFIRQRTSVINAIRAHLAEFGIVAPVGRHGVEELLTVVADPNERRVPEIARACLLALGTQLRRMKEEILEFDRLIRALHRSNEMSMRLEEAPGVGPVLATALVAAVADPKSFRSGRNFSAWIGMVPKQHSSGGKNRLGNISKQGDRYLRGLFVAGALSVIRYAKIHGTKHRPWLTALLARRPTKVAAIALANKIARMVWAMMARGERYKEPVALAR

SEQ ID NO: 478190 - protein, 318 aa, unidentified
MARIICGVDVSSISLEAFVAPQGATGGFPNTVEGVSALLEFCQQQQVELVAMEATGGYEKKAVQMLWAEGVGVAVLNPRAVRQFARSLGLLEKTDRIDAQVIARFAAAKKCEPSVPASAEQQCLKALSRRLQQLSRLAADQKNQRHLVSEPRVLRTFDAVLKIAKQQMREVEAEIATLLASDPLWQKLEEALRSIKGVAGRTVARVLADLPEIGTLSNKAVSKLAGVAPLAQDSGKREGKRAVRGGRRNVRAILYVVAGVVRRYNADFAAFAERMAAKGKPKRVIRVALAHKLLIRLNARARDARAAFSCAGLVEQNA

SEQ ID NO: 478191 - protein, 345 aa, unidentified
MKYFAGLDVSLEETAICVVDEAGAMVREARIPSEPEALVAFFQGSGLVMERIGLEACSLSAWLHESLVAAGLPAVCIETRRAKAAMGAMPNKTDRNDARGLAQIIRTGWYRAVHVKSPACRSWRALLAARRLVLNKMRDVENGLRALLREVGLKLGTPTRKEFAARVRELTTADPVLSVLVEPLLTIIAAMTRELAQLTKRVLEIVRDEPVCRRLMGVPGVGPLTALAFRATIDQPSRFRRSRDVGAHLGLTPKRYQSGETDLQGGISRCGDELARTALYEAAHSLLIRSRKWSTLRAWGLQVAKRRGMARARIAVARKLAAILHRMWADGTEFRWGKDDAAVAA

SEQ ID NO: 478192 - protein, 356 aa, unidentified
MTSNIKYIGMDVHKESISIAVMNSVGKVVMESVIETKASMILQFIEGLRGDLQVTFEETTSAAWLYDLLKPHVTKLVVCDPRKNKSMREGNQNDKIDARRLAELLRLDHLTPVYHGEHGLRTLKELVRSYLTVTRDLARVKSRVKAIYRSWAIPCTGKQVYARCHRAEWLGKITEPGVRRRAEFYYLQLDALRVLRQDARRDLLAESKKHKAWKRLCEIPAIGPIRAAVLLGILQTPHRFRSKRPLWNYGGLAIEMHSTADHRSVNGQLQRSRKNVLVRGLNRNCNHDLKNLFKGAAAVASSKPGPFQEFDTALVAKGMRPEMARLTLARKIATIVLIVWKKGVCFDASHLKPQTA

SEQ ID NO: 478193 - protein, 497 aa, unidentified
MPTKSTIYSRCNPQLLKLFETAGHPAKVLCVALDYAKAQHTALICNGLGELLKPSFALDNTPQGAAKLLSEVRACLKPRKIRPEHVFFGGEDYPSYAENFLRHLRQEKFLVVRVNAWEAKQQRSNFQASSDSLDLLGIARCCLNRRGESVRDLPEAYPNLRIATRDRDKLVRMRTAVSNRIHSYVDRLFPGFLSEGNSGLEPFSKASLELMADRFSPAQLSRRPCQALAQWLGRRGVTQPRDTADQLKRFARNVLEPAPEQTLMLQQTLAQLVGLYRNLEQSIARIDREVAHWLARTPGAWLTSIPGFGITLAAGWTAELGPPGQWHSVRQLCSYSGVVPKSKQTGGPQKEPVVGAVQQRCNKRLKNVVLQAVGKVIRFGPEELRRTAQALEARGAHTEFALAKRLVRLAKYLALTGTVYRPKAMLDPATPKAALAAHYQTVWEKLLPKWRDKADLREVFAPEQPLGQWRKMVQQLYALELRLPQQKAAQKSSALAP

SEQ ID NO: 478194 - protein, 473 aa, unidentified
MARAARRPGARQPHKRHSSRARSAPLEQMHLNAAGIDVGATEHWVAVPEDRDEEPVRRFGAFTADLYALAAWLQQCQIETVVLESTGVYWITLFEVLEERGFDVKLVDAHYARQVPGRKTDVKDCQWLQELHTYGLLHGAFRPEDQVCVLRSYLRQRSMLVAMASRAVQHMQKALEQMNLKLTEVVSDINGKTGMEIIHAILAGERDPQRLASHRDRRCKHDQATIAKALEGHWRAEHLFALQQALEQYEFLQQQLQACETQIEACLQTFVTHVDVDTPPPAPARQRRARQRHAPGFDVHGYLAAMTGVDLTQIDGIDALTALKVISEIGLDMTRWPTGKHFASWLGWCPGNKVSGGKRSRMRSKPTANRAASALRLAAQGLVHSHSALGAYYRRMRARLGAPKAITATAHKLARLVYSMLRYGTAYVDAGQQAYEQKYRDRVLTNLQRKARVLGYQLVHVADPGSAQAAATL

SEQ ID NO: 478195 - protein, 426 aa, unidentified
MNERGGSRQHKKRCWAGLDWGGSGHAVSVVDDRRRVLASFAVGASLEDLESLSQRLRACGEVAGVAVEATRHPVVGHLLSAGFTVYAVNPKQSKNWRGCASVSASKSDARDGLVLAVELAGRHESLRPLRREDPAVAELAGLCEKVRDLVDERTALVQRLKATLGQYYPGALCFFSDWTSPVAWRFVKRFPRPKTLAQARKQTLCAFLKSNRVGLRPVWLERIEARGDAARWPLPADSAALEAVALATVAQLLALQPHIDKMDRLIAEQSKKVPQTTLMKSLPGAGKRLAPALAAMAALTTTGKKQNLEALRCVSGVAPVEDKSGKRQRVRARRRCNRHWRDVLYLFAHCSINCCDWARAFYDMHREQGDNHAGALRKLADKWLKIIHHMVEANEPYSDVRHVQSLRKHASWFPPEPGGKPGGKLH

SEQ ID NO: 478196 - protein, 371 aa, unidentified
MSTLLLQPTARQGRPAPPAGPPAGTPVIIAVDLARTTWVYVCRWAGAERRRLSAPAGLPPLQALVQSYQGQGCPVTVVYEACGFGHTIAWWVATQPPAEVIVVAPSSVEQAPGARVKTDGHDAGGLALKAERGMLRSIYIPPPAVHQARQLSRTYEQVCGDRRRAQVRLRLCFQEQGELGAPLRTAGWPALERWITAQLPTQPPAVQQCVTELLHQRAAAAASAQRLRTQLLALSRTAPYAPLVHALSAQPGVGRFTATRVVLELGAIERFPRAAALTNYLGLTPAEASSGDTVRRGHTRKCGPGAVRAWLLQSAWVAIRPGRDAALHAVFERLAPRVGRKRAIVAVARRLALRLRARWLATLATPPAANA

SEQ ID NO: 478197 - protein, 417 aa, unidentified
MITDREVAMDIIHRNCAGLDVHKKIVVAAILVEGRSKDIRSFGTMTADLLELSDWLMSRGVTHVAMESTGEYWKPIFNILENNFEVMLVNAQHISKVPGRKTDVSDAEWIADLLRHGLLTASFIPPVGQRELRELTRFRSTFVKERATLVNRVQKVLESANIKLASVASDVLGVSGRAMLKAIIAGTATTEQMAELSKGKLRSKREELSRALEGRVKPHHRFVLTELLSQIDSLEETIIRFDQEIEEYCRPFEEAVALLDTIPGVARQTAENIVAEIGTDMSRFPTANHLASWAGVAPGNNESAGKKRSGKVKKGNKPLGVILNQAAHSAAHTKNTYLSAQYHRLAGRRGKKRALVAVAHSILVMSYFMIKRHEPYCELGSDYFDRRRPETTAKRLVTRLEHMGYQVSLHQSSVPVS

SEQ ID NO: 478198 - protein, 338 aa, unidentified
MKYKRIAIDTSKHVFTLHGVDEQERPVLRRELRRGQVEAFFGKQDATEVVLEACGGSHHWGRLFSRLGHRVRLIPPQYVKPFVKRAKNDRNDAEAISEAASRPCMRSVVVKTVDQQADGVILKHREMLVSQRTQAINALRGHAAEFGVVAAKGIVKVAALLMELAADNAIPATARAMFEQMGAHIEALDQRVAAVDSELAALHKADPVSQLLAEIPGVGPLGAITMVLTVEPGNFASARHFAAWLGLTPKEHSTGGKQRMGKISKAGNERLRQLLFVGAMSVIRCAKPGGKSASAWLLQLLERKPRKLAAVALANKMARIIWAMMSRGEAYRRQPVAA

SEQ ID NO: 478199 - protein, 369 aa, unidentified
MADRITYVGLDVHKDSIVVAVAVGGLRGEVREYGRIANAPTALDRLLRKLGGDGMTLRFCYEAGPCGYGIQRRLSTQGHECVVVAPSLIPKRAGDRVKTDRRDAASLARLHRAGELTAVWVPDARHEAMRDLVRARLDAVHALRRARQQLSGFLLRQGCHYGRPAWTKLHRRWLAGLKFAQAVHHLVLEDYIAAVEAAAARRDRLTAQIEAMLPDWTLAPVVAALQTMRGMALVNAATLIAELGDLSRFANPRQLMAYLGLVPSEYSSGASIKRGGLTKAGNGAARRLLIEAAWCYRFPARVSRELLLRQEEQPKPIREIAWKAQLRLCARYRRLARTGKPANIVTTAIARELAGFVWAIARQVTVTTD

SEQ ID NO: 478200 - protein, 338 aa, unidentified
MELYAAIDLHSNNSVLVVTDSEDRVVFAKRLRNELEVIVTAMRTCRGEIRAVAVESTYNWYWLVDGLQAAGFDVRLANTAAVKQYDGLKHGDDFSDARHLAKLLRLGILPEGYICPRELRALRDLMRKRAQLVRQRTAQILSIQNQLARNTASSLAGHEIKRWEDCEVDALTLLDDQKRALKANLAVMRCLDEQVKGLERAILAKGKLREEFKGLKTVSGIGDVLALTIALETGDVHRFASAGKFASYARMVDSRRESNGKAKGVGNRKCGNKHLSWAFIEAAHYAVRYDPLVKRFYQRKCGKGLSVVAIKAVAHKLARACFHIMREGVPFDGPRAFT

SEQ ID NO: 478201 - protein, 347 aa, unidentified
MRFYTKQHQFYCGVDLHADAMYVCILNAVGEIVVHKNIPTKPKAFLRLIKPYREGLIVGCECMFTWYWLADFCADEGINFVLGHALYMRAIHGGKAKNDKIDSHKIAVLLRGGTFPLAYAYPAKMRATRDLLRRRNHLARKRAELIAHIQNTASQYNLPDPLGCVAKPSQREGLPQKFKDPIARGMIEIDLATIEHYDQLLGVLERQLEKVAMSHDPVSLALLKSIPGVGRILSLVILYEIEDIARFPRVQDFISYCRLVKPAKESNGKSYGHSGKRIGNAHLRWAFGEAIILMLKGNKPMQQQVQKMANRHGKGKALANLSARLGRAVYDMLKNQVPFDQELFLRS

SEQ ID NO: 478202 - protein, 410 aa, unidentified
MELLHPHCAGLDLHKETVVACIRHMVDGKVATDVKSFQTTTQQLMELSDWLSSQGVTHIAMEATGVYWKPVWHILSDGEFELVLANAAHVKNVPGRKTDVNDATWLADLMAHGLIRASFVPEEPTQQMRDLLRTRKQFVRERSSHTQRIQKTLEDANIKLDSVITDIVGLSGRRMIEALIGGETDPEALAALAHGRIRATKAELEAALRGRVTPHHRFMLQLHLDHLDAVNAAIARIDKEVEGNLEPFRVAIEMLTTIPGVSSLAAEVMVSEIGIDMSRFKTDGHLISWAGLCPKNDESAGKRRSTRMKKGAPWLKTTLIQCAWAASRTKGSYLQAQYLRIRSRRGGKKAIGAVAASMLTAAYHMLKDGTLYQDLGANHFDNRDKGKQALRLVNRLQSLGFTVQITSMAA

SEQ ID NO: 478203 - protein, 322 aa, unidentified
MQIAVLGIDLGKNSCSLVGLDGRGAVVKRRRMRPASVVGLTKALPPCIIAMEACCGAHHLGRLLEAQGHDVRLMSPEYVRPYVKAQKNDDRDAEAIAEAATRPTMRFVELKSEEQLDMQTLHRARDRLVGERTALINQLRAILLERGIVIAQGRRNFERELDAMLCEEQGLAVSPRLRMLIEDMWEEWRVLDRRIAAFDDEFAARAKNDEAARRLATIPGIGVLNATALAAAIGEGQTFARGRDLAAWLGLVPRQITTGGKPRLAGISKLIHGARAVLPTLSKSETPLGGWLRAASGARAQERRCRRLGQQARPHRLGRVAA

SEQ ID NO: 478204 - protein, 351 aa, unidentified
MLIIGVDYHPSFQQIAFLDQDTGECGERRLNHSDGEAEKFYRGLKLRGVRVRVGMEATGYSRWFERLLAELSVEVWIGDAAKIKTKRVRKQKTDRQDAQLLLKLLLENNFPRVWAPSPENRDLRQLLWHRHRLVQMRTRIMNQLQALAMNEGTRWKRSLWSEQGRSQLEKIRLAPWASRRRQDLLELLDRMNPTIAELTAAVEQEAKKRPEVLRLMTHPGVGPITALAFVMIIMTPERFPCGKQIGSYVGLIPCEDSSAGRQRLGHISKQGNALLRFLLVEAAQAAVRYDPDWRRRYLRLAMRRERRIAKVAMARKVAVRLYWMWRNGWEYSQSVEFGSHAGQLATGHGVK

SEQ ID NO: 478205 - protein, 350 aa, unidentified
MPMVADVVDAVIGGDTHKDTHTLEMATPSGVPMASIVVGNDAAGGAAALAWITDHALGPRIVVGLEGTRSYGIGLARALRAAGLTVVEVERPKRETRRGRGKSDPIDAHLAVLAVLRMHTDRLPTPRADGDREALRILLTARAELTDTYTRQINQLRALLLTGDDTDRAISRGRVTHDWLDRLIRRRGPGTETREQATRRAETRRLAQAIRDAHRDLTHNRDQLAAIITDLAPGLLDRPGVGPVSAAQTIVSWSHPGRCRSEAAFAALAGVNPIPASSGKTIRHRLNRGGDRHLNHALHTIALTRMRSCPRTHAYLTRRRAEGKTDRDIRRILKRYIARELYRTLNTIAA

SEQ ID NO: 478206 - protein, 400 aa, unidentified
MRSIGMDVHRSFAQVAVLDRGKVTEEFRVELDYDAVVAFGQKLRKDDEVILEATGNTSAIVRLLTPFVAKVVIANPLQVKAIAHARVKTDKVDARILAQLHAAGFLPEVWAADDDTLNLRRLVSERAALVRSVRRVKSRVQAVLHANLVPKYSGHLFGKGGRDWLSTAPLPKAERDLLARHLDELDWLKGKLEKLDGSMARIALDDSRTRKLMTIAGVNSVVATAVIAAIGDISRFPTPDRLASYFGLTPRVRQSGDRGAIHGRISKQGNTTARTMLIEAAWSAASVPGPLRAFFLRIKDRKGLNVAAVATARKIANLIWQLLTKEAPYRWARPAFVAMKMRKLELRAGAAKAHGPAGPARDYWIKEIRHREMELVAQAESAYAAMVEAWRDRPPKPQKS

SEQ ID NO: 478207 - protein, 340 aa, unidentified
MGNVTTIGLDIAKNVFQVHGVDADGAAVVRQRLTRGGMLKFFAKLPRCLIGIEACAASHFWARELVALGHDVKLMPAQYVKPYVKRGKNDAADAEAICEAVTRPTMRFVGIKSPEQQSAMMLHRVRLILNRQRTQLSNAMRAHLAEFGIAAPIGRNGIEQLLDVIADPTDERVPADARFCLEMLAAQLRIVKEQILENDRRILASARETELGRRLMEIPGVGPLLASAIVATVPDPAIFRSGRNLAAWIGLVPRQNSSGGKERLGSITKAGHQYLRQMLIVGAMAVVRYAERNGAKRPWLVQLLARRKAKVAAVALANKNARMIWAMMASGERYREPQIV

SEQ ID NO: 478208 - protein, 411 aa, unidentified
MELMQKKYWAGIDWGDTQHTLCVVSTEGEAVFSSCVPHSASGVTALVEKVQSVDGLVGIAIETVRHVLVDALLKAGIPVYPINPKQSHQWRLCESVAGPKNDVRDARSLANGLRLYVKGLRALQPDEAHVRVLAMLCEHEQHLIEQRTALVCALQAALKAYFPAVLTWFPNWALPSAWRFVQAFATPEALAQASKQKLCGWFKTHRFALTPERLRRIEQRQDVLALTADPVMHEAHGLRTVALASELLALESGIAQHRQQIEALYPQLPAAALFSSLPGAGRKLAPRLLCLFGSDKDRYPCAHNLGLLAGTVPIEFESGGKCCVRFRRGCRKNYRNTLHQFAWVSVRYCGWAKAFYQKCRREKQSHALALRNLATKWLHIIFRMWKENAPYDEQRYLDALKKANSPLYQLL

SEQ ID NO: 478209 - protein, 363 aa, unidentified
MTSIALDRGDVVVGVDTHKDQHVAVALDGVGGRLGEPLVIDATNDGYAELLAWACGLGSLHTFAVEGCGSYGIGLARFLRRHGHPPVEVARPPRAGERRASGKSDAIDAEHAARLALAGTGLVTPKLADGQIEAIRLVKIARDTAVKAHSTAIITLKAVLVTADQDLRDELEPLSDFKLMTACAALEVAGDLADPDVAMRHTLVALATRWFDLHEEIKIHSKHLKALTQAAAPQLLEAFGVGLDIAAQILITAGDNSERVRNEAAFAKLCGVCPIPAGSGKTNGRHRLNKGGNRQANAALYRAVIVRMRWHAPTIAYVERRTAQGLSKKDIIRCLKRYVARELFQLLPPVNSRPATPELRVAA

SEQ ID NO: 478210 - protein, 316 aa, unidentified
MSISETFIGIDVSKEQLDCASRPNGTTSSFKNSVTGIDALIKQLQEQRPRLVVLEATGGLERALVAALVVAQMPVVIVNPRQVRDFARAVGQLAKSDRIDAAVIAHFAEAVKPEVRTLPDQLTQEMDALMKRRGQLVSMLGVERNHLVSATSPVSNHVKEHISHLEELIKRLDQEIDQMIGKSPIWKAKDELFQSVKGVGPVLSRTLLAELPEIGQLSRQKLSKLVGVAPLNNDSGKRKGKRSCWGGRSGVRAILYMSALSATRFNPVIKEFYQRLLAKGKTKKVALVACMRKLLTILNSMVKNNTPWDPSFAQRG

SEQ ID NO: 478211 - protein, 337 aa, unidentified
MEQQTQYVGIDLHRRRSVIVRRTGAGETLDTVRIDNDPVALAKELAKAGEHPEVILEACYGWYWAADVIQECGGNLHLAHPAGNNWGNRRVKNDERDATDLVDLLRLGRLAEAFVAPPPQRELRELVRYRAKLVHLRTSLKAQVHAVLAKEGVPVPMSDLFGVGGRRLLDDVHLGDAYRLRVNSLRDLLGHVDREIELVENQVAPIFAGDLGYHAVQAIPGVGPVLAAVFVAEIGDISRFTSARHLCSWAGLTPKHKESDVVVRRGHITKQGSRLVRWAAVEAVARQSTDSPIRRHHRQVGERRGTKIGRVAAARKLLILVYYGLRDGEIRCLAQAE

SEQ ID NO: 478212 - protein, 402 aa, unidentified
MAGANLGCHTSGAVWPDWELSPDALTQYMRGTTDCRLCRQAESTGRKVIDLQASFTPAKEVVVKMLYDRCAGLDVHKKSISASMRISKGRQTTVETGSFGTFTSELERLRDWLQKHKVKHVAMESTGVFWIPVWNVLEQSDGKFELTLINPQHVHALPGRKTDRKDGQRIAELLQYGLLKGSFIPPPAVRELRDLTRRRAHLQGERNRVINRIRRLLETVNIKLGSVVSDITGKTARLILSEICRGNCTPEELAKLAQASLKNKRAEITASLKGFYSDHFRWLLNEAMQDLAYLDRKQQPIDVQLASRLRPHADLIHRLCTIPGVDFTTAVVILAEIGFDMSRFPDAAHLVSWAGVCPGNNESAGKRFSGTVRKGNRYLRRVLTQSAWAIAHKKDCFLTSLF

SEQ ID NO: 478213 - protein, 408 aa, unidentified
MNAVGIDVSKGKSMVAALRPKGEVALLPQEFLHTEIGLEQMAYAIIALGEDTRVIMEATGRYHEPVAAALYEYGIYVCVLNPLFIKQSGGGSIRKVKTDKADAMKIAKYGLDNWVDLREYTPMDTVRQQLKLCSRQYNLYMKMVVSLQNNLISLADKTFPGVNELFSSPERADGHQKWVDFVMTFWHCDCVCRVSEKAFTERYQKWCKRKGYHFSAEKALDVYAGSCGHFTTLPKNDNTKLLITTAAQQLLAGKMTLAALRAEMTRLAKQLPEYDTVRAMYGVGETTAAQLMAEIGDVRRFPRRSSIVGFAGVDPAVNQSGKHSAKSVPTTKRGSPHLRKTLYQIVCTYLKKSPADEPVYQFLDKKRVEGKPYFVYMTAAQNKFLRIYYARVKECLEAFDARQSLAQS

SEQ ID NO: 478214 - protein, 338 aa, unidentified
MELYAGIDLHSNNSVVTVLDEQDRTVYAKRLPNDLDAIVASLRTCAGTMRGVAVESTYNWYWLVDGLQAAGFTVHLVNTAAVKQYDGLKHSGDFSDARHLAHLLRLGILPVGYIYPREERAVRDLLRKRSQLVRQRTTQILSIENLMARNLGTRATGNEVKRWEAKNINAMELLDEQKQALKANLAVMKCIDGQVDRLERSILAKAKLREDYKALKTVSGIGEILAVTIALETGDIGRFAGPGNFASYARMVDSRRESNGKKKGEGNVKCGNKYLAWAFIEAAHFAVRYDATIKRWYQKKCAGSLSVVAIKAVAHKLARACYHVIKDGTPFDAAKAFG

SEQ ID NO: 478215 - protein, 332 aa, unidentified
MKTQIEIQVKNQNIETYIGVDVAKATLDAYRTHDHATRQFPNSKEGFKQFLKWSKEMPPTLVLCEATGGYEKNFVIALANAEVPFRVANPARVRDFAKSHGILAKTDKLDAKVLAKFAAERSLEPQKLQVETQRRLKELIGWRRQLIKARTMHRNQLEHAADKMVVKGTKLLIKQLNKQIEKVEAELNQLIDNDPQLSNFNDILQSIPGFGPEMARTLIVELPDLGKGDPAKLCSLAGVVPLNCDSGKFRGKRRIYGGRGTIRTVLYMAALSAVKCVKADNVFRQLYLRITATKPHKVGMVAVMHKMLIIAHALVKNNEKWKNKMVKKITEN

SEQ ID NO: 478216 - protein, 325 aa, unidentified
MRSLGWDVHKDFAEVAEALPGGIVRQLGRVRTTPDALRAFAEQLGPDDQVALEATINTFAIAKLLGEHAGRVVISNPLRTRAIADAKIKTDKVDAGVLAQLLAADYLPAVWEPDETTQQLGRLVARRAHIVRQRTRLKNQIHAILHRNLVSGCPATDLFGKRGRRWLADVPLPEDERDALESNLRLFDLLGDELNRADAACARAASGPEDVRRLMTVPGIDFAVALALIAAIGDVHRFASPQKLVSYLGLDPRVRSNPATDHRWRTCASPRLAGRTRRHAGRGGLGGCAHAGTLPRLLRPDSVATRTGRLRSSHSRASWARWCGI

SEQ ID NO: 478217 - protein, 346 aa, unidentified
MKNTIVGVDLAKKVIQVCITQRNKVISNKELSISQFTHWLVTSKPVTIIFEACSTSNYWKQLATEHGHDARLISAKLVSKIRQNQKTDANDALAVVQASQLVDIVFISGKTFSQQELQSLMRMRELSVKQKTALSNQLEALLLEFNIRVSPKQGGLRGVVEATLEDAENGFCSQFREGLDLVWQSYVKNITNIRHYDKLLAQTLKKHPDCKKLMALEGVSVINAVNLYIAIGCKDLGVFKTGRDASACIGLTPIQHSTGGKAQLGTIGKNVKNSSLRSLLIVGAMSVVRQLSNREARTEKEYWLKQLMERKSKKCAAVALANKTVRTAFALLTQGTEYKAQPLIAE

SEQ ID NO: 478218 - protein, 394 aa, unidentified
MAFKIFRKNCCGLDVHKTWIYACMGITDTNGRTEYKQARFSSFTKGLQELADWIAKYDCNDVCMESTGKFWIPVFNILEKTCWVTLAYPKYTKPQKGNKTDHKDAKWICDLYMCDMVNPSFIPPPDIRQLRDLMRYRSKLTNIMTSEKNRALNCLTVSNLKLDDVFSDVFGKSSRSVIRYILEHPGETFQVAPFIDRRCKHPVEEIQAVIDGTISHQQAVKLRECLQHLDELEVHKTNVEKEILCLVQQYPYQLELLQTVPGFSGNIMTAIALISEIGADMSVFPSAKHLISWAGCCPRNDQSSKKVKSTRIPRAGVYLKPLLVQVAIQPFTANADKLSAAGALEIRCQICDGRFLSMWAALFIFLGCPLPPCPKNLHVHNGRIVILASVAWIF

SEQ ID NO: 478219 - protein, 395 aa, unidentified
MLSHLSLTVNGNQSPSRMNVGIDMGRRKWAVNVLDTATGRHHGHMFTGPDCARNTYELIRNLKLSGREVDVIYEAGRNGFTPARELAALGADVTVLPVNKLEVVKAGKKAKTDGLDAYTMSERDARAAGFPRVWVPSVEDEVRRRMTRERDRLLEDIKRNNNRILSILERWPVGYSGGHRAAEGWRVEIKIWRRSEAIPGRLPEGECRCIEAMVREIGTLEKNLAAWEKRIDAELARERQQAKELGIPCAPDILMQYKGIGRLFAVGLCWYVGDFSRIRNGRKMASLLGLVPMPWDSGTKTRCQGISKAGPSDIRRLMIQIAWLWSRHQPDSSITRKWLPKLQQKGAVRRKAIVAMARQLSVAFLRLINENIELEGAVKNLPLALSPARPGSPMA

SEQ ID NO: 478220 - protein, 454 aa, unidentified
MAQCAPSSSMPVIHPNAAGIDIGSQFHVVAVPPDRIAKSVRTFKSFTGELHAMAKWLKKCRVDTIAMESTSVYWIPAFEILESYGFEVFLVNAREAKTVPGRKTDINDAQWLQKLHQFGLLRASFQPSKEVAELRAYVRQREKLLEYRAAHIQHLQKSMMQMNIQLHHVVTDVTGKTGIDIIRAIVRGEHNPDELVKLRDAHCKNSVEVMKAALTGSYKSEHLFSLTQALELIDIYTEKIEACDRVIESTLKRLQQEGDSTPPALPKPRSKSASKNTPGFDVRQALFSYTGVDLTQIHGIGSAVALKLVAECGTDMTKWPTSKHFTSWLCLSPCNKISGGKILSSRTRRSSSKVAMSLRLAAVVVGKTNTALGATYRRLSARIGKAKAVTAIARKLAILFYNALRYGIEYVDKGANYYEEQYRQKVVSNLKRRAESLGFTLQENAQTLSAAGVS

SEQ ID NO: 478221 - protein, 361 aa, unidentified
MRIIGCDLHARQQTLAMLDTVTGEVVNRTLMHEGKEVREFYSELSRPVLVGIEAIGPMQWFLNLLEELEIECQVGDATKIRAAEPRKQKHDRRDAELILKLLVEKRFPAIWMPNKELLDLRALLLHRHQWVRLRTQVQNALQAIALANGLRRGPSLWSYDGQAKIAFLPLPPHTSLRRSALQALYRHMDEEIEKLTVQVAEQAEQRSGTQLLMTHPGVGPVTALATDVFLGDPQRFDDGKSLASYVGLIPQERSSGRRRRLGKISKQGNPLLRFLWNEAGVHAARRDPELKRFYRRKLVQKGMGKARVAVARKLGIRLWIMLRDQIDYQEFCRRGQKQQSGAVCAGMPEVGLGANSHRPVD

SEQ ID NO: 478222 - protein, 403 aa, unidentified
MNAVGIDVSKGKSMVAALRPFGEIVAKPFEVPHTSSGFHQLVDQLNSLDGSTRIIMEHTGRYYEPMARWLSDSGFFVSTVNPKLIKDYGNNTLRKVKTDKADSVKIARYALDNWQDLRQYTSMDIIRNQLKIMNHQFSFYMKQKTSYKNNLISLLDQTYPGINDFFDSPARSDGSQKWVDFVSSFWHVDCVRSLGLAAFTERYQKWCKRHGYNFQPEKPAQIYSFSKELISVFTKDPVTKFLVKQAVEQLNTVSFTVEQLRLEMNRLAAQLPEYQVVMAMKGVGPSLGPQLMAEIGDLSRFSHREALTAFAGVDPGVNQSGTYEARSVRTSKRGSPQLRKTLFQIMDVLIKSAPSDDAVYRFLDKKRSEGKPYYVYMTAGANKFLRIYYGRVKEYLAALPKPE

SEQ ID NO: 478223 - protein, 315 aa, unidentified
MNTQKLVGVDTHKDTIACYCDGKFKEFKTNTKGFNQAIKWAGKANWAIEGAYCFGRAFTAHLIKNGCEVYEINPLLTKNWRGALKVSAPKNDYGDAKVISIFANTSNLEKISLKTGKLKEKLSARKALVKQKTKTTNFIKMLYFTRGEQLPFKKLDTKKAVNYLINSDDIIIKTNGKILKEVIEGIKLVEKEIEKEMPKKAGKLMQLKGISFITASTIYTETKGKITESAKLANYCGVAPIDCSSGKTTRKKNNKSGNRILNSVFYSLSIAQKRYNPVAKAYYEKKISEGKTPRHARKCLARQLVNIVFKILKED

SEQ ID NO: 478224 - protein, 402 aa, unidentified
MNAVGIDISKGKSMVAIMRPYGEIVSAPFEVKHTSSAINSLVALINSVEGESRIVMEHTGRYYEALAHQLSQANLFVSAINPKLIKDFDNDSLRKVKSDKADTVKIARYALDKWQNLKQYSVMDELRNQLKTMNRQFSFYMKHKTAMKNNLIGILDQTYPGVNTYFDSPARSDGRQKWVDFASTYWHVDCVRKMSRNAFIGHYQNWCKRKKYNFSQLKAEEIYGKAKELVPVLPKDDITKLIIKQAVDQLNSASTTVESLRTLMNEIAAKLPEYSIVMAMKGVGTSLGPQLMAEIGDVSRFTHKGAITAFAGVDPGVNESGTYVQKSVSTSKRGSSSLRKTLFQVMDVLIKTHPQDDPVYQFLDKKRAQGKPYYVYMTAGANKFLRIYYGRVKEYLASLPES

SEQ ID NO: 478225 - protein, 357 aa, unidentified
MVKVLGVDVHKGSHTVVAVDEAGRQVAQKTVRATDAGHRQLVRWSRQLGSVDRWAVEDCRHVSGRLERALLAAGEAVVRVPPKLMAGARAGGRTPGKSDPVDALAVARAALREPDLPIACHDGPSRVVKLLVDRRDDLVGERVRAQNRLRWHLHELDPGLDPPARALNSTKELDRLAGWLDGYHTEAPGESALPLVARLAADIIADIRGLTVRINALEHEVTTLVRGLAPQLLQLPGCGPLTAAKLLGETAGIGRFRHEARFAMHAGVAPIPASSGKTNRHRLARGGNRQLNVALHRIAVTQVRLDGLGRTYYQRRRAGGDTTMEALRALKRRLARVVFNLLQDHQPAQPDLLPAAA

SEQ ID NO: 478226 - protein, 414 aa, unidentified
MLCVGIDWAVESHTVTLLTRPGEVLESLVIANTLKGFLSLLDTIRRHVGQDKPAPTPGDVLFIIEDRNQRLVDFLLAQDFIGYLMEPSRMPGYRLRYRSSGNKTDPDDAFILADVLARDRDQLSTINPMSTTVQTLKTLLLDREGFVRDQTRLTNRLIACLRQYYPEALELFSDVAGKTALAFLTAHPDSAAAHRLSREQTQQFLAEHHCNRAKQLERMMVVLSQEPITVPAAVIETKRRLALHIIQQLQAVQATVAEYDAEIQRIGAENAEVQRFKGLPGAGPQIAGGLYTLFGDDRTRFRSAMATQSFVGTAPRTIQSGKTRSVCFRFGRNRFYQTLAQRLALGALRVSAWAKQYYRGKRAEGKRHQHALRCLANLLMKIAFAIWRDRTTYDENRHLAQIMRHQLRQKSSMA

SEQ ID NO: 478227 - protein, 402 aa, unidentified
MNCVGIDVSKGKSMIAVMRPFGEVVVSPFEVRHTANELSELAGLLKSLDGETRVVMESTGNYHAPVAWLLHDAGLYVSVVNAMLVHDYGNNSLRRAKTDKKDAVKLANYGLDHWLTLPRYAPEEDTRLMLKTCYRQYQQYSKVQTMLKNNLISLLDTTFPNANRLFTSPPRADGSEKWVDFVAAFWHCECVCGLSEKAFTAKYQKWCRKHGYNFSEDKALDIYASACGHFGVMPKTDTAKLLVEQAVSQLRTTSTALAALKHEMKSLAASLPEYPVVMKMFGVGPSLGPQLMAEIGDVRRFHSKKALVAFAGIDAPPYQSGQMDIRSRSISKRGSSSLRRTLFLVMGVILQCAPMNEPVYQFMDKKRSEGKPYRVYMMASANKFLRIYYASVKTYLDSLEHD

SEQ ID NO: 478228 - protein, 413 aa, unidentified
MDVIVERCAGIDVHQAQLTVCARLPGADGIRVEELASFGTTTPDLLALADWLGAHGVTQVAMEGTGVYWKPCYWVLEESFELWLVNAQHVRNLPGRKTDSKDAAWLCQLLEHGLLRKSFVPPPEIRDLRDLTRYRKALIRQRAAEVNRLHKVLEDAGVKLSSVASDIMGVSGRAMLEALIAGTSDPEVLAELAKTRLRKKLPALRKALDARFRDHHGFLVAQVLAHVDYIEEAIATVSERIDAAIASFEPAVKLLVTIPGVQRRTAEVVIAEIGTDMSRFATSRHLASWAGLSPGNNESAGKRKHGRTTKGSPWLRTALVEAALGATRPPGYLRAKYWRVRGRRGHQRAVIAVAHSLLEIIHHVLSTGELYTDLGHDYFERRQADYLRRRAIRQLERLGHHVTLTEAPTLQPT

SEQ ID NO: 478229 - protein, 347 aa, unidentified
MNLSRAGVDIAKSVFHVHAVDCHDQPKWRAKLKRADWLDAVCQHLAPGAEVGMEACASAHHWARKLQERGFRVKLIGAQFVKPYVKSNKNDRVDAEAICEAMSRPGMRFVAVKRVAQQDTQAAHRIREELVGQRTAKANQIRGLVGEYGIVAPQGIQQLRRVLPDWLEDAENALTADFRSLLADLAEDLRYLDDRIAQLDERIAQRVKEDPVARRLLALRGVGPLTASALAGALGDAQAFNKGRDFAVSLGLTPRQHSTGGRDRLLGISKRGDAYLRKLLVHGARAVLRHAKGRDDALSQWLQALTARKHPNVVIVALANKTARVAWAIVHNATDYDPRLVAGTAAN

SEQ ID NO: 478230 - protein, 429 aa, unidentified
MNYTQNDKIEQVTDTTLVVGVDIGSQTHYARAFDNRGRELCRKVFTFHNDLEGFNSFYDWAEKLKAENEKKDVIIGCEPTGHYWFAFQNYVAIHQMLLVIVNPFSVKKIKELDDNSPKKTDAKDPKTIAKLVVDGRYSIPYMPEGIYAEIRDLVYSRDRIMKQYNISANRIQRWLAIHFPEYLGLYSRFDAASGLAVLEKAPLPKDVIALGVEGIRRIWHDKKMRGRGVTEDRAKTLVEAAHNSVGLDGGIGTRSELYMLLEENRLWASQLEAVNAVLEETVLKVQYVEKLLAIKGVGSVTIAGFIAEVGDIRRFKSPKQIQKYAGLELVENSSGKHKGRSRISKRGRRKLRKVLYQVMIPLLARNQEFRQIYDYYVTRVKNPLKRRQAMVAVSCKLIRVFYAVLTKGIDYDRFKMMTDIHRNDELIAA

SEQ ID NO: 478231 - protein, 341 aa, unidentified
MNIITVGIDLAKNVFAAHGVDDNGKPALVKPKVARADLLPLIAQLPPCTIGMEACSGAHHWARLFRQYGHTVKLMAPKFVAPYRMTGRRGKNDAADAAAICEAVTRPNMLFVPVKEEHQQIILSLHRTRQGFVEERTASYNRLRGLIAEFGIVLPQKVICLRREIGAHLEDLPGYANLCVGDLLSHTAELDTRIAEYDRLIARAAKEDAASRRLMQRPGIGPVTASALLASLGGGHDFKNGRQVAAWIGLVPGQYSSGGKARLGRITKAGDNYLRSILVMGARAVLNSLGDKQDRFSRWARSLQERRGYWRAVVAIVAKNARIAWAVLKYGEDFKLEPVNI

SEQ ID NO: 478232 - protein, 417 aa, unidentified
MPSPLFVGIDVGSETNVVCCLTRDDEKRPLSRFTFTNNRPGILEFQDRIQKLVHKQGFETILFGLEHTGCYSTHAAIYIHRHLDFGMRDKQVYVFNPSLIKEFKKSHFLDAPKNDRVDAWYIAAKLRSGHLPHPFTWSEPLMALQRLTRARFHLMQDLTRESNFLMTNLFLKFSDYTITGPFRNNKLSATSLAVMEEFESVEALVEMPLDKLIEFLVLHGKNRFDDPEAVARALQKAARSSYRLPQAMADSVNLAMASSIRVIRTVQEQLKALKKGIEDHLKTIPQTLDSVPGIGPIFASGILSEIDISQFQTHKELAKYAGLAWTEHQSGKFTANRTRLIRSGNRYLKYYLIEAANSVRVHDPVFAEYYAKKKAEPKEFAEKRALALTARKLVRLVFYLLKTNRLYDRKGGIRQHM

SEQ ID NO: 478233 - protein, 356 aa, unidentified
MAIVADTYTYVVGVDTHAATHHYAIVETRSGGQIAHGKFPTHAAGLLRAVDWISRRTSVDDNPAVDQVLISMEGTGSYGAQAAELLAARGYRVVDAPSPKRARGSGKNDHIDALVAARGALPKDSERLADRRAGHTRAALQILLTARDSMRRDRTRSKNQLTALLRTHNLDIDARKGINKVHISLIAGWRKRPTDTTLARIARTEAHRLATRIHTLDADLDSNEKAINALVRELEPTLLDLPGLGPINAAIVLAVWSHPGRIHDEAGFAKIGGVCPLEISSGNSKDHRLNRTGDRQLNSALNSIANTRMRHDETTKAYVKKRKQQGQTKPRIRRCLKRYIARQIFRHLNTTTLDKT

SEQ ID NO: 478234 - protein, 376 aa, unidentified
MLTSFTSQNSDDVDAPALTDSAWYEPVSKAERGAFKMTITTIGLDLAKSVFQAHGVDESGATVLVKKLHRKQMLPFFSKLAPCLVGVEACGTAHYWARTLAAMGHEVRLIPPSYVKAYVKRGKSDALDAEAICEAVQRPTMRFVPVKTVEQQAILMIHRARSLLVRQRTMLANALRAHLAELGFVANPGIANLAKLAEQVMADKNALPAYARTALEMLIRQIMTISGEIEVLDRQLTVWHAESEASRRLAAIPGLGVITATALVATVTDPDQFRSGRQFAAWLGLTPRQHSTGGKTRLGGISKQGDRYLRRLLVVGATAVMRHIKDKPTPMADWIRKLLEKKPFRLVSVALANKLARIVWVVLTRKEAYQPYAHLT

SEQ ID NO: 478235 - protein, 326 aa, unidentified
MVDQHETVNILGADVSSQEIVVAWARSNQPIQSIGNNRKCILAWLKTLPANTVIGMEATGRYHHWLADCAVTHGHTTYVINPKHLAHYARGVGQRGKTDPLDARVIARYVDRERDRLHPYVVPSELQRNLRNLLSQRAGVIKHSGAIRQNLQATHTGSSAALRRAAQQVLNSMVAMIDAIDVEIKRAVQNHATLEAKRAQLQTITGIGFLNSVALTHRFDRTPFANSDAVVAAYGMDPRPKDSGQKVGKRRLTKQGNPEDRRLIYLAAQSASKTKLFKPLYLALLAKGFATTEAIVILARKLLRIAFAVWTSGKSFDPAKIGFKGC

SEQ ID NO: 478236 - protein, 320 aa, unidentified
MQTIVATPLYIGVDVSKDTLVSCVHSSGVRRTLANQRAAIEAWLSSLPAGSRIGMEATSTYHELLADLAQRKGMLVYVLNPKDVRHYAKGVGMRGKTDRVDAALIARYIAHEHAKLHPYRPPTPEQRQLQRLLTRRAKLSRSRAGVQQSVQGLPGLKIALRSLLERFDALIAVIDARIQALVHACPQRLAHCQRLRQIKGVGPVVGPALLNTLERFGFKCADSFVAYTGLDPRPDDSGKRSGRRRLSKHGPSELRRLLYTAAMAAVTSPAWKPLYQHYLDKKLSRTEALVIIARKIARTAWSVYTHNTTFDPQRLTSGLT

SEQ ID NO: 478237 - protein, 443 aa, unidentified
MICAEIERCAGIDVGKERLAVCVMVGPLAGEPRVEFREFGTVTAELVRLRQWLQAEGVTHVVMESTGSYWKPVFNVLEDSVRVYLANSQEVKNRKGHKTDKKDSWWLAHLLRHAMIRPSFVPPRGLRELRDLTRRRRKMIGVATSERNRVDKILQDANVKLSSALSDIFGVSGQLMLEALLKGKAQPAEIAQFAQRRAQRKIPQIMAALEGHRMSDHHRQMIRYSLEHLRFLEDHLSELDEQIVAKIEALGYTPQWQLLQTVPGVKENSAASVLAEIGPDMGQFGSEKNLSSWAGVCPGNNRSAGKNKGSKTTKGNRWLRDVLTECAWGVSSKKNCFLKEKFWRIATKKHRKPPATMAIAHTLLVLCYQVLKSGQPYRERGLPVMDEKQRNRLICHHMRRLGKLGIRVRSLAVAEDSRKSKRKTTAADRNRLTDRAKTRGNRN

SEQ ID NO: 478238 - protein, 315 aa, unidentified
MQTPLDIGADISKDYLIVACTQHSFERLKLANQRAVLLAWLKKLPAGSRIGMESTGSYHELLAHLAYRLGLSVYVLNAKDVRHYAQATGQRAKTDRVDAALVARYVAKEHEHLHLWYPPSAAQRQLQRLMRRRAKLTSTRCTIRATFKDVASLRTHSRALLKGFDALIAKLDAQARELIKADAEREQAFQRLDAIPAVGNAVGVGLLASLERWALPRADAFIAFIGLDPRPEDSGKKSGRRRLSKRGDPELRRLLYVAAMSASRTRVWAPLYQRALARGLSRIEALVVLARQIARTAWSIYTHKTHFDPQRLQTA

SEQ ID NO: 478239 - protein, 420 aa, unidentified
MDEITEEPGALVERVAALDIGKATLTACIRVPHEDKPGARRQEVRTCATLTPALLELRDWLICQGVTLVVMEATSAYWKPPFYLFEDDIECWVVNARDVKNVPGRPKTDKLDSVWLAKLAERGMLRASFIPPRPQRQLRDLTRYRRTLTQERTREKQRAEKLLEDAQIKLSVVISDIFGKSGRAMLDALIAGQRNPHALAALAYRNMRAKTSVLQEALTGHFTDHHAFMLGMMLARIDALTTQIDTLTTRIGQAIAPFAAQVAQLDEIPGIGITAAQDLLAEIGTDMSRFPTPGHLVSWAKFAPRARQSAGRSKAASTGKGNPWLGGTLGEAATGAARTKTFLASRYKRIVRRRGKQRALVAVGNSILTITWHLLSDPAAHFTDLGPDWHDRLAPLRRKRQLIAELERLSGKKVTLQDTV

SEQ ID NO: 478240 - protein, 404 aa, unidentified
MNSIGIDVSKGKSTVVAVKPFGEVLKKPFDVLHNTSELRELVDTIKSFEGESRVVMESTGIYHLPVAKVLCDAGIFVSVVHPKRIHSYDNDSIRKIKTDKADSLKIANFGLDKWDKLMRYEPEDDVRQSLKTFCRQYHHYSDLKTNLKNNLIALLDQSFPTINTLFGSAPRKSDGHEKWIDFAEKFWHIECVLGLSIRKFCEIYQKWCKKAGYNYSVSKATQIHETARSCFGVLPKSDSTKLLITLAVSQLNTIAETQATIANEMIRIASTLAEWSIVTQMFGVGEILASKLIAEIGDAARFENKRSLVAFAGLEPPPYQSGQFESKSRRISKKGSPHLRKTLFQVMRTLIQHQPEDNCVYDFLDKKRKEGKHYYVYMTAASAKFLRVYYGKVNEYLNLLHNTA

SEQ ID NO: 478241 - protein, 322 aa, unidentified
MENEQQKPVVEFDQIVLRGCGLDVHEKTVVATIDGQGLRRETRTFDTFTSSLNELRSWLKQYGITHVAMESTGVYWKPIFNILEDSFEVILVNARHLKNVPGRKTDRIDSQWICKLLLGGLLKASYVPEEKIRQLRDLSRYTGKLIQQLAAEKNRVQKVLEDANIKLSSVVSDTSGAVATRLIDGLIAGRQDLVQLIAESYHGRLKASKAELLLALTGRVTDHHRFMLKQIKNHMAWLETEIAVLEGQMDKLLEPDQESIELLTTIPGVDKAIARKIVAETGTDMEVFGSEKKLAKWTGICPGNNESGGKKKADEPPTATST

SEQ ID NO: 478242 - protein, 362 aa, unidentified
MKKHNTRKQAKKLGQTIGLDLGDRTSRYCLLDRAGVILTEGSVAMTKKSLAQQFGSLERSRMALEVGTHSPWVSRHLKALGHEVIVANSRRVRLISESSHKNDKMDARTLARLARVDPELLSPIQHRSEQAQEHLTVIRARAALVEARTRLINTVRGLSKASGERLKSCASGQAGRGLLEQAPAGLQTALNGLLETVETVNQQIGKYDGLIENLAEQHYPESARLQQVSGVGTLIALTFILTIGDPYRFGKSRDVGCYVGLRPRQQDSGQSQPQLSITKEGDRYLRQLLVQGAHYILGRWGPDTDLKRWGLRRCETGGKNAKKRAIVGVARKLAVLLHRLWVSGEVYEPLRNSLARAAGSVA

SEQ ID NO: 478243 - protein, 404 aa, unidentified
MRRCIGLDVHRDFAQVAIWQDGVVRDAGRVATSPEGLRAFADTLAADDEVALEATMNTSAIAVLLAPRCGRVVVSNPLKTRAIAEAKIKTDKVDARVLAELLAADYLPSVWLADDHTRALRRQVARRVHIVRQRTRLKNQVQAVLARNLVPRCPASDLFGVKGRRWLATQPLPDDEAVTVAALLRQLDFQGEELRLLDATLADEALHRPDVLRLMTIPGVDMAVAVSLVATVGDFSRFSSPNKLVSYFGLNPKVRQSGGLPAVHGHISKQGRAYARGMLVEAAWVASKAPGPLRAFYERVRARRGFQIAVVATARKLAVLCWHLIHTNTDYAFARPSLTAKKQRALELKAGQPQRRGQRGIAAAYSLKDARRRERLVLEQAETAYKHLVAGWHPQPQRPIAAKC

SEQ ID NO: 478244 - protein, 347 aa, unidentified
MRVLLKQTVGIDVAQNELVVSLGRMDEQLSIEVYAYKVFANTKKGYSALVSWVNKQTSTSIEIRYVMEATGVYHESLAYYLYNVKKQVSIVLPNKISNYSRTLDIKTITDKSASQAIARFGLERQLEVWEPPLKIYNDLKQLCREREQLIQERTMLKNQLHADHTSETSNASSVKRTKKRISIIDLQEKEIREEIAVLIKGDHVLADKMTIVSSIPGIGSLTAVTIIAETNGFELIKNKRQLVSYAGLDVKEKTSGTSVKSKPRISKRGNRYLRKVMHFPALAAIRTDGGFREIFLRLVSKHGIKMKAVVAIQRKLLELTFILWKNNSYYNPQFVDYSIELKRGRSI

SEQ ID NO: 478245 - protein, 348 aa, unidentified
MKIIGCDFHPGYQQIAMVDDVTGEMLERRWEHEKGEARRFYQGLQGEVVRVGMEAVGNAQWFERMLEELGQELWIGDAAQIRRLVVRRQKTDRRDARHILQLLSDERFPRLWVPSVAIRDARQLLRHRQKLVEMRTQVKNQLQHLALNQGVQRKRQLWSREGRAVLEGLPLEGWTARRRNDLLAMLDRLQAQVEELDRAVRQEAEQRPEVRLLMTHPGVGPVVGLAYALTLGPVSRFPRGKQVASYLGLIPSEHSSGGRQKLGSISKQGNTMMRTLLVEAAQNAARFDEELRREYRRLAARKHKALAKVMVARKLAVRMYWMLRENQPYTPHPVARMQGSPSHSVVAG

SEQ ID NO: 478246 - protein, 340 aa, unidentified
MSLYGGIDLHANNSVIVLLNEQDEVIYRKRLPNALPTILEQLAPYHTEVKGLVVESTYNWYWLVDGLMEAEYRGHLANPAAMQQYSGLKYTDDHSDARWLAHLLRLGVLPEGYIYPKAERAVRDLLRKRAHLVRQHTANVLSVQNIMARNTGARFSVKRIQELTQQELTTLLAEETQVLAVTSSLMVLDCLRHQIKTLEQSVHKRLHHTPAYEQLLTVQGIGTILAQTITLETGAINRFPSVGHSASYCRCVDSTKLSNSKRTGTGNVKNGHPYLAWAYMEAAQFALRFQPEAQRFYQRKLAKSRNNMVLARKAVAHKLSRACYYLMRDLVPYEATQAFG

SEQ ID NO: 478247 - protein, 387 aa, unidentified
MEKTRGRVVGLDVHPDSFAGAVMEGTDPLSAQVLSTSTRVQLEQLERWALRHTRTEDRLVLEASGNAFAVAERLRMIGRKVDILDSHRAGKVGKVYCANDRVDAVKIARIYLSALSPIVWQPDEKTLERREMFSAYQAVVKESTRAKQQLRSMLNEHCVRLEKGFRLCHPNAITRLLRLREWTPARTMLLQQLHGSLVSARARRTLLRRHMAQEIVTDEALLRLTRLCGINLITLYGVIAAVGDVRRFSHSKKLVAYLGLNPSVSQSGNFEGGGALKRHGRGALRALLIQSGKKLLEVTNSLQKWGLAVAARRGRNKAAVAVARKLCVALWHVLMGHAIGALERLDTLETKLSKFATEMGPAALSALGYHNKADFVEKKLYVLRSYP

SEQ ID NO: 478248 - protein, 406 aa, unidentified
MERPAPVRRLWITLRIGRSVAQSHMRKEPVMRSLTRFVGLDVHADTIAVAVADGTAIRSLGVVPNRAEAVRKLVAKLGPVKDLKVCYEAGPCGYVLYWQLAELGVACEVIAPSLIPVKAGDRVKTDRRDAEKLARCYKNGDLTPIWVPDAEHEALRDLVRARLVAKADQRRARHRLGQLLLRHGVRRPDGLTAWKGKHRVWLNQLQFAQRALQLTFEDYLAEVDHVAERVVRLEDAIDTAVEAAPAGLRDLVQALQCLRGVARVTAAIIAVEVGDLTRFQSAPELMSYAGAVPSEHSSGASVSRGSITKTGNGQLRRVIVEAAWAYRYRPAIGPELRRRQQCLSAQVREISWKAQHRLHSRYTKLVANGKHRNVAVMAVARELLGFIWAIGKEVQRNGATTPPVAA

SEQ ID NO: 478249 - protein, 356 aa, unidentified
MPKIKQLDFAGQTIFCGIDVHKKNWRVNIRNDQFELEDYTQDPCEDLFMKHLHKKYPGARYQVAYEAGFSGFGLQRSLTTSDIPCIVVNPADIPSTDRDKKRKTDQIDARKISRHLSKSTLRPIHVPGVEMEHARTLVRQRGRLVKDQTRCKNRVLHLLMFSGLKLSMDKPNDHWSRRFVESIRMLPCQTEYLRQALDTALEEYLLIRNLVSVTTKQIRALSQQKTLIKTQKLIQGIPGIGLLNSMTIITELQDMKRFKTLDKLCSYAGIVPDTGSSGESNIIKGITHRSNHHLRTAIVESSWVIIRKDPAMLHLYKKYCTVMVPNKAIIKIARHLLSRIRYVWTNQIEYEIGLVG

SEQ ID NO: 478250 - protein, 341 aa, unidentified
MQITTIGLDIAKNVFQIHGIDAAEKVIVRKQIRRGQIIAFFEALAPCLVGMEACATSHHWARELTKLGHEVRLMPAKDVKAYVKRNKNDAADAEAICEAVRRPTMRFVRIKSAEQQGQLMLHRARDLLMRQRTQVINALRAHSAEFGITAAQGREGIKELLAMVAHEEGSRLPSDAHASLTVLATQLQAVQTMIGSLEKRIVAQHRSNEASKRLETIPGIGVIGATTIAAVVPDPRVFRSGRDFAAWIGIVPRQDSTGGKQKLGPISKQGDQYLRRILIVGAHAVLRRARQQPETYPWLTQLLARRPFKVVAVALANKMARIAWALLAKGGTYRAPQLVAA

SEQ ID NO: 478251 - protein, 340 aa, unidentified
MKTLHKRCAGVDVHKAEVVACLRLITNRKVEREVRRFPTTTHGLLELAEWLEKARCTHVAMEATGVYWKPVWHILDGRFALILANAAHVKTVPERKSDVNDASWLADLLAHGLIRPSFVPPAAIQELRDLTRTRKQLTREVVQHSQRIQAVLEEANVKVCSVITDILGASGRRMLKAMIAGETDAHKLAALGSERLGCAPVALVEALTGRMREHHRFLLAQHLRTIEQLEETIRVFDTRIEAKLVPFRDIVERLKEVPGLGTTAAEVVLAEIGTDMSPFPSAGHLLSWAGFVPRLDESAGKRRSTRIKKGAPWAQACAGSSRVGRSAQEEQLFSSPVPAS

SEQ ID NO: 478252 - protein, 346 aa, unidentified
MMIIGCDFHPSWQQIAWLDTETGETGEQRLVHAGGDAERFYRQLQSPALIGMEATGNSHWLVDLLAESGHELWVGDAGQIRASYVRRQKTDKRDAGHILKLLVEGRFPRIWMPSSEVRDLRQLLLHRYKLVLIRARVKNELQHLCLNKGVQRKRKLWTKLGQQMLCELPLRPWAGRRRDDLLGLMAMLDRQIEPLDEAVKAEAQRDKMALLLQTQPGVGPITALAYVLTMGDVTRFPRGKQVASYLGLIPREHSSGGRQHLGAISKQGNRMLRMLLVEAARTTVRLDPEFRKEYQHRCHQKPKAVAKVAAARKLAVRLYWMLRTKQGYPEVVRIESSPRVPLVGEN

SEQ ID NO: 478253 - protein, 339 aa, unidentified
MQIHSVGIDLGKTTFHLVALGAAGKVLVRKKFTQKQLLAYTANMQTPLIGLEACSGAHFLGRALRKQGHDVRLIPAQFVKPFVKSNKNDFIDAEAIAEAVERKNMRFVPIKTDDQLDLQAIHRVRDRLIARRTAVINQLRAFLLERGLVFARTPAKLKIAMPDILENAESDLTPRMRNLIDGLWSEWKLVEQQIEELNDELERISAADAGCTRIRKIPGIGPVVATAIVAAIGNGAAFGKGREFAAWLGIVPRQYSTGGKAKLFGISKRGNAYLRKILIHGARAAVLHIKRDRAPIGAWLDALDARAHKNVVIVAMANKLARIAWAVLSSGNEYRPVST

SEQ ID NO: 478254 - protein, 322 aa, unidentified
MPSTNFQHSADFTGLDFYIGIDIHKKSWVVTVRALNLQVDRFTQPPSPENLLSHLKKKFPNGIFHSAYEAGFCGTHFHHQLCLLGIENIIVHPADIPSTDKQKKNKTDLHDSHSIAHYLEKGLLHGIHVLSEEQQELRALFRLRQSKVRDVTRINNKLKSYLAFMGIITPRNNTNNQLTNKVICWLNGLELSTSAGTITLRQYLGDLNYHRNQLLEVTKKLKQQVLRFYHQQYECLLSVPGIGPIVAMALLAEIGNFNRFKNSDEYCSYLGLIPWENSSGEFMTTKGLQPRCNKYLRPLLVETSWAAIRHAPELLAYYRNMQ

SEQ ID NO: 478255 - protein, 316 aa, unidentified
MKPTAPMLSIGIDVSKATLDLDAYPITQPASYSNDVRGRTQLTKYLKHLQPTLIVMEATGGLESPIAAELASAGLAVAVINPRQARDFAKALGVLAKTDQVDAQVLARFAEAIKPEVRPLKSGDMMALTSILTRRSQIVEMITAERNRQAQVTGKITKQIAQHLIWLSKRLNEADDDLDDAIRQSPLWQAKAELITSIPGVGRVTATSILATLPELGRLDRREISALVGVCPFNRDSGKHKGRRAIWGGRANIRAVLYMAALVASRHNPIIKTFYQKLLAAGKMKKVALVACMRKLLVILNAMVKANTPWREAKFS

SEQ ID NO: 478256 - protein, 377 aa, unidentified
MSKDTLYVGLDTDKKHIDVALAEALPGGEVRYWGKIANEASAVARLVKRLRAGGRPLEMCYEAGPCGYGLHRLLDGQPGVRCRVVAPSMTPRRPGDRVKTNRRDAIALARLLRAGELTAVWVPDATHEAMRDLVRARGAGVADLVRCRQRIAGFLLRHDIRYAGKPWTKKHRVWLGQLVPARALPAHRLMLGEALQALDEATARRARLTDHIAELVPDWSLAWLVDALQALRGFALINAATLAVEIGDPRRFAKPSQLMAYLGLVPSEHSTGNSVRRGGLTKTGNGHTRKALIEAAWTYSRPARAPRDSARHAPAVAAIAAKACHRLSLRYRRLTNTRGKRPVIAVAAIARELSGFVWAIAHAAGPAAATPERSTQR

SEQ ID NO: 478257 - protein, 352 aa, unidentified
MSQTPKTAVVGIDIGKNSFHVVGQDERGAIVLRQKWSRGQVAARFANMPPCLIGMEACVGAHHLSRRLKALGHDARLMPAKYVRPYSKGQKNDFRDAEAITEAVQRPTMKFVATKTAEQLDLQALHRVRERLVSQRTGIINQIRAFLLERGVAVRQGQRFLRTELPRILAAPSDVLSPRMVRLIEDLAGDWRRLDERIEGLSSEIEAIAYQDAGCERLMSVPGIGPIISSATVAAIGSGEAFSKGRDFGAWLGLVPRQMSTGGRTILGRISKRGNRYLRVLFVQAAWVVLNKPKSWERHGLKSWIEAAKKRLHPNVLAIALANKLARIAWGVLAHGRDFEARTITNATAQAA

SEQ ID NO: 478258 - protein, 323 aa, unidentified
MIKDIKYFGIDISHLVFDITDSDGNYYHFKNNISGFKKFVKILGVNSNCVMEATGYYHYQLAYYLLESGMKVSVENPLAVKRFIQMKLSKIKTDKSDSRLICEYAGQVKLKLWQGNSKHQIECLQMTRLLSVYTKQSTMLKNKLHGEAVLGNPSKFVVGSLKRSLKQVQKESKTLEEKLLILVKQVHQDVLTRLKTIPGIGDKTAVMLVVLTDGFNRFTSGSELCSYAGLTPIIRQSGSSVKGRPRISKIGNQKLRNLLFMCSFNACKYNRACRALYERIVVKGKSKKLALIAVCNKLLKQAFAIAKSGLIYDDTYRSTLVKN

SEQ ID NO: 478259 - protein, 331 aa, unidentified
MQILDTVGIDMSKLNFDVRIHSTQSYAQFENSNKGFKKLIIWTYKNSSFARENIFFVLEHTGLYSHKISVYLTENKILFALVPGLEIKRSLGLSRGKDDKVDATNIAKYAYRLRDEIKPYKMPSEQLQSLKRLLSLRDRLVKQRAGFKSSLKEENRILIKKENHVLFKSQEKMVDYLTKQIEILEKEMMGIIKSDELLITQFRLIVSIKGVGMQTALFMIAYTHAFTKFENWRKFASYCGVAPFPNMSGTSIRGKTKVSNLANKRIKSLLDLCAKCAIQRNMEMKIYYNRRIDEGKNKMSTINIIRNKLLSRIFAVVNRSTPYIDMMKYAA

SEQ ID NO: 478260 - protein, 352 aa, unidentified
MRDYRIGCDAHKRYSQVEVQDDRGHVVRQARVYHQAGAVRGFFAQFPEGTPVALESVGNWYWIADEIESAGCIPLLTHPAKAKVMMGHVNKTDKLDANGLATLLRIGSLPTVWLPPAEVRDERELPRTRMALCNMRTALKNRIHSTLAKYALSPEDGTDLFSKKGQAWLEQAIPKLPPETGRCLQQEVELLGSFNEQIQTLEARIREEIALTSSMQLLKTLPGVGDILAIVIEREVGTISRFPGSQNLSSYAGTTPRVSSSGGKTHLGHMRTESNQYLKWAFIEAGNVVAAHHAQPGWTQKHVSKIYLRTRNKKGHSIAVGAVARHLAESTFWVLTKAEPYKDPEAVPPRQG

SEQ ID NO: 478261 - protein, 346 aa, unidentified
MRFYTKPHKHYCGIDLHARTMFVCIVDQQGNVLLQRNIPTRPDEFRRLIEAFREDLVVSAECVFCWYWLADFCAAEGIPFVLGHALYMRAIHGAKAKNDRIDAFKIASLLRGGNMPVSYVYPAAMRATRDLLRRRLYPVRERGFLLAHVQNTHHQNNLPTPAASLQWRSNRAGVAEHFTDECVRRTVEVDLNVVSHLDVVIRELELFLTNTTKEQDAGSFHLLRSIPGVGKILAMSILYEVHDIARFPTVQDFASYARLIRCSRESAGKRSGTSGSKIGNAHLKWAISEAAVLMLRHGDVEKLQNRLRRKHGKGKAMGVLTHKLGRTIYYMLLRKKPFDLERFLAA

SEQ ID NO: 478262 - protein, 525 aa, unidentified
MYHVRRPGRQQPKAKPRSKQSLQKPNGVISPRVRNVGGEHFGIVCVDPAKHRSEWMMADYFGNLLIEPRTVEHQRAFFQIAIEMIRQAQQQHGIRDTVVVVERTGNYYLAPKRAFASAGFETRVVHPFATKQYRMPANPGNKTDENDLYAQHRAAVAGFGLCELELEPPYRELQLRARHRRNLVEKSAALACQIRDHLHLAMPGYAGLFERLFELPVGLAIAARCDSPAKLIQLGRDRLSRYLKKNKVHHQLRTIDKVLAWAAQAVDDPIRDGAMHHAIWTDLHALYQHFQRNIAALERELASDIVQTPYVRLMAIPGINVRLAADLAAEMGPIKQYANANAITGRAGLFPSRHQSDQTDSNRGAIIRQANRRLRCVLMRIADNLARHCAYYRGQADVDNARGIDKRASRVKIAKRFSRLTLACVAGDQPMRHPCFQKPDSILDKLRRFHQEHGTPMDVLLADLEAAVEQLPYNTCNHEAEVVADVLQQQRRRRRGTQPIGDVLPAVLARLNIRINEANKNRDRS

SEQ ID NO: 478263 - protein, 351 aa, unidentified
MDAMTIGVDLAKNVFEIVENTGRSIPTSRRRLSRSQFEHFLAHHSPAHVVMEACGTSHHWARVAQRYGHRVSLLPTQRVRPYVTHHRKTDYTDAAALLEAVRNPRIHPVPPKTVAQQELLTLHRLRTHWMTTRTARINMLRGFLQEFGIPIARGARTACTTAAHVLADSTVPVPARLRVVLPLLLVEIRELETRIAAIEHALAQVATDDVVVQRLHRIPGIGLLTATALVATVGHIHAFRDGRHFASWIGLTPRERSSGQRRRLGQISKAGDVYLRSLLTHGARSCLVAARQATRRQRPVTRLQRWSLDVQQRCGHNKAAIAMANKLARIAWVVWAREVEFSADPPTRAAA

SEQ ID NO: 478264 - protein, 353 aa, unidentified
MTWTFHGSTKMSKTSVAAGDGNALLALLVQIKTRAERSQQLAGKIIVIQEAGLDGFWIHRLLEGHGMESHIVDPASVAVPRRQRRAKTDAIDGQTLLRVLMAWKRGEPRVCSMVVPLRPEDEERRRLVRERKMLVAERVRETNRIRGLLASQGIGNYDPLRRDRRDRLATLQTGDGRPLPERFNAEISRGLDRIALIERQIKELEEERDALVRSTSESSIPAARLFAIKGIGPEFATVLSLQCFFRRFDNRRQLAAYAGLVPTPWQSGQVDHSQGISKAGNPRLRTAMVELAWLWLRYQPGSALAAWFRQRVRAQRGRARRIAIVALARRLLVALWRYITAGVVPEGAVLKEV

SEQ ID NO: 478265 - protein, 340 aa, unidentified
MTATTYGLDIAKSVFQLHWVDAQTGEIVNRRFSRGELIKFLSFRLPGRVALEACGSGHWWARKIRTMGHEVVLLHAKFIRPFVQTNKTDAADARAIWTAVHQPGMRTIAVKSEEQQAMLSLHRMRTLLLKFRTMQVNQLRGLLYEFGATFRAGRVAGLAEIRARMAELESQLPGTMLSCLQEQLGRIDGLQQDIDRLEARIAAWQKQDQACRAIADVPGIGRLTATALVATMGDAAMFKSGREFAAFLGLVPRQSGTGGKVRLGSISKRGDPYLRTLLIHGARSVMYHTKVPTPWQREIQARRPANVVAVALASKMARTAWAILARGEAYQRNFVSMKPA

SEQ ID NO: 478266 - protein, 407 aa, unidentified
MGITCGIDWSESHHDVALVDEHGTVVARTRIDTGAIGFHILLALIAEHGGSVDDTPIALETDKNLLVVALAKAGFTVYPINPRAVARYRERYGQAGGKSDPGDAAVLAHILRTDRHLHRPLPAVSEEGRAVKALARQHQEAIWALHQTVSRLRSVLLEFYPQALQAFPNLKHKAALTVLAAAPTPAAGQRLTRGRVVALLRRSGRGNHPALVEQILTDLHTPALGQPPRVEEAYGHTVRGLVAIVIAMGQAVDDLETELAREFDQHPQAAILRSVPGLGPVLAARVLGEIGDDPARFDNPQGLRAYAGTAPVTIASGRLRYVKARKVRNKRFGDACHWWAYTMLTKSAGARAHYDRRRAAGDHHNAALRNLANKLLGRLWWCLVNNQPWDEHGAWPDHGHTENPTAA

SEQ ID NO: 478267 - protein, 368 aa, unidentified
MNSVKFIGMDVHKNSITIAIADQGRRGPARTYGAIDNDLGALDKFCRKMVSTASQLHFVYEAGPCGYGIYRHLSEKGFNCMVAAPALIPKKSGERIKNDHRDAKMLARLHRAGELTAVYVPDCQDEAMRDLSRAREDAVSATRKAKQRLKAFLLRHHIVYSGRSKWSKAYFNWLSAIAMAHPAQQVALQEYIDAVHENMNRVNRLTEQIRQLVTSWRLASVAAALQSARGVSLIVAVTVLAEIGDLSRFESPDQLMAYLGLVPSEHSSGDKIKRGGITKTGNSHARKVLIEAAWAYRMKPRVSRVLLKRQQGLSDQIRQISWKAQLRLCTRFRRMAARGKPKPVVVTAIARELIAFLWAIAKQVQPVT

SEQ ID NO: 478268 - protein, 427 aa, unidentified
MGAMSESEVQELQFAALVGIDWADQKHAWCLQAADTTQRENGEVQHTPEAIEAWVGQLCRRFDNRPIAVAVEQVKGALVFMLSKYGSLHLFPVPPTMSAKMREALYPSGSKDDPRDADLLLELLLQHRDKLRRLSPDSEATRRVQNLVDERRNLVDEKTAQINRLTHQLKIYFPQMLEWFEQLDTELVCALLERWPTLEELQKVPPERLRTFFHKQRCRYPELIERRLVGIRQAIPAIRDRAVIEAKSAVVKVSAQVIRSLVRGIADLDSKIEEAAAAHPDFFIFESLPGAGAVLAPRLLAAFGSQRERYASAEEVQTYSGIAPVMKRSGKKKWVHFRWACPKFVRQSFHEWAGHSIAHSQWARSYYQQQRERGKGHHAAVRGLAFKWIRIVFRCWKDRAAYDESRYLMTLAKRNSPLTAVPGGTML

SEQ ID NO: 478269 - protein, 322 aa, unidentified
MQEDGAVIKRRKLKTEPEALISFVQRYGGDVEAVGLETGPLSVWLCHELGAAGLPVVCMDAFHAHRTLSTKLNKTDAKDAEGLADLLRVNYHRSVHVKSWTAHQRRGLLKARDMLVAQRTGLQNQMRGLLENFGIVLGAGRGGRFAAMVEEALQDRTELVRIIEPLLAAWRMLRAQAVDMFKTIRTEARADEQCQRLMTMPGVGPIVATSFVAMVDDASRFTNSRSIGAYIGLTPKRYQSGKQDRQGRISRAGDQHMRGLLYEAAQVLMFRSKSKADQLQAWARALAERIGRKKALVALARRMAVIMHAMLVNKTDFRDLPA

SEQ ID NO: 478270 - protein, 408 aa, unidentified
MQVVYPICCGIDVHAKMLVACLRDNGQRETRTFSTMTDDLLRLRDWLVESNCTHVGIESTGVYWKPVFNILEGSLEVVLVNPLHVKAISGHKTDIRDAERLADLLAHNLVRPSFIPPPEIRQLRELTRYRESLVRERASINNRVIKVLESGNIKLAQVASDALGKSGRAMIAALVRGETDTAILAGMARRKLKRKEAELRRALNGRLTTAQRFVLKGLLWRIEELEAAQATVNDRIDQVFMSRPKFAHCRALLQTIPGIGQRVAEIIIAEIGVEVEANFPSDKHLASWCGLCPGNNASGGRRKSGRTRDGNTYLRSALVQAAWAAQRAKNTYLSAQYRRLARRINKKKAAIAVAHSLIVIAYNVLVRDRSYQDLGGDYFDRQHIEQRRAYLLRQLEALGCRVTVEQNA

SEQ ID NO: 478271 - protein, 404 aa, unidentified
MTNANIIPADAVLVAIDIAKVRNEVLIEDPSHKRRRRLQVLNNRAEHDRLIEVLQTYGRSVVCGFEATGNYHRPIAWRLAEAGFEVRLVSSLALARTREALHNSWDKNDPKDAQVMLHMLKIQATQFYHDPLRAGINDAQELSKTHEAIARAKTEIQHRILTHYLPLYFPEIERFRGNSRSDWFFAFLDAFPTPASIVVLSKEEFVKAAWGVVGRKVSKTQILMDIYETASTSIGLPLPLEAPAVRMFRMVVAEARSLIRQRNEIEAQADELLRHSQDYQLLRQIPGVGPIIALTIIAEAGDLRRFHHHRQFFKFCGLDLSTQQSGQYRGQTRLSKFGNARLRRALWIAGQVAIRQRENGFRHKFERYIAKDRDNPDLRRKALTAIADQPANHGRRRRPDHRSR

SEQ ID NO: 478272 - protein, 345 aa, unidentified
MNTVKKQVAGLDVSKKEFEACFKELQENGKITIKGTRKFANNVSGFNHYLTWCSKRRKTTLVHVMEATGVYHEELCYFLYQHQEQVSVQLPQKVKYFIKSLNLKTKTDRSDAMAIAQMGVLRNLELWQPLSEGFKQIRDMCRTLAKLNKGSTAVASQLHAMKTSHSTFKESLQALERLKDTYDKLIGECQEKLLEMVKQDKELYQRIERITAIKGVGTLTVVKLLAETDGFRNCSSIRKLVSYAGLDVVHKESGQYVGSSRISKKGNPYIRAALYMPALSARMHDQRLKPFYERLEDRLPKKKQAIVAVMRKILILVYTLWKNGQSYDPKHQWNEKAGRTPLRIA

SEQ ID NO: 478273 - protein, 405 aa, unidentified
MEIFVGIDWAEAHHDISVLDEAGAVLAKRRIAEGLEGVGQLHTLLAEHAAEPNEVVIGIETDRGLLVGALLAAGYQVYAINPLAASRYRERHVTSGAKSDSGDAKVLADLVRTDRHNHRPVAGDSELAASLQVLARAHQNLIWSRQRLVNQLRNNLREYYPAALAAFGTELAHPVALGVLGAAPVPSMGRTLSESKLAAILRRAGRERGVEEKAAAIQAQLRAPQLAAPALVSEAYGKSVAATVRILRDINTELASLEAELAPSFEKHPDAEIYRSLPGLGIVLGARVLSEFGDDRTRFAHPKARKNYAGSSPITKTSGKSRVVLARLARNRRLADACHQWAFCALTGSAGARDYYHRLRQRGNTHHQALRALANRLVGILHGCLDHRQPYREAIAWPSRLPVAA

SEQ ID NO: 478274 - protein, 402 aa, unidentified
MNAVGIDVSKGKSMVAIMRPFGEIVSAPFEIKHTASDINSLVELINSVEGESRIVMEHTGRYYEVLAHQLSAANLFVSAINPKLIKDFDNDSLRKVKSDKADSVKIARYALDKWQNLKQYNVMDELRNQLKTMNRQFGFYMKHKTAMKNNLIGILDQTYPGVNTYFDSPARSDGSQKWVDFASTYWHVDCVRKMSLNAFIDHYQNWCKRKKYNFSQSKAEEIYGKAKELVPVLPKDDITKLIIKQAVNQLNSASTTVESLRTLMNETASKLPEYPIVMAMKGVGASLGPQLMAEIGDVSRFTHKGAITAFAGVDPGVNESGSYEQKSVPTSKRGSSDLRKTLFQVMDVLIKTHPQDDPVYQFIDKKRAQGKPYYVYMTAGANKFLRIYYGRVKEYLSSLPES

SEQ ID NO: 478275 - protein, 451 aa, unidentified
MGKKQMSLEVVNPNAGGIDVGSKSHWVAIGQDAEDIREFGVYSEDHQELCRWLSENGITSIAMESTGTYWQTLFSALTAYGFEVILVNGRQTKNVKGKKTDIKDCQWIQKLHCLGLLSHSFLPDSTTEIIRTYSRHRQNLIKQTGGTVLKVQKYLRLMNMRLDVVVNDIVGLTGTKIITAFIAGETKGKNLAKYRHYNCRKPEEEIAKALQYNGRADYLFALKQEWETYLHIQKQISEVDVQIKKLLEDIIDQYDNKKQHVANKKSYKRKNKNTIRGTDMNQISYQYFEGIDLMEVEGINDATIMAIISEIGLEGIKKFSSGKQFTASLRLAPNNKISGGKVLSHHIPKGSSRLKIAFRNAANAIGNLKEGHLADFFRRINYKKGRSTAINATARKLAIIIWNMLVKGQNYSPPTQYMFLDEKRRLGLVKRLQKQITKFDIQPEQLGFTTA

SEQ ID NO: 478276 - protein, 340 aa, unidentified
MNEITTVGLDLAKHVFQVHGVGASGAPVLRKRLRRSEVLGFFARLPSCLIGLEACATAHYWARELRSVGHEVRLMPAQYVKAYVKRNKNDAADAEAICEAVRRPTMRFVPIKTAEQQAALLVHRGRERLVRQRTALVNALRAHLAEFGVIAPLGLRNVARLIAVIRDESDARLPDLARQVLRVLATQVEQLEAAVAALEKQLMAWHKSSPASQRLATIPGIGPIIATAIAATVVEASGFRSGREFAAWLGLVPRQHSTGGKARLGGISKRGNRYLRRLLINGASANLLRSKATNADPWVIGLRRRRPSLVVAVALANKTARIAWAVMHRQENYERMAAVA

SEQ ID NO: 478277 - protein, 404 aa, unidentified
MKGPIVSIDVSKGKSDYQAFKNLNVKYTGSRSIKHTKEGFDEIVNLVREMEKKLEAEVCVVYEATGVYHRVLKKVLEDNNIKQFIINPLLSAKTRKNDSLRCPKTDKLDPKSIAKTYYSHSLHNSHKQETIYHELRELSRYYEDILVHIRKDKVAFRAQLDIVFPGYDALYDDLYGPVALAVIEKYPHPEMLQKKKINTVSKVIQSKTCHRKAVSDTMADKAIEYSKTIYSGCDKDDIEVLILQRFIKKLNEDMAEAERTIGEMIKLAQELPDFSIIKSIPGIGDNLAARIIAELGDMTRFKKKNELVAFAGLDPRISESGQNDGDHMHITKKGNKRLRCLLYLAVTCSIRLKRDDNSIKDFYIKKKQQSNPMCSKAAKTACASKLVRIIYSMCKTGELYQYNK

SEQ ID NO: 478278 - protein, 402 aa, unidentified
MIFINCLGIDISKSQSLLAHYKDEVLVKEMVIQNNQNGYRYLKNYIKHLDSLFILFESTGIYSRGMKRFCEIHKIDYLEMNPLEAKFKTSSLRSWKTDKSDAHKLALLAFRMKDSKVQRQSEEIYFELRERARFHLEMEINQNRLKVELVETLHQTFPGLEKLFTNRYSKIALSIAKAFPHPDFVSTLTHDELVEKVLHSTDKGISVNKAHKYVQKLIEIQINSFPNVDKSSFLLQKVQYLCDKLLIGIEEMKEFDQEMIDLAKNTTEFENIISIPGIGELTAALLIGELGNIREFKTNKQLNAFVGIDIKRYQSGTSKSRDTINKRGNKKARRLLYLIIMNIIRGRNHYQSHIVDYYYKLREQPHGKTHKTAVIASINRLLKTIHYLIVNNKLYDYQKAPH

SEQ ID NO: 478279 - protein, 351 aa, unidentified
MIAINTDIIIANIGVDIGKNAFHICAMNAKGTIVLRERLTRAALPKRLANIPPCLIGMEACAGAHHIGRKLASLGHDVRLMPAKYVKPFLKGHKNDYRDAEAIAEAVQRPTMRFVPFKSDEQLDLQALHRVRSRLVGQRTAVINQIRAFLLEHGVPVRQGPGALRQALPSILAQRTDTLSSRIIRLIEGLIDDWRRFDQRIADVTSEIEQLAKQSENCKGLMSVPGIGPMTASAMVAAIGDGSAFSRGRDFAAWLGLVPKQISTGDRTILGGISRRGNSYLRTLFIQGARSVLQRFEGWEKKSFGRWLIAASKRLHKNVLAVALANKLARIAWSVLYHARGYDAAPTPKAA

SEQ ID NO: 478280 - protein, 482 aa, unidentified
MKPKQLGKTNQATDHPTPGSWHEMNRKQRRETMRKIQSEDLTLEVVHPDAAGIDIGNESHYVAVPPKRDSQPVRRFGCTTAELKAMANWLKQCGIRTIAMQSTGVYWIAAYDILEQAGLEVYLVNARDTKNLPGRKTDVQESQWLMKLHTYGLLRNSFRPSQETRTLRTYWRQRNDLIQSAGRHIQRMQKALTQMNIQLANVLSDLSGVTGQSILKAILAGGRDPHKLAKLRDPHVKASEEKIAQYLEGNWQEDLLFLLKQEQEGYEFCQKQIAACDQQLQQYVQGREDRSQGASLPEERRKTRLRKKKGNAPQFDLRAELFRMTGTDLTQVDGIDVMTATTILSEAGGDMSKWETENHFVSWLRLCPNNRISGEKVVGKGRLPTSNRASIAFRMAANSLRLSDTYLGAQFRRLRTKLGSPIAIKAMAAKLARLVYRMLRYGMKYVDRGAKFYEAQHRELEIRRLKWKAAKLGFKVVEAPAA

SEQ ID NO: 478281 - protein, 393 aa, unidentified
MTATPISNATTRSDVLYLAFELGDMNWKLAFTIGQGQKPRLRSMPARELATLQTEITKAKKRFGLAADATVKSCYEAGREGFWLHRYLAAHGVDNSVVDSASIEVNRRQRRAKTDRLDASKLLNLLLRYHGGERKVWSIVRVPSVADEDARQLHRELEELKDERTAHVNRIKGLLTSQGLAASAVGKEFAQWLGEARLWDGTAVPPDLQRRLLRELERWQLLDRQIKELEHERRQRIRRDDTPHADKVRSLLQLWGVGLNGAWLLVYELFAWRRFTNRKQVGGCVGLTPTPYQSGDSRREQGISKAGNRRLRRLLVELAWCWLRWQPDSDLSRWYLCRFGGGNGRSRKIGVVALARKLLIALWKYLEQGEVPAGARLATWQGKVKGCPKVAVA

SEQ ID NO: 478282 - protein, 415 aa, unidentified
MIPTVVERCIGIDIGKKFLVACLMVGAAAEEPRVELRQFGTFTEDLVRLKAWITAEQCTHAVMESTGSFWKPVFNVLEDAVTVVLANPREIKIRKGHKTDWKDSRWLAHLLRHGMVPASFIPERGIRELRDLTRRRKQLIHACTAEKNRVQKTLEDANVKLGSVLSDMFGVTGRAIIAALLDGKLSATEMARFAKRQAKRKIPEIIASLEGHRLTDVQRFLIRQSLGHLEFLQSAIKELEAETQARIESVEPYHKAVLLLQTIPGIREEAAAGILAEMGHRMEQFPSEKHLSSWVGLCPGNNKSAGLERSGHITKGNQWLQTLLIECAWAASLKQGSLFCLKYRQLAPRIGGKRAVVAVGHAMVILIYQVLRNGKPYQQTAIEAALESKRRKSIQRHVKALTKLGVLLKGIQYPE

SEQ ID NO: 478283 - protein, 352 aa, unidentified
MSKIYAGVDLHKTQFTVCILRNGLYEKEGQYPTSKEGYKAFVSDIQTMDNPPNEVELAIESTGNARHFKTVMETAGFKVTVVNTLKFKVVNLSTRKTDKNDARTLADFLSKEMLPTSHLCSPMNEGIRRILKCRSLMVQDCVALKNQAHAIMLAYGKVTKPTQFQSKKNRASLLNSLLKRDADLKYSLETLFETLDVIEAQVRIMEKRLSEITKADRNVRLLMTIPGIGIVNACTISSYIDDISRFGTPGNFSSFCGIVPWVQSSNESSYYGRITKRGPQELRTALVQCVVAMIRMGDRTKNTRLMKQYAVLKENKSSGKAIIATARKLSTIIYVMLRDGVPFDISKLSVAS

SEQ ID NO: 478284 - protein, 366 aa, unidentified
MPAISNSPDRVVIAIDPHKASWTAAAVDASSQPVATIRVPVSCDGYRALRRFARRWPDSTWAIEGASGLGAPLTARLRTDGVDVVDVPAKLAARVRMLSTGHGRKNDDADAVSVGIAALSARTLASAAVDDTVTALRAIVDHRDDLVKTRTQTVNRLHVVLTNLIPAGAQRNLTAERAAELLRKIRPRDASSKTLRGLAADLVTEIRHLDRRIAKAAADIKTAVTASGTTLTELCGIGDLTAGKILGRVGTIDRFRSAAAFASYNGTAPIDVSSGDVVRHRLSRAGDRQLNLCLHVMALTQIRQDTPSRAYYLRKRTNGKSHKEAMRCLKRRLSDVVYRQLLRDAARQEAGPGGHSGAALMSSAAS

SEQ ID NO: 478285 - protein, 478 aa, unidentified
MNGKGRKAKKQAKINNSLNILSKEELGRRIAEVEADLKSSTWKDLEVGIKFDKNAKLTFISEDMLILGCDIGSETHYMRAIDIRGRELSEDAFPFSNNAEGFQSAKAWAVQIAAVHGKRQIVLGLEPTGHYWFCLAAWMITNGISVVQVNPYAVKQTKELEDNSQLKDDRKDPKVIANLVKDGNYGMPYLPENVYAELRRLSMLRDQLTEDRIRNVNRLHREMKIYFPEYMNAFGKIDGTFALMVLKEAPFPEDILALGTDGLKEIWHEAKLRGRGYSRADHIVKLALESVGLKHGTGGSKTAVRCFVEQILYLTEKLDKIEESLHQKCREIPYAENLLEIEGIGENILAGILAEMGDVSRFDDVKEIQKLSGLGLVACSSGKHKGETKISHRGRKRLRFWLFQAARSAVSHSEEFKTLHVYYTTRPDNPLKKMQSLIVIACKLLRVIFTILRTGQKYDPAKMLRDVKHPTGATTQAA

SEQ ID NO: 478286 - protein, 381 aa, unidentified
METLSKTVAANDIEQQAKLFVALELGQATWVVALHSPIVDKISIYRIDGGDTDELMALIEKKRVQAARRLGRAAQVVSCYEAGRDGFWLHRFLIRRGIDNRVLDSASILVDRRARRAKTDRLDARALLRVLMALVRGEEQVCRVVRVPSIAQEDERRLSRERERLLHERNSHIARIKGLLILHGVRDYRLIERDWKERLDAVRTTEGQALPARAKTEIERECRRLWLAKQMLAEVEREIEQMIAHDGAVAGKLIQVRGIGPTFASVLTHEVYYRSFDNRRQVGSYLGLVSVPWQSGSVRRDQGITRSGNARARRCAIELAWLWLRHQPGSALACWYRTRVGTMTGRMRRIALVALARKLIVALWRYLQNGIVPEGAVLKAA

SEQ ID NO: 478287 - protein, 345 aa, unidentified
MALYVGLDVSLKFTSICIVEANGSPVWEGKAESEPTLLIKALTRWRESIMLVGIEACPLSEWLYGALIECGFQTVCIETRHAQRFLSSRPNKTDRSDARGIADMMRLGHYRPVHVKSKASQLLRTTLIARRKFVDHMLAIEDSIRGLLKVHGLKLGLVHRGRFAAKVEAMLADAPDLRVAIEPLLEARNMMRAKKALLDRQLSQMARKDDVCKRLMTISGVGPIVSLSFKATIDDPERFKDSKAVAAHLGLTPRIYQSGEIDRSGNVSKCGDKLMRHALYEAANSHLRISKKWSVLRAWGVKLAKRIGAKKACVAVARKLAIIMHRMWVDGTDFQFGHPATAQAA

SEQ ID NO: 478288 - protein, 334 aa, unidentified
MIYIGMDIHKYFIQGVAIDERGRKVEELKFKNELEEIERFVRRFGFEVKVAIEGTFGWQHVYEILEYLKVETKLVNVRRTKVIAESKIKTDKLDALSIAQCLRTGFIAEAYAPKPEIRKIRDIVRHMLSLKREVKRIKNKIHSILLKNGIKHGFTDLFGKAGTEFLKKVKLREQDRYRLDSYLRILNSLNKEVNETAERINKISKADKQAMLLTTIPGISYYSALLIIAEIGDINRFKSAEKLCSYAGLVPRVIQSGNHVHHGKLIKECDQNLKWILTQCAHVHVRCCNSKITKHYRKVGKKRGNNKAIIAAARELLVSIYYMLTRKEPFKING

SEQ ID NO: 478289 - protein, 340 aa, unidentified
MTITTVGLYLAKSVFQVHGVDAVGATALTKRLHRKQMLPFFSKLPPCLIAMEACGTAHYWARTLAGMGHEIRLIPPSYVKAYVKRGKNDALDAEAICEAVQRPRMRFVPVKTVEQQSILMAHRARSLFVRQRTMLANALRAHLAELGLVANPGIANLANLARQALCDEDVLPSYARATLEALVRQIMTLSEEIAALDRKLLEWHADNEASRGLETIPGIGMITATAIAATVTDPEQFRSGRQFAAWLGLTPQQHSTGGKTQLGSISKQGDRYLRRLLVVGATAVIRHTKDKPTPMANWIRKLLTKKPFRVVSVALANKLARIAWVILTRKEAYRPYQLAA

SEQ ID NO: 478290 - protein, 325 aa, unidentified
MQGKEASEQETRKCTAGIDVSKDWLDAHVLPASQSLRVANRSEGISQLQRWLLKHEVDLIAIEATGKWHREVCRSLRASHFAVAVIDPYRVRSFAKAERILAKTDRLDAKVLAMFAATMHPVCRAPTPQVIEAMQELVTARATAVEEQTSLQNQLGSARTGFLKRQLTRRITQLKAHIKAIEQECLGQIRADESLARRYAILTSIPGFGPVVAISLIAFLNELGSLTNKQIGALAGVVPIADDSGERKGIRVVWGGRGIVRRMLYLAALSASRHNKDMKLFRQHLSARGKAAKVCLIAVARKLVALANTLISQNRSWQPSAPENA

SEQ ID NO: 478291 - protein, 415 aa, unidentified
MSETRRWFAGVDWGSKSHCVFLTDDQGRKAGQKFFKHSGEGLAEMASWLLKASAAAEPGEVFVAIEVPHGPVVENLIERGFAVHAINPKQMDRFRDRFSMAGAKDDSRDAEVMASCLRTDAKCFRRLVCAEPIFIELREWSRIAEELGVERNRLANRLREQLWRYFPALLELEDDCSAEWLLDFLALAPTPAKAVRLREAKLAQLLKQRRIRRLDPAAILKAVRAPPPKLAAGTLEAASAHVASIIPRLRLVNRQIGEAERKIGALVDSLTASEDSEPGQKKQHDAAILASLPGVGRIVLATLLAEAWEPLQRRDYPALRSLAGVAPVTKRSGKSCIVVRRQACSDRLSNALYHWSRVAVQHDPRSRAKYAELRKRGCTHGRALRTIADRNLSVACAMLKTGTLFDPSLKQEKNP

SEQ ID NO: 478292 - protein, 420 aa, unidentified
MLMNIPSQFPYRATVGLDWADQKHDVFVRFANGDSYRRKIDSRPEAIQEWLLELRSTCAEAKIAIALEQRRGALFYHLCTHLSWIDLYPINPHSLASFRQTFFSSRAKDDPLDSQLLEELLRTHPERLRSYQPEPTAERKLDQYCRHRRSLRDLATKTELKLISTLKQYFPLAVNLFAEVGMKSEIALNFLSRWPTLEELQRAKAQTVRSFFYAHNSRSQSLIEKRLQLIAQAHPVTDDLALIEPLVLTSKCLVTQLRQFNQAISQFDQKIRELFKSHPDHFLFESLPGAGEQLAPRLFAVFGSNRSRWADATDIQKYSGIAPVVERSGKSLWVHRRLARPIFVCQTFHEFAQQSTHRCSWADQFYRRQRQRGKSHHSAIRALAFKWIRIIYAYWKANKPYDESFYVQALEKRNFSVSTT

SEQ ID NO: 478293 - protein, 410 aa, unidentified
MELLYPHCAGLDLHKETVVACIRHMVNHTVTTLVKTFKTTTQELMALSDWLSEEGVTHIAMEATGVYWKPVWHILSDGNFSLVLANAAHVKNVPGRKTDVNDATWLADLMAHGLIRASFVPEEPTQQMRDLLRTRKQFVRERSSHTQRIQKTLEDANIKLDSVISNVAGVSGRRMIEALIAGQTDPEALAALADGRIRATAAELEAALRGRVTAHHRFMLRLHLDHLDAVDAAIFRIDKEVEGNLEPFRVACEMLTTMPGVGALAAEVIVSEIGIDMSRFKTEGHLISWAGLCPRNDESAGKRRSNRMKKGAPWLKTTLIQCAWAATRVKGSYLQAQYLRIRARRGAKKAVGAVAASMLTAAYHMLKDGTLYQDLGTNHLDNREKGKQALRLVNRLQSLGFAVQITSMAA

SEQ ID NO: 478294 - protein, 424 aa, unidentified
MAGSSTGFTCENERTARVTATDVVWVGIDAGKASHHAAAVDAGGKRLWSVKVANGQRQIEELIGRAAKSAAGGEVRWAVDLVSPAAALLLAILLASGQKVVYVPGRVVHGMAGVFRGEGKTDAKDARIIADTARMRGDLAELTATDELVVELTRLTSYRADVMADWVRGVNRLRDLLTSIFPALEASFDYSTRSALILLTGYCTPDEIRQAGPGAVAAYLREHGAWAKGIDAMADTTVRAAQQQTVALPGEATTAMLVKKLARQLLDLDREVKDTDKLLTRRFRDHPQARIIESLPGMGPILGAQFLVATDGRALEAFTSPGRLASYAGLVPVPKDSGRVTGNYHRPRRYHRPLRNVFYMMALSSLRAEGPSKAFYQRKRGENKIHTQALLALARRLVDVLWALLRDNRTYSPIPPAQVIATAA

SEQ ID NO: 478295 - protein, 338 aa, unidentified
MKFKRIAIDTSKHVFTVHGVDEQERPVLRRELKRSQMEPFFGRLDPTHVVLEACGGAHHWGRVLSRLGHRVRLIPAQYVKPFVKRAKNDRADAEAISEAAARPTMPSVAVKSVDQQASAMILKHREMLVAQRTQAVNALRGHAAEFGVIAAKGTVQVKALLDKLASDEAIPAPAQAMFAEMGEHIEALDQRMATLDGQLLALHQANPVSQLLAEVPGIGPVTAITLALTVEPGHFASGRHFAAWLGLTPKEHSTGGKQRLGRISKAGNERLRTLLVVGATAVVRHAKPGGKSASAWLLGLLERKPRKLVAVALANKMARIVWAMMARGEAYRRQPAAA

SEQ ID NO: 478296 - protein, 482 aa, unidentified
MKKRNIYQNRSQELLSLFEEAGNSAKVMCVPMDYAKKDHVVMFCNGYGDILRKPFSIKNSPDGVKYLVDQATRSCRRRGIRKQHVFFGGEDANSYAENFVNTLRSKGWVVAGVNAHDAKKQRANLQASTDCLDLMGIATMLLNCRANCCPAQSGIYRNLRTLVRHRRKLVVMSTEVRNRIHTVVDRLFPGFLDEGKTGIVPFTSSSLYLMEDRFSPKQIRRRKREKLIEILKRFGTSKAEKTADKLQQYAAQVLHTTVEYIDTLQLSLAQHVKHLRCLKESIDQLEKEIAVNLAQTQGAFLTSVRGIGIVLAAGVTAEIGDPNEQKPLNNLVSYSGIIPRVKQSGGPEGKTYTVSVAKRCNRILKDYVVKSALHLGLHGPQDLMADYKRRDASGQHADFSMGRRYLRMAMCLMRTSQIYLPPRLRKADATLQERAGYYLMTWPYLRGKWKKLGALEAAFTKDRPLGLWRQIVQELYEIKLKL

SEQ ID NO: 478297 - protein, 345 aa, unidentified
MKYYAGLDVSVKETSICIVDETGAICREIKVLSYPEDLVQALKNPEWRLVRIGLEAGPLSQWLFSGLAAAGLPAICIETRHTKAFLKAQVNKTDRNDARGIAQMMRVNLFRPVHVKALASQRRRALLTARKLLQEKAIAIENDIRGLLRNFGLKVGIIGTVGFDDRIRELVDGMPDLGEIIGPLLAARQKLRETFMDLHRKLLSIVRDDEACRRLMTIPGVGPVTSLAFTSTIDVPARFSNSRAVGPALGLTPVLNQSGESHRVGRVSLCGDGMMRALLYEAAQVMLSRVKKWSWLKAWAMNVAKRRGRQKAIVALARRLAVIMHRMWSDGTEFRWTRENMPAAV

SEQ ID NO: 478298 - protein, 540 aa, unidentified
MNRAFSAPQDFWALVPGRCPDTVSKVIHRRAERASPAERSEAVNNFAAMNFESNLRPEHNGFGREARGRTRSRWPYPARIEPRTPVGPEAIITKSERTSPCEGHCIRTTHDKSQGPRANKHMNKTISWEDIEYYAGFDWAKDHHDVVVVNRQGKIVKDLTFEHTAEGWAQWKELVAAHPHLAVAIETNQGAAIEQLLESEVAVYPVNPKSAERYRDRKAPSGTKTDYLDAWSLGDALRVDGHGWKALQPLDPLVHELRLLCRDEVELIGKRTELVNQLQAALHEYYPAALQSFEDWTATPSWHFVQQFPTPELLQKAGRRKWENFLHAHRLYRPELNQQRLAVFAKAAEFCGSPAVTRAKSRLALALVKLLLALEIQLRDYRQEIERLFKEHPDHDLFGSLPGAGDKLAPRLLSELGSDRTLFESAQALQCYVGTAPVSFQSGQVRQAYVRFMCNKSFRYAVHLWANSSRAGCSWAEVYYQQLRAKGKSHATALRCLGQRWLKILWKMWQTNTCYDPNFHMANQLKHGSWVLAVKPSGSL

SEQ ID NO: 478299 - protein, 391 aa, unidentified
MFLLGIDIAKLNHVASCIDSSTNEIVFSNFKFKNDFKGFSTLLDKIKTFDTKNLIIGLESTSHYGENLINFLFKQHFKVALINPLQTSHLRKANIRDAKNDNLDSLNIAKSLIFAKLNFISEKNINCFYLKKLTRFRSSLIKQRSKAKIQLTSLLDLLFPELQYLFKSKIHSKAIYSLLKKYPSAEEIAALKDDEISNLLYASSKGHFKKEKSIELKSLAKITVGIKDTSISLHVIQLIELIELYDKQIKDIVTKIADTVDKLDTKLLSVPGISIIACAIILGETNNFNNFSDSTKLLAFAGLDPKIRQSGNFNASSCRMSKKGSPYLRYALIFTAWNIVRHSEKFNKYYCLKRSQGKSHYNSLGHVAHKLVRVIFTLIKKNIVYQEENLE

SEQ ID NO: 478300 - protein, 436 aa, unidentified
MFLDSNEPMNSSLNNDHTQNNYAAFIAIDWADQKHTFSLQVAGQAKKETGTLEQKPEIIGPWVAKLRERFRGRPIAIAVEQSRGALIHALLAYDFLVLYPIHPTTVARFREAFKFSGAKSDPLDTDQILEILTKHLELLKPLNPDTQETRLLGRLVQDRRKTVDLRTSHIQALLASLKEYFPQAIELVSGNLTSRLAGDLLKKWPTLESFQQAKPSTIKRFYYGHNIRSPEVIETALKLAIHAQPLTTDSAIIESSRRVSEMHSQMIQALNPVIDAYDQRIEKVFHDHPEFPLFSQLPGAGPVMAPRLSAFFGTDRSRYSKAQNVQTFCGISPVTKSSGKTRVVYFRRACPQFQRQSFHEFARLSVASCQWARNYVDYYTAKGKKYNTVIRALAFKWIRILFRCWKDRTPYDDNKYMGILKKRGSIFATLHLEQEK

SEQ ID NO: 478301 - protein, 348 aa, unidentified
MQVTTLGIDLAKNVFCVHGCDANGKAVVRKQLLRRQLLNLVANLPPCLVAMEACASAHYWAREIEKLGHRVRLIAPRFVRPYVKANKNDASDAEAICEAASRPSMRFVAIKSAAQQEVQAVHRVRQQLVKARTGLANQVRGLLAEHGIVLARGFAPLRRALPVILEDRDNGLSAVMRELLAEIGERLRFIDERLRQYDLTIQRLFRHDERCQRVAAVEGVGPLTATALVAAVGNATEFRSGRELAAYLGLVPRHRASGGRTILLGISKRGDRYLRTLLIHGARSALHRIERHHGVRASWAARLKLRRGANVAAVALANKNARVLWALLSRGQSYRPAPFPARAPQAGG

SEQ ID NO: 478302 - protein, 331 aa, unidentified
MNTLMMPAAAARFNHVIAFDVAKATLSLHILPTGESLCLENDGAAIRRLLKREQKRNRKQGLGPMLVICEATGGYEDAVLKAASELGLECHLAHGSSVRAYAKFRGRHAKSDPIDAFLIAEYGRDKPDLRLYKPPRPEESALRALMGRRAELKEMILAETSRLEHASLKAVRLSLESHLVALKEQLALIEKEIRALTRRDEAFTHKSRLMQTLAGIGAVAAQTLLAFLPELGQIPSSAAVALAGLAPYDRDSGKERGKRRIFAGRSQIRRCLYMAALAAIRSHAVFRDFAERLSRRGKPFKVAVTAVMRKLIVILSAMLRHNQPWKHAQTA

SEQ ID NO: 478303 - protein, 322 aa, unidentified
MRLPNPLCVGIDVSKATLDIAATAEIEQFTTSNDSDGFDEIINKLKECRISLVLMEATGGFEAAIACSLQAAGFDVTVINPRQARDFARAMGYLAKTDRIDARVLAQMAEVINKHPDRERFIRPIQDAERQVLTAMVVRRRQLIAMHVAERNRLHPAHPQSRKSINIIIKALDDELARVDAEMSKHVQNHFKELADRLNTFKGVGIRTIASLLAEVPELGNLTRREISALVGVAPVNRDSGTMRGRRTIFGGRIGARTALYMAALVATRFNPVIKAFYSRLLAVGKPKKVALVACMRKLLTILNAMLRKNEEWDMSYHSISL

SEQ ID NO: 478304 - protein, 395 aa, unidentified
MHDSTTYVALDAHKKEHAVSMLLPGRDRAEEWTVRNTAAEIRRMVRRIRRLAPGEVEMCYEAGVCGFALQRQIEAQGVTCKVIAPTLVPVEPGRRIKTDRRDARQLARLPRAELLTEVHAPNEAQEAVRDLVRSREAAGADLLRSRHRVSKFLLRRARVYRDGRAWTQKHFRWLSGLEFAHATDAYVFEHALVEVLRRQEQLQELTEAVEAAARQAPYAEAVGWLRCFRGIDTLTAMTVVVELHGFERFGSPRQLMSYLGLTPSEHSSGDTQHKGGITKTGNRRVRRVLTEASWHQRRRPVTSQALRQRRAGQPAWVIQLADQAMHRLHRRYWHLVHKGKLPTKAVIAVAREFVGFLWAALYLRERSSAACRQRRPRVKERRERVRAREFFASRG

SEQ ID NO: 478305 - protein, 312 aa, unidentified
MGIITVGIDLAKSVFAVHGVDENGRAVLVKPKVTREQLLPLIAQLPPCVIGMEACSGAHHWARLFRRHGHTVKLMAPKFVTPYRMSGRRGKNDAADAKAICEAVTRPCMRFVPLKDEHQQAMLSLHRTRQGFVEERTATYNRLRGLISEFGIVLPQKITNLRRDILAKLEELPGYANQCVGDLLSHADQLDTRIAEYDRAIAQTAREDARSRRLMERPGIGPVSASALLASLGCGHDFKNGRQVAAWIGLTPGQYSSGGKARLGRITKAGDPIYAASWSWAPERSWPGWAINRTASAAGRGICKSGAATGEP

SEQ ID NO: 478306 - protein, 335 aa, unidentified
MSIMNMHPQGGVANREQRPNAGVDVCKQHLDACLGTLELRVVNDATGWDVLIAKFKEEDVDLVMLEATGGYERGLVCALQGAGITVARVNPRQARDFAKSMGVLAKTDQVDARTLRDFGEVLASHKDRAKFITPLVDEQRQVLAELMTRRRQLVDMRVAENNHLEHAGKHSVRSIKSVLKTLDRQLEAIDHEVDDHLDRHFKDQRKLLDSVKGVGPVTILTLTAALAELGSLGRRQIAKLVGVAPLADDSGQRKGKRRIWGGRADVRSVVYMAALAAIKHNPAIKVFHSRLIAAGKPRKVAIVACMRKLLTILNAMMRDQSMWNAAKHLQSAKTA

SEQ ID NO: 478307 - protein, 407 aa, unidentified
MVSVMIGVDPHKASHTAAAIDPAENDLGQIRVRAAAGQVQRLLAWAGAWPERTWAVENAGGLGYLLSQQLLAAGERVLDVPPKLAARVRLLATGDINKNDPNDARSVAVAALRSPAVKPVAAEDHQAVMKVWAKRHRDLGRARTQVVCRLHAVLCDLVPGGGISKELSVGKAEKVLAEIEPEGAVASARYQLAEAFIDDLRRLDEQIRDTKKRITAAVTASNTTVTEIFGAGPVIAAMVKGDVGDVRRFATRDRFASYNGTAPIEVSSGPKKIYRLSRRGNRRLNHAIHMIAVTQLRFPYTEGRAYFERKLAEGKTGKEALRSLKRRISDQLYARLLDDARRQDSVSENGPGGHTGSVSASSAAGSHPATPTLRKSHSRTATKPTTSRRTRRPADAPASQKVSRRAS

SEQ ID NO: 478308 - protein, 375 aa, unidentified
MDHIRFIGLDIHKARISVTVAESGRDGSIEYVGEISNDPRAIGKLCKRLERRGALLSFCYEAGPCGYGVYRQLTDLGHECDVVAPSLIPKKPGDRVKTDRRDATMLARLLRAGELTSIWVPDGDHEAMRDLVRLRSAVRQVLTRARQHLQGFLLRHGRKHTGGTAWKAAYRRWLSTLAFDHCAQQIVFQDYVDAVMDAERRLKRVEDQIVALLPEWNQRSVVDALQAMRGIALINAVVLVTEVGDFRRFSNPRQLMAYIGLVPGERSSGEKIRRTAITKAGNTHARRALVEGAWAYRMRARVGRHKVDRIEALPKVVRDIGWNAQVRLCARYRRLRARGKNANIVNVAIAREMVGFIWSIACTVQAPAQSELKMV

SEQ ID NO: 478309 - protein, 393 aa, unidentified
MAQTSAFHSPSATPDFDQTLVMAIELSSTKWVLAAQVPGLPRLKAKRTIEPTAEALLAAIESYRERAKRAGHTVQRVIATYEVSWSGFWLARWLARQDVETHVLQPSSVPVDRRARRAKSDGIDAEVLLRTLLAWLRGEPRVCSMVPVPSEADEDARRCTRERTELVAERVELVNRIGAVLATLGVSDYDPLRRDRRERLATLRTALGATLPPHANAKITRILDRLDLVRAQIADLEQQRDAVLEDAVPDKAGEMIQQLARLRGIGVQSATVLVREAFVREFANGKALGSYAGLAATPHSSGGVERELGISKAGNRRVRTVMVELAWLWQRYQPRGRPSTLVPRARRRHRRAYAQGDDRGSGAATPDRSVAVRNSGRAAGGGGHEAFDLIGLT

SEQ ID NO: 478310 - protein, 427 aa, unidentified
MAYRIAGIDVHKAMLAVVVADVEVEGDWQFTRRRFGATPSQLRLLTEWLIEHEVEEVVMESTAQYWRPVWDALERDWQRTQRPRGDASPTTAALHLAQAQSNQGRHGRKRDFPDAERLVKRLVAHELTLSFVPDVTQRLWRTVTRRKYQLTRNRVQLQNRLESLLEETHIKVSTLVSDLLGASARRMLRAVATGETDPAAIAALGSPRLHATPEQLRDALGAATDVPPLYRRLLAMTLAELDLLESHMQQLDEELAALLRVHQDAVQRLAAVPGFGVDSAQQIIAEVGPAATTFPTAKRLASWVGACPGHDESAGINRSHRAPSGNRQMRRLLNQAAHAAVKTKGSIFELLYRRFVVRLGHAQAIGAIAHRLCRLVWKILHDGVTYEERGPAVSQARAQRRAAKMLRELRSLGYRVELTPATLHTTH

SEQ ID NO: 478311 - protein, 353 aa, unidentified
MLIIGCDYHPSFQQIAFVDRETGECGERKLTHKEEAESFYRDLNGRSVRVGMEATGHARWFERLLAEQNFELWIGDPAEIRAKRVRKQKNDRQDAEHLLQLLVEDRFPQIWVPSPENRDLRQLLWHRHRLVQMRTRVKNQVQAIALNEGIRRKKGLWSKLGRVQLESLSLAPWSARRRQDLLELLDRLNPKIDELSTAIQQAAEQRPEVQRLMTHPGVGPITALAFVLILGVPERFQCGKQVGSYLGLIPCEESTGGRQRLGHISKQGNTLLRFLLIESAHAVVRYDPDWRRRFLHLAMRRGRPIAKVAMARRLAVRLYWMWRKAWDYQQTLKFGSQGRKLSSHNVVTTGSTR

SEQ ID NO: 478312 - protein, 342 aa, unidentified
MKNITVLGIDLAKNIFQLHGTDPRGKCILKKRLGREGLIEFMAQLPSCLIGIEACGGSHYWARTFQAMGHTVKMMAPQFVKPYVKSNKNDQNDAGGINEAVTRPSMRFVPIKQIEQQDILLIHRCRELLMKQRTALSNQIRGLLAEYGIVIPQGMSQIKILPEILDMNKNKLTTRATSIFTRLHEQFKTLEEQINGYEQEIEQHANEDARCIEIQRLKGIGPITASAVVATIGDPSVFKNGREVAAWFGLVPKQHSSGNKIRLGGISKRGDRYIRTLLIHGARAVVNMCEKRSDNLSLWVADKKHRCGYNKAAVALANKNARVIWAMLATGEAYRVPQESAA

SEQ ID NO: 478313 - protein, 345 aa, unidentified
MSLMFFLGVDVSKKTLAVVLSDHKDKILWSNKSIPNDEVGFKKLVETVIKNTSKKAGKEEYSIAAGMEATGVYGERLAYYLNGNSHNGSIVTYVLNPAAVRAFGNSVMAPNKNDSADAQLIASYLSMAVTKGQISPWKALSPEGRALRELSRRREELIGLLESEYNRMEKLECMQEPPEAIVRNVREHICYLKDSIHILEKEIEEHIDDDPCMREDIELLRSIPGIGEVTSVTLQGESDGLNNFQSVKGLVSFVGIAPSEHTSGTSVFKKSKISRRGNSRIRHHLYMATLVAARVNPVIKEFYERLLNRGKCKKLALVACMRKMLHIIWGVMKNRKRFDPCYSLK

SEQ ID NO: 478314 - protein, 385 aa, unidentified
MPSDLSKSLVALKQDNTLIAVIELSLSNWLVAGLVPGLNRQPRRKLGADPEALLTLLQRWRDEAVKTGQAIERVTVAYEAGRDGFWLARWLKSRGIEAHVIHPNSIPVPREHRRAKSDRLDTELLLRAFLGWLRGEPKHCTMAQIPSVEEEDLKRPNREHQRLVNERTSLINRLKGCLIRFGIRNFNPKLKTAGERLAGLLTPEGMPLPANTLAELGHDLARLQLIKAQLKEVESRRLKQLAAAPKHRHAAAVGQLTRVVGLGIETADMLDSEMFCRPLRDRWAVARYGGLTGSPDESGQRRREQGLARAGNGRVRRGMIQFAWRFRKFQKDSPLAQWYERKTQSARKDVRKLMIVALARKLLIALWRMVTQGVIPEGIRLREAT

SEQ ID NO: 478315 - protein, 321 aa, unidentified
MQTIPVTVYAGVDVAKATLQLHLQGRQAEFSNQAAGLVQLCQQLKTIPHIHVVCEATGGYERLLVQAMHQAQIPVSVTNPAQVRAAAQAQGQRAKTDRIDAALLTDYGQRYQPKPTSPTTASQDQLVALTQWLMQLVQAQALAKTQAEHHQAAFVCGRHTKLMAHYQSQIVAVEKQIRALLAQDAQLQQRVDCLDEIKGVGARTAWLVLAHMPELGQINRQQVAALAGLAPWTRQSGTMKGMRCIGGGRPEVRLALYMAALSAARCNSVLKPFYQRLRAKEKPAKVALTAVMRRLLVYMNHQLKALQATQTDTKLQNAKIP

SEQ ID NO: 478316 - protein, 365 aa, unidentified
MPPRRVGDAAAAMKKYIGCDMHKKFSVFVAMDERGKTDAPVRVANDSLELTEYLNKLEPGTEVAVEASGGWYWFVDQLEQVGLKVHLVDPLKAKQRMGGRNKTDALDAAGLAMLLRNGTLPEVWIASPQLRDLRGLLRARLSLRQHTTALKNRIHGAIRRYGQYEENEPKNLFIGKGRVQLSVYVGALPPETRLATRHEWELIDQCEEHIKELEKRIRLGIGQLGYVRLLKTMPGVGEILAATIYLEIGDVARFSCPERLASYAGLTPTVHASGGKIHLGKTSAMANHFLKWAFVEAANGIVMKKSHYGECHVVKLYDRLRAAKNHGKAAVAVGRHLAEASWWILQKKQSYREPAPASMSSSKNG

SEQ ID NO: 478317 - protein, 406 aa, unidentified
MGLIIGLDIHRTFAEAVVWEDGRLNGMGRVEMTRTGLEAFGGRLDAGCEVVIEATGNAMAVARVLTPFVSRVVIANPLQVKAIAHAHVKTDKIDAGVLARLRAAGFLPEVWVPDAATERRRRLAARRNQIVRQRTRLKNEVQSILHAHLIPPCPHADLAGLSGRRWLCSQPLPADEQQAVERALRELDRLADDLEVLDRQIAEDALNHAGVQRLMTLPGVDVCVASGLVAAIGEISRFSTAEKLVSYLGLNPRVRQSGLGPAKHGRISKAGRAHARALLVEAAWSAARSPGPLRAFFLRVRAKRGDKIAAVATARKLSVLAWHLLASQTDYLWARPSLVASKMRRLELTAGRPKAQGKRGSASAYNNKTLRAQEMLIAVKAEQAYAHFTGQWRTRGARAPHAGRTV

SEQ ID NO: 478318 - protein, 489 aa, unidentified
MSTAPKQEREKEGSDAQRSAPKRKARGSHCQQGGGNQRRSKLTITNPDAAGIDIGAQVHYVAVPEDRAEVSVRSFGAYTAQLDELVQWLKDCGIKTVAMESTGVYWIPLFQKLEEAGLEVLLVDARQAKHVPGRKSDVQDCQWLQQLHSYGLLRAAFRPEDSICRLRTLQRHRKNMVESAAMWIQHMQKALNEMNLHLHHVLSDISGLSGLAILDAILAGERDPRKLATLAHYRVQKSQAQIEAALRGDYRPELLFVLSQTLQNYRQMQQQIAQCDLTIEKQLAKMADCTNPNQASEPTQQSPDSAGCKPPKRKPKDALELSLAGHLKRILGVDLTTIPGLNILAVLNLLSEIGTNMGKWRNEKAFVSWLGLSPNNKISGQRVLSSRTRKVVNRAATTLRLAAMLLGKSNTPLGSFYRRKRAQLGAPKAITATARKLGCLIYRLIKNGQGYKEPDLHTYELKYKDQILNSLRKRANSFGFDLVEVPNAA

SEQ ID NO: 478319 - protein, 349 aa, unidentified
MLYTGIDYHRSFSYLTTMNEKGEVVSQKKLPSSGEIVDFLKSFGESMEIAIEATPSWYWLYDELEDEGFQVKLSHPLKTKAIASAKVKTDKVDSATLAHLLRSNLLPLSYVPEKPVRLNRELLRYRASLVKIQTRVKNKIHTILAKNNVSHDYSDLFGKEGMAFLHSLALPENYKIALEGYLTVLDVARREIRLASKKVEQVAEGDRDAMLLMTIPGMGYYSALLTKSEIGDVKRFPSAKQLCAYAGLVPSTYASGNACFHGHITKQGSRWLRWILIEAAIHAVKRPGMLRRFYFKVERKKGGQIAKVATARKLLEWIYHILRDGRSYQEMEKMADLLGRGELGNCPGQ

SEQ ID NO: 478320 - protein, 358 aa, unidentified
MKKFIRIGVDLAKNYFQVHALESENGRAVTRKLKRSKMHEFFSQIEPCLIGMEACGSAHYWGRELKAMGHEVLLMPPAYTKPYVKRGKNDAVDADAICEAMSRPGMRFVPIKSPEQQAMLMLHKTRELLVKQRTMRLMLHKTRELLVKQRTMSVNALRGHLSEFGIVAAKGIGRVDELLDLANSDATLPVAAKAGVKVLAQALEGLDKAIDDLEKEISSAHAQNEMSRLLDKVPGIGKLIASVIAASVPDPSVFKSGRDFAAFLGLTPRQNSSGGKQTLGGITKQGNRYIRKMLVLGATSLLNVLGKRKGALRDWIVGLLAKKPARLVTVALANKLARILWAMMKTGECFRTEMFAKA

SEQ ID NO: 478321 - protein, 351 aa, unidentified
MVTVGLDLHKRYITACALDDAGTVLAESRRLEPTMDTLGRWVGALPQPLTIALEATLYWHWLEQQLTALGHRVVVAHPYQVKLIWQARTKTDPIDARKLAELARVNLLPAIWIPDSATRALRQLLRGRVFLVRQRTVMRNRIHAWLTAENLRCPELDLYTRAGQAWLASVDLPAVVRRQVDLVLENHALLTTQIQALDRHIKDTVKRDATAQRLQTIPGIGPFGALLLQAEIGPISRFHSAQELAAYAGLVPSTRSSGDKTRHGHVGRGNPWLKWLLVEALQTLKLAPGPVGDHYRKLLRAKGKPKATVAAARKFCTYLYWMLKEEWSYTEWLRQHDRSEVRPMQPLGSAA

SEQ ID NO: 478322 - protein, 393 aa, unidentified
MFFLGIDIGKNTHVASLIDTDGKTLFKAFSFSNTTDGGNALLAKLSDYTPSSIQIGMEATGHYWLSLYSFLLDAGYSVHVVNPIQTDGWRKGTEIRKRKTDIIDSLLIADLIRYGDFLETSLANEDTLALRNLSRFRGYLVSSIGDLKRKTIALLDQVFPEYQSVFSDVFGQTSKELLLHFQTADDFVAISADQLEGVLDKMTKKSFARRKVQEISQLAGHSFGLSFCKDSFSLQIRMLLEQIQFIEEQVHDVEQEISQIMDKMDSPILTIPGIGLVNGAVILGEIGDISRFSSPVKLVAYAGIDASVSQSGQYQSTNNKMSKRGSPYLRKAFFQAALVAAFNDPTFSAFYQKKRAEGKHHLTAIGAVARKLCYVTHAILKNNTPYVVQTPKE

SEQ ID NO: 478323 - protein, 356 aa, unidentified
MNEGSWVGLDVHARSVVAGVIEGVSGEVRSLRVPTGNAETVAWLETLPAPVRVVYEAGPTGYGLARACAGAGISCVVAAPSRIRPAADRVKTDRRDAERLARLLRLGEITPVRVPDPEEEAARDLVRAREDARGDLMRARHRLSKLLLRHGAVYDATAWTRAHDVWLRRQRFQSGPLAIVFDECYGRMLDAKTRRDALDKAIAELAATPPYVEVVDRLVCLRGVSTLTAFALTVELGDWRRFRPESLGPFLGLTPSENSSGERRRQGGITKTGNTHARRLLIEAAWHQRRPPPMSTVLTRRRDGKPPAVQAQADRSARRLHGRWHALEARGKPRSIVVVAVARELTGHCWALATME

SEQ ID NO: 478324 - protein, 355 aa, unidentified
MNSIKYIGMDVHSATISIAVLNDAGKLIIEATIQTAAAAVVDFIRGLPGTLQVTFEEGIHAAWLYEVLLPHVALVLVCDPRQLPRHKREKKSDKIDARQLAEWLRLGSLKPVYHGRSGLRTLRESTRSYLTLVSDTTRVMNRLKAIYRARGIASKGTRVYSPRYRPAWLEQLREPGVRWRAELLYQQLDGLLPLRQQAKQSMLAESRKHAAQKVLLSIPSLGPVRAAILMAVMQTPWRFRTKRQLWSYAGLSLVTRSSGDYDIVQGHLTRSRKSVLVLGLNANHNHVLKAIFKDAAAGALAHAGPWQEFYARRVAQGMKPELARLTLARKLATLTLELWKKGACFNAEHLKPQAA

SEQ ID NO: 478325 - protein, 412 aa, unidentified
MLHPKMKKLFIGVDIHKRTHVAVIINCFTEKLGELRFENNKKGFEKLIEFVKSHLKRGITPCFGLEDTASNGRNFTRFLLNLGYTVKSVDASLTYTERRNQAISHKTDGHDAFCVAKVLLNQLDTLPDASIHDDSWTLQLLVSRRNSIVKVRAASKNQVHSYISHHYPSYPKFFTVTYCKAGMEFFQNFPSPSKLRGITKEELAEFLSIHSSGFFGIEHAEKILKLVEKDGDTSTEYQETRDFIVSHCIKEIKHCNEELEVIEAEIKKHMKQFPYKLETMPGINTITAAMLISEIGDIRRFSSSDKMCRYSGISPVACSSGDKDKNFRNKQGNRRLYEIFRDIASRNICRGRDKKSPINDTFLEYYNKKISQGKTKRQALIAVMRQITKVIYSMMIHQREYIKPTVSKTENA

SEQ ID NO: 478326 - protein, 347 aa, unidentified
MKQIIRIGMDTSKQIFQLHGVDASERVVLRRKLKRKELLGFFAGLAPTIVGMEACGGSHYWARELARLGHDVRLIAPQYVKPYVKRGKNDAADAEAVCEAMSRPTMRFVPVKSAESQAALMLAGLRERLVRNRVQLVNAIRGYAAEFGLVAARGHAKIAPLLARLQEDASVPSLARELFAAHAEEYDQLESQIEAIDAKLMAWHRASELSRRLTRIPGVGPVIASLLAMKTPDPHVFRSGRQFAAWLGLTPKDHSTAGKLRLGVITRAGDERLRSLLVVGATAVIWQTRRGKGRCGSPWLVALLKRKPPKLAAVALANKIARIAWKLMVTGETYDARRALPAVPVAA

SEQ ID NO: 478327 - protein, 408 aa, unidentified
MNAVGIDVSKGRSTVAILRPMGEVVQMPEDVTHDAISLERLAYKILALGDETKVLMEATGRYHEPVAAELHEHGIFVSVVNPLVIHNYSTESSVRKVKNDQKDSIKIAKFCLDRWTELREYTPMDALRQQLKLISRQYDLYMKTRVTLENNLISLTDKVFPGVNEMFKSPERADGHQKWVDFITTFWHCECISRVSEEAFTERYKKWCKRKGYNFSAAKASDIYIDSLGHIVTLPKNDNTKLLIQTAAKEFTSTSELMALVKAQMISLAKQLPEYDTVMAMYGVGEVTGPQLMAEIGDVRNYPRRSSIVAFAGIDPEVDKSGKNQSDGKPTTKRGSPHLRKTLFQILSTYLKLSPQDEPVYQFIDKKRAEGKPYYVYMTAGANKFLRIYYARVKECMAALEAQESSEG

SEQ ID NO: 478328 - protein, 342 aa, unidentified
MLIIGCDYHPSVQQIAWADTETGECGEKRLMHSNGEAERFYRELKQKGVQVRVGIEATGHSRWFERLLSELGFELWVGDAAEIRAARVRKQRNDRFDAEHILKLLMEDRFPKIWTASSENRDTRQLLLHRHRLVGMRTRVMNQLQAIAMNEGVRRKSGLWSKKGRARLESLSLPPWTSRRRQELLELLDRLNPMIDKLSKAIEQEAARRSEVQLLMTHPGVGPITALAFVLIIGNPERFHCGRQIASYLGLIPCEESSADHWRLGHITKQGNALMRFLLVEAAQTVARCEPEWRQHYFHLVLRRGRAIAKVALARKLAVRLFWMWRQGWDYQQWKKFGSHVG

SEQ ID NO: 478329 - protein, 434 aa, unidentified
MRILYERCCGLDIHKCSIAVCVVITRDGKTEEETRRFGTMTADLLELAAWLKARGIEHVAMESTGVYWKPVWNILEAEGFDLLLANAQEVKIVPGRKTDQKDSQWIADLHQHGLLRKSFVPPRQIRDLRDLTRSRATLAQEHSSMCNRIQKVLEDANIKLSSVASDVFGASGRAMLLALMKGENDAEALAELSKGRLRNKIPELRRALEGRVTGHHRFLIDRHWRQMESLENQMRQFEEEIAERMKPTAEEIARRGESLPADAPLPLSPREEAILLWMELPGVGLTTACSMVAELGVNMEQFPTSAHVASWAALCPGNNESAGKRMSGKTRKGNVWLRRAMCEAAWAAAHSKNTYFAAQFGRIAARRGKKRALLAVAHSLLVVAYEMLKHKGHYRELGADFFDGLNKEQVKRRLVQRLAKLGFQVTVTKAPTAE

SEQ ID NO: 478330 - protein, 331 aa, unidentified
MKILDTIGIDMSKLTFDVRIHSSQAYVQFKNSKTDFKELLKWSFKNSAFSKENILFIFEHTGLYSHQLAVYLTEQKVPFALVPGLEIKRSLGIARGKDDKVDATKIALYGYRLRDELNPYKLPTTQVLSIKRLLSLRERLVKQRAGFKASFKEQKRVLILNKNKTLFDVQEKMIAYLTKQINDVEKQMITLIKCDDKLKKQYELITSIKGLGMQSTLFIIAYTSGFTKFKNARKFASYIGIAPFPNTSGTSLIGRTKVSHLANKKIKSLLDMCSKSAIQHNPEMKKYYEKRVAEGKNKMSTLNIIRNKLVARIFAVVERGSIYIDIMKYAA

SEQ ID NO: 478331 - protein, 577 aa, unidentified
MTTTGLDRIGVGIDTARYGHRASFLGPDLKPVAKPLTVTENHAGYRALQGRLEDLRHKHPQVHFHIRIDAAGQYAANLEQFLRDLELPLTLSIGEPKRNKDYRMAHFPKRTSDDTESQALARFALVERPRATPAPVPSLALLRELVGRLQGQVKQTTRATNRLHNLLARTFPELATLTEDIAAGWVLRLLRKYPTAQRVAAARLASLEKIPHLDGDKARALHQAAADSVASLEGATAESLVRNLVEQVVRSRAAERDLLRLVTQAWDDLAASPHVRVLTVPGIGAATAAILVAKIVDIERFARPESLVNYFGIFPEEDSSGVDKGGQPRPTAVMRMSRKGNDLARAYLWNAARSAIRHNPAVGALYRRLRAKGRRGDVAIGHCMRKLLHLVYAVWKTDRPFDPKHFAWEPPAAAEPLAGAANGAAVGHERGEPAGKVVTTASPRVEPTAAAVNPAAPSLRAARPRVDYAFLREQITMERVLGHLGLLERLRGGGPQRRGPCPLHGHPAAAERTFSVDLSRDIFKCFHAGCGAQGNALDLWAAIHRLPLYDAALHLAETFGLRRNREEEPVPGTRHPR

SEQ ID NO: 478332 - protein, 421 aa, unidentified
MQVIYERCAAVDVGKDVIAIAVRKPGDGPDGRVTVKRTFKTFYGVLREAARWLMSEGVTHVAMEATGIYSMPVYHALLEHGDFEKVLVCNAGHVKNVPGRKTDMADAEWLCQLLECGLLAGSFIPPADIKAARDVIRYRAKIAQQRVSEISRLGNVLQDAGIKLDSVAWSISAKSGRLMIEALIDGERRGAVLAGLAIGRMRSKIADLSMALEGRFGDHHAMLCRLHLDHLDHLDGMLAQLDTQIQAMMQPFHAARDLLITIPGIGPLSAAAIISETGADIAQYFPDAAHLASWAGLCPGNHESAGKHRVGRRRPGNKHLQPVLVECAWAAVRHEGYLKSLYHRHVMKWGGYRSSIAKNKAIIVVAHAILVIIWHVLATGKPYGELGADYFTRRLDPERETRRLIARLEALGHAVTLDKAA

SEQ ID NO: 478333 - protein, 345 aa, unidentified
MHIASIGIDLGKTTFHLVALGERNKVLLRRKFSRSQLLAYTANLPASLIGLEAGAGSHFLGSVLREQGHQVRLIPAQFVKPYRKTNKNDFIDAEAIAEAVTKQNMRFVQIKSQEQLDIQAMHRVRDRLVQRRTALINEIRGFLLDRGLTFAARPIELRKKLPSVIEDAEQNLSSRLRWLLDRLWQEWKQMEIDIKSITEAIERIGNENALCQRLRQIPGFGPLVSTATVAAIGNGAAFKKGRGFAAWLGVVPGEHSTGGKQKLTGTSRRGNKYLRKLFVQGAHSVLLQRTKQTFALSMWLANLVSRKRAQVATVALANKMARMAWAVLFKGEAYRPPLLPQTVAA

SEQ ID NO: 478334 - protein, 355 aa, unidentified
MNDAKYIGMDVHQATISVAVRDSRGNLVMEAIVETKAETILQFIRGLHGSLYVTFEEGTWAAWLHDLLQPHVTRVLVCDPRKNALLKVGNKNDRIDARKLSELLYLNKLSSVYHGEPGIRTLKELARSYIAMTRDLTRVMSRLKAIYRSWGIPCAGQQVYAPRYRPEWLAKISEVGVRRRAELYYQQFDALAALRQQARRELLAEARKHPAMKLLRQIPTIGLIRAALLIALMQTPNRFRTKRQLWAYCGLALRTYTSGEYRFVGGQLKRSKKVLAVRGLNINHNHDLKNIFKGAATRAASTVGPFQDFYQACVARGVKPHLARLTLARKIAATTLLVWKKGVRFDVEHLKQQAA

SEQ ID NO: 478335 - protein, 348 aa, unidentified
MAHFVGLDVSVEETAVCVVDDVGKVLCERKVRTEPEDIAVLLTSIGGDYIRIGIEAGPLSQWLVNGLTEADLPVVCVETRHMKALLKAQQVNKSDRNDARGIAQMMRVGLFKPVHVKTLIAQEQRMLLTSRKLVQRKLMDIESDMRGTLRNFGLKVGAVSSIRYEARIRDLVEGFPRLAAIIEPLLTVRRVMRQQLATLHKLLLNAVRVDPVCRRFMTVPGVGPIVALTYRASVDQPHRFIHSRAVGAHVGLTPKRHQSGEIDYDGGVSKCGDSMLRAMLYEAAQSMLTHSKKWSWLKAWGMRVAQRRGMGRAIVAVARRLAVILHRMWVDGTDFRWRNGSTAVVQVA

SEQ ID NO: 478336 - protein, 314 aa, unidentified
MTTPNEVFVGIDVSKATNEVAIFGQDGVESFANNPTGHRALANFLEPLEPTLIVIEATGGLERDLASHLLETGFAVAVVNPTRVRDFAKALGRYAKNDPIDAHTLAHFAQAIRPEVRQLQSAQEAELLALVRRRRQVVANIGQERNRLHTVPAKAKKYIQDHLAYLQAQLQVLNAEIDALIQAIPQWRQKAQLLCSVPGIGPVNAFTLLAELPELGSVSRQKIAALAGVAPYDKDSGKKKGRRKTFGGRYGVRSTFYMAVLAAIRHNPIIKRFYERLIKNGKEHKVAMVACMRKLLSIANVMLMRGEAWRLAAN

SEQ ID NO: 478337 - protein, 422 aa, unidentified
MSKRKNRVCGADVHRDLIVATIRDDDNPLFQEEFGTTHAELKRFRDWLVANNCEQLAFEATGVYWLPIYDFLSPSIDTIVANPWKIKNIPKDKTDSKDSQWIASLCLNGQIKRSRILSKNERDLRTMTRARSGYVKTRTQFRNRIHKYLASNGIKLSSCISDIFGESGRYILGGLVEGRSIDAILEGIPSGRVRKKRDLIKEALGNGLDAISRMLVKDTMDLLDHLETKVEAASREAINRLQTKSKDLAIVMSVPGIGFVSGSVILAEIGDYHDFKTPEQLAKWCGLSPGENESAGKKKPCGITKQGSKYLRTVLVQIAHIVARKGNSNLSKFFQKLSKRKEYNVAITALARKLICLVYHLLINQELYLEEDGRRRKSKPAKSDLTSSYSPENQLEDKVAAIVDAFYHLKEQNRKTPSDEGG

SEQ ID NO: 478338 - protein, 402 aa, unidentified
MAYDFVIGVDVGKYFHHACVLDPQGSQVLSERINQHEGSLRKLFGKFLADDASVLVIVDQPNNIGRLTVAVAQDMGADVRYLPGLAMRQLSRIHVGNSKTDVRDAYVIAHAGLKLPDALRSVDRVEEVFIQLKVLNGIDEDLARAYTRLINQMRSALVGTYPAFEHVLRGQVIHRKWILHLLAKYGGPTKIRRVGRARLAAFARSHRARNPEPVIDAMLAAIHGQTVSIAGAEYAELGVAMSAKDALAKLEHRKEIEAQVLKLIQDIPHTEILLSMPGIGPRSAAQILMTVGDMSDFPDAAHLASYAGLSPRTNQSGTSIMSNSPNRAGNKKLKNALWQSSFASIRFHERSRQFYERKRKEGKRHNAAVVALARRRLNVLFAMMRSGECYRDISTVQETAAA

SEQ ID NO: 478339 - protein, 404 aa, unidentified
MHQRCAGLDVHKDEVVACARVVSGRKVLRTSARFPTTTRGLSALSEWLSTQQCEMVALEATGVYWKPVWHILEAHFSLVLANPGHVRAIPGRKSDMNDAAWLADLVAHGLIRGSFVPPTPIRELRDLTRTRKQLVRQMAQHSLRLQKTLEDANLKIASFVSDLLGVSGRAILQGLIKGETNPERLLARTTGLLRADPEQLRAALDGRVREHHRFLLRLHLTQIEAIEEGLRTVDARLDILLRPFTPVVDRLSTIPGVGPLVAQTVIAEIGADVHRFPTPGHLRSWVGLCPRLDESAGKRRSTRLRHGAPWLKTVLIQAAWAAVRRRDAYPHAQFQRLKAKRGPKKAIVAVAASLLTAVYFMLRDDVPYRDLGVHYFDRHDTTRAAARLTKRLEALGFKVALSAA

SEQ ID NO: 478340 - protein, 393 aa, unidentified
MICVGIDVAKDKYDCFILSSEGEVLADVFTIPNNAEGFDTLLQTIRRCARPEDKIKVGLEATGHYSYNILGFLLNEGLDTYVINPLHTNLYRKSLSLRKTKTDRVDARTIAAMLMSDVDLKSYTDTAYHNEELKSLTRYRFDKVRERAKLKQSVSRLVTILFPELEKLVSTLHTASVYALLSEFPGAKQVAGAHLTHLKAALYDASKGRYGRDMATTFRDAARCSVGSVMPAKSLELRHTIRLIHELDAEIEDIEAAIQSMMDEIQSPITTIPGMGVRMGAMILAEIGDFSRFDSPNKILAYAGISPSTYQSGQLSLSGAYSHMERRGSRYLRYALYNATKYVCLWNPTFAAYLAKKRAEGKHYNVALSHAVKKLVRLIYALEKSKRPYSTAA

SEQ ID NO: 478341 - protein, 403 aa, unidentified
MPSDTPLLLGPKPMHKPTPTRPSNKSWHPPLPWGKLGYPKTKFYPQSKEDTHEPFYRTGRSFVKLHLCVLSEKGKTLRTDVVETNGQSLVEYLRLIPGRLHLCLEEGTQSQWLFELLAPHTHEIAVVSGEKNQGDKSDERDALGLAERMRTGALGAKIFKAPLAFTSLRDLARIYGMVTGDVVRTKNRIKSFYRSRGVQPTAGKAVYAVGRREEELKRLKGGTRQSVQLLCRELDILEGIKADAQQALVAEAHKHAIAKVMETAPGLGPVRVAQLLAIVVSPHRFRTSRQFWAYCGLAIVMRSSSDWVQQPNSQWMKAPVTRTRGLNRNFNRTAKAVFKGAATTVITQLPKNQLYRDYRRLLKEKVKPNLAKLTIARRIAAITLAMWKNKEAYDPAKYQKKAA

SEQ ID NO: 478342 - protein, 387 aa, unidentified
MLYLGIDIGKNSHVASLIDENKSVLFKAFSFSNSVEGAESLLQKLPSSDVEIGMEATGHYWLSLYSFLISKNFSVHVINPIQTDAWRHGFEVRKRKTDVIDSLIIADLLRYGNFVDTSLADENMRSLRDLSRFRVYLVSSIGDLKRKVIALLDQVFPEYTSTFSDIFGKTSSEILKQISAPKDFEEITSDKLSSLLEHIYLKKYATKKIQELSSKAHSSFGISFCLDSFSLQIKLLMEQISFIEDQIKLVEKGIEEIMDKLNSPITSIPGIGIVTGAAILGEIGDISRFSSASKLVAYAGIDASVSQSGEYEATINHMTKRGSVFLRKALFHSALKAEFYDPVFQAFYQKKIQEGKHHLVATNAVARKLIHTIYAILTKNVEYKIQS

SEQ ID NO: 478343 - protein, 346 aa, unidentified
MDHYAGIDVSLECSSVCVVDVNGKIVREAKVASEPEALIAWFRSLGFDLARIGLEAGPLSQWLYAATKQAGLTVELLETRHASDAFKAMPVKSDRNDARNIAQLMRLGWFRPVHCKSTSAQEIRAMLTARKLIQSKLQDVENSLRGILRGFGLKVGKTTKRSFAARISELVAGHPVLETIAAATLAVHMVLLREFNGFEKRVRAMSLLDARAKLLMSTPAVGPVISLTYASAIDDPSRFASSKRAGPLFGLTPKKYQSGETDYSGRISKNGDASVREALYEAAHIILTKPIKGCAQLKSWAMRIARRAGMNKAKVALARKLAVIMLRMLKDNVPFNSTANTTAMAS

SEQ ID NO: 478344 - protein, 361 aa, unidentified
MNNEKYVGLDVDQATTVAYVSDVEGGFVMETMLETKPNSIRQFFKGLEGPVHVAFEEGCMAAWLYDLVRPLVKEVIVCDPRQNKLIQSGNKGDRVDANKLSRLMRLGELRSVYHGEQSIRDLKELVHTYDSLVRDSTRTMNRLKAVYRGQGIASRGKRIYKKLTREDWIEKLPAQAARSHATCLYKQMDSNSELRAYAKREMVKAARKHSVYKQLAKVPGFGPIRVSQVIAEVGTPHRFRTKRQFWTYCGFAVVTHMSSEYEVIDGRRRRRNKPLRTRGLNNNFNRRLKAVFKGAATTAIKKEPFKQYYSRLIDNKMRAEMAQLTVARKISAIVLIMWKKGDSFDPDRVSQAEKAQATSTD

SEQ ID NO: 478345 - protein, 317 aa, unidentified
MGGVNAAIEVGKHELKVCLGSEGELFSEPNQPRAINRIIKRLSQAGCARVLIEGGSYQSVLIAALRAAGLPVVIVNPRRVREFAKSIGRLAKTDEIDARVLALYGERTEPPLRELADEQTQSLRTLWVRREQLIEMLVMEENRLEHVPAKAKAVHHNLRSHIDYLRKQIKQADDDLDREVRNSPLWDRYEMLSSVPGVGRVLSVALLSDLPELGRLNRGEIAALAGVAPFNCDSGTLRGQRRIAGGRTRLRRTLYMAAVSAVRCNPVLKPFYLRLRAAGKPGKVALVAVMRKLLLILNAMLKTRSAWRALPCPTANS

SEQ ID NO: 478346 - protein, 321 aa, unidentified
MKEASTQRLVCGGIDIGKDRLDYALAGADRAMNCANTAKGRSQMIAFLKEKSVRRVGLEASGSYEIEVVDALRAAGFQVAVLQPNQVRAYGQFKRKRAKSDPIDAILIADCTAALDQLRDPPDPRLASLAEHLTFIEQIQEDIARLKTRRDRFRDPRVKEEIEGEIKRLAARKRQELRLLMKAVRAHADLARKLHLLLSIQGVGEPTALALLIRMPELGTLSREEAASLLGVAPFVHDSGRYKGQRRTGGGRARARTSLFAAALAARQWNPALGAFYDRLTKAGKPYHLAIIACVRKLVIFANTVLARNQPWEVRTAVARR

SEQ ID NO: 478347 - protein, 335 aa, unidentified
MDLHRHRSVLVRMSEDGRKLGTARITNNPAALRAELARAGENPRVVLEATYGWYWAADTLAAAGAEVHLAHPLGVKAYGYQRVKTDARDAANLADLLRMGRLPEAWITPPEIRDLRELTRYRQKLVGLRSSCKDQVHAVLAKLGIAVTCSDLFGAWGSAWMDGLRLPQPYAGKVTSLRQLTGELNTEITMLSEVIGDLLAGHAGYRVIQRLPGIGPVLAAVIIAEIGDVTRFPTAAQLSSWAGLTPKHRQSDTSVTRGHVTKQGSRLLRWALIEAIQRARAGSWPGDARDAIIARRGKQARNIAKVAAARRLLTLVYYGLRDGQIRCLPEPARAA

SEQ ID NO: 478348 - protein, 356 aa, unidentified
MITIGVDAHKRVHVALALDEAGRELGQWRGPNSTVGWQALGQWVLGVLAFGGDRQWGIEGAWGYGRGLAQHLVAAGETVYEVNARWTASGRRSARRPGKNDRLDARAVALLVRQETPTLPQVQAEDETAVLNLLTTEREQALSEATRLRNQIHALLLQLDPEYQVHLPMLKSRASLAALETYIAPGGGPLQLERAASVRRLAQRLRLALTQAEELASRIRDSAAEDFSPLTRLCGVNLLTAGTLAGVLGPGRRFATDAQLAAYAGVAPLEASSAGLVRHRLNRGGNRRLNAILYRIALTQAHHSSEARAYLDRRVAEGKTRREAIRALKRFIIRAIWRLWQECRSVTNTSLEVRAA

SEQ ID NO: 478349 - protein, 344 aa, unidentified
MTVDYYVGIDVSLEASSICVVDGAGKIIKEAKLSSEPEAFIAWFKALPFSLARIGLEAGPLSQWLYAALKEAGFAVELLETRHVRDAFKAMPVKTDRNDARGIAQLMRLGWFRPVHCKSAPAQETRALLTARKLVQGKLYDIEMSLRGILRGFGLKVGRTKKAGFASRIMELTEHHPALKAIAKALLTVHEVLLKELNRFENQVRKLARGDARARLLMTTPGVGPIVGLTYVAAIDDPARFSSSKTVGAHFGMTPKKYQSGEIDVTGRISKMGDKGVRAALYEAAHVILTTPVKGGALKSWAAKLARRAGMRKAKVALARKLAVILHRMLADGSVFDVTKAAAA

SEQ ID NO: 478350 - protein, 417 aa, unidentified
MSSRQEVYVGLDVARDSMEAVWVDEEGERIGSLSFANDNSGYEEFLGKLHKFREAGDDITVGAEGHAGDLTPLDQYLNDEGFDFLSIHPLKVRRYKDILGQPQKTDNYDAYVVADFLRSREDLLENKPQFDPVIQKVKKLSRTYKDLKKQINRYTNQLDETLTEYFPELLDDSFPDLTTKTTLKLLNEYNSLEKIRETEVEELGKFLDDTSRGYYGEKLASRLIETVKRIDRSPIAESAYRVKLETLTDILLTIKEHTKEIKKKISHLLEDWEDARIVLSLCGAGDITVGRWLGEIESTDRFDGSDPLGLFCGVAPLPHYSGKYSTDKASQRVNKRAKDAIMQIAKSSVQHNPESRRYYNKKRDEGKSHWHAIKCLARQLIRVIYAMLRDRTYYQPNKKSKQQGEEEDKKEVTLNPA

SEQ ID NO: 478351 - protein, 336 aa, unidentified
MSYIGVDLHTTQLTVCYLKSLDDYQFKQYRLSEIEAFLASLEAEDELAVEACGNSRWLVRLVERRVSRVVVVNPSGFEVVKRSVKKTDQRDALNLARFLAVDMLPAVRVKSELAEAVGRMNETRNKLVGVKTSLMNKIHALAVSRGWKLKKESLSSKKGLTKVTEFQWTAIERVELEIIIEQIGNLKASIKRLDEVIAETGAQLSGFENLISVTGIGARSAGVLLSVIGCVEDFETADKLASYFGIVPRISNSNERVNHGRITKRGSKMGRTTLVQCALVAIRYSPYLKKYYEQVKGRRGHGKAKIAAARKYLGIIYHTLKNNWVFEDFNNFVLAE

SEQ ID NO: 478352 - protein, 390 aa, unidentified
MGFAGIDIGAERHMVAALDEQGEVLCRSSPFGEDASGYARLFELLGPSADCLVALEATGHYWRNLFVALIAKDYAVAVLNPLRTARFAEEELRRTKTDAIDALGIARFAQQKRPRAAQLPDSVTEELRELERLRERVVEDFADRLRQLHRAVDLGFPEFTRYVRTLESQLAATILSRYPTAASFRGVSVKKLARIVYDGSHKIGEELARNLIEAAEKSVGAHHSEPYRRRIKYLCEDLDVLRRRLKDLARDVERKLDDHEVGKLLMTIEGLGPLTAACLIAELGVPARFDSPGAIASYVGVIPRIRQSGKKRFTKGPAIPLGNARLRKSLFMVVLQMVRRNPWLRHYERLRAAGKPGKVAIIAAMRKLLVAVWSVATHRRPFVPTMPARV

SEQ ID NO: 478353 - protein, 447 aa, unidentified
MKALPVLDPKAAAIDVGSEKLHVSIAGDTPHVFGTFTGELERLRDWFQAQGVRSVALEATGVYWLYVYEVLEAAGLEVVVVNGRHVQNVPGRKTDMADCQWLATLHAHGLLRGGFVPPAHIRQLQDYQRLRADHLVGAASQVQKMQQALERMNLKFHDVISDLVGVSGLKVVRAILKGERRPGELLALCDVQIQKKKADRVKESLRGSWKKEQLFALRQGLELWEAYQQKITDCDRELEALLREMTDVQPPEGGSGNAVAVGPVALAPAKPPGKNAPAIERMQELVARLCGGRDVSQIPGLSVYLVLQLISEVGTDMTRWPSEKHFVSWLGLAGGRKQSGKRKGSVKAHRNRAGRLFSAAARALAQSVDKALGGFYRRLRGRLGGLAANVALARKLALLFYRLLRYGMDYVEKGLKSYEAKVLETETRLLRKLAKKQGFALIPSTAN

SEQ ID NO: 478354 - protein, 370 aa, unidentified
MKHPTTLFVGLDVHKDSISVAHVFEDRSAEVTFVGPIGTRQGDLDRLVRRLQSKASRLVFAYEAGPCGYVLHRSLTRKGFTCLVVAPSLIPKKPGDRVKTDRRDAVQLARLLRSGDLTSVYIPTVEDEAIRDLTRAREDALKDLKATKLRLKSFLLRLGIHYTGKANWSDAHLRYLAKVVCPTPSQQIVFQEYRRAVSELVERLGRITTVITEQVPSWRLSPLVSALQALRGVQDTVAVTTLAEIGDLTRFHTLRQLAAYLGLTPSEHTTGNQRRLGSITKTGNSHARRALVEGAWAYRFPAKVSESIQKRLEKLPKPIQDIAWKAQVRLCKRYRRLIARGKHPNVAVTAIARELAAFMWAIAREVPITA

SEQ ID NO: 478355 - protein, 431 aa, unidentified
MSKFFYRPTVGIDVSADFSVAAILAPNGEIYRKPFKIMHNRNGFDYLVDQIKKVEEEFSMKTAIFMESTGVYHLTLFHFLKDTFEVCILNPLITNCNKNVDIRKVKNDKKDALTIATIGKFQDVKYSSNFDIEIYTLKSLCRDYYKFTDSKSTFTKKLSTDLRVIFPGYRSVFSSITSKTSIAVLKKYSSAEAVLNADRVELINLISSNSRKGLVYSEKIYKKLYAAAEEAAYIGLKSPSLFVKVINTIAIIESLEIQIRNLLIEIHILMRSNRISDEFKKNVQLLYSIPGVGDLTSITIMSEIGNIKGFVKPKHLVAYFGLDPSVSQSGKFNSNKNVMSKRGTRIGRRALYVVALASVRKSRNGEPINKVLLNFYDENMKGKSKKVGLVAIMHKLINYIFSVLKNQKKYELRDPKIHTKMYLNKQSKPAA

SEQ ID NO: 478356 - protein, 411 aa, unidentified
MNPVIGLDVAKGESQVQAFLDRKKPYKKSFKVAHTLEGLQELHVFIREVEEVTGSTPPIVLESTGHYHMPIVQYFEKRGYLLIIVNPLISYKAKSSSLRKVKTDIIDAHHLCELYYKEDLEPYKKRGIQLLNLRNLTRQHENLTGMFVQTKLQFQSVLDQVFPEYVGVFGDLYSDVSLLILSVFPTSKEILEAGEETLSIKINELCKSRSRKWANDQAVKLIKAATRNPFQQTLYHSHLISLEMLINILLEYKKHLSKLEEEIDALAKNIEEYKIIQSIPGIGEKIAATIISEIGEIDRFNHPKKLVAFAGIDPSVFESGTFKGTKNHITKRGSSRLRHALYTAVRCAIRDARKTRTTKELIPRNKRLREFYDKKREEGKPYRVSIIACANKLLHWIYALLKAKTTFQDVA

SEQ ID NO: 478357 - protein, 355 aa, unidentified
MNSEKYIGMDVHKESISIAVMNGAGKIVMECVIETKASVILQFIHGLRGDLQVTFEEGTWAAWLYDLLKPHVTKLVVCDPRKNASMKEGNKSDKIDARRLAELLRLNHLNPVYHGEHGLRSLKELVRSYLTITKDLGRVMSRVKAIYRSWGIACIGKQVYAPRHRAEWLGKISELGVRRRAEFYYQQLDALRALRKQVRRDLLAECKKHQAWKQLCQIPSIGPIRAAVLLGILQTPHRFRTKRQLWTYSGLGIETRSSADHRSVDGQLERAKKQISVRGLNQNCNHDLKNLFKGAAIVASSKPGPFQEFYTALLTKGIRPEMARLTLARKIATIALMVWKRGASFDAQHLKPQTA

SEQ ID NO: 478358 - protein, 454 aa, unidentified
MTQSNRQSSMPIIHQNAAGIDIGAKFHVVAVGSDKAKEPVRTFQSFTTDLHAMAKWLKSCEVTSIAMESTGIYWIPAFEILENYGFEVFLVNPREAKNVPGRKTDVNDAQWIQRLHQFGLLRASFRPEKQITVLRAYIRQRERMLEFRASHIQHMQKALMQMNLQLHHVVSDITGATGMKIIRAIMNGERCPAVLAEHRDIRCKESIKTIEESLKGNYQEEHLFSLTQAVELFDYYTQKINECDRRIEETLSLLGKDNKLPDQPLPKARHRTKQPNSLSFDVRASLYQALGMDLTQIHGVGPSLALKLISECGTDMSRWPSSKHFTSWLCLSPGNKVSGGKVLSSRTRRSSSRAAAALRLAAVTIGKTNTALGAFYRRLSARIGKSKAITATARKMAVLFFNALRYGMQYVDPGANYYEARYQKRVLDNLSKRAAALGYILQENKMQDLVQGVS

SEQ ID NO: 478359 - protein, 365 aa, unidentified
MERYIGLDVHCKESVYVAEDGEGRVVKEGAVETTAEGLKAMVEEVGAPAGTKVGLETGTQATWVARTLERLGMKPVVIDAHEVRAKARRVGQKSDRRDAWEICDGVRRNLYTAIVYVPSEPVERLRQVLSRRRHFIKARTQQVNAAKFVLRSRGLRSVCRTLTTARAWQRLLGDARVGVVRDHLALHAAVWDVVESNVVALDEELARAGQPFADVMTRLETLAAIGPITAAAYVAALGTPERFPDSSHVVSYLGLAVSTYDSGERERHGHITKRGAADVRGLLCEAAQHASQPTHPLNPYFIRLYARQGRNVAIIAVAQRMARILFQMWRTGQDFDVRKLNVRPIQRVRSRTYYFEIKPPKALKA

SEQ ID NO: 478360 - protein, 387 aa, unidentified
MPQPNDLSRSLIALDQNSTIIAVVELSHSSWLVGGVVPGIERQPRKKLEPSPERLLALLHRWRNEAVRAGSTITRIALAFEAGRDGFWLARWLAARGVEAHVIHASSVAVSREHRRAKTDRLDTELLKRGFLGWLRGERGHCSMARVPTIAEEDAKRPNRERDGLVGERTRIVNRIKSTLARVGIRNFKPALRKAAERLATVHTPEGMPLPPNTLAELQRDMARLSFVVSQIKEIEETRQKRLEQQPETGPDAMVRLLARIIGVGVETADMLVHEVLSRPMRDRRAVARYAGLTGSPDESGAQRREQGLSRAGNARVRRGMIQLAWRFLMFQKESALALWYRARTADSRSGTRKTMIVALARKLIIALWRFVTTGEPLEGVVLRPAT

SEQ ID NO: 478361 - protein, 342 aa, unidentified
MEYYAGIDVSLECSSVCVVDGSGNILREAKVASEPDALIGWLASHGHELARIGLEAGPLSQWLYAAMKQAGLAVELLETRHVRDAFRAMLVKSDRNDARGIAQLMRLGWFRPVHCKSIGAQEVRAVLTARKLVQSKLLDVENSLRGILRGFGLKVGKTTARSFAGRIRELVQGHPGLEPVGKALLAVRDVLLREFDAFEKQVRTLSNSNARTRLLMSTPAVGPIVALTYAAAVDDPARFSSSKRVGAHFGLTPKKYQSGETDRSGRISKIGDASVREALYQAAHVMLTKPVKGCTQLKGWAMRIARRAGMSKAKVALARKLAVILHRMLADATVFNAAAAAA

SEQ ID NO: 478362 - protein, 475 aa, unidentified
MNVKGTKKKNQVVTANIFEQQELWKKAEVIKENLTASTWRELETNGKFDKNEKLSFISDDMLILGCDVGSETHYMRAIDTRGRELSKSAFSFSNDSEGFQSAKEWAVKIAAEHEKSQIVLGLEPTGHYWFCLATWMISNGISVVQVNPYAVKQTKEVEDNSQLKDDRKDPKLIANLVKDGNFGMPYLPEKLYAELRRLSMFRDQLNEDRIRTINRMHREMKIYFPEYKDALGKVDGTFSLELLKQAPFPDDLIALGEDGIRKIWHEAKLRGRGYSRAGEILQYAKASVGIKDGAIAGKTAVKWFVQKVLELDDELAVIENQINQKCQEIPHACNILEISGIGENTLSGILAEMGDISRFDDVKEIQKLSGLGLVACSSGKHKGETKISHRGRKRLRYWLFQAAKSAVAHAEEFKELHMYYTTRTNNPLKKMQSLIVIACKLLRIIYTILKKGTAYDPKKMLMDIRRPEKKEAIAA

SEQ ID NO: 478363 - protein, 400 aa, unidentified
MNAVGIDVSKGKSTIAVMQPFGVVVASPYEVGHTESELKELARFLKSLPGETRVLMEYTGHYYEPIARYLHDADIFVSVVNAIVAHDYSTNTVRRAKTDKKDAVKLANMAIDRWLDLKEYIPEDEIRQTLKICNRQYNQYTKLKTMLKNNLIALLDQTFPDVNKLFNSPARKSDGHEKWVDFALKFWHCECVCGMTERQFKDKYERWCKRNGYHYSVEKAEDVYISSCGNIGLLPMCDSTKVLVTQAIVQLRAIEESLATLKNEMQRLSSLLPEYETVMALFGVGETLGPQLIAEIGDVNRFETKKSLVAFAGIDAPPYQSGSVNVQSRSISKRGSSSLRKTLFQVMSVILQNAPEDDPIYAYLDKKRSEGKPYKVYMIAAANKFLRIYYARVKQCLVNT

SEQ ID NO: 478364 - protein, 331 aa, unidentified
MATFFVGCDVSKKKLDLALLISQEPLKLRSKVVQNNQPGWMMLIDWACRQVNCTPGELHVVMEATGAYHEAAAYALTQAGVRLSVVNPAQVRDFAKGLATRNKTDAADRAVLARYGAVNKPPLWEPPAPEVVELKGLLGRLQVIEEELARETNRLEKAQVSVTPPVVLESLHKNLAFLKQQKRELEQRMNDHIDGHPQLKHDRELLESIPAIGRKTACRMLCVLHSRPFRSAASVAAYIGLVPIHHQSGTSVRKPARMSKAGPGAIRAAIYMPAIVATRKNPDVRAHYDRLVAKGKSKMSALGAAMRKLVHICFGVLKNQQPYRPNVPQNA

SEQ ID NO: 478365 - protein, 431 aa, unidentified
MARKNPYSLLDVKDMVVEGLVAARAGQAATVGVDVAKFEYVACLVWPDRAFERPWRVKSPEQVGLLVAKLRELHGHCPVTVALESTGTYGDVLRQAVADAGLAVRRVSSKAVKDQAETFDGVPSQHDGKDAAIIGTLCAGGHGSPWPLAQDVAKEQALRYWIRKLDTSQRIKQVWCGKLEAMLARHWPEIGGLLKPSSATLLHAVALWGDPRALAADAQAAAKLAGFGRSYLRPEKIQQVIASARQSIGVRSNDWTVRELREIATAILQRRARILHCRCELKPLSRDNACIQGQAPALGLVAACVLWMCLGDAANYASAAAYRKAMGLNLKERSSGMHKGKLSLSKRGQRLTRKWMYFAALRWMRAPCVRRWTEKKKQRDGGRGGKAVVGVMRRLALAAWHIGLGEEFQPERLFPGAGGVQPAQAKEVVVQ

SEQ ID NO: 478366 - protein, 360 aa, unidentified
MEPEGKTSRITGGVDTHKDTHTAAALDATGRVLGNATFPASAVGYEELLAWLRRFGPLDRVGVEGTGSYGAGLMRYLRESEVPVIDVNRPNRQARRQHGKSDPADAEAAARATLSGDASGVPKSQDGTVEVIRMLRLERRSAIHARTQAANQLHAVVSTAPEPLRTKLRALSLAALLDHARKCRDVLPTDTVSATQRVLRGLTARWQHLDREVNQLDAQLAALVKTAAPDLVALRGVGIDVAGALLVAAGDNPERLAHEASFAALCGVSPVDASSGRQRRHRLNRGGNRDANRALWVVALVRMQRDPRTRAYVLRRTGQGLGKREILRCLKRYIAREVFKLLRASSVVAGDGETRLKHVA

SEQ ID NO: 478367 - protein, 348 aa, unidentified
MTIVDAPRPVTGGVDTHLDLNVAAALDPVGGLLAVAEFPATCGGHRRLFDWLAGFGPVTRVGVEGTGSYGAGLARYLRAAGVEVVEVDRPNRQARRRSGKSDPLDAIEAARAALSGRACGAAKTRDGNVEAIRALVVAKRSARSTKIQSLNQIRHLSYTAPDQLRERLKGVSRQRLAAQAAALRPSQREGAEPVLAATKTALRILGRRVLALDEEKARIDVLLSALVTQTAPDLLTLHGVGIDTAATLLVTAGDNPGRLRSEAAWAHLCGTAPIPASSGKVTRWRLNRGGDRQANSALWGIVITRLRNDPRTQAYMTRRLAEGRSKPEVIRILKRYVAREVYHHLPRS

SEQ ID NO: 478368 - protein, 341 aa, unidentified
MEWTVAIGVDTHKDVHVAVARDRFGAQLDGLEVETTESGYRSLLSWALELGVPAFAVEGCGSYGAGLVRLLELAGLAVWECERPHRRERRRGKSDSIDAALAARRLLTGDGLCLPRGGGQQRDDLRILLLERRSAVRARTAALNQLSALVVTAPDHVRTRLGSLSGERLARAAARQRARPGTSNGVLRRLGRRVERLSQEVAEVERELADLVAELAPDLLSEPGVGPVCGAQLLVSSGDPKRMASEASFAALAGTSPIDASSGKQQRHRLNRGGDRQLNWALHVIALARIRHHAETTSYYERLLATGKTTREARRCINRALARHFYRRLREIPTTCGVPKL

SEQ ID NO: 478369 - protein, 371 aa, unidentified
MENGITFVGLDAHKKKISVAVLMPDQTAPLQWDVPNEAGAVKRMVRRIEREAPGEVRFCYEAGALGYALQRQITEAGSEKVSCMVVAPSLIPRKPGERIKTDRRDARKLAELFRAGLLTEVQPPTPEDEAVRDLCRAREDAKEDLTRSRHRLGKMLLRKGVVYSQGSAWTARHRLWLRGLRFEHASEAEVSDDYLLAIEQLEERLRGFEEKLEGVAQKKPYSEPVGWLRCFRGIDTVTAMTIVTELYGFERFHSPRGLMAFLGLVPSEQTSGYDPKRGRITRMGNSHVRRILIEAAWHYRHRPGVASLRKRRQGQPAEIIALADKAQQRLYRRYRRMTEKGIPAPKAVTAVARELTGFVWAALRHTTKASA

SEQ ID NO: 478370 - protein, 339 aa, unidentified
MKLYGAIDLHSNNNVLMLIDRHDKIRFQKRLPNDAAYILETLHPYRLQIQGLAVESTFNWYWLVDALQEAGYPVHLVNTAAVKQYEGLKFTDDSSDARWLAHLLRLGILPQGYIYPKEERAVRDLLRKRAQMVHQRTTNVLSIGNLLQRNTGSSLAGGRIKRLTEETVDEVLPETDLSLAVKCNLRVMQCADEQVAELERAVLERVKLKPAFKYLRSIPGIGRILALTIMLETGDIGRFPNVGNFASYCRCVESKKLSNSKKKGEGNRKNGNGYLAWAYVEAANFAQRYNPRIRRFYQRKQAKTHPVVAIKTVAHKLARASYDIMRDQVSFDLTKAFGG

SEQ ID NO: 478371 - protein, 346 aa, unidentified
MHYVGVDYHKKSSYVTVMDERGKVVKEAQIANTQEALAAFLDGTAQGASAVLEAGRNWPVMYDWLEEIVDEVTLAHPAKVRVIAEAKVKTDRIDSRMLAHLLRADLIPAAYVPGAVTREQRRRLRQRMFLVRLSTMVKNRIHTLVDRHPELSRQAGGWSDLFGKAGRAWLEQLDLPASEAHLLGTDLDLLEAIQQHIKSSNRWVSQLARKDARAKLLATLPGIGDFFAVLLAVEIDDVGRFLRPEKLAAYAGLVPSTYASGGYVHHGRITKRGNKWIRWACIEAVYPATRQDPDLAALYQRLKTTKGANVAKVAVAKRLLIIAYRVLREGRPYRPAEEQARLRRSR

SEQ ID NO: 478372 - protein, 323 aa, unidentified
MNKSTKFYGIDISKDVFDVTDQKEVHYQFRNDYKGFKKFMKLLDENSHCVMEATGYYHYKLAYFLQENEVLVSVENPLSVKRFIQMKLSKIKTDKSDSKMICKYAESVELRLWEGQNIEQQECLQMVRILSVYTKQSTALKNKIHGEEVLGVPSKIVLSSLKRSLKAVKKELNMIEEKLIELVKKENQELLTLLETIPGIGRKTSVMLLVLTDGFERFTSASELCSYAGLTPVIRKSGSSVNGRPRISKIGNQKLRNLLFLCSFNACKYNQACKALYDRIVAKGKSKKLALIAVCNKLLKQAFAIAKSRVAYDQNYRSTLVVN

SEQ ID NO: 478373 - protein, 348 aa, unidentified
MKYYIGLDAHSSTSTFAVVNESGECVLRETVKTSEQSLVRVINQIHGERHMTLEESSISQWLFVQLKDKVDRLLICNPTYIAKKQGAKTDFRDALHLAQELRTNHLQPVFHDTSHWMELRTSVSGYLDIVEEIVRFKNRLKALFRTEAIATDENSFYRNQERVKELKNPSAKFVAENLFRQVEYLEKEKEKYKEVFERNRKKYRPIRNLMTIPGISIIRANIIAAIVCQPARFDNKHKFWGYCMLVRHIQESGGRIYGNKRFFGRRELRNIFIGAAENALRLEGQLRDRYEALRAKGVQHKEAKLNLARQIAAIALCLLKNNDKYSENYGEQLKERKKLRLEFFNQAL

SEQ ID NO: 478374 - protein, 407 aa, unidentified
MELVALYKRVIGLDIHQAQITACALIEESDGTTRIEQRQFGGFKRDRRELAAWVASLRPDEVVMESTGIYWKSPYAALEAVGIRAKVVNARHVKNVPGRKTDVSDAHWLATLARAGLLRGSFVPPAKLRELRLIARQRQKLVGQLASEKNRLHKVLTDSGIRLGVVVSDLHGKSARAMVKAIIAGQSPNEVLKLASTRLRASREEIFDALQGDLSASHRFVLDELMCHIEELEARIARFDARLLTELESERNTLALLQTIPGVDLIGAAMLLVEIGTDMDAFGSADRLASWVGICPGNNESAGKRKSGRVRKGNLYVRRLLCEFAHAASRTTSVFKSKFQSLVIRRGYKRAIIAIGHKILRNIFFMLRRREHYRDSATDYEALSVQRNAPRWIKALTKFGFIAPASA

SEQ ID NO: 478375 - protein, 380 aa, unidentified
MNKYIKHVGMDTHKEMIKVAIAKDVPGVAMYYGEIMNTEGAIKKLAKKLSSDGSQVVFCYEAGPCGYWIHRLLTKEGYECKVVAPSLIPKKAGDRVKTDRRDALTLAKLLRAGELTPICVPEKEQESMRDLTRAREDMKSMERHARQRLGAFLLRHDKIYSGKSKWTQAHFRWLEGIKFESPVQQIVFQEYVDTVKHAQNRVAALEEEMRRALDGWSMKEEVNALMALRGVGMVTAMTIGSELGDLSRFETPRQLMAYIGLVPSEYSSGDKRRQGGITKTGNGHVRRVLVEASWCYRFSARKTATLQRRAEKTDEEVQAIAWKAQKRLCMRYRHLLNKGKLKVQVCTAVARELIGFIWAIARQVNGKRNTNKAVFAGSAQ

SEQ ID NO: 478376 - protein, 322 aa, unidentified
MTVIAFDVGKKELVGVRTNKNGSVREKYVVANEPNAIDEFLQKAKEKYTRLTVASEATADYHRCLAQKSLAFNIPFRLVNPLLTKQFTRATIRKKKTDLTDAHIIAKLVLQGEGGLLLRESLDPLKSLNRTVSKVNRLAGILAAIISRFEERSSPQLSKAVLKELEKPFGTLRRTVKTLRGYLTEKVDQNLKTLLMSLPGIGETLAVTFITEIGDIRRFPSSKSLVAYAGLDPKVKQSGIGLKRNTCLTKRGSPYLRRAAYIAAYIAKRCDPELKIYFQKKRQEGKFYKEATVATARKILFRLFAVWKRGTPYIPLLQQKNV

SEQ ID NO: 478377 - protein, 347 aa, unidentified
MRIVSHSCAVYGVDLGKTTFHIAGADQHGRPTLRIKLRRDALLQFFATASPALVGMEACPGSHWLARKLIAFGHDVKLIPAQFVKPYLKSNKNDTLDAEAIAEAVTRPTMRFVPVKRHEQLDMQALHRVRAQFVHQRTALVSQFRCFLLEYGIAIHTGIGMFRRDATRILADDSNDLTPTMRQLLMDLWSDFLRIDERVTALSGQIEVSAKHDDVVQRLTTIPGIGPLGASALCAAIGNGKQFRSGRDLAAWIGLVPRQHTTGGKPTLLGISKRGNTYLRRLLVLGAQSCLMHLDRSRDRLGRWLDTLESRMHHNKVVIALANKLARVAWVVLTRPGALYEKMDPRF

SEQ ID NO: 478378 - protein, 483 aa, unidentified
MTPTTQEKNRKSTEPLTQRHWNEMNRKQRREMMRKIQSEDLSLEVVHPDAAGIDIGNESHYVAVPPGRDSLQVRRYGCTTDELKAMANWLKLCGIRTVAMQSTGVYWIAVYDILEAAGLEVYLVNAQQTKNLPGRKSDVQESQWLMKLHTYGLLRNSFRPTQEIRTMRTYWRQRNDLVRAAASHIQRMQKALTQMNIQLANVLSDISGATGQAIIKAILAGERDPHKLAALRDYRVKANEEQIARYLQGNWQADLLFVLKQEQEAYEFCQQQMATCDQQLEQYLQQREDQSQGASLPEERRKARLKKKKGNAPQFELRAELFRMTGTDLTQIDGIDVMTATTILSEAGSDMSKWETEDHFVSWLRLCPDNRISGERIIGKRRLPTNNRTTIALKMAATSLRTSNTYLGAQFRRLRTKLGSPIAIKAMAAKLARLVYRMLRYGMKYVDRGVEFYEAQHRRLLIKHLKCNAAKLGFRVVEAPAAA

SEQ ID NO: 478379 - protein, 406 aa, unidentified
MSIYIGIDWSQDKHDVAFMNAAGAIIARLTIPHQPDGFGKLEATRKQLAVTATDCLVGLETAHNLLLDFLWDQGYQQIYVIPPGVVKSSRGRYGHSGARDDTLDAQLLADLLRTDRARLHPWRPDSQLTRQIRAQVGFISYLTHSANRTHNRLRAALLRYYPQALELFSGLMVPTTLAFIAAYNTPQALDALSYEAFVAFAHQQGYWNQQVLLACYARLQHTPLQASPATVAVYQDEAQILAQQLRELILTKRQVQRDINTLFALHPDQAIFSSLPGTGDFLAPALLAKLGDDRDRFPSAASLQALAGTCPVTVASGKRKRVIFRHACDAEFRQIAQQWARCSLRKSVWAVAYWQHIRPRCASEHDAYRRLANRWLAVLWKLWQSREPYDEAYHLQQRRLRSQPVA

SEQ ID NO: 478380 - protein, 314 aa, unidentified
MNTTNEINVGIDTSKAQLDIYIRPLDEFFSVDNTAQGVKAVVKRLKTYCPTRIVIEATGRLELGFVIAAKKARLPVTVANPLHIRRFAGAAGQLAKTDQLDAKTIAHFGEALKPEPTELKPENVRLISDLLARRSQLLDMSTMEKNRLSILPQPLHASLKRHIKHLQSEVKKVEQRLDKLIEQTPQWQEKRDLLMSANGVGTVLTYTLLSDLPELGALNRKAIAALVGIAPMNRESGRYKGKRRIRGGRARVRTVLFMATMSAIQSNPKLKRKYTQLRAAGKPPKVAIVACMRKLLTILNVMMKTGQHWDPELP

SEQ ID NO: 478381 - protein, 377 aa, unidentified
MHSENIAAYIGLDVHKETLAVAIAAPERLGEVRYYGTINNEAQAVRRLFQKLQGLYGNILSCYEAGPCGFGLYHQLTAMNIKCQVIAPSRIPKSPTDRIKNDHRDAISLARLLRAGELTPVWIPDLTHEAMRDLIRARAAAKRDSRVARQRILSMLLRTDKRYAGKHWTGKHRTWLANQSFSQPSQQIAFQHYCQSLEQIEDRILQLDQEISRLLPEWSLCNLVCQLQALKGVGQLIAITLVAELGDFSRFSNPKQLMAFLGLVQGEYSSGNSIRPRGITKVGNSELRRLLYEAAWSYRTPAKVGAWLIYYRPDSVTQYSKDIAWKAQQRLCSRYRTLTAKGKKSQVAITAVARELTGFMWDIALAAQSSFSQQKQN

SEQ ID NO: 478382 - protein, 374 aa, unidentified
MSNHSEAFVAFDSSKLRNAVAIAQAGRAGEVRFLGEIDNTVAATAKLVRKLAAQYERLTFCYEAGPTGYGLYRQIESLGHHCVVVAPSLIPKKPGDRVKTNRRDALGLVKLLRAGELTAVWVPEERHEAMRDLTRARGAAVEDLRGKRQQVSSFLLRQGLHYAGKKTWTRAHMSWLASQKLEHLEQRIAFEEMLLVVRQAQERIERLEQAIRAAVPDWSLAEVVTALMAMRGIDLVSATAFLAEIGDLARFQTPRQLMAYLGLVPSEASTGDTVKRGPITKTGNRRARRILVECSWSYQHPPRVGKKKQEKVAAAPRAVREIAWKAQCRLSTRYRALTRRGKLKTVAVTAVARELAGFIWAISREVTTARAAAG

SEQ ID NO: 478383 - protein, 353 aa, unidentified
MTPKRTPPRIYCGVDTHADTHHAAVITDTGILIESRQFDTTTDGYRELHTWILGHGAPIAVGIEGTASYGAGLTRHLRSRAVAVVEVPRPNRKLRRNVGKSDPIDAEAAARAVLARNQLSEPKHGDGPIEAIRALRVARSSAVKAATASMNAVRSMIVTAPETLRTHLRGRTTTALLDACIALEPDLGALTDPTNATIVALRSLAGRCRELRREAKELKKYLTALVKQSAPRTSEILGLGPDTAAALLITVGDNPDRLRSESSFAHLCGVAPIPASLGKTTRHRLHRGGDRRANQALHTAVVVRLKYSDEARAYANRRTAEGKSMPEILRCQKRYLAREVFSALRADYSALTA

SEQ ID NO: 478384 - protein, 424 aa, unidentified
MKEKLRFFGLDVHAETIAVAVAEPEGEVRSLGTVPNRAESIRKLIKKLGPADKLRACYEAGPTGYVVYWQLAELGVECEVVAPTLVPVKAGDRVKTDRRDAEKLARCYRSGDLTTVWVPDEGSEALRDLVRAREAAKQDQTRARHRLSKFLLRSGQRPPTGVRPWTRPYLIWVAQLRFTQIAQESTRQDYLHEVEHMRGRVERLEQAIMEAVKLATPAMQQVINDLQALRGIADISAVTIASELGQVSRFESARQLMGYCGVVPSEDSSGKRTRRGAITKTGNAHLRRIVVEAAWSYRRPPGIWYGLRRRQESISEEAKEIAWKAQHRLHKRYMKLGAAQILYSLRDEVPPLMFLVLVLWRVPVKRLHHDCHGLCSPMPFVAPATHTIRMFVTRRAARSAVSWRRDPISRKPERSGPLVYCQLH

SEQ ID NO: 478385 - protein, 286 aa, unidentified
MKIVTIGLDLAKNVFQVHGVDERGITVLRRQLKREQVAPFFARLEPCLIGVEACGGAHYWASKLGALGHRVRMMAPQFVKPYVKTNKNDALDAEAICEAVARPNMHFVPLKSPEQQSVLSLHTVRESFVRARTAQANQIRGLLMEFGHIVPQGIRHLYVRVPEVIEDASNELPGRFRLLMDRMLQHLKELDRQVQELENEIELWHRNSEVSRRLQTIPGIGPITASALVASAGDPSNFKSARQFAAWIGLVPHQHSSGGKTRLLGISKRGNVYLRTLLIHGGRAMC

SEQ ID NO: 478386 - protein, 407 aa, unidentified
MIFVGDDWAEDHHDVHLMDETGAPLASRRLPEGLAGIGELHQLLARHADEPEQIVIGIETDRGLWVTALVGAGYQVYAINPMAAARYRERHHVSGAKSDAADAKLLADLVRTDRHNHRLVAGDSTDAEAVKVLARAHQNLIWIRNRHTNALRSALREYYPGALEAFDDLHARDALAVLGRAPSPLQGASLSLAKIRSALKAAGRQRNLDTRAQEIQAALRTEQLAAPAAVTAAFAASTRATVGIIAELNRQITDLQTELATHFETHPDADIYRSLPGLGVILGARVLGEFGDDPNRYTTAKCRKNYAGTSPLTIASGRKRAVLARHVRNRRLYDALHQWAFCALNVSPGARAFYDARRAAGDLHHQALRALGNRLVGILHGCLRHRTHYDEHKAWSHRQHNPDTQAA

SEQ ID NO: 478387 - protein, 436 aa, unidentified
MEVNTRLPRVSIGIDAAVVASHQIAIRGEVREDFTVQPTLAGLATLTERLEQYAGSMVVAEPTGGTWLPLAHAVTDAGCEIGFVANRDSARLRKAIVGANKTDVIDADMLAHCENVLGVVPAAVPPPGQIALRRAIRRRHVATVDAHRVECRLWALSAWAFPDVWKAMGGHTLAQPLLARWPHLERLARARLCSITEIVAAHSRDTHPQRRAIRIRDAAGGWSTFWDNRLDLDALGWEITAMLDDIVAADGRHRNATDHALELWQHHWPDDPLVSIPGLGPICASTIRGWWGDAHHLKSAKAATAHAGLNPSVWASGLTEAPSRRITKQGPAELRLALYQAANVARRRDPQLADHYRRLMTERGHNHISANTAVARKLACRAWAIATTARVYEPRDLDGNPMSLADAAALAVELAVPDEVRTRRRGNTRKGRLNPA

SEQ ID NO: 478388 - protein, 351 aa, unidentified
MKTNTPLNSETQARIRQLKIAVDWHVEQFRVVRMCDGQSPQPAQRFTPASFLPFVQKQLALADQVFVIYEAGPGAFHLHRQLTALGVTVFVVHPVKLDPQHKGVVTDKTDARELALKLDRYLGGNRKAMSVVRVPTEAEEQRRALSRQREQLRRERQRLAAQGRSLALTQGLRLRGEWWRQPLTLPEWLRPRLEVWRKLIAAVEDQLDGLTQQVEALAPKARPKGLGPLTLGMLIAELCDWSRFKNRKQIGSYTGLCGGVSSSGQSHCDLSITKAGNARVRWSLIELAWRMVLYQPQSKAVQRWKHVLLNPKAAARQKKRALVALARQLAVDLWRWQTGRITPEQLGWVMV

SEQ ID NO: 478389 - protein, 339 aa, unidentified
MVEVYAGLDVSDKSTHVCVIDSKGAVRWAGACATDPAVIARTLKARAAGVERVILETGPLSSFLYHELGERGVPVTCVCARHAKGALSVRVNKSDPHDAEGLAHMSRTGWFKAVHIKQEATHMDRARLKIHAQLIGAHGAMAGQLRGLLKLFGLRMGKVTTAGKRRERLAALFAQKPELEAIMAPLIQSLEALEAQIARAAKSLAASAAADPVAARLMSVPGVGPITALVFKTSIEDPDRFTRGEDAGAFAGLAPRRSQSGERDVKGHISKAGDPMLRSALYEAANSLLSRVKRPCALQSWGLRLAEAKGGKRARVAVARKLAILLHRLWRSETEFRWA

SEQ ID NO: 478390 - protein, 409 aa, unidentified
MRLFVGLDVSSFDIKACILNGEGEKLDSFSVNNDLPGATALKERLLQRIANQEVETFKIGLESTSVYSFHPSIFLHYDEDLQRFGVKVFLMNPKQIANFKKSYSDMDKTDEIDAFVIADYLRFGRNQMSIVKESQYVALQQLTRSRYHLVRMLTKEKQHFLQHLSYKCNTFSQEVDSSVFGNAMMELFLEKFSLEELANMPLEELAEFLQVKGKNRFGDPKCVASTVQKAVRSSYRLDKVVEDSIDVLLGTSITVIRTYQQQIKELEKSIKRIMAGLPQTLESIPGVGPVFAAGILAEIGQIERFDDETKVAKYAGLYWRTHQSGRFTAENTSLSRNGNHYLRYYLVEAANSVRRNVSDYQEYYVKKYNEVPKHQHKRALVLTARKLVRLVDALLRSHQLFTPERCVKV

SEQ ID NO: 478391 - protein, 417 aa, unidentified
MSEYAAFCGFDWADSKHDICLVDAASGKKEFSVIKHTPQALQEWASSLRTRFGGRLVAVCLEQSRGPLIFALLKYDFLVLYPINPSTLSNYREAFSPSRAKDDPRDAEYAVELLIHHRERLKAWLPDSQQTRTLQYLVEHRRRVVGDRTRISNRMTALLKLYFPQVLEWFDDIRTSLVCDFLLQWPTLEAVKKLRRTTLEKFFREHNSVRKESTEQRFSAIKESMALTTDRAVISSSVLMIKTLASQMKVTLAAIKEFDRQIEELCASHEDYHLFATLPGSGSVYSSRLLAAFGTDRERFESADEMARLSGIAPVIERSGQSIWIRWRYFCPKFLRQSFVEYAGESIRHSFWARAYYEGQRAKGKSHQAAVRALAFKWIRVIYRCWQTRTPYNEVKYLEHLRKKGSPLLAYAANNPE

SEQ ID NO: 478392 - protein, 366 aa, unidentified
MGKIRFVGLDVHKESIVIGVAEEGGGEPSVVASIGHEMKGLFKQLRRLGDQAELRVCYEAGPTGFGLARNLRQEGIDCRVIAPSLVPKQAGDRVKTDRRDAMKLARFLRSNDLTEVQIPDVETESVRDLERARNGAKKAERVARHQLGKFLLRQGRRYSGKSWTKTHLEWIRTQTFEHEAHHRVLADYVMTVERATERVRQLTADLAAVVISWTRQPVVKALQSLRGIDFLSAVILVAELGDLNRFGSAPKLMAYLGLVPSEHSSGESRRQGRITRTGNTHARRVLVESAWSYRFGPRMSAAIKKRNEGLSPRVQDIAWKAQQRLCGRYKKLSGRGKNRQRVVTAIARELAGFVWSIAREQTLLAA

SEQ ID NO: 478393 - protein, 461 aa, unidentified
MPKRNASPSSSRRPKTGGRIIKANPNTDLHLLNQHAAGIDIGAERHYVAVPPAADAHAVREFSVFTKDLYAIADWLDNCGVKSVAMESTGVYWVPLFEVLDERGFEVKLVDARKVKNVSGRKSDVLDCQWLQQLESYGLLTPAYRPTDEIIVLRGYMRQRAMLVKNASSHIQHMQKALQQMNVRLDNVVSDITGQTGMRILKAILGGERDVQKLGAMRDRNCKATAEVIAQSLVGNYRQEHLFALKQAVELFEFYQEKIGECEAEMEAYLQNLSGKRADEPPPLVGGGKRQRMNFNVRDYAWKLLGVDLFRVQGLNSQTVLQIISEVGVDLSGFASEKQFASWLSVSSNRRVSGGKVLSSRTQASRNRAAIAFRQAAVSVARSKSELGAYYRRMQARKGPGAAITATAHKLARLYYSLVKNGQEYDEGRARADEERQRERMVTNLRKRAKGLGYELVALAA

SEQ ID NO: 478394 - protein, 356 aa, unidentified
MSRDTKYIGMDVHKEAIVIAVLNDSGKVVMESIVETQASSILQFIHGLRGELHVTWEEGTWADWLYDLLKPHVHEVLVCNPRRNALLKEGSKSDKVDARKLADLLRTGMLRPVYHGENGLRTLRELARSYQTISKDLNRVMNRLKALYRGWGIACSGTQVYAARYREEWLHKIPHAGVHRRAELLYQQLDGLQALRRTLRPELLAESRKHKAAKLLRQIPCIGPIRAARLLALMQTPHRFRSKRQLWTYSGLGIETRDSAQYRYVHGQLQRSKKPQQIRGLNQNHNHEMKEIFKGAATRASCGVGPLRDFYVALLDKGMRPEMARLTLARKIAAIALTLWKKEERFDAEQLKPQAA

SEQ ID NO: 478395 - protein, 368 aa, unidentified
MDSSSYRGLTRLRWVNIERARAMRNSSTIGVDLAKNAIQVSVVTPANKELSNKELSRIKFAEFLAKQKPGLVAFEACSTAHHWARLATTYGHQVKIIPAMAVAPFRQGHKTDKNDALAVAEAANRPNIKIAPMKSIEHQAIQSIQRSRELIIQERTATSNHIRGLLLEFGIAIPKGLVHLRRHVPLVLEDAENGLPMSYRPTLHRMLMRFHAAEEDLAFMDEQVKQIVKSNDGCQRLTALEGVGPIGAILLFATLGSGEAFKNGREFSAYIGLTPKQYSSGGKTNVIGISKHVANRRLRAVLIQGARAYVYKRKQAASAKDRWLLDLVARGGHGKAAVALANKNVRTAWAILTQGSQYNCKPCLGNAT

SEQ ID NO: 478396 - protein, 331 aa, unidentified
MKFQDVIGIDVGKLKNESVHHLSQKSFEFDNNSSGFKKLIKWVEKQSEYPLNKILFAFEHTGIYSFPLSVYLSENKLSYIVIPGLEIKRSMGIARGKDDVIDAQKIALYTFRRKDEIKPYQLPSKRIIEIRRLLSLREKLVKHKSAYSATLNENKQFLKRKENRTLFEVQEKMITELNKQISKVENELEDIIKHDDQLKRLHKLITSIKGIGNQTALFMIAFTNGFTLFDNHRKFASYAGIAPFPYQSGISIKGKTKVSHLANKKMKSLLNTCAVTAITHNAEMQQYYERRIKEGKSKMSTINIIRNKLLSRVFAVVKRGTPYVNTMQFAS

SEQ ID NO: 478397 - protein, 427 aa, unidentified
MKLSYKIDNVKQNNLLNIAFDVSKDDLHLYTQTGSGTIECVSECFANNLKAIKDKLISYESFAQQKGFSGTHIICEPTGGYEEKLLLLARQLGLHTSYVSGEAVHKYKIIEDNSASKSDIRDPRVIFFVAQYGKLLKHRILPDEYEMLRHFNRMHEYETRQLVSCKNMLHRELRRLFCDLSFNNAFLFGSSGRALLKKYHGNPYKIVRAGKTRFNQTMKKNVRGIRDETIEQLYSDASCSSKLYQGMEVIEILDWRVAGLYKMFEGHEQARKEIKQRMSDIYQRLLDNDEAVPKPVKGFVSQVNLARIIGETGPLGDFDHQRKLKRFGGLNLRERSSGQYKGKNKVAKKGRIRLRLILGQSIFHLIKRDRILGEYYHGFKERGMPGTKAMSVVARKLIEILFALSRPGTIFDESRLFVCESCYKSAA

SEQ ID NO: 478398 - protein, 369 aa, unidentified
MNKTLYVGLDIHKDTIAVAVAEDSRSGEIRFHGIVVNSADAVLRLTKRLSKNGHTPSFCYEAGPCGYGLHRHLTKLGFECAVVSPSMIPRKAGDRVKTDRRDAEMLARLWRAGELTPIWTPDEEQEAMRDLIRTRKQAMDAVKVSKQQLLSFLLRHGLRYESGGYWRQRHRRWLAELRRFRFSYQQLAFEELKRAINQAEARVATLDQAIEDAIPGWSFAPVVDALRALRGVNTTIAATVVSEIGDITRFKNPRQLMSWLGLVPSEHSSGSTTRRGRLTKAGNALARTMLIEAGWSYRHPPKEGHPYLKRSAHLPQQIKDIGWKAQTRLCKRYRDLSQTGKPQPRVLAAIARELAGFIWDIARKTPLAT

SEQ ID NO: 478399 - protein, 343 aa, unidentified
MKLSRVGVDLAKNVYQLHGVDRFGKSTWKRRLKRQQWLKVLLDQTEPDCVIGMEACASAHHWGRELQSRGYTVKLIPPQFVKPYVKSNKNDARDAEAICEAMSRPNMRFVTVKTIDQQDIQATHRIREEFKGRRTAKANQIRGLVAEYGLVAPKRLSSLRAAIPCWLEDAENGLTHYFRSLLHGLWNDLLALDDRMCEMDKTIRRLAKDNEDCVRLEQLRGIGPMTSTAMIATVGDARQYHKSRQMAAGIGITPRQHSSGDKHRLLGISKRGDVYLRTLMIHGARSVVASAKHKDDPLSRWVTEIATRRHPNVAAVALANKNARMAWAILRNKTDYDPDFAIG

SEQ ID NO: 478400 - protein, 418 aa, unidentified
MKAEYKTSVKEKRYIGLDVHKHYITVGGMNAKQEIVLKPRDVAMERFKRWAEENLRVTDEVVLEATTNTWDVYDTVAPWVKRVVVAHPAEVKQIANARVKTDNQDVLRLIRLLIADLVPEVWVPPVAVRQLRALISYRWRLVKMATAIQNRMHSLLHRHNIPAPDGKVDTGENREWWEQLRLSELEDLRMKQELSMLRMVREHIVEVEKELGRLSTSERWGDQSVYLMQIPGVGIIVTMTILSAIGDIHRFESPKKLVGYAGLGAGVHDSGQKHRDKGITKSGRKELRWALVEAAWQAIRANARLRAQYDELCQRKHSNQAIVAIARKLLVTLWYLLSRQEAYDRSTAEDLAYKMLTWAWHIDKSARNGLTNQQFAKYGLIQLGRGEQLTRIVKGGAPRHIAPTEEVLALKPNLRPPL

SEQ ID NO: 478401 - protein, 368 aa, unidentified
MSKTITSFVGLDVHKDSTAIAEAEAGRETPRFIGTVGSELGQLLKALRSLGKPETMLVVYEAGPCGYGLARQLRPRGYSCEVVAAGKIARRPGERIKTDRRDALTLARLARSGDLVKVRVPDERDEAMRDLSRTREDAVKARLKARQQLKALLLRHGHRYGGKSSWTLAHERYLATVGFAHPAQDIAFAEYRQAVREGQERVERVTQALRTQTEHWRLQPLVAGLSSLRGIDFVAAVTLAAEIGDFTRFAHPTELMGFLGLVPSEYSTGDTRRQGDITKTGNSHARRVLVEAAWNYRFPARLSRVQQIRQEGQPKAVREIAWRAQLRLAHRYRRLSSRKLHPNKICVAIARELAGFLWDIARQVKLAA

SEQ ID NO: 478402 - protein, 486 aa, unidentified
MSASVRSKSAMSDVDHGTDESEDVLLLLLTGLVSHNSEEDVVIQGNGLSRGDKRRNARLARMRALVPVENAILGIDLADVKQAVVLTDHDSRVLARKRVSAKAWELGPVLDWARRVARERGFVDVTVGCEPTGHRWRVLDQLAAQRDMALVCVQPMLVGRAREAEDYTRDKSDDKDAVLIARLVGRLCCYAPERADETWARLRQLGARRQRLVTEATACVQQLRDLLECAWPGVLGAAADPFGSTNWCAALAVVLERCDGHPERLARGGLARFEAAVRRELPRWGGSRRRRAIIEAVFVALVDPTGVSAQRRGALERARWVLADWQAANTGLAEVATRMVEVLDALELTELVTSIPGVSAVGAAAILAETGDPARFDSPRALVKHAGLCPRDNASGTFSGRSRISRRGRPRLRLAAWRAVWGALAHNPVMAARYRYLTTRQDNPLTDGQARAAIAAALLRWLHVITTRRVSWDATVASTEVMPLAA

SEQ ID NO: 478403 - protein, 339 aa, unidentified
MFTTGIDQHKRDSVFTTYDGAGQRVRQVRLANRPAAIARYFAAFPGPHQAVVESTGHWYWLSDLLRAQGIDLQLAHAKALKAIAYAKVKTDPIDSDLLAVLRQAGLIPQAHMIAPELRGPRDLLRTRLRLVTKSTSCRNSVHRLLEKFNVPTVEQLSPIYQLQAACHTEQRVLLAGQIHRLEQELNPAVLPTAAVQRLLWIPGIGKLNACTIALEIDDIARFPTVKRFVSYCRLVPGADNSGGRTRHRSGSKDGNRYLKIAFSHAAIRAIQYYPEIRTFYRWLARRKNPKVARTIVAKELARIVYQVLTTNTAFNGTFRGVVLSRTKQSQWPRRASPDA

SEQ ID NO: 478404 - protein, 362 aa, unidentified
MTAMSIVAHSHAFVVGVDTHARNHVYAIITVTTGELVDTRDFPTTGAGINRAIAWVARRTGADLATLWVIEGAASYVSILAGTVATKGYPVVEAARMDAKSHHGVGKSDELDAQRIARAVFPLKEKKLRRPRLIEGVRAALRVLVSARDSMTGERTRAANGLTALVRVNELGLDARKALTGAQIAEVPRWREQDEELALSVVRTEAVRLAKRIGDLDKDVAGNTQQITDLVKFSEAAPLLEVKGFGAITAAACLTVWSHQGRVHSEAAYASLAGVNPIPASSGNTVRHRLNRGGDRALNSALHMVAITRMTHDEETREYVQKREAEGLSTKQIRRCIKRYLARRVYRIFNSQAEALIAGWQT

SEQ ID NO: 478405 - protein, 358 aa, unidentified
MAHRTWKLGNVKSVPVSEGDVMTVGLDVHKATVHAALRKNGQEIATWVMPMDCQAVVASLKRFAPALKKVVYEAGPTGYGLARALKKAGLPAEVIAPGKVPQAPNPDSKSDRLDCRKLAEEAEKGSLKAIAIPTEQEEADRQLARLRDQLIGKQRRVKQQIKSLLLLQGLAEPVGLAHWSAEGIAALKGMRLRHQLQLSLEVLVEELEHLVACRRRVERHEAWLMKQRRHRKSAQRLQTHPGVGVVTATAFRLEVYQPQRFATPEQLAKYVGLAPRVRQSGPKRRGGPLIKAGRGSLRALLIEASWRWIRDEEAAAKTYRRLVRNTGSGQKAVVAMARRMAVHLWCMMCRGEVYHQAA

SEQ ID NO: 478406 - protein, 463 aa, unidentified
MPKARKSRKKLALKVDVTAGLEALHHHAAGIDVGNAEHYAAVPVGRDPQPVQTFGSFTADLHRLAKWLKACQIETVVMQATGVYWIALYEVLEGYGLQVNVVNAKYTKTLPGRKTDVLECQWLQKLHSFGLLNNSFLPPEEIRVLRTYLRQRENLVAAAGACIQQMQKVLTQMNVQLANVSSDLSGMTGMAILQAILDGQRDPQQLAALADPRVQASRKEIAQSLAGHWREDLLFVLRQVHGLYFTYLESITACDQRIEAHLKTMPAKVDVVAQPLPEARPKDRLPNRKHIPQFGLREELYRITGVDLTRIDGIQVQTAQVLVSEVGVDMTGWPTEHHFSSWLGLSPNNQITGGKVIRRGTKKVLNRAATALRLAAQTLHRSQSYLGAKYRRLRAKLGAPKAITAMAHHLACLIYRLLRFGTQYHDKGVEQYERKYRETEMKWLQKQAAKLNMQLIPTGALTK

SEQ ID NO: 478407 - protein, 408 aa, unidentified
MNAVGIDVSKGKSMVAALRPMGEVALLPREFLHTEIGLEQMAYAIITLGEDTRVIIEATGRYHEPVAAALHKYGIYVCVLNPLYIKQSGGGSIRKVKTDKADAMKIAKYGLDNWVDLREYTPMDTVRQQLKLCSRQYNLYMKTVVSLQNNLISLTDKTFPGVNELFSGPERADGHQKWVDFVMTFWHCDCICRVSEKAFTERYQKWCKRKGYHFSTEKALDLYAGSCGHFTTLPKNDNTKLLITTAAQQLLAGKMTLAALRAEMTRLAMQLPEYNTVRAMYGVGETTAAQLMAEIGDVRRFPRRSSIVGFAGVDPGVDDSGKHSAKSVPTTKRGSPHLRKTLYQIVCTYLRKAPTNEPVYQFLDKKRAEGKPYFVYMTAAQNKFLRIYYARVKECLAAFDAQQETAQS

SEQ ID NO: 478408 - protein, 347 aa, unidentified
MNFYHSTHRHYCGIDLHARSLYVCIIDQQGEVLLHKEIKARPEPLLALLEPFRDDLVVGVECMHCWYWISDLCEEHGINFILGHALYMKAIHGGKTKNDRIDSFKIAMLMRGGNFPLAYVYPKEMRATRDLLRRRTRIVRHGAMLKAHAVNTLGQYNLPPSKANLNNPGGRSQLTAAFSDPDVQRNIDLDLAIVDCYQHELKKLEWHLEQQAKQHDPASLNVLKTIPGVGRILALTILYEVGDIQRFESVQKFASYARLVKCKAESAGKIYGTQGNKIGNAHLKWAFSEAAVLFIRNNDKAKRYVEKLQKRMNKPKALSAVAHKLGRAVYFMLKDKRVFDEQRFLKG

SEQ ID NO: 478409 - protein, 368 aa, unidentified
MTSILYIGMDVHTTNYTLCSYTLETQQPFGRMQVEPDYKQILKYIEKMKEAWGDDIEIVCGYEAGCLGYSLYHSLTDHGVKCVILAPSTMASAPNERKTDMRDAEKIAKCLAYGTYSAVYVPTERDEAVKEYIRMRDAHKANLKRIKQQIIALCYRYGKQYTKKSHWTQAHLAWLKSLRFNDPILQETFEEYMIQYHQAAEKLERFDKRILELSGKEEYAEKVHKLVCFNGVREHTALSAIVEIGDFNRFPSADHFAAYLGLVPGEHSSSTNICRTGITKKGNSHLRTLLTESAQCYSRGQTGRKSMALKARQEGNEPAVIAYADKANERLKRKFKRIAFTRPHNVAATAVARELACFIWGMMTGHIN

SEQ ID NO: 478410 - protein, 347 aa, unidentified
MRFYTGQHQHYCGVDLHARSMYICVLDRESHTVLHRNLCTDPDTFLKAVQPFAGDLVVGAECMFTWYWLADLCRDEGIPFVLGHALYMKAIHGAKAKNDRIDSAKIAALLKGGIFPMAYVYPREWRATRDLLRRRLHFVRRRGELLTHIQNTYHQYNITPPSGQIRYRSNRVGVADVFPDPGARKNVAVDLAVIDRLDRAIHDLESFLVRQVKVHDGDNFHRLQSVPGVGKILGMTFLYEIHDIGRFPRVQDFSSYARLVKCSHESGGKRSGSGGAKIGNPHLRWAFGEAVLLMLRGNEEVKKKRQRLERKHGKGKSLTILAHKLGRAVYFMLKRKQVFQMERFLEG

SEQ ID NO: 478411 - protein, 413 aa, unidentified
MQNLLEVCCGLDVHKEVIVACLLKGRLEEEPEPIIREFPTLLSGLDEFKKWIMENGCRNVAMESTGVYWFPIYNVLESILYGEERVNIIVANPHHMKNVPGKKTDVKDAQWIATLLRAGLLAPSYIPPKEIRELRDWTRYRDVLIKEMVGHKNRIEKHLQQCGFKLSTILSDIFGMSGTLLVKRLCEKGALEERDVVECLKGTLRGKVSEVRLAVAGKLSEHDRIFLTDLVKVKENCDREIEDVEQRITEYSEKYEPAMQALETIPAVQRRASAIIISELGVDLSMFQSAGHLCKWAGLCPGDNENAKKKKTMRITKGNPRIKSVMCQCAWAATRCKKFFLRDWFYRLRARRGTKKALIAVARKLLAIVWHVLTTGETYDEARYEQTKKNDEERRKQKLKAEAAKLGFKLMPV

SEQ ID NO: 478412 - protein, 339 aa, unidentified
MSIVMGLDQHRGQITGEWLDTETGEVRCARVTPADREHVRRWLSRFAGRELEVALEATTGWRFVVEELRRVGAVVRLAEPAETADLRGSKKRAKSDRADARHLRELLMIGRLPESWIPPEHVLDLRERVRLRHTLSEQRGEWQQRMQATLYHHGCPQRRQLMTGEGREWLAVQPLAAAAREQITVATLMVDALDRQLAPLDKELRGYARRQAGCKALMAHYGIGELTAVTILAELGDCTRFSSSRQAVRYAGLDITVYQSDRRRAPGHISRQGPPALRWALYEAAQVARRGERSPDRAYYLQAKERVGGNRACLSVARKLLKRSYHTLRELGEEALAPA

SEQ ID NO: 478413 - protein, 470 aa, unidentified
MTLNHRRCCGIDVHKNSVTVCVLAPAGEHGAPKKRKFRTYSRDLRQLRGWLKNCGVTEIAMESTGQYWRPLWNLLEGEFARLVLVNPQHIKGLNGYKTDPKDAQWIADLLEGGKLKSSWVPPRTIRELRDLTRHRVNHLEDLNRAKNRIEQLCQTGNIKVSSAASDLFGVSGRKMLGALVEGKRDPGWMADYAIGRLRKKRAELELGLEGTFTAEQRWLLGRELQQVEWLETQIAVLEQEIERRVAPWQEAIARLVTIPGIDRKTAWTIVAEIGADLSAFANPRQFASWTGLCPGNRESGGKRMSGRVRKSNRYIKRAMCQAAWAASHTRNTYLSAFYRRMAVRKGAPKANIALAHHMIVVVHQVLSRKEEYVEFGADYYDRRNRPRTAARLVQRLQKLGYRVELHEDSLLPQSVTDAAAAELTTPTALPAVALKRRRGRPCKCAERGLICRHGTSPQPNLLTDEAPAPA

SEQ ID NO: 478414 - protein, 359 aa, unidentified
MSKYSTIIGMDLGDTYHHYCALDAISGEVMNEGRVRCTKAALEQLFATMQPALVAVETGTHSPWVSRLLTELGHQVLVGNARKLRAIYTDKQKCDQRDAEMLARMARMDPKLLSPIRHRGQQAQADLALIRSRDNAVAVRTKLINHVRGSVKSYGQRLPASSAPAFHHKAAQAIPEDLRPALMPILNLIESLTKTIRGYDKTIAQYCQDKYPETELLRSVPGVGPITALSFILTLEDPHRFKKSRDVPAFFGLTPARSQSGDADPQLRITKQGDSAMRRLLVSCAHYVLGPFGPDSHLRQWGLQLAEGGSSRTKRRAVVAVARKLAVLLHRLWMDGAYYTPFPDEPSQPGHNISNDAAA

SEQ ID NO: 478415 - protein, 415 aa, unidentified
MQALYRCIAGMDVHRMLYVVTILVELADGTEEKHQRSFGGFKRDRRALVAWLVELGVELVVMESTGIYWKSIYSTLEKAGIPAHVVNARHVKNVPGRKTDLSDSEWLARLGRYGLVKPSFIPPEDLRELRVVSRYRDKVAQTLAGEKNRLHKVLDDAGIKLGAVVSDIHGVSAQAMIDGLIDGTPIEQLPDLAKGTLREKHELLELSLDGELTPRHLFVLKNIREHIRYLESELASLDAYLIDAMAPYADYWRFLQTLPGLDQISAAMILVEIGTDLQAFDNVQHFASWAALCPGNHESAGKRKTGRIRKGNHMIRYLLCEAANAARRTNSVFRSFYQSLVPRKGHKKAIVAVAHKLLRTIYMLFTRRQAYRDPGIDYQAMVVNRNAPRWIRALKKYGFWPKISTLNAPIAAPVH

SEQ ID NO: 478416 - protein, 406 aa, unidentified
MWYVGLDWADTHHDVVVLDEAGRRVGSRRFAHSHKGLNELKEFVLGIAASPDQLACIVETNHGLLIAFLLEAGIPVYPVNPQITNRLRKAAGAKTDRIDAYLLAKTGRFDLAELRRMSPDSSTVAELKTLTRDQDALIQTQTRLVNQLTACLKEYYPAALHLFAKVQQRSTLVFLQAYPTPQAAQAASVEQIIATLRTGKHTNPSKVAPKIFEEVHRSQLVATEVIVRAKSRLMLSLVKQLLVVIEEIASYDEAIRPLLLSHPDQEIWSSLPRAGKRLAPRLLAEWSDDRSRYADGSSVQMVAGTAPVPFESGNYAKAHKRFACVKPLCNALHRLLGNRRDSIKPRRLKRRSGLMRLGNTSPESRSRLPVAPLWVLSALRGLSPVRGTCAPTEPPKRFPSRPFCRP

SEQ ID NO: 478417 - protein, 349 aa, unidentified
MDKIYDICCGIDVHKKLIVACLNHKRKKELREFGATTRELMELAEWLQKNECEIVAMESTGSYWKPLYNIMESYGLHAIVVNPAHMKAVPGRKTDVKDAEWIAELLQHGLLQPSYIPSKDQRELRELVQYRKSLVGERTRELNRLQKMLEGANIKLSGTVTNINGKSARKILEYILSGNEIDEKKYDEMYEEKLIAHNLKASKEQILDDLKGFMSPLQRRMLKELLQHLDELNVHIENLNDEIDNFMKPEEKQASQVIQDVTGIGNTSAQTIIAVIGTDMERFPSDRHISSWAGLCPGDNVSAKKRKSGKIRKGNALLKSTLVLCAHAAVRHKISYFHSQFKRIITHRV

SEQ ID NO: 478418 - protein, 334 aa, unidentified
MQNITLIGIDLGKHTFHVHAQDKDGHALLRKKFSRTQLTAFLSTCSAATVVMESCAGAHFMARHISQLGHQVKLISPQFVRPFVKSNKNDFIDAEAICEAASRPSMRFVTPRTEDQQAMAALHRVRDAFVKERVKTTNQMHGFLLEFGISMPRGRAVIRRLTAVLEEHPLPPYLTRLLLQVRQHYVYLSEQIEGVEQELKTHMADDEATQRLLSIPGVGMITASLLATKLGDGKNYAGSRDFAASTGLVPRQYSTGGKNTLMGISKRGDKNLRRLLVQCARAFMQRLEHNPGRLAGWVKIQLTRHHSNVVACGLANKLARIAWAITAHRTVFSQ

SEQ ID NO: 478419 - protein, 440 aa, unidentified
MGHEPEAEHNPDAFRNNQLSPPTGMSTRECFGFSHPASIACLTEEEFTLQILYPQCCGLDIHKKSITGCCLWFDAKGQRQQEIRKFGTHTTELRQLAVWLRRHQVKHLAMEATGSYWRPIWNVLEGEGFEQTLANPQHMKAVPGRKTDPHDAHWIADLFQHGLIAASFVPNQQMRHLRDLTRMRTKVTQDRARVVNRIEAVLEDANIKLSCVATDIMGVSAQAMVKGLLQGERDTAKLAELAQGRMRSKRPQLQTALEGNLQPHHVFVLQRLLMQARFLQQQRAAMDRQIGRRLDPEMRQAIALWDSIPGVDEDIATIMVAEMGIRSEQFADGAHAASWTAICPGNHESAGKRKSGKMREGNRWLRGALTQAAWAATHTNGSYLSALYRRIARRRGSKRAIVAVGHAILISAYYMWKKKRHTRNSGTILTHSNPKKPQSG

SEQ ID NO: 478420 - protein, 401 aa, unidentified
MQETTQHDAVDVFVGVDVGKGQHHAVALDRNGKRLYNKALPNDEVKLRALIAELKTHRRLLFVVDQPSTIGALPVAVARAEGVLVAYLPGLAMRRIADLHAGEAKTDARDAAIIAEAARSMPHTLRSLRLADEQLAELTMLRGFDDDLAAQLTQTSNRIRGLLTQIHPALERVLGPRLDHPAVLDLLERYPSPSALAAANEKTLANRLTKLAPRMGKNWAAEIVQALNEQAGIVPGTQAATIVMPRLAQQLAALRKQRDEIAAEVERLVLAHPFWPVLTSMPGVGVRTAARRLTEAAQKAFATAAHLAAYAGLAPVTRRSGSSIRGEHPSRRGNKVLKRALFLSAFAALRDPVSRAYYSRKIQQGKRHNQALIALARRRCDVLFAMLRDGTIYPPKSAPDA

SEQ ID NO: 478421 - protein, 344 aa, unidentified
MDNHTQYSGFAGVDLAKKVMQIHFVTGDGEITDKQVKRAEFLDFFRNRGKCLIGMEACGSSQDWARKLEAMGHEVHLMSPKAVKPFVSGQKNDYNDAIGIYKAMFNGVRRVPVKSTEIRDLQTLRRIRSQVTKDKVKEINHVRGLLAEYGIVMGKSITAFNKGISSALESLKERGDVSPLVAEELQTTVESIKTKIERQKRLDREIEQLARGCKNYENFLKTPGVGPFTAAMLCVLLCDPAIFANGRQFAAYIGLAPRSRGSGGKNFIIGIPSKFNCDSESRAVFVECAQALARYKNKSPWVDGILRRKPKKVAVIAIANKLARQVWAMANKGESFKQMTILTA

SEQ ID NO: 478422 - protein, 450 aa, unidentified
MPQGRQVEVEEQEEILARVAAIDVGKASGMVCTRVPHEAKAGKRVTTVWDVAATTSVIMELADRLVCQGIQRVVVESTSDYWRPFVYLLQAHGLLVWLVNARDVKQVPGRPKTDRLDAVWLCKLNERGMLRPSFIPPAEIRRLRDLTRLRVDLTEERSRHKQRVEKLLEDALIKLSTVATDIFGVSGRAMLEALIAGERNPVRLAELARGRLRVKRAALVEALTGQFSDHHARLARILLDQIDGLTAQIDQLTTLIEEAIAAIPTAHPPVAGLDPGSTVGAGAPAQGPLPAVQRLDEVPGIGSKAAQVIIAEVGLDMGQFPTPGHLVSWAKIAPQTIQSGAKRRAGPTGKGNPYLRGTLGEVAAAAAKTDTFLGERYRRLVRRRGKLKALVAIARSILVIVWHLLADPTARFRDLGADYHTSRVDTGRKTRSLVRQLEALGHTVTLQPAA

SEQ ID NO: 478423 - protein, 411 aa, unidentified
MELLVDRVAGLDVHRDTVMACVRTPRVSGRGRASEVREFATTSLELGLLARWLSEMEVTDVAMEATGIYWVPVFTALESGFEVMLVNAAHMKYVPGRKTEVADAVWIAQLVEHGLLRASFVPPPDIRQLRTLTRYRRALVNERVRAVQRLEKTLQDAGIKLTSVASTVLSKSGRAMLDALVDGVRDPDVLAELARGRLRPKIPALREALAGRFDQHHAAIVAEGLAHVDGLEASIARVSIEIDRVLEPHQWAIELLDTIPGVDVRTAQVIIAEIGVDMTVFPTAGHLASWAGLCPGNNQSAGKRGPATTRPGSPWLQKALVEAALSASRTRNTYLAVRHARIRARRGKQRAAIATAHTILIAVWHMLSQHVEFVDLGTGYNTHRSSPEAETRRLVRRLETLGHHVQLDPAA

SEQ ID NO: 478424 - protein, 424 aa, unidentified
MKVTYQTCCGVDVHKSFLVATIVKTTGGIEPSYQKKRFSTFNNSILEFKQWLINNNCHDVCMESTGKYWIPVFNLLEDQINVTIANPKWVKAVKGNKDDTKDSKWIGDLFRLGLVKGSYIPCKAIRILREYTRYRYKLVSCRSSEKNRYQNALTVCNVALDSVVSDIFGKSSTSIIDYLLEHSGISINHEEIASKLLRRLKSKEDAVIESVEGYQMTDAQKYRMRLVRAHMDYITAEINDVDKMIENMISSNPDFENAIQFLCTIPGVKRDSAITIISEIGTDMSQFSSSKRLCCWAGLTPGSNESAGKKKSVRITRAGVYLKPALVQCAHAAVKSDKSPYYKKKYESLVKRRGKKRSIIAIARMILTAIYQMLSTGEQWNPSDLYKIDMPVALVEKQKAKAIKQAKKLLQREGLLPPDEPLAS

SEQ ID NO: 478425 - protein, 449 aa, unidentified
MSNRLPKLNVDAAGIDVGSEEHWVAVPEDRAEHPVRSFKCFTADLQAMIQWLRECKIKTVAMESTGVYWIPIFQILDRAGFEVKLVNARHVKNVPGRKTDVSDCQWLQRLHTYGLLNGSFRPNDQVCVLRSYWRHRDNLLRYASSHVLHMQKALSEMNIQLHRVITDITGMTGMRIIRAILAGERDPLVLANMKDYRIQSSVHDIVKSLEGDYRQEHLFVLKQAVDLYDYYHQQIEACDRQMEVCLSQFDSKVDIQSHPVPPAKAVGRKRRRNEPHIDLHTHLYRITGIDFTRIDGLDVLSVQTILSEVGLNPDAFPSEKHFASWLGLCPDNRITGGKIKSSKTRKVVNRAANAFRLAAQTMHHSASALGGYYRRMRAKLGAPKAITATAHKLARIFYRLWKTGEAYNDPGVDYYEQKYKERVLNNMKAKAKQLGYEITLKTLAGSEVS

SEQ ID NO: 478426 - protein, 352 aa, unidentified
MIVIGADTHKSTHALAAVDAGTGEVRGEREITANDDGHRKALCWAHEIDADVVWALEDCRHVSHHLERALVTSGERVVRVAPRLMGQTRRGEREAGKSDQIDARAVARAVLKDGVEKFPGAHLDERAMEIRLLCDHREDQVAEINRLTNRLRWNLVILDPALEASIPPRKMDFPGQLDRVARRLRSMETSARVRIAKEQVRKIRELSRQARELKRELHTLVAAYRPELLAELGCSAITAAILIGQTAGAERFPTDAHFARMAGVAPIPASSGKQERHRLHRGGNRRLNRALHVIAITRGRWDPATKAYLQRKEAEGKSRMEALRCLKRQLARHFHRLLVQPPQPLCNPPLHA

SEQ ID NO: 478427 - protein, 352 aa, unidentified
MEEYRTSGQKGKTVFVGVDLHRLSWHVTVRTEDQELFSGTLPGHWEALRSLLHRYQADSIQVVYEAGYFGFWLHDRLVGYGVDCIVTPPSLLPQQYGNRVKTDRRDSRKLAHLLSRGMLKRVWVPTLKERYHRQVIRRRRQLIGDRVRTKNRIKAELRFYGIEIPEPRGPWPRCYVQNLCSIRFNDPWMQESFQRLLEQYEFLSEQISKQTQLVRRLSETPLYRGRVAILRSVPGIGLIAAMELLVELQDVGRFRRAEQLAAYVGLTPSQYSSAEKIRMGRITGIGKSGLRATLVEASWKLITKDGAMGEKYERIKARSGAKRAIVAIARTLLLRTRRMLLDGNPYAVGLLA

SEQ ID NO: 478428 - protein, 351 aa, unidentified
MPHKLNSGIAVIGIDIGKNSFHVVGHDKRGAILLRQKWSRGQVEARLANLPPCLIGMEACVGAHHLSRKLQMLGHDARLMSAKYVRPYSKGQKNDFRDAEAITEAVQRPTMKFVATKTTEQLDLQALHRVRERLVSQRTGIINQIRAFLLERGVAVRQGLRFLRAELPRILAAPCDALSPRILRVIEDLAGDWRRLDERIEGLSNEIEALARQDKGCERLMTVPGIGPIISSAMVAAIGTGDAFSKGRDFGAWLGLVPKQISTGDRTILGSISKRGNRYLRALFVQAAWVVLVKVGPKHWERYGLKSWIEAAKKRLHHNVLAVALANKLARIAWSVLAHGRTFETSKIQAA

SEQ ID NO: 478429 - protein, 323 aa, unidentified
MKAADGTILEEGKLEATRKELFNFADRLPRPWAGAMEATLFTGWIYDFLLPYADELKVGHSYMLRAICASKRKNDRLDARKLADALRCDWFPQAHMPPAEVRELRTALRYRNLLVREEVRMKNKTAGLLMEAGVEYSKDKLQGKRYFNELLDRLDYVPDSLKEIAAASHESAKYFEAGGKRLVAALTGNPALNERVERLMSIRGVGEITALTWALEIDDPHRFANRKKAVSYCGLCSSEDESAGKIYRRPLSKQRNKHLQTILIEAAKLAPRWNPQLALVLKKARDRGANKNEATIEVARKLVSYLLYVDKTGNRFQLKENLN

SEQ ID NO: 478430 - protein, 338 aa, unidentified
MKAYAGIDLHSSNNFTAVIDDQDQRLYGRRLPNTMDAVVSALEPYKEHLKGVVVESTFNWYWLVDGLKEHGYKLHLANPSAIKQYEGLKHTDDKWDSFWLAHMLRLNILPEGYIYPKDKRPVRDLLRRRLLFVRHRTAQILSLQSSITRNLGYTMSARDIKKLDQPDADTLFKDPFLILAAGNTIATIRFLKTRIAEIEKAVKAHIQLTPQFRYLLTTPGIGEVLGLTIMLEVGDIRRFPKVGNYSSYCRCVKSERFSNSKKKGEGNRKNGNKYLAWAYVEAANFAIRHYPEIQSFYQRKKVKTNGIVAIKALSNKLARASYYIMRDKVPYDEGKFFR

SEQ ID NO: 478431 - protein, 409 aa, unidentified
MEQATRFVGMDVHKDTIVVAVTATGEVGKAMAYGTFPNTTAALEKLVKRLRQAGSGPIKFCYEAGPCGYGVHRALTKMGEDCMVVAPSMIPRKSGDRQKTDKRDADGLAVLHRGGLLTAVWVPDAAHEAMRDLIRARLAAIRAVRAARQQLSAFLLRHERIYPEGRTAWTKAHRGWLVDQSFAHPAQQIVLEECIEAVRSGEQRRDRVDGYLHAQIPTWSLFPLVQNLCALRGLDTIASAGLAAAIGDPSRFASAPDFMAYLGLVPSEHSSGPKRHIGAITKAGDVHARTLLIEAAHSYRFPARITRHKLTAVEAVPEAVRTIAWKAQTRLCQRYRQMMAKGKPRQVVVTAIARELAGFVWSIACITSDPAATGDVVNGPCNEATTYLMGVEIDSDKVTAAREGAVKRG

SEQ ID NO: 478432 - protein, 340 aa, unidentified
MKFIRTAIDLGKTYFQVHGLESEGGQSMSRKMKRSKMREFYEQIEPCRVGMEACGSGHYWARELVAMGHEVVLIPPAYIKPYIKRGKNDAVDAAAICEAMSRPGMRFVPIKSADQQAVLMLHKTREMFVKQRTMSVNALRGHLAEFGIIVAKGIGRVDELLALAQSDTELPQIAKSTVAGLAQHLEGLDQSIEAVGDEITRAHKQNPTSRLLDEIPGIGVLIASVIASSVPDPSVFKTGRDFAAWLGLTPRQNSSGGKEKLGSITKQGNRYIRKMLVVGATSVMRVAGKRKGALADWINALQAKKPKRVAAVALANKLARICWAIMTTGEGFRVDTYVKA

SEQ ID NO: 478433 - protein, 375 aa, unidentified
MNDHSEAFVAFDTSKLRNAVAIADAGRTGEIRYLGEIENTGAVTAKLVRKLATKHLRLTFCYEAGPTGYGLYRLIKSLGHECIVVAPSLIPKRPGDRVKTNRRDALSLVKLLRAGELTAVWVPDRHHEAIRDLTRARGTAALDLRRKRQQMSAFLLRQGLHYPENRHTWTKAHMNWLASQKLAHAEQRLVFEEMMLAMRQAQERIERLEQAIRAAVPDWSLAELVTALMAMRGLDLISATTILAEIGDLSRFQTPRELMAYLGLVPSEDSTGDKVIRGPITKAGNGRARRMLVECAWSYQHPPRVGKDKQEKVAAAPRAVREIAWKAQCRLNRRYRALVRRGKLKTVAITAVAREFAGFIWAVARAANAARVAAK

SEQ ID NO: 478434 - protein, 340 aa, unidentified
MTIVMGLDQHRAQITAEWIDTETGEIGRTRVRPADRAGVRRFLGRFGGQRLEVALEATTGWRFVVQELQAIGAAVRLAEPAETAARRGRKKRPKTDRADARHLRELLMVDRLPESSIPPEHILDLRARVRLRHTLVDQRGEWQQRIHAVLYHHGCPHHHGIGLLTAKGRAWLDSLGLPSTAREQVTVALRMIDMLDVQLAPIDTELRAYARRQPGCKALMGHYGIGHLTAVTILAELGDARRFSSSRDAVRYAGLDITVKQSDQRRAPGHLSRQGPPALRWALYEAAQSARRHSSPDRDYYQQAAERLGGNRACLAVARKLLKRSYHTLRELGDEALQPA

SEQ ID NO: 478435 - protein, 466 aa, unidentified
MQGKNVTGKKCKRLSRSLKTIQPNAAGIDLGSREHWVAGPPLSDGSPNVQRFATTTPELLRLSDWLNEQQITTVAMESTGVYWIPLFEILDSRGFEVLLVNARQISHVPGRKTDMIDCQWLQLLHACGLLSGSFRPGDDICQLRALIRERNSVVEQRSDWIRRMQKSLDQMNICVHHAVSDISGVTGMAIIRKIVDGERDPRVLANLRDHRCQKSIEQIEQELTGNWRPEHLFNLKQALKTHDHLNAVIDDYDAEILKRIDSLQSPAMKDSSAPAPASKGKANKICKQGQEPLRQALYRMSGIDLTTINGIGVDTAALIISELGPDLSAFPDEAHFVSYLRLAPNISVSAGKKVPGKFKAVTATRVSNALRMAATTLRNSKTALGAYYRRISWRKGASVAVFATARKLAQLVYRLIRYGQAYIDEGAKVYEERFNQSRLESYTKTLKDMGYKVEPITAGEVDPIAV

SEQ ID NO: 478436 - protein, 358 aa, unidentified
MTHNTPQITGGVDTHGQTHHAAVIDSVGRHLADQEFPATIRGYRDLLDWIRSHGTLVAVGVEGTGAYGAELARVLTAAGITVIDVDRPDRKTRRMKGKSDPIDAYAAATAVLSGRATGVPKSRDGGVEAVRVLRIARRSAVKARTQAMNQIRGLLVSAPAMLREQVAGLDRAALIRTLARLRPGHDLSRPLAATRAALRRLARRHQAMDAEITELDAEIGPLVEQAAPALLELFGIGPETAGQLLVSAGDNPERMRSEGAFAHLAGVAPIPASSGRAHRHRLNRGGDRAANNALHTIVLTRMRFDDRTRAYVERRTKEGLSKKDIMRCLKRFVAREVYRALTTTPTERTTQTDLVPAA

SEQ ID NO: 478437 - protein, 419 aa, unidentified
MRVYDTDARASRTKGAERTMFDTGDVGIFLGLDVGKTAHHGHGLTPAGKKVFDKPLPNSEPKLRAVFDKLAAKFGTVLVIVDQPASIGALPLTVARDAGCKVAYLPGLAMRRIADLYPGEAKTDAKDAAVIADAARTMPHTLRSLELTDEITAELTVLTGFDQDLAAEATRTSNRIRGLLTQFHPSLERVLGPRLDHQAVTRLLERHGSPAALRKVGRRRLVEVIRPKAPRMATRLIDEVFDALDEQTVVVPGTGTLDVVIPSLARSLAAVHEQRRALETQIGQLLEAHPLSPVLTSMPGVAVRTAATLLVTVGDGTSFPTAAHLASYAGLAPTTKSSGASIHGEHAPRGGNRQLKRAMFLSAFAALHDPASRTYYDKCRARGKTHTQALLRLARHRISVLFAMLRDGTFYEPKTPRLA

SEQ ID NO: 478438 - protein, 413 aa, unidentified
MTVYCGIDWAETHHDIALIDDDGQLLAKRRIGDDAAGYQLLLDLLAEYGDSAEALIPVAIETSHGLLVAALRTGSRKVFAVNPLAAARYRDRHGVSRKKSDPGDALVLANILRTDMPMHRPLPADSDLAKAITVLARAQQDAVWNRQQIANQSRSLLREYYPAALAAFQHRPGGLTRPDARTILALAPTPARAARLTLTQLRSALKKAGRRRGIDAEAIRLREVFRAEYAHHPASVEDAFGIQLLSLIRQLDAVCQAADDLAEAVEASFREHPDAEILLSFPGLGVQLAARVLAEIGDDRTRFADARGLKAYAGSAPITRASGKKHFVGRRFVKNDRLINAGFLWAFASLTASLGANSHYRRRREHGDWHAAAQRNLLNRMLGQLFHCLQTRQHFDEQRAFTSPISSSLTAAA

SEQ ID NO: 478439 - protein, 383 aa, unidentified
MVEKKGIANVSGCEEIEASYYGIDLHKDQITWHCIDRTSKGILVRGTGKISTDRIHEDFIPMLRKEKCYVIVEASGSTFFFHSLIQSHCTKSIIVNPSAFREMYMTGKKTDRIDAKKLADRLMYHIEMKDSDDGFPEVYVPDEEALKIRKLVTTYELMVKQITQAKNQVKAIFRSKIISVDVDVLDNGLEEQLKNERLDNADRIIVRSLKGLYDTMCREKQTIKEAILSVGVRRFRDEIELLTGISGISIIGSIVFMADVVTVRRFDSAKKLTSYLASVGKVDASGNTTRNGGLNKRGRRTSYRFILQGLEHIVNGNEGFQRFRERHASKRSNKIRAAIVRKTFVTMYYMLKNHDMYRFLNKSIYTRKIREMNKIIRTIEKAA

SEQ ID NO: 478440 - protein, 340 aa, unidentified
MSLYGGIDLHANNSVIVLLNEQDEVIYRKRLPNDLPTILEQLAPYHTEMKGLVVESTYNWYWLVDGLMDADYRVHLANPAAMQQYSGLKYTDDHSDARWLAHLLRLAVLPEGYIYPKAARAVRDLLRKRAHLVRQHTANVLSVQNILARNTGARFSVKRIHELTKQELTTLLAEETQVLAVTSSLVVLDCLRHQIKALEQAVHKRLHHTPSYEQLLTVQGIGTILAQTITLETGAISRFPTVGHYASYCRCVDSTKLSNGKRKGTGNVKNGNPYLAWAYMEAAQFALRFQPAAQRFYQRKLAQSRNNTVLARKAVAHKLSRACYDIMRDLVPFEATKAFG

SEQ ID NO: 478441 - protein, 338 aa, unidentified
MKITTIGLDIAKSVFHAVGVDKAGKLIKKKMLRRKDLLPFVAKIEPCLIVMEACGGASYWARELEQFGHVVKLIAPQYVVPFRQGNKNDYNDALAIAEAAQRPNMRFVKPKCVEQQDVQLLHRMRERLTKQSTALINQVRGMLAEYGIVITKSKSAFKAQLPDILVDEANTLTTKGRAIFYQLYEEFTDIDKRLKSCDTQVLNETQNNVVCQRLQTIPGVGPVTATAIYAAVGDGKDFSNGRHFSAWCGLVPKQHSRGGKDNLLGISKRGNAYLRTLFIHGARAVLRHSGSKSDKLSCWAIQLAERRGFNRACVAIANKLARMSWVIAAREEEFRLAM

SEQ ID NO: 478442 - protein, 459 aa, unidentified
MPAGKKRRKKRQNQKVIKLDSLKQLNLNAAGLDIGSAEIWACVPEDRAEVSVRVFETFTPDLHALADWLTACEVETVAMESTGVYWIPIYEILEERGFEVYLVNARHLKNVPTKKTDVLDSQWIQQLHTYGLLNASFRPEVEMVALRAYIRHRDNLIRYRTGHVQHMQKALDLMNIQLTNVLSDITGRTGMQIMRAIVAGQHDPITLAQYRDGRCRSSEAEIAKALSGHYRAEQLFALQQALELYDFYNQQIQACDAEIERKYATIKPVFDSDRQPPAPKKGRSKNEPDFDLHRYLYQLCGVDLTQIKGLDVLTVQQIITETGVDMSPWPTVKHFASWLTLAPHNAITGGKVINSKTQKSTNRAAQAFRMAAQSAGRSDSALGAFYRHMRAKHGGPKAITATAHKIARIFYHMLKYKQEYQDPGSNFYEQKYRDRVIKNLKRKAKALGLELVPLQPSVS

SEQ ID NO: 478443 - protein, 465 aa, unidentified
MGAGKMNRKQRKELGRRLQSANPGLEVVHPRAAGIDVGNGAHYVAVRPEQDAEPVRRFECFTADLHRMADWLEACEVKTVAMQSTGVYWIPLYEILEQRGFEVYLVNARHTKNLPGRKSDVQESQWLLKLHTHGLLNNSFQPTAEIRVVRTYWRQRGEHVRGASTCIQRIQKVLTQMNVQLANVISDLSGLTGQAIVRAILVGERDPRKLAELSHPRIRAGREQIAKSLEGNWRSELLFVLKQEMEMYDTYQHKIAECDRELEATLKQFAAPERASTEQPKIPNAKKAKRIQRNAPGFNLTSELHRITGVDLSRIDGVNAIVAQTIISEVGLDMTRWKTEAHFASWLGLCPDNRISGDKVLARGTRHVINRAATALRMAATTLIKSQSYLGAQYRRLRTKLGAPKAITAMAHRLARLVFRMLKYGQEYVDKGTQYYEQKHREQQLHLLKKKAATLGFQVVETGVA

SEQ ID NO: 478444 - protein, 350 aa, unidentified
MDILGGFDVHRKQITFDYMQMDSGEVHRGKIRPADRESLREWLESFTEQFPEHEAAIAVEATTGWRYVVEELRRAGVEPHLAEPAETQSLQGRKKRRAKTDRLDAGHLRDLMMIDRLPESWIPPDHVQEITTLTRLRHNLIEERTTHKQRIHAQLFHNGHPQQKNLDSMEGRAQLEEVELPAAARQVVDLSLQMIDHINEGLEPVEARLRDYARVQAGCQALMEHPGVGELTSVALFSELGDTRRFSSSKKAVRYAGLDVTVHSSDDKRAAGKLSRQGPPVLRWAAFEAAKGAWRKNSPDHEYYLGNKERIGANRASLSVARKLIRRAHHTLRELGEEAMSEPVFASSRA

SEQ ID NO: 478445 - protein, 347 aa, unidentified
MNSVGIDLHRKRSHIAALDESGAQLLSRRIVNDPQTFLELLEGIDGESKIALEATYGWEWLADVLEEAGYELHLAHPLRTKAIAAARVKTDAVDARTLAHLLRTDLLPEAYIAPPELRDLRDLLRHRVALTRMRSALKQRVGAILAKHGIQRPYSNLFGPGGMRFLAELELREGPRRRLDSLLSLIGDFDREIDQTSREIDQRAKADPYVEVLCQIRGIGRYIAMLVIAEVGDIGRFPSARHLCAWAGLTPTVRSSDGRARLGHITGQGSPALRWALVEAAQHAGRGGGPLRQAYERISKRRGKSVAKVAVARKILTLCYYGLRDGEIRCLAPRAKARTIRTLAVAP

SEQ ID NO: 478446 - protein, 435 aa, unidentified
MPAAAFRFGCNTVGSGLMAEVMIGIDPHKGSHTAVAISAGEEPLGELQVHACPSQAQQLLAWAAGWPERAWAVEGAAGLGHLLAQQLVAAGEQVLDVPPKLAARVRLLQSGDTNKNDPNDAFSVAVAALRSTARRPVIAEDHAAVLKVWAKRHRDLARARNQAACRLHAVLADLVPGGVRREISAGQAARILEQVRPSDAVVKARCELAAEFLTDIRRLDAQLRDTNKKLAAAVRVSGTGLTGLFGVGPVIAGTMIGDVRQVFRFPSRDHFAACNGTAPVEVSSGGRKVYRLSLRGNRRLNHAIHMAAITQIRYRHSQGRAYYDKKLAEGKTHKEALRALKRRISDAIYAALVADARRTAATGPKSPGGQPGNHSVSRTAGSHPAHRLFGQATPGPATTLRPGATASPAAIQPNRALQHRAGCSPASSKKPQTTA

SEQ ID NO: 478447 - protein, 343 aa, unidentified
MAQQMIIGIDLAKHVLQVCMVTPTGTLKTNTTVARGKLLTFIARPPPALIFMEACGGAHDWARRFCALGHAVRLLAPQYVTPFRRGQKNDPNDALALTEAGQRPHIPTVPIKTVEQQDIQALHRVRERRMKNRTAVVNQVRGLLLEYGIVIPQGIARFRKRLPRVIEEADNGVSFVLRDLLQSLQSDLHALDTRVVEVTCQLTRLSHELEACQRLQEMEGIGPLRATALVAALGNGHDFQTGRQVAAWLGLVPRQQSSGGTTRLGGITKGGNGYVRRLLMHGARSVIGHVRDKPDAKSAWIRQLVTRIGVNKACVAVAKKMARVAWALLHTGEQYRKPVVLLA

SEQ ID NO: 478448 - protein, 393 aa, unidentified
MGVIIGMDPHKSSATIEVVDERAVVQARGRYGTDKTGYAAMLGAGRKFADRVWAVEGCNGIGKHIAHRLVHDGETVLDVPAKLSAQVRVFATGNGRKTDPVDAHSVALVALRTPGLVKVSLDGDLLVMGMLADRRDELGQARTRTVNRLHRLLLELFPGGAKQFLSARQARTMIATIRPRDLVGKTRRRLAVELIGEVEQIDAKMKTLKKELTALVTARGSTLLEVTGIGPSGAARLLADVGDIHRFADRDRFASWNGTAPLDASSGNQQRHRLSRAGNRRINRTLHIMAIVQLRHRTEGRAYYDARKAGGMPSMMAMRALKRRLSNVVFARMLADQKRREKTGPGGQSGTTTNSSVTDLTPAIGSSDKPHPGPASTQPRTAIPGGCPTRRRR

SEQ ID NO: 478449 - protein, 431 aa, unidentified
MPKYLNSLVVGIDVASKFSFAAILSPDGSQYRKPFKFDHSAVGFNYLLEQIKKAEEEFATKPVFFMESTGVYHLTLFHFLEDNRFEALVINPLVTNSSKNKSIRKVKNDRNDALTIAGLGKYEDIKTSSNSDLDLLTLKQLVRDYYKLIDVRTGFKKKLSTTLNIAFCGYQDVFSDVCGQVSVSILEKYPSPQAVLSAPKQEIVDILLLSKKGLSWAEKKYHTLVECAENAQYIGLAAPRLATCIKSSLALYKSIKAEADHMMDEIKDFINSAEMPAVLRGNIELLTSIPGIGFSTAVTIIAEIGNVDKFITPKQLVAFFGVDPAVNESGNFKGDRVKMSKRGTRFGRRALYAVALASIRTKRNGQAMNPVLLKYYQENMKGKKAKVALVAVMHKLIKYIYAVLKNQQEYQIRDPKVHRQMFLVNNTRLAS

SEQ ID NO: 478450 - protein, 397 aa, unidentified
MPNIFKGCDPMIYVGIDIAKQKHFAAAMTADGEVLIPPFGFTNDAEGFKLFLSKIKSFEKSNILVGLESTAHYAENLVCYLFELGFRISVINPIQTSTLRKTNIRKTKTDKVDCLLIIKSMIVNRPRLYSKTDIDSLRLKSLCRFREKIKKAKAKLKVQLVTYVDIIFPELQYFFKSGLHINTCYQLLKKHSSPDDIAALHLTYLANLLQKASHGSFGKEEAIALKGLAKSSVGTGNTAVSIQITQSIAQIELLEQQLADLDEAIKSVMLEMDSVILSIPGIGFLNGAMILGEIGDISRFSNPSKLLAYAGLDPTVNQSGKFNAKSTKMSKRGSKLLRYALINAAWNVSLNNKTFDNYFKLKRSQGNNHYAALGHVAHKLVRIIFKMLKDNVTFNLD

SEQ ID NO: 478451 - protein, 326 aa, unidentified
MTLSHSTDNTFVGIDVGGAGLDVAWHRGDSAHYANRPDAIATLVERLRTGPEVTRIVLEPTGGYEKALVKALRQARLPVEIIHTTRFNAYRALVGVKAKSDTSDAKLLASYAAAPDEVRGRKAGHVELPEDAVREQLSELASRRDQLKHMIHAETCRLGTVRKDELRQMITTHLEALRAEDKQVHRMMQELVRQRDDLRRDQRLLKTIKGIGVKSALVLLASVPELGRIDNKAAAALIGVAPFVRKSGTMNAPARIHGGRAPVRSILYMAAVTASKHNPLLSPFYDRLIAKGKPPKVALIAVLRRLVVFANAVLRSGKPWKGASAT

SEQ ID NO: 478452 - protein, 319 aa, unidentified
MARNCIGVDLAKDFLEVCDPVRGRSRVANRPKAVAHWVAGLGETDFVVYEATSGCDRPLRVALAEAGRPGARVNPLHAWHYARSRNRAKTDRLDAALLADYGRERQPAPDPAPDPALDPAREALRALVGRRDQLRRMEVQEKNRLSGCLAEGAPALVVRDLRAGLARLARSLARIEAAIRDEVAGDATLARDARLLRSIPDIGPVTAVTLLAWLAELGHTDRRAAASLAGVAPRARDSGKYRGRRFLGDGRRQVRRALYMAALSELRHPGFLADFVRRMKEAGKPGKVILMAVARRLLVVANAVLRTGEPFRTAIPTAA

SEQ ID NO: 478453 - protein, 387 aa, unidentified
MAQVNDLSRSLTAFDPISTLVVVVEMSKASWLVSGVVPGVERQPLKKLEPDATALLRLIERWRNEAVRAGRPISRIALAYEAGRDGFWLARWLIARGIEAHVIHSASVAVSRERKRAKTDRLDAAMLMRVFLGWLRGERGHCGMVAIPTMEEEDARRPSRERESLVDERSRITNRMKSALARLGIRGFKPHLRKAPERLAGLRTAEGTGLPANIIEEFRRDMARLALVREQISSIEKTRAERLERAPDTGPHAMVRLLARVIGIGIETADMLVREILSRRLRDRRAVARYAGLTGSPDESGLKRREKGLAKAGNARVRRGLIQLAWRFLMFQKDSALAQWYRTRTEGPSGARKTTMIVALARKLLIALWRLVTTGEVPDGVELRPAA

SEQ ID NO: 478454 - protein, 404 aa, unidentified
MATPEQVSVWIGLDVGKETHFADVLDNDGERLFSRPIGNDQGDIEALIDRAGKHGVPGLAIDQPGSIARLILAVAAKRQVPVAYIPGLVMRRAADLYPGEAKTDRRDAYIIADTARTRRKQVHWLDAASDELLEELRVLNGFDTDLAADQTRLANRLRDVLTGISPALERALGKHLDHGGVLDLLAAHPTLTALRAAGPDAIRAAVAPRSPRMARKVTEAVEKALAAQDVTVPAEKAAGRVIAELARELDRLLQRRAALEKEIREAFLAHPFGEILASLPGVGARTGARILAEIGDGSGFASGAKLAAYAGLAPVTRQSGTSLNAETRSRRGNHRLKNAMFLAAFCSLRDPESRAFYDRKRAEGKKHNAALICLARRRCDVILAMLRNREHYQPGRRTGDAAAA

SEQ ID NO: 478455 - protein, 352 aa, unidentified
MDRYVGLDAHAKTCTLAVLSRSGKRLRSMVVETNGRALVEAVKGIAGDIHLCLEEGTQSAWLHEILSPHTRELVVSVPEKRRGPKDDLRDAWSRAEDIRVGRVQTRVYKAPKHLAGLRSAACAYRLATRDVVRTKNRLKAVFRSRGIRSNSGVYEAASRDRWLNQLPSGSRELADWLGQELDDLVPLRDKAEEWLRKEAKSHPIIRKLRTGPGMGPIRTAQLVAIVGTPHRFRTRRQFWSYSGLAVVTRSSSDWVQSRDGNWVRGRTYQTRGLTRQRQPVLKAIFKGAATSVIEQLPQDPLHEHYERMLASGIKPNLAKLTVARQVAATVLAMWKHQEVYDPKKHLVVTDKA

SEQ ID NO: 478456 - protein, 396 aa, unidentified
MLYIGIDLHGKQMTVSVRDQAGNVILRRQVSTRPAKVKKFLQELVALGGGKYVVLLEVCGFHDWLVQELKAQPSCMEVVLIQPEQTSKKKTDRRDASRLSEVLWVNRQRLLAGEAVRGVRRVYIPTEAERQDRQITAGRYRLGRQRTRTINQIRHILRRNNLEWERPTKGFQTKKVQSWLKTLALDETDRLEMDQLLEQWMLWDRQIKQSEERIAERFEKNAAAQLLATIVGVSCYMALTIASRIGEIGRFPRGRSLANFFGLTPGTRSSGEHERLGSITKQGSRMVRFMLGQLVVHVLRQDSTLRRWSKGIKKRRGAKIARVAVMRRLTGIIWRMLSKGEAYRYDGVTEPRRRPDPDSPREACQLPERASVLAAFPAAAAAWEPRSAGEVPVPLL

SEQ ID NO: 478457 - protein, 350 aa, unidentified
MKIRHPIIIGIDTHKATHVAVAIDTQGTRLAALSIPANSKGYLELERWSCGLGHVQAFGIEGTGSYGAGLSRCLLAQGHHVVEVTRPNRQLRYTQGKTDSLDAEGAARSVLSGQANSRPKTQTGSSEMIRHLKIARDTAVKSRSQAMVTLKTLIINAPADLREVLDQIKGKIGLIRHIAAFRPGDILNTLASAKAAMRALARRWLLLHEEILGHDKELERLVIKRAPDLMQSHGIATMTVAEMLILVGDDPTRIRSEAAFAKLCGVCPIPASSGKTHRFRLNRGGNRQANAALYRVAIVRMRSHEPTLAYVKKRTKDGKSKSEIIRCLKRYIVREIYSQLCVPQTIKIAA

SEQ ID NO: 478458 - protein, 360 aa, unidentified
MAKVSLSRLSEVLEKQSGHIFHVGIDVHKRSYHVAFYGDNGEQQAFVCSAEAVNLVKQLEKSRAQIAQVVYEAGPTGFELSRKLKDAGFKVLVVAPSRVPRPVIHGAKTDRLDCIRLAQYSAHGMLKGIAIPSKAQEAQRSLVRRRHDLIESVRRVKQRIRSHLLYLAVEEPAGLDRWSNNAVKALLKLPLDTWAKDTLKSLVRELDFLHKEKHRLEKQISVMCNQPEHGKRFDCLQTIPGIGPVTAATFLLEVFDPWRFKTAEQLASYLGLAPMVRQSGESKGRAKLRPVGQKRLRSLLIEAAWCWCRKDEQAGSKYHRIVCKTDVPQKAIAAVARELAIILWRLAIEQRAYEMRQLAA

SEQ ID NO: 478459 - protein, 355 aa, unidentified
MNQEKYIGMDVHQATISVAVMDAGGKLIMECLLETKAATVVEFIRGLHGTLSLTFEEGTSAAWLHDLLKLHVSRLVVCDPRKNALLKDGNKSDRIDARKLAELLRGNQLHPVYHGEHGVRTLKELGRSYLTITQDVTRVMNRIKALYRSWAIPCAGATVYAPRHRAEWLAKITEPGVRVRAERLYQELDLLQPVRLEARRELLAESHKHSGVRLLRQIPSIGPIRSALLVALLQTPHRFRTKRQLWAYSGFAVETHDSGEYRSVRGKLQRNRERMTVRGLNDNHNRDLKNLFKSAAISASTRPGPLRDFYVARVEKGIRPTMARLTLARKIAAISLTIWKKGVEFDAKQLQRQAA

SEQ ID NO: 478460 - protein, 343 aa, unidentified
MQTVTTIGLDIAKSIFQVHGIDAAGQVVIRRQLKRRYVLAFFERLPPCLVGIEACASSHHWSRELHSLGHTVRLMPPAYVKPYVKRQKNDTTDAEAICEAVTRPNMRFVPTKTIEQQSCLMLHRARHLFIRQQTAVINSIRAYLAEFGIVAPVGRRGVEQLLEVVADAADHRLPEIARVCLAALGSQLRKLKAQILEFDRRIMAWHRSNSTSKRLDAIPGVGPALATALVASIADPRAFRSGRDFSAWVGLVPTQNSSGGKDKLGSISKQGDRYLRSLFTAGALAVIRYAKIHGTRHRPWLTALLARRPTKVAAIALANKLARMAWAMMARNERYKEPAALTA

SEQ ID NO: 478461 - protein, 454 aa, unidentified
MAQGNGLTRADRNRNRKIAGLRGVVGKDRAVLAVDLGEDKQAAVLVDHEGRVLARRTVKNAKADELAGLVGWMAGRAAGAGFAGLVVACEPTGHRWKALMGLADAAGHGFVCVQSLAVHKEREKDDYTRDKTDQRDAYLIGKLVTKLECYLPERASADWARLRHLGARRFALVADVTSCMQQAGDLLGCAWPAPLAAARRPLESVTWLAAMAVVTGRCNGNPARLRTMGYDKFLAAVRRELPRWDGKIVRHSIVKNVWDALTDTSGVAAQRRGGLERLHLLLEDWRSLRARLAATETLMTGMLADLGLAELVASIDGMSALSGAVILAETGDPTRFASGRAVVKHAGLNPSENTSATINGKTRISRRGRPGLRTAAWRAVWGALRHNRVLAGKYDRWTSRNANQLTDGQARTACAATILRWLWAVVTTGRAWDARIAAGQIPARPAAMTVAAAA

SEQ ID NO: 478462 - protein, 430 aa, unidentified
MEASIATPGAVAAYIGIDWADKKHVIALRSAAEPNKIEPQLIDQKPEALMDWIGQLEQRFGSQGKILVCLEQSRGALIYHLMGYEFFELYPVNPLQLARYRETFSPGGAKDDRPDAELLNELLYCHGDRLRALKPDSELGRKLSFFNQGRREAVDQRTRLSHAIKSQLKVYFPLALELLDQDTSTALAADLLLRWPTLEAIQKQNAHRLRKFFYGHNCRGEQRMLERLELIQKAKALTKDSALIEPAALRVQVLARQLKHLLPDIVRYDNKIAELFAAHPDRFLFENLPGAGEALAPRLVSAFGSDPERWESALEIASLSGIAPVRRASGMKSGKKGERKASVHFRQACPKFLRQSFHEFAGCSVRYCSWAKAHYDNQRARGKGHHAAVRSVAFKWIRILFACWKRRIPYNPQRYLKTLQQRGSPLANVC

SEQ ID NO: 478463 - protein, 444 aa, unidentified
MEVVYRRCCGLDVHKQTVVACLLLLDEAGRKTKKKREFGTFSDDLRRLMLWLFSNHVTHVAMESTGVYWKPVWNVLEDKFTILLVNPQHMKALPGRKTDQKDSEWIAELLQHGLLRASFIPAREIRELRDLTRLRVHLKQEVNRVRNRVHRILEDANIKVSCVVSDLFGVSGRAMLEAIVRGKTDPGWLADYARGTLRLKKDELTRAFQGHIGEHHRFVVGELLAELAFLEGRIVRLEAEIERRLQAHANVLERLCTIPGVERITAWTLIAELGLDMSAFADAAHLASWAGLCPGNCESAGKRKTGRTRKGNVYLRRGLCQAAWAASHCKDTYLTALFYRVASRGGVKKAVVAVAHRIAVIAYFLLAEPVAYKELGGDYFDRLHPERTTRRLVRRLEQLGHQVALQPRAPLPPLTALSHIPKCGQRRGRPCKCAQRGITCIHKT

SEQ ID NO: 478464 - protein, 326 aa, unidentified
MSIRRDGKRVWRGTCASDPKLIANLIQKRAPWAKRVVFETGPLSVWFYHALCAEGLPVICIDARHAKAALDMAANKTDANDADGLAHLAEVGFFREVRVKGFDSMLTRTLVAARSRLVKITTGLSNQIRGLMKTFGLLVPAGKGSTFEKNVRSLLVDQEGLAPIVLPMLEAWRSLRLRAAELGRQLVASSRQNQACRILMSIPGVGAITATSFATAIEDPDNFKKSRAVGAWLGLTTRRYQSGEVDYDGHISRRGDRHLRGLLYEAAAVILTRSSADSGLRSWGLKLKERVGFKRAAVAVARKLAVTMHAMLKTGTFFDRTLGAAA

SEQ ID NO: 478465 - protein, 403 aa, unidentified
MRAICGIDWASDWHDVHISDETGGVLAIEQFSHDERGVGALIDLLVAHRVEACAIERPDGLLVGRLLAAGVTVLAIHPNRLKAARDRFRAAAGKNDRFDALVLCELARTDRHRFPALAPCGDETLALRALVRTREDLVKARVALANQLRAQLEAFWPGAARIFADVDSPIALAFLERYPSPGEARGLGERRLEGFLARHAYCGRRSPAELLARLRSAPTAVVGELECDARRCAVIGLVATLHPIVEQISQLTSQIAGAVRAHPDGEIFLSLFRDRKSVVTAAGLIAEIGDNRSRYPTDDTLAADAGQAPVTVQSGKRSSVSFRWACDKRLRDHVAVLADSTRHWHPWARDTYQRAHARGADHPHAIRILGRAWTRVLWRCWQDHTAYDPAQHKALNALLAEGG

SEQ ID NO: 478466 - protein, 431 aa, unidentified
MLGGNQEKLMSQNQPEIQYAAFLAIDWADQKHVWSLQEANSSTREHGEVGHMPEAIEAWIAQMSQRFAGRPIAVAVEQSRGALVFMLSKYAQLHIFPVPPAMTANLRKAFYSSGAKTDPADTDLLQDVLQMHREKLRRLSPDTEATRRVQNLVEERRKLVNEKTAQGNRLEAHLKIYFPQIPHWFGDVDSPLVCALLERWPTLEALQKARPDTLRSFFRKHHCRKEELIESRIKAIGKAMPALNDRAVVEAQLAVVKVLVQVIQVLHQGIEDFNRRIQEAAEAHPDFFIFESLPGAGAVMAPRLLAAFGSQRERYQNAAEMQTLSGIAPVTESSGKSSWVHFRFACSKFLRQSFHEWAALSITQSQWARAYYELQCRRGKRHHAAVRALAFKWIRIIYRCWKERVAYDEKVYLAALAQHNSPLLAATKIAL

SEQ ID NO: 478467 - protein, 404 aa, unidentified
MDHCTAGLDWASEEHAICIVDQQGSIRESFNVRHDARGLGELVRRLRRYEGLRLAIERPDGLLVDTLVDAGIAVVPIHPNKLKAARERYTSSGAKSDPGDAYVLADFLRTDGHRFRDLAPLSEQTRALRALVRTRDDLVRARVALTNQLAAQLAVFWPGAGAIFYRLDSDIALAFLERYPTPEAAANLGERRLAAFLKRNTYSGRKPVGELLARLRAAPRGLVGSAEAEARGECVKALVRALKVLLPQVGELEGAIAVALAKHPDGALFKSFPRAGEVNAAQLLAEIGDVRERFPSDDVLAMEAGVVPVTKRSGKFTRVGFRWACNKRLRRALTTWADNTRHGSSWARTFYDRARDRGADHPHAIRILARAWLRVLWRCWQDRTKYDDVRHLAAAAARFAPMGG

SEQ ID NO: 478468 - protein, 427 aa, unidentified
MKTEDIRLEEFRNLKKEVRGSVGHLLVGIDIAKEKHNAFFGSATGKTFLKRFVFDNNREGFEKLLAETDALKQKYGLSQTVFGLEPTANYHKPLGEYLIYRDHEVVLVAGSAVRKNRELLDGRWDKHDVKDAANVADLMAQGKFLYYENPGIEVRELRGLLSLKRKLKKQAQGLHLRIRNNLLAQYFPEMDQYYGTCEKDNLAMVSSCLSPAVIGGMEYNEFFKTVVSRKNGVRQHRHLYRIWQLAGDSIGCTAEEGAACEAGVLVEMLKQTREALATVEQEILKLCYTFSEYEFVISIPGFGPDITAKVLAYIGDQYRFEKASQVLKMAGFDLSASRSGKPSEKAVPVISKKGKADLRYALYQAAHIASIRSAHFKQYFAQKIRGREREKGIKTKMKVKLAAKMLVIAWTLMKNKEPFNPDYLTTN

SEQ ID NO: 478469 - protein, 341 aa, unidentified
MSVMIGIDPHKGSHAAVAVDESEQALAELEVRATGRQTTELLGWAVRFPQRSWAIESANGHGYLLAQQLIAAGEHVVDVPSAQAARVRVLDSTRSQKNDPNDARSVAIVALRQPGLRVVEAEDHVVVLRMLARRHKQLAGLKTQAASRLHAVLAALIPGGLGKEMVPRQASALLQRIRPGSMVEAERKRIAHQHLAEVRRLEKELKASKARLKVAVEAAGTTVTDIYGVGPVVAGLLIGYTGDVSRFPTKHHYAAYNGTAPIDASSGSRKRHRLNPRGNRMLNHALHLIAITQLRYPDTEGRQFYERKLAEGKTGKEAIRSLKRRLSDVVYRHLIADQQNS

SEQ ID NO: 478470 - protein, 365 aa, unidentified
MNSVVYGGLDVHKDSISACLINRETGAIFQEQVPNDQGRLLRATRRWQKLGQLRLCYEASGAGYVIKRWLDGEGIDCEVIAPSRIPRAPGDRIKTDRRDARKLAQLYAAGLLSPVRTPSQEEEQVRAIVRLRDEITRDMTRIKNRVLKHLARLGIRFEGGKNWTQKHRRWLQKLSLHPADALIVNMHLNTLDHLEAQRQDLDERIAVIAEEPAYRDRVQRLMCLRGIQLYSAMVLLTEIGDISRFGTAPQLMSYFGLVPSESSSGDSRYLGGITKTGNSRARWILGQAAWNQTRRPGSERLRKQWATQAPEVVAIARKAEKRLHQKFWRIAARKERTIAATAVARELAGFVWAVLSAPCAQVASS

SEQ ID NO: 478471 - protein, 331 aa, unidentified
MFPVGIDVSKSTLDLCMLYDGIKGRIKTRNIRNDRSATENIIRWLRLQHYGPQDVHLVMEATGVYHERLATDLHDAGFYVSLANPHRTREFARGMGIMTKTDKVDAYMLACYALLKKPHRWEPPAPEIRHLSALLRRRDVLLGDAVREENRLEKYLSTDTPANVISSCMRMAQLLREEVDSIERQIKAHIQASPDLKQDYSLLTSIKSVGPQLGMHMLIVLRSHNFESAEQAAAFLGVVPVEKRSGTSVRSRPRMSKIGPPQLRAKLYMSALCGKIHNKRMRNMYDELCMRGKPKMVAIGALMRKLVHWCYGVLKTGTAFCDEISNPLVHT

SEQ ID NO: 478472 - protein, 344 aa, unidentified
MKITTIGIDLAKNVFQIHVVDERGKTVLKKQLKRDQVAAFFVNFPPCLVGMEACGSAHHWARKLEGFGHTVKLMAPQFVKPYVKTNKNDAADAEAICEAVARPNMRFVPIKNIEQQSVLALHRVRQGFVKARTAQANQIRGLLGEFGLIIPQGIAHIAKRVPQLIEDASNELTGSFRLLVQRLMDHLNELDKQVGEFEAQIKTWHRASEASCKLEMIPGIGPITASALVASVGNAKNFDDGRQLAAWLGLVPKQHSSGGKSTLLGISKRGDSYLRTLLIHGARSVIFRAQQKADKSSWLHKLLERRNPNVAAVALANKNARIVWALLANDRNFQADYTRAPATA

SEQ ID NO: 478473 - protein, 408 aa, unidentified
MKRYYLGVDWAEEFHQVWVSDPDGKKVAEMKVFQQSEAMSEFGAWLHQRKAEEIELWAAIEKPHGRIVDFLLDHRVVVYPVNPKALDRARDRFRMSQSKSDSFDAYVLAEFLRTDHAHLRALEPNSVQAQELKILSRDHERLMRQKTRLLHQIGITLKEYYSRPLEVFGDLESKIARDFLKAYPTPQTLSKLNRRGWNRFAKHDHHVSEVRSNELWEKLSKAQLPIPEHIVRAKAKLLLALMVQLGALIPEVEGYSEEVERFFAAMPAAELVKTLPGGKSGTTVAKLWAELGDANNRWQSFRHLQAEAGGVPVTQSSGKSHVVVFRFACNKHLRHAIYWFSFNSLRRCEWANKSYRQQRAKGHSHAQALRALGAKWLKIIFVMWRDHKPYDENYHLANIARQRMRQAA

SEQ ID NO: 478474 - protein, 370 aa, unidentified
MRCYQGQHPFYCGIDLHARTMHVCILDQAGQTVFDKGIPCRPEALLRAIQPYRDHLVIGAECMFAWYWVADLCVEQDIAFVLGHALYRKAIHGGKAKNDRSDAGKIARLLRGGTFPLAYAYPKGMRETRDLMRRRTYLVRKRAELLTHLQILNAQYNLAPFPKKLACAANRTEMNVAERFADPSVQKSAAINLALIDRLDELIGDLELYLVRTAKVDDIQTFYRLRSIPGVGKVLALILLYETHDIGRFDTAGQFLSYARLVRCAHESGGKKLGTGGKKIGNAHLRWANACAACLFLRSSERAKKWKQKQAAQRGEGKALAILAARLGRAVYHMLRKGEAFDEDRFWSGARRTRTGSSSLSRKEARDAGH

SEQ ID NO: 478475 - protein, 343 aa, unidentified
MYYIGLDVHKKTISYCVKNVAGHVHREGKIGSTRRELDAWIRTLPQPRMIAMEATIFTGWIYDHLLPHAEKVKVAHPLMLRAIAAAKKKNDKIDASKIADCLRCDFLPECHMASTEIRDRRRVLRYRNLVVKQMVQMKNRVSGLLMETGVSYNKQRLHKVSYFGELMSRNEDISHAVRPLLNLSRGMIRSSGKLEYDLVSSLERDPFLRERLRRLRTVPGVGSITALTWALEIGDYTRFRSNKQAISYCGLCADEKSSADKVMRMPLSKQRNKHIQRVLIEAAKLAPRDSPELAMIREREIERGNPNRATLAVARKIVCYMMAVERRQQDFVPAGELMPTAAA

SEQ ID NO: 478476 - protein, 410 aa, unidentified
MYKICCGIDVHKNFVVACIAKTDKQGITTYERHHFSTYTKGLKQLLKWLLDRNCKDVCMESTGKYWIPVYNVLEHDCSIVLAHPKYVKAIRGKKTDKKDAKWIADLFKHDLVAGSFMPPADIRQLRDLMRYRFKLTCFKSSEKNRYQNCLTVSNIQLASVVSDTFGKSSQKIIAKILENPDNTSFDIESLIHGSMKDKLPELELAIDGYITPEQAAKLKIIKEHFDNLESRKAELEELILALANPYQQEISIILTAPGFKNTFTAIGIISEIGTNMEAFPSAKHLCSWAGLTPTNNESAGKKKSVRVSKAGCYIKPLLVQCANAAIKSKKHPEIRDRYLRIKKRRGHKKAIIAIARMLLTALYHMLKNGENYNSDLYQKSDILPTTREITVEQAILMAQFQGYRIKSATE

SEQ ID NO: 478477 - protein, 389 aa, unidentified
MIFVGIDVASKKHDCFLMQDETGLIYSKPFSIDNNEEGYKKLHTAITNFVEQTKDSNVRIGLESTGHYSNNILNYFYKAGFQVALINPLLTNMDRKATSVRKTKTDKVDSQAICMFLQRNKYDFQPYTFPLYHIEALKSLTRQRFQLVKAKSKYKVILNRLITIVFPEYLNLFSDLYGVSSLNILLNYPTPKRIAKAKLSSISKHIHARCSATAFEIQEIAKNSVGQSEDFYAFQIKQAIETILFFNKQIESYEKEISSIIKEYGQVILSIPGVGNITGAMILSEIGNINRFSSPDKLLAFAGLDPSVYQSGQYEANLKISKRGSKYLRWAIHQASFIIWQHDQTFNDYYHKKINEGKQHNVIIGHIEKKLVRVIYSLLKNNKSFVPQK

SEQ ID NO: 478478 - protein, 323 aa, unidentified
MNKDIKYFGIDISHLVFDVTDSDGNYYQFKNKLSGFKKFLKLLDSKSHCVMEATGYYHYQLAYYLFEEGIKVSVENPLVVKRFIQMGLSKIKTDKSDSKLICAYAEQVELKLWVGSSKEVQESLQITRALSVYTKQRTMLKNKLHGESVLGEPSKFVVRSLKRSLKQLDKEIKALEDKLLILVKASHQDLFTRIKTIPGIGRKTAIMLIVLTGGFERFSSASELCSYAGLTPVIRQSGSSVKGRPRISKMGNQKLRNLLFMCSFTACKYNKACRDLYERIVAKGKSKKLALIAVCNKLLKQAFAIAKSGLIFDKEYKSTLVKN

SEQ ID NO: 478479 - protein, 333 aa, unidentified
MTREYIGVDLHKQFFQACAVSMTGDRLWEQRFPRTADGVGRFSARVTGDSAIAVEAMGPTWAFVDAVAPTGAAVCVVDPRKTRLKAGHAAKTDRLDARRLADALRRDSVVRIYIPPPEIRALREVCRGRHQLVRVRTRLAQMIRALLLRCDAGEPPGTTLYAARALAWLSTVQLAPEAACQLRRLERLYRAVHADAVAADADVKARAAHDPIACALATITGVGPVLGLTLRAEIGDATRFPGGPALASYAGLVPRVESSGERVYHGRITRQGSPWIRWALVEAARYATRRLDARGRWARRLAVTKGLAKARVAMARVLCDDVIATWRGVQRSA

SEQ ID NO: 478480 - protein, 356 aa, unidentified
MNEGTTRKGSWTIGLDLGDRFSQVCVLDAAGEVGARFRVATTRKGLEGGLARYPGARVVLEVGTHSPWVSHALEETGFEVIVANPRRLRSITQSDRKDDRADAEQLARLGRVDPKLLSPIRHRGLSVQRERARLTVRDGLVRSRVLLVNQARGLAKPLGLRLPQCTTEGFASRMRREGMGDAFPGMASLVAMVEQLTQSIRALEREIERVSQDHYPETKHLRQVAGVGSLTALAYVLTLEDPQRFRRSRSVGAYLGLRPRRRQSGEQDPLLRITKAGDPYLRRLLVQSAHYILGPFGPDTDLRRFGLRLMARGGRAGRKKALVAVARKLAVLLHRLWVTGAIYEPVRGGAAEADAA

SEQ ID NO: 478481 - protein, 351 aa, unidentified
MRHLAQAQHVATYGVDIGKNLFHVAGLDKTGRPQLRTKFRRDTLLQFFGNVPVAVIAMEACPGSQWLARKLQTYGHTVRIVPAQFVKPYVKSNKNDSVDAEAIAEAATRPTMRFVAVKRVDQVDVQALHRARDMMVYQRTALISQMRGLLLEYGIALRGGAGAFKLDLPGVIEDAENELTPSMRQLLAMQRQHLEELESHIHHLSEEVAAQADRDDVARRLMTIPGFGALAATALLAAVGDARQFRRGRDMSAWLGLVPAQYSTGGKPTLLGMSKRGNSYVRRLLIHGARSCVIHMDRTRNRLGAWLDQLSRRVHFNKVTVALANKMARMAWVVITHRGALYQRNDPRFAL

SEQ ID NO: 478482 - protein, 405 aa, unidentified
MEVVHPRCSGLDVHKKTVVACVLVPGRKEVRTFGTVTAELLRLGDWLQEEGVTHVAMESTGVYWKPVFNLLETTGLELLVVNAQHIKAVPGRKTDVKDAEWIADLLRHGLVRASFIPARPQRELRELVRYRKTVVEQRSHLVQRIQKLLEGANIKLSDVASDIVGVSGIAMLRALAKGEQDLDRLVELAKTSLRNKREELRLALQGSFGSHQRFLLGKQLDQLEFLDRQITDLNQEVEQRLRPFEALLARLDAIPGIGQRNAEQILVEVGTDMSRFPSAAHFASWAKLCPGNDESAGKRRSGRTGLGSRWLRSTMVEAAWSASRVRNSYFAAQYHRLAPRRGKRRAAVAVAHSMLIAVYHLIKDGTVYQDLGPNHFELDRRRITHRAVRRLQALGYQVTLEEVLA

SEQ ID NO: 478483 - protein, 418 aa, unidentified
MKPWQEITHCAGFDWAKNNHEVVIVDKGGQIVADFVFEHSLEGWQHMRKQVSGFAGLAVVIETNQGAAVDQLLQHGFTVYPVNPVAAASYRKRKVPSGTKTDHVDAWALADALRVDGHGWKVLQPTDPLTQQLRFLCRDEVTLIEQRTALINQVQQALSEYYPAALEAFDDWTHAFTWDFVIEFPTPQALVKAGKRRWEKFMHTHKLWRPETTEKRLKVFAQADQFKASDAIVGAKSQLALSLAKLLRTLQQQLDLYREQIEKLFKHHPDHDIFGSLPGAKQVLGPRLLAAVGADPERYGGHQALQCIAGTAPVSYESGQMHKVQVRRACDKFLRHTVHLWANCFRKASAWGQAYYEKKRADGMSHACALRCLGQRLLKILFKMISTKTPYDAELHAKNQKKHGSWVIALAADNQAGA

SEQ ID NO: 478484 - protein, 340 aa, unidentified
MENIRTIGLDLAKNVFQAHAVDAAGSVVMRKRLRRGQVLAFFAGLPACLVGMEACATAHYWARELRALGHEVRLMPPQYVKAYVKRNKNDAADAEAICEAVKRPSMRFVTVKTAEQQSALLMHRGRELLVRQRTMLANALRGHLAEFGLIAAQGLHKVAGLIAIVRDVEDERVPDMARQVLRLIAEQIAELDTRIAAIEAQIMAWHKSNPMSQRLATIPGIGPIIATAITATVAEPGEFHGGREFAAWLGLVPRQNSTGGKTSLGGISKRGDSYLRRLLVNGAHAVLLRSKAGKTDPWLIALRGRKPRLVVAVALANKTARIAWAVMRKQESYRFAAAAA

SEQ ID NO: 478485 - protein, 307 aa, unidentified
MSPVASPYVGADVAQDSIAFCGPTAATVKNEPAALRAYLRTLPPQAHLICEATGRHHRPLQQACAEAARPLSVFNPARARAFAGSLGQWEKTDPLDAALLRRLGQERQPAPTPPPAPELQALLDLLMLRSALVADLGAHRCRDLLLTPLARRHLRAFLRSLQAQRAAVERSLSAWLDQAPADWQDRVQTLCLVVGVGVLSALQLLAYVPELGDCNRRQIAKLCGLAPLACDSGLHRGQRHLRGGRSPARRVLYQCAVVAARYNDHLRPVYLRLRAHGKPAKVAYLAVARKLVIFLNALLRPTPAGSA

SEQ ID NO: 478486 - protein, 473 aa, unidentified
MLHLPRQLPAGYFRGFNADYARLHGVVVRDSAPGIPSIKTKGGATVKKRLKFDHLSTLCVGLDIGSRGNFITALNFDSDRLINMRPVPNTASGVEAMESMILAVLEENLQFRYLLIALESTSFYGVHVANYLSTSDQLKPYDVKVFCLNPKTIANYRKSFTGLGKNDGIDSFLVADYVRAGRIETDPWRGSQYLALQRLTRQRRHISEAIAREKNYVLNNVFLKFSEFALLSGEESPVSDKFSATAEAILTEYKTTEDIANAPLEELIDFISASGHGRFSNPDQVASLLQKAARNSYRLDKALYEPITTSIACSFNCIRAFEKEQKALDKAIAATVAGLNPTEYQILKSIPGIGPVYAAGILAEIGSVRCFNNNNALAKYSGIIWRDNQSGEFDSEDTPMMKAGNRYLRYYLIQAAGSVVRYCPEYEDYYNKKFAEVPKHQHKRALALTARKLIRLIFGLLDKNQLYSPAKSR

SEQ ID NO: 478487 - protein, 394 aa, unidentified
MKNVLFAGIDVSKDSFDIAIINKNKKIVMQSKFEMNSKGFNDLSENIAKLQYDELLFVMESTGVYHLNLYLHLIDNNHKAAVVNPILIYNFARSISLRKTKTDKKDAETIADFALSNQQKIDFSNKEDNSIRNISRERDNLAQNVAKLKTEIKNVLHVLFPELTKHTNIFTKTMLKLLLKAPGCIPILNLKPQQITSFFNNTRGNKIQISAKELKTLAKESIGIKDVYLENVLICKIKRLLFITEQIKDMNNLLKMFVKENLQQDFEIITSINGIGDTTAEKFLIEIADINNFKSHKQLRAYIGTDPSIKQSGSSININGRISKRGNAYLRKTIWQMAVGVIRCCKQFQDYFNKKISEGKKYKQAVIAVANKLIKTLYAMLMNKTYFKVNIKPN

SEQ ID NO: 478488 - protein, 473 aa, unidentified
MSRVGEDNEDVLLVSLTGSSPNDTEEDVVTKGNRLSRGDKRRNAKLAELRRLVPVDHAILGIDLADKKQAVVVCDHDSQVLARQTVKARAWDLGPVLDWARRIAHKHGFAGVTVGCEPTGHRWMVLDQLAAQQDMTLVCVNPMLVGRAREAEDYTRDKSDDKDAMLIARLVAGLHCYAPERAEETWARLRQLGARRERLVTEATACIQQLRDLLECVWPGVLEAAAKPFDSANWCAAVAVVLQRCNGHPERLNRLGLARFEAAVVRELPRWGGQRRRRTIISAVYSALVDPTGVLAQRRGVLERARWVLADWRSATTRLAHVEARMVEVLDQLELTELVTSIPGISAIGAAAMLAETGDPTRFDSPRALVKHAGLCPRDNTSGTFTGRSRISRRGRPGLRLAAWRAVWGALAHNPVMADRYRHLTTRKVNPLKDGQARTAIAAALLRWIHVVVTQRVHWDAAIAGAAEIPAAA

SEQ ID NO: 478489 - protein, 409 aa, unidentified
MGKTLFVGIDIGSDTNVVRILDDTGKDVCGFNVSNDLPGAERLVERIVNEAELIDADKVKIGMEATNLYWWHLSQALHEAPELAAFAAEIAVINPKVIDGFKNIYTDVVKTDAVDAWVIADCLRFGRVRPTPPPDMTYAPLQRLTRFRYHMVSNLAREKNRALNLIFLKFSTYQKECPFSDLFGQASRAVVGNLTPDEIANMPVEELADLMLQHGNNRLKDVPEMARAIKQAARNSYRLNPKMRDAVDVTLAMSLETIRFFESQQKKIDQVIAKELKAIPQTLDTVPGLGPVYTAGIVAEIGDISRFKNHNALAKFAGLTWRQHQSSKFTAEDIPLTRSGNYYLRYYLIEAANSVRVREPEYAAFYRKKFTEARHHHHKRALVLTARKLVRMVFTLLSEGQIYKQRRLG

SEQ ID NO: 478490 - protein, 332 aa, unidentified
MDTHADTHVAAALDSISGLPGVQEFAATAAGYADLLDWLRGFGTVCLVGIEGTGSYGAGLARHMAGAGVRVVEVDRPGRQARRRAGKSDPLDAVSAARAAQSGRPCGAPKGRDGAVEAIRALMVAKRSARAERTQTINQARALILTGPDDLRARFAKLPPATLVTEIALLRPRPGDAAAYAIRVALRELGRRAEFLDGQMERLDELIIPLVTARARGLLTLRGVGPETAALLLVTAGDHPGRLRSEAAWAHLCGTAPIPASSGKRTRHRLNRGGDRQANHALWRIVITRMSSHPPTRAYVTRRTTEGLSKKEIIRCLKRYVAREVYPYLRTR

SEQ ID NO: 478491 - protein, 334 aa, unidentified
MENIALIGIDLGKNSFHIHCQDHRGKAVYRKKFTRPKLIEFLATCPATTIAMEACGGSHFMARKLAELGHFPKLISPQFVRPFVKSNKNDFVDAEAICEAASRPSMRFVQPRTESQQAMRALHRVRESLVQDKVKTTNQMHAFLLEFGISVPRGAAVISRLSTLLEDSSFPLYLSQLLLKLQQHYHYLVEQIKDLESQLKRKLDEDEVGQRLLSIPCVGTLTASTISTEIGDGKQYASSRDFAAATGLVPRQYSTGGRTTLLGISKRGNKKIRTLLVQCARVFIQKLEHQSGKLADWVRELLCRKSNFVVTCALANKLARIAWALTARQQTYEA

SEQ ID NO: 478492 - protein, 341 aa, unidentified
MKPAMNVLGIDIAKHVFHAVGMDNTGEIVFRKRLSRHDLMPFMAKLPPVLIGMEACGGAHYWARRFREHGHNVKLMAPQFVKPYVKSNKNDSRDAEAIAEAVTRPTMRFVPIKDVDQQDIQALHRVRERLIGERTALVNEVHGLLHEYGIVIPKGVAKFRQAVIGKLESEKDKLTSLSQEMFWKLIEEFAGLEKQLAYYQEKLEALATTHPECQRLMTIPGVGPLTATALVAAVSDASAFKNGRQFAAWQGLVPRQHSTGGKDRLLGISKRGDSYLRKLLVHGARTTIRWVGRKTDRRSPWIRQLVERRGKNRTAVAVANKNARIVWALLTSHQDYQLATG

SEQ ID NO: 478493 - protein, 439 aa, unidentified
MSQELPTLDPLASFVDVGSEHMHVSVGGNKPEVFGTVTSQLHALRDWLLEQGVHSVAMEATGVYWLALYGVLESAGLEVRMVNGRQTRNLPGRKTDMADSQWGATLHMHGLLHAGFVPPADIRRLQDYLRLRASHVAAAAACVQLMQKAFDRMNIKLHDVISKLGGVSGMAVVRAIVAGERSPEALAALCDVQIRRKKERAVIEALRGTWADEHIFALDQALQSWDHYQKLIADCDRRIAAVLPPHDETQPPLPSSTKQTGVNAPEISRLREILAQMCGGRDLTKLPALSQYGVLQLIGEVGTDLSVWPTEKHFTSWAGLAPGSNDSGKRKKRVSRGRNRTGQLFCMMAQSLVRSKDIALGGFYRRLAARRGGLVATKALARKLAGWFWRVMVKGDDYVEKGIACYEEQVRKTKEHALKRLANELGRQLVPVPSSSQIT

SEQ ID NO: 478494 - protein, 309 aa, unidentified
MEKVYVGIDIAKDSLDVAVHASDKQWRYSNDPAGITSLCKVLVELSPTLVVFEATGGYEMPLYLSLDEVGLPAAPVNARQIRDFARSTGKLAKTDSLDARVIAHFGCAVQPIPRPVPDTQELKVAQARRIQLLEMITAETNRLRGVPTALRKRVEAHIAWLKQELAEIDHELKDMIEKDPIWREKDSLLQSTPGVGPTLSATLIAQLPELGILDRRQIAALVGVAPLNRDSGMMHGRRTVWGGRANVRAVLYMATLVATRFNPAIRDFYLRLCSAGKRKKVALTACMRKLLTILNSILKHHIPWSYSPC

SEQ ID NO: 478495 - protein, 368 aa, unidentified
MNNYTLEAARTAGAKELKNQKAAKAKRIVIGTDAHSRSYQAARKIDNGPIGAVAKFRSQEELLLYVEKQKEQAEEVVVVYEAGPLGYVLYRALKARGLRCYVCAPDSREQKRKRRKNNTIDTRTLTSNLFNYLHGNERALQLVRVPTEEQEQARWQSRQHDQLVEERKRLGAKGNALLLSRGFGSWKNWWRPKAFSRLSQLVPEWLLELLETWVDLLRKLDEKIRRAKVALAKRCSGLRPKGVGAPSLVQLQSEVLDWGRYSNRRKIGCLAGMVPSEWSTGDTQRRGSITKVGVGAIRRIITEMVWRIILFQPQYKAVQKWQEVLRGSNRGLKKKAVVAIGRQLMVDLWRLQTGRVSAQELKLVMIGG

SEQ ID NO: 478496 - protein, 399 aa, unidentified
MGQQLWAGVDAGKSEHHCVVIDADGQRVLSRRVANDETVLLELIDAVTTLADGEEVTWAIDLNHGGAALLITLLIAAEQRLLYIPGRTVYHASGGYRGDGKTDAKDAAIIADQARMRRDLQPLRPGDEIAVDLRILTARRIDLVADRTRAINRLRAQLLEYFPALERAFDYSHSKAALILLSGYQTPDGLRRAGAARLEAWLRKRKAYNAAAVAVTAIEAANAQHTTVPGQQIAAAMVARLAKEVMTLDTEISDTETMIEDRFRRHRHAEIILSMPGYGVALGAEFLAATGGDMSAFDSVDRLAGVSGLAPVPRDSGRISGNLKRPRRYDRRLLRACYLSAQIAIRTDPASRIYYDRKRSEGKTHTQAVIALARRRLNVLWAMLRDHAAYQPTTTAAAA

SEQ ID NO: 478497 - protein, 390 aa, unidentified
MYIVGIDIGKRNHEASIMNAAGKQYGKPIRFANSHTGFNKLMDWVKNISGADDVVFGMEATGHYWLALYTHLCHEGYAVHVINAVQSDALRGMYIRQAKNDSRDSFIIAEVIRFGRFCETAVSAPELHALRELCRHRFWIVDSVSDLKRKVIALLDQVFPEYENLFTNTFGKTSLQLLSEYTTPEELLAVDTAKLAETIYTASRGHHGIEKAQEIQNTARNSFGILLASDSIALLIRQYIEQIRFVEKQVDRIDTEIARLLSAFDNQLTTITGIGPTLAATILSEIGDIRKFASPGKLAAFAGIDPTMKQSGNFVGSHVHMSKRGSPYLRRAIWLAATIAAFKDPSISVYYQRKRSEGKSHLTALGHVSRKMVNIIFAVLRDNTPYSPAI

SEQ ID NO: 478498 - protein, 409 aa, unidentified
MRLFVGLDVSSFDIKICILNGEGEKLDSFSVNNDLPGATTLKERLLQHISNQEVEILKIGLESTSVYSFHPSMFLHYDEDLQRFGAKVFLMNPKQIANFKKSYSDMDKTDEIDAFVIADYLRFGRNQMSIVKESQYVALQQLTRSRYQLVKMLTKEKQHFLQHLSYKCNTFSKEVDSSIFGNAMMELFLEKFSLEELADMPLEELAEFLQVKGKNRFGDPKCVASTIQKAVRSSYRLDKVVEDSIDVLLGTSIAVIRTYQQQIKELEKSIKRIMTGLPQTLESIPGVGPVFAAGIIAEIGQIERFDDETKIAKYAGLYWRTHQSGRFTAENTSLSRNGNHYLRYYLVEAANSVRKYVSDYQEYYVKKYNEVPKHQHKRALVLTARKFVRLVDALLRSHQLFTPERCVKV

SEQ ID NO: 478499 - protein, 341 aa, unidentified
MLIIGCDYHPGFQQIAFVDTATGECGERRLNHTEGAEQFYRDLCARGVEARIGMEASGHARWFERLISELGFELWVGDAAAISTKRVRKHKNDRQDAELLLTLLVENRFPRIWIPSCENRDLRQLLWHRHRLVQTQTRLRNQLHAVALNEGVRRKKALWRPKGRAQLESLVLAPWASRRRQDLLQLLDQVDSTIVELTAAIEKEAEKRPEVLRLMTHPGVGALTALAFVLVIGTPERFARSKQLSSYIGLVPSEESSGERRRLGHISKQGNTLLRFLLVAAAQATVRSDPDWRRRYLRLAMRRERAIAKIAMARMLAVRLYWMWRNGWDYAQLPKLGSYAG

SEQ ID NO: 478500 - protein, 377 aa, unidentified
MNATSLASNVQPDTGLIVGVDLAKNVFQLCVADARWQPVEALRLSRAQFERWFANRAVSRVIMEACGSAHHWARWLTGLGIEVTLLPARYVRAYVRRNKTDAADAAALLEAARCADLHPVRIKSVEQQALQALHRTRSLWQGDRTRRINTLRGYCREFGIAIAQGARLGLEQIARVLAEPRSGIPDLLRPTMVLLIEEVRLLEARIGALERELAALVRHSPACTTLLSVPGIGLLTSTAMVAATSGDVTHFQDARHFASWFGLTPKEHSSGQRRQLGRISKQGDRYLRMLLTHGARSVLRAAAAARNAGKPVQGLRAWALAVQDRSNHNKACCALANKLARIAYACLRDHAAFDEKTKLDKKIERQSFEMPSGALPA

SEQ ID NO: 478501 - protein, 356 aa, unidentified
MRVGVDLAKRVIQVHAVDAAGHVLASRALARDKFIAWCAQLPAGCIVAMETSSSAHHWARKLAALGLDARIIAAQLVSPYRKQGASGKNDANDAAAICETASRPQMHFVPVKTIEQQSMLCVHRLREGMKADRTACINRTRGLLAEFGLVFAQSPAALQAVLGDVLEDASNEMNTLARLVVQRLQAQWREIDTHIAWCDERIAAHARDNDSVKKAATLLGIGPVGASAAVATVGEFKQFRSGAQFSAWMGIVPRQHSSGGKHSLGGITKRGDTYLRSLLIQGAKSAVMTAHKRSDPISQWLVALRERAGWQKAAVALANKNARILWAVMTKGEAFDARHVSTKPKAPTPTPAVISA

SEQ ID NO: 478502 - protein, 453 aa, unidentified
MARKRKKDTKTANAVLPVMRPDAAGIDIGATEIFVAVPADRATETVRSFPTFTQDLYALADWLKQCGIKTVAMESTGVYWIPLFQILEDRGFEVCLVNARHVKNVPGRRTDVSDCQWLQFLHSVGLLRASYRPEQEVCAVRSLLRHREGLVQMAATHVHHMQKALDQMNLQLHHVISDITGQTGLAIVDTILAGERDPYVLAKLRNERIKASEAVIAKSLVGDYRPEHIFTLRQSLAAYRSYQKLIEECDREIRESLEQFQPPRQPDISNDDGQKPQPKKASTESVLRSELKRVFGIDLTQIPGIRVGIAQTLFGEIGPDFTKFRSASAFASWMGLCPDNDISGGKVLWTGTRKVNCRAATALRMAAQSLHHSKSALGDFYRRIRAKLGAPKAITAAAHKLARIIFHLVTTCQEFDDSRFAADQVRYQKRQETKLRAKAKAMGFELIPLAQAG

SEQ ID NO: 478503 - protein, 341 aa, unidentified
MPTITIGLDLAKHVFQVHGVDATGQVVIRKKLRRSELLEFFKELPPCLVGMEACGTAHHWGRELTALGHDARLMPAGYVKPYVKRGKNDAVDAEAICEAVTRPTMRFVEIKSAEQQSVLMLHRTRELLVRQRTALINSLRGQLAEFGLIAPQGVWRIPQLHALAQGATSSVLPDAMRACVELIMGQIEDLQMRIGTIGKSILACHRASEMSQWLQTIPGIGVITATAIAATVANANVFKSGRHFAAWIGLVPRQTGTGGRIHLGPISKKGDPYLRKLLVLGATAVIRYAKSKPELAAWINALLERRPARVVTVAVANKLARIAWAVMSRGETFRQASSAIA

SEQ ID NO: 478504 - protein, 325 aa, unidentified
MVKLDYQVFDNRPMGFLRMLVWARHLIKGAGLEDVLFCCETTGGYDHRLCDYVYARGLEMWRESALQIKRSMGLRKGKDDKADSLMIAEYAMRHMDKAVIYQTPSKTVQQLKELFLYRHKLVQERTSAKVRMNELKATAGRSEALKFIARDAGKHVRSIDKSIRDCEKQILALIASDEDMQRNYGHIVSTPGISIVNATALIAYTNNFKGITTPNKAASYWGSAPFREQSGTSIDKKASVKCYSSSLLKATLTQAAECAIKQNGIYHGYYLRLEKEGKPYGIIVNNVRNKLIHLTYALVANDMDYEKNHEFLRTQNKDGKKIAAN

SEQ ID NO: 478505 - protein, 367 aa, unidentified
MRKDNAKKSGQGKEQKGRPERVTIGMDLGDRTSRYCVLDDEGAVVAEGSVATTKKGMLQVFGAVQRCRIAVEVGTHSPWVSRLLKSLGHEVIVANARQVKLISQSTRKDDRLDARMLARLARADPELLRPIRHRSEEAQADLTTIRVRAALVNARTSLVNAARGFCKAAGERLPACDTDQMDVERLAELPAGLREVLQPLIGQVESMTEKIKECDGKLEQIAREKYPETKLLRQVSGVGLLIALTFVLTVEDKARFAKSRDVGCYVGLRPKRSESGESQPQLRITKEGDRYLRTLLVQGAHHILGYRGPDTDLKRWGLSLAGRGGKNAKKRAIVAVARKLAVLLHHLWVTAEVYEPLRNGRALSQAA

SEQ ID NO: 478506 - protein, 333 aa, unidentified
MNKITLIGLDTAKQTFHLVGVDAHGHYVWRKQASRRRLLSTLAQIECCEVVLEACGASHHWARSIQALGHAVRLIAPQHVKPYRRGQKNDYRDAEAIISAALSPGMRFVGVKRVEQQAEQALHRVRSRLMSHRNAAANALRGLLGEYGVVFGRGLKPLRDGARCFAETEEAHTLGLVDLVNDVLEEIGVLQARMDHYEHLIEQRVEADETSRRLREELRGVGKLSASALRVKVADVRGYGNGRHFAAYLGLAPGHSGTGGQVHIGHLKRGHDRYLRQLLIHGARSALCHLGDKQDPQSRWLRGLLERRGFNIASVALAHKNARQAWAIMAREQ

SEQ ID NO: 478507 - protein, 337 aa, unidentified
MKFSGIDLHSNNSVVLISDEADRIVYQKRLPNDLAQIVAALEPHRDELVGVVIESTYNWYWLVDGLMDVGYRVHLANPSGIRKYEGLKYSGDVADAAYLAHLLRLGLLAEGYIYPREERGARDLARKRLQLVRYRTAQILSIEGILMRQTGARMKSESVKGLTAAQVEAFGFAPDVALAVEANRAVSQTLGQQIEALEQRLQERVRLRAEFKLLKTVPGIGATLATTIMLETGTIARFAQVGNFSSYCRCVDSLRESNGKKKGEGNTKNGNKYLAWAFVEAANFAVRYCPQAKSFYERKKRKTNGIVAIKALAHKLARACYYMLREQKPFEVNRCFA

SEQ ID NO: 478508 - protein, 444 aa, unidentified
MKTELPNIYEQAAGIDIGADKIFVCAKDGEYQVFGCFTKDFQKAAAYIKENGVSRVAMEATGVYWIALKDVLEQEGLVVDVVKAGDAKQLPGRDKTDGSDCQWIRTLYQKGLLRPCVVSDAAIRELRTYVRMRQDHIEMAAQHVQQMQKALIQMNIRLPQVFSDIMGASGKRIIEAIINGERDPEKLVLLCDRQILKNKKEEVILALEGNYREDYLFLLSQAYQGWQFYNELMKECDKKIDEWLERHTKDKAPLEKVTPAKSIRHHKLDIEKLHEKVLLLNDGKDVTRIPGFTDYTVLRLVAEVGTDMSKWKSAKHFVSWLGLAPKKRYSGKGKRHYRGIANTKAAQILRESAQALLRSKHCALGSFGRRIRSTRGPAIAIKAMARKLGILFYNTLTKGIEYVEQGIKKYEEQVRQTELSKVTKWAERLGYTLIPNQQINVVHQ

SEQ ID NO: 478509 - protein, 371 aa, unidentified
MSARPARVALREKEDTISFPEISRVVIAGVDCHSEFHHAVALDERGHKLDELCFEATGTGCLQAVGWLQGLGVVEAVGVESSGSYGAELSRVLIRAGIRVVEVNRPHPHTRHRRGKSDGIDAEAAARKVLAGDTKVVPKDTTGVVEAIRQLKVARDGALKARGAALVQLRDLIITAPSELREALSRRKTLRGRATLCRRLRPDRTRTGEPQEAAKIALRSLAKRIAALDEEIAELDAQLEPLVRTAAPRTVTLFGVGVGHTTQMLVTAGENIRRIRNDAAFAHLCGVDPIPASSGKTVRHRLNPGGDRDANSTLHMIAVVRLRYCARTRAYAARRLEEGLSKREVIRCLKRYIARQIYKALREDLCTLAET

SEQ ID NO: 478510 - protein, 437 aa, unidentified
MSLNRLQVGIDFSQKRADFCLLFPDGQPLVAHQAFPNSLPGYQKARQLLLDSLRTQSFDGLDVSGEATSYYWLPYFWQMAHDSELSACDISLFLLNPRQVFWFKKSLPPDDKTDNVDPFYIAERTRTRRPTSSWEPQDDWMPLRFYTRLRFHLAQSLTREKNYYLIYLFLLHNTYQRIKPFSDTFGVTSQQVLGGELSLAELVALPEEDLAEKLDAWSGGNLDDPLETAKKLHQVASESFVLSEPLALAVQRILDSTLEHVKFIEKQIEQTEQWITAEVETRHPEVRFLETVPGVGLVLAAGITAEIGDLQRFFRTKKWNKKHKCYRARTLREVEDAVAKLAGLWWPQNSSGDFVSENRPLAKTGNRYLRYYLVQAANGMRRHIPAYVSFYGSKSREATRFKHKRALVLTARKSIGLFVGLLHRKEAYRPQEVSGHL

SEQ ID NO: 478511 - protein, 320 aa, unidentified
MMAQNDLVVVGIDVAKDKVDACIRRFTLRQTFPNTAQGHRKLVAWLRKYQVGKAVMEASGGYEREWRNVLHNAGIEVRIVDPRRVRSFALSAGRLAKNDPIDAEMIAWFAETFSQAPGQIPDAAREELAALAKARKALVDVKIRLQAQDEHAAPEPARKAYARVLKSLAAEIDKLEAAISAKVKATPEFAERAEIIESVPGLAQATSAILIAGMPELGQVSDEVAAALIGVAPYDDDSGKRRGERYIKGGRRWVRNAIYMPCLGAATQYNPVLKAFYQRLLAKGKEPKVALVACMRKLIIILNTMLARRQKWNPGRHAMA

SEQ ID NO: 478512 - protein, 414 aa, unidentified
MEMLYERCAGLDVHQHSVVACARVVADGRVAHAVETFATTTHGLLALADWLTERGCTHVAMESTGIYWRPVWHVLGDAFELILANATHIRNIPGRKSDVSDARWIADLLAHGLIRGSFVPPTPIRDLRDLTRTRKQLVREMTRHTQRLHKTLEDANIKITGVITDLLGQSGRAILAGVIAGEDDPERLVDLAPGRLKASRARLIEALRGRVRPHHRFVLKLHLEQIDGLQAAVRDVEARLGETLGPVRTSAELLTTIPGVSTTVAHVIVSEIGIDMSRFPSAAHLVSWAGLCPRSDESAGKRRSTRLRKGAPWLKTTLVQAAWAGSRTKGSYLQAQYRRLKARRGPMKAIVAVAASILTAVYHMLRKGVPYHDLTAAYFDSRDPTTLARRLIRRLNALGVHVEIKTPVPIEVSF

SEQ ID NO: 478513 - protein, 319 aa, unidentified
MDAIHSVVIGIDVAKDNCESFFSVEKKWFQFTNDRLGHRRLLKELPKTGTCLIVMEATGVYQRSLATELVSAGHQVAVVNPRQIRDFARGMGILAKTDRIDAKTIARFGQQAQPRQLEKVPEKQAEIEQLVTRRRQLLGLRTSEMNRLHTADTKLVRKSLKKMIEQLDKHIAQIEKEIEKLIQMNDIWSHRSKMMRSVPGVGVVTATALVAELPELGKLNRQQVAALAGLAPFNRDSGRFHGKRSIWGGRAGVRCALYMAALSAKTHNPVIRSFFQRLKAEGKPFKVALTACMRKLLVILNTMVKNDTYWNPKLASQTT

SEQ ID NO: 478514 - protein, 359 aa, unidentified
MTAISIVAHSHPFVVGVDTHARNHVYTVLAATTGELIGTQDFPTTGAGINRAIAWVARRTNADADVLWVIEGAASYGAILAGTVATSGYPVAEAPRTDAKKRRGVGKSDQLDAHHIAAAALPLPTQKLRRPRLNEGVRQALRILVTARDAMSTERTRSVNSLTALLRTQDMGLDARKALSGAQIADVSRWRAREEELSLSIARTEAIRLAKRVRELDDQLKANEKQLAELVQISPAAPLLQETGFGPVTAATCLTVWSHPGRVRNEAAYASLAGVNPIPASSGNTVRHRLNRGGDRRLNHALHMVALTRMTHDPETRKYVEKRRAEGRTDRETRRCLKRYLARRVHRTLTAAKPCLGSI

SEQ ID NO: 478515 - protein, 348 aa, unidentified
MRCYQHQHRFYCGVDLHARTMYTHVLAADGQTVFEKDLPTEPDTFLDAIAPFRPDLVVGAECMFSWYWLADLCADEQIPFALGHALAMKHIHGAKTKTDRIDEAKLAALLRSGLFSIGYVYPRAKRQTRDLLRRRSFFVRQRAQLLAHVVNTNTQFNLPPLPKKLTYAANRTPDLVERFADPSTKLAVTADLGLIDGYDQQVADLERHLVRHAKVDDPVTFGLLRTVPGIGPILGLTLLYEVDDIARFPEPGNFLSYSRLVRCPHESAGKKKGTGGKKIGNAHLKWAFSEAACLMLRGCLPAKSWMQRQERKKGKRKALSILEAKIGRTVYHLWRKQVPFDVKRFLNG

SEQ ID NO: 478516 - protein, 418 aa, unidentified
MGKINEHCAGIDVGKRFLLCCALTGAAQEEPQSQTRRFDATVKDLVHLREWLSSQSITHVVMESTGSYWVPIFNILEGHFIIVLANPEEVKNRKGHKTDRRDAEHLADLLRHDHIRASYIPPKPIRDLRDLTRRRLQLTQDASRERNRIEKLLEHVNVKIGNVLSDVFGVSGKNMLLALLDGDMSTEQIARLARGQAKQKIAQLTEALEGHCMRDHERFLIRSSLRHLACLQEETEEMDAEILRRMQTPPFQEGFLLLQTIPGIGQLAAASILAETGTDLSSFPTADKMASWAGLCPGNRESAGTKKGSQTTKGNPYLRSTLVQSAWAATRKRGSIFQLRFRELAPRRGQKRAIVAIAHQMLTILYFMLKNAAPFLGAATMPQKHRRLRRAHHHLRCLRRLGVTVQVFGSLEAVPPTG

SEQ ID NO: 478517 - protein, 427 aa, unidentified
MKSKLTDFAATLGLDWADQKHDLWIQPADGSKAQHLRLEQTPEAIHEWVAKLRERFGNRPVALAVETSRGPVISALMAYDFIVLFPVNPKALKDYRAAFSVSGAKNDRSDAQLLEQFVRLHRDKLLALEPDTELTRKLAGLVEDRRRLVDERTRLVNQLHSRLKTYYPLAQSLLDSLMNTPLAAEFLARWPDLSSLQRAEPKTLRAFFFKHHSRSAKTIEERLEAIKNAQALTTDPALIEPARLLVGALSQMLRGLHQAIAQFDQAIEQAMNQHPEAALFRSLPGAGPALSPRLLTAFGTNRARFGSAQEVAQFYGLAPVVMQSGTSKTTHMRRRCPKFGRQTFHENAACALRQEPWAHCYYEQQKKRHENKHHQACRALAYKLIRIYFACWRDRQAYQPEKYLRALQTNGSPLHKALETQPPKNCE

SEQ ID NO: 478518 - protein, 444 aa, unidentified
MVCSGMILIREVADAPVIMGISKPAGLKSPCGEVKIVNPLFVGIDVSSRSNVAYLMKPDGSKHSSFSVQNNLGGAKMLSERIVSALSSMRLSDVVIGLEATSIYGNNLVYALREDGSLSRFQRKIHVLNPKQVKKFKEAYPDLPKNDFVDAFVIADHLRFGRIAKEVYMDDYRYQALRTLTRARFDVIQNLTREKQRFANYLFLKCSGIAQEKDIQNTSATTIALMEHFETVDDLANTDLDELTDFIAQAGRGRFVDPDATARAVRAAAKGSYRLPKTVNDTVNQAMSVSIASMRALKEQVKVLDKAIEQQFEIIPNTLTSIPGIGKVYSAGIIAEIGDIHRFDSQASVAKFAGLVWTQHQSGEFEAEHSRMIKSGNRYLRYYLLEAANSVRRCDSEFRRYYDLKFKEVNKYQHKRALALTARKLVRLVFRLLKDNRLYIPSEG

SEQ ID NO: 478519 - protein, 408 aa, unidentified
MNPLYVGIDVSSKSNVVYFMLPDGSKHCNFSVANSHTGSSQLVKRILSAMTSCSLDTVLIGLEATSVYGDNLVYFLREDAALARFNSKIHVLNPKQVSKFKEAYNDLPKNDLIDSFVIADCLRFGRINKEVYIGDYRYKALQNLTRARYFAVSNLIKEKQRFMNILFKKYSTMTQEKVFSDTFSTTALAVYDEFESAEALADMDLHELTAFIMEKGKNRFPNPNAVAKAIQKAARSSYRLPKTVNDSVNQVLSISITSIKALEAQIKEFDKAIATQMELLPNVLISIPGIGPVFSAGIMAEIGDINRFHNQAQLAKYAGLAWKQHQSGDFEAQTTRLINSGNRFLKYYLCEAAFSLVRCDKEYSDFYHLKYKEVNRYQHKRALALTARKFVRLVFLSLIHISEPTRPY

SEQ ID NO: 478520 - protein, 354 aa, unidentified
MSNKSNSPVATMGIDIGKNAFHVVGLDRRGAIVLRQRWSRGQVQARLANMPPCLIGMEACVGAHHLSRRLQLQGHDARLMPAKYVRPYSKGQKNDFRDAEAIAEAVQRPTMKFVATKTPEQLDLQALHRVRQRLVSQRTGIINQIRAFLLERGIAVRQGLRFLRAELPIILANRSDVLSPRMLRVIEGLMADWRRLDERIGGLSEEIEALARQDPACERLMTVPGIGPIISSAMVAAIGNGAVFTKGRDFGAWLGLVPRQISTGDRTILGPISRRGNRYLRALFVQAAWVVLVRTKDWDRYGLKAWIDAAKKRLHHNVLAIALANKLARIAWAVLNKERAFECVRTRATLSQPA

SEQ ID NO: 478521 - protein, 335 aa, unidentified
MSHHETPAPAAWVGIDVSQSTLDACLLPSPGGKPRAASFANDAAGHAALAAWADEHAGGAALGFCLESTGPYGEALACALADAGRHAAVVNPARIKYAGLMRGQGNKTDHADARLIAEYATRERPAAWQPPRPEVRELQALSRRRDDLRQLAAREKTRLAAPGLSAATRTSITRTIAFLAKEADRLQGQADDLIAASESLRADRDLLRSIPGVGPVAAHAILAELPEPSRFATAQQAAAYAGLAPRQYRSGTSVHKRTRLSKAGNARLRKALYLPAMTAIRFNPLVGAFYERLVEAGKAKMAALGACMRKLLMIAYGVLKSRTPFDPQRGSKMAP

SEQ ID NO: 478522 - protein, 314 aa, unidentified
MSPLVFVGIDVSQARLDLAIRPSASFSLPHEESAIATLVEQLCALGPTLIVLEATGGMEIPLTSALATAGLPVVVVNPRQVRDFAKASGHLAKTDALDAQVLAQFAEVMRPQPRPLPDAEARALAALLTRRRQLVEMLTAEKNRLLSAPSPIRTRLRTHIRWLERELQSTNTALAEAIRQSPVWREKDELLQSVPGVGPVVTSTLLASLPELGTLTHKQIAALVGVAPLNRDSGTLRGRRTVWGGRAQVRAVLYMGAIVAARFNPVIRIFYQRLQRAGKAKKVALTACMRKLLTILNAMLKHRTPWRQVETHHA

SEQ ID NO: 478523 - protein, 347 aa, unidentified
MNITRVGVDIAKSVLHVHAVDRHESTHWQAKLKHSQWIESLRERVHPGAEIGIEACASAHHWGRELQKRGYRVKLIAAQFVKPYVKNNKNDRVDAEAICEAMSRPGMRFVAVTSVEQQDTQAAHRMREELVGQRTAKANQIRGLVSEYGIVAPVGIQQLRFALPQWLEDAENGLTDEFRVLLADLAEDLRHLHRRITSLDERIAQCVKSDPVARRLLELRGVGPLTASALAGALGDGKGFSRGRDFAASLGLTPRQHSTGGKDRLLGISKRGNRYLRKLLVHGARAVLRHTKDRDDGLSRWLNELTARKHVNVATVALANKTARVAWAIVCNETAYDPMLVASKEAS

SEQ ID NO: 478524 - protein, 422 aa, unidentified
MLQNTEEREEIVERVAALDIGKAELVCCTRVPRPDRAGQRMQEVTTYSTMTRSLQVMVDRLRELGVTRVVMEATSDYWKPPFYVLEAAGFETWLVNAKDVKHLPGRPKTDRLDAVWLCKVAERQMLRPSFVPPKPIRRLRDLTRYRFSLVANASAEKNRVEKLLEDAQIKLSVIATDIFGVSGRAMMAALIAGQRDPKVLAQMARARMRVKIPQLEEAFVGHFDDHHAFLLGQMLAHVDALQADISRIEERIDAEIAPFAQMVARLDEIPGVGLTAARVIIAEVGVDMTRFPTASHLCSWARFAPGVKESAGRKKGNGATGHGDRYLASALGEAAVSAGKTNTFLGERYRRIARRRGKKKAIVAVGRSILVIIWHLLNDPETRFIDLGSDYYDTRLGTQRATLNHVRRLQALGYRVTLEPAA

SEQ ID NO: 478525 - protein, 367 aa, unidentified
MDPLTNRLLMSHDVISRKHQTVRGPHMHTITYGIDLAKNVFQVHAVNTVGEIILKRKLKRKEVLAFFARQELGLIGIEACGGSHYWARELSKLGFTVRMMSPQFVKPYIKGNKNDANDAEGICEAVTRPNMKFVTVKTTDQQDILMLHRIRTQRIKQRTALSNQARGLLSEYGIVIPVGIRNVRKDLIDILTDTEEKRLSEFVKPHFNNLYEELLYLDDLIQTVDKALKVYFNQNEACQRLASLPGISIITATALVGYLGDISNFKSGRELSAYLGLVPKQHSSGGRELLLGISKRGDSYLRTLLIHGSRSVLKVAATKEDKDSLWLIDLQSRRGYNKAAVAQANKTARRVWALLSNKTQYEVQQAA

SEQ ID NO: 478526 - protein, 399 aa, unidentified
MIGNHENIDVFIGLDVGKGEHHAVAPDRSGKKLFDKALPNDEARLREILDALKRHGSLLLVVDQPATIGALPVAVAQSADVTVGYLPGLAMRRIADLHPGEAKTDARDAFIIAEAARTMPHTLRSIQVADEQLAELTMLCGFDDDLAKQATATSNRIRGLLTQIHPALERVLGPRLDHPAVLDLLRTWPTPEALRHAGLRRIGNRLTKQAPRMGERLAADIISALNQQTVTVVGTNAATIVLPQLARMLADIHESRDLVFARVEALVETHPLHPVLTSLPAVGVRTAARILTEIVGKDFASAGHLASYAGLAPVTWRSGTSIRGDHPSRKGNKILKRALFLSAFAALKDPPSRAYYDRKRAEGKRHNQALIALARHRCDTLYAMLRDGTLYEPRLATAA

SEQ ID NO: 478527 - protein, 415 aa, unidentified
MEGLSPLHRRVAGIDVHRMLHVVTVLIEQPDGSVDKHSREFGGFKRDCRALAAWLAELQVQLVVMESTGIYWKSVYAHLEDVGITAWVVNAHFIKHVPGRKTDMLDSEWLAVLARFGLVRGSFIAPKDLRELRLVSRYRRKLSAMCASQINRLHKRLDDAGIKLGAVVSDIHGVSARAMVRGLIDGQSEAVLLSHARGALKRKTEELAASLDGDLSERHLFVLRHLSDSIDALQRQLADIDAYLMCAMQPYTWAHSLLQTIPGIDEIAAALILIEIGDDMDRFGCPERLACWAALSPGNNESAGKRKSGRTRHGNNAIRFILCECANAARMTKSTLAAKYRSLTVRKSHKKAIVAVAHKMIRLIYILLSRRQPYLDQSIDYAAMSAKKNAPRWIKQLKAIGKWPSPSAPAASAAR

SEQ ID NO: 478528 - protein, 413 aa, unidentified
MGVNRDMEVKMSITIGIDWSEECHDICILHETGSQLARFQIGHCPTGFTRLAEKIDQFGLKPAACLVALETAHNLLVDFLWSRQYPVYVIAPSIVNSSRARFRSSGARTDQSDAHLLADLLRTDRARFTPWRPDSPLVCQMKAKLSLIDSLTKAITAHSNRLRAVLLRYYPQALTIFGHLTSQISLQFLMTFPTPAALTDLSYADFARFCQEHTYKRSDYIAKAYAALQQAVPEADPVMVRAYQDETPLLAQILLTLVTNKQLAIRETQTLFGQHPDHAIFASLPGAGNLLAPKLLVIFGDDRARFPCPQAIQSLAGTCPVTKQSGKKKTVRFRQACNRDFRHATQQFAISSVKQSVWAAGYFSDARSRGLPKNQVYRALANRWLAIAWHLWQTRQLYDEAYHLSQVHRYRRK

SEQ ID NO: 478529 - protein, 351 aa, unidentified
MKECSTVSFKGQVIYCGIDVHKNSWHVSIRHCNQQIANFSMNPEVLELVRHLRKNYPDAEYRSVYEAGFSGFEAHRTLCELGVKNIVINPADVPTSGKEREYKSDSLDSRKLARELENGSLEGIYIPEPANLELRNLTRRETKLTGNIVRIKNRIHSHLFFLGLKFRSWSGGSLKIMESDAAKRHDYALQSDLRELRFLREERIRIIRDERECLKHLNREKVQDNLESIPGIGFRTAVVLQAELWDLSRFPNKDSLNSYVGLAPHTVGSGEHEEIKFGGNRKKKQLHYLLIESSWRAIRFNLEYRAKYGAMLAKGMCPQRAISIIAKKLLLSIRAVWLQNRKFVELLPRTK

SEQ ID NO: 478530 - protein, 403 aa, unidentified
MNNVAGIDVSKGKSMVSVLRPFGEVVAKPFSVGHTGSELKELADYLKSLDGETRVVMEHTGRYYEPVARFLYEEGIFVSAVNPKLIKDYGNNTLRKVKTDKADARKIARYGLDNWVELRQHTPMDTIRMQLKTLNRQQGLYSKTKTMMKNNLIALLDQTYPGVNDLFDSPVREDGSQKWVDFATTFWHVDCVRAMSLAAFTERYRKWCRRHGYNFSQSRAIEIHMEAQDLIAMLPKDALTKTMVRQAVDALNAVSASLERLKAEMRTLAAQLPEYPVVMAMRGVGDSLGPQLMAEIGDVTRFTHRGSITAFAGVDPGADQSGTHEAKSNRTSKSGPPELRRALFLVMDCLLKTQPEDDPVYRFMDKKRSEGKPYLVYMTAGANKFLRIYYGRVKEYLASLEGN

SEQ ID NO: 478531 - protein, 503 aa, unidentified
MNNFAAPKMKSGEKVLRSRHSGHGRIAPGGSRSILVNPTRIGLSLPARPAAPVQTSERTIACEAPGIRGTHDGATMQQPKVYSMKKWQELRHYAGFDWAKDHHCVLVLNSQGTIVGDFEFEHSLEGWKSFGQKIAAWPELALAIETNQGAVVDQLLQRELTVFPVHPVAAKSYRQRKAPSGNKTDHLDAWGLADALRTDGHGWKALDSLDPITQQLRLLCRDEVVLIEQRTALVNQLQQALLEYYPAALEAFDDWTRSFSWEFVLGFPTPDALVTAGKRKWEKFLHTHRLWRPDTAPKRLEIFARADQFKASKPLTLAKSQLAVSLCKLLITLDKQLALYRGQIEELFDKHPDKDLFGGLPGAKKVLAPRLLAAIGGDANRYGSHDVLQCLAGTAPISFESGKISKVRIRWGCDKFLRHTVHLWADCFRRASAWGQTYYYQKRNQGMSHACALRCLGQRLLKIIFKMLETKKPYDAELHARNQQKHGSWVLKLVTPLKPQACE

SEQ ID NO: 478532 - protein, 299 aa, unidentified
MDATTVAVDVAKTVFEVAIANREWHIVARYRFNRPQFTQFLATASPTHVVMEACGTAHDWGRCAQRHGHTVTLLPPAYMRPYVRRNKTDRTDAAALLEATRSGEIPSVPVKSVAQQTLVALHRIRAQWMATRTARINALRGILREQGVLLPAGAGPALRAMPAFLEDAETPLANPLCRMISLIYEEVRQLEACIGALERELRAVADADPVATRLREIPGIGLLTATALVGTVGHIHAFRRARQFASWLGLTPREYSSGARRRLGGISKRGDVYLRCLLTHGARAVLHTPRIVVRPRARH

SEQ ID NO: 478533 - protein, 416 aa, unidentified
MYYVGIDIAKSFHVGSIIDANEQKVINKPCRINNNRVGFEKLLTILKSISLDVEAFTIGLEATGIYGENLLEFLNSKGYSVKLLNPFQTSRYREQITLKKVKNDEIDSLVIALLLKDGKFSSGYITDDEYQSLRTLYRNRASIQADMKDVKKRILTQITVTFPEFEAFINPFSVSGLALLDKYPTAHHYKHSSVERIMKLFRHIQGNNFNESKALKLLELSKSSIYSGKAKEARAIAIKSSIRLLRMYLSELEIIEAEILSLLDSSNTPTTTVDEAGEEINKADSLIANLKTIPGVSSKTIAALLSECGDLTRFPTIPKFIGYLGLFPTENSSGNSKNIGHLSKRGSSIAKHALYMSAVSCLIHNTQLKQLYDTKRSQGKSKKEALIAVSRKIAVIIYSIVKYNVPYNPDRVFAKS

SEQ ID NO: 478534 - protein, 371 aa, unidentified
MAKRLKYIGLDVHKETIAVAVAEGERGGEVRFHGTIPNEDDAVRGMVKRLAGPGITLDFCYEAGPCGYGLQRLLTRQGQPCIVISPSMMPRRPGDQIKTDRRDAMTLARLLRAGELAPIWVPDEAHEAIRDLIRARRSAQEDTSAAKQSVRSFLLRHDRRFSGKSAWTKTYWRWLSEQRFDFAHQQLAFEEAKRRVLEAQARTARLEAALVEAVDGWRFAPLVRSLQALRGVRLIVAATLVAEVGDLTRFQNPKQLMASLGLVPSEYSSGARVQRGRITRAGNAHARTMLVEAGWTYRLPAREERRYRDRVADLPEDIQAIGWKAQVRLCQRFRRLSATGKPQPKVNTAIARELVGFAWDIARRVQPVVAV

SEQ ID NO: 478535 - protein, 406 aa, unidentified
MSIYIGIDWSQDKHDVAFMNAAGAIIARLTIPHQPDGFGKLEATRKQLAVTATDCLVGLETAHNLLLDFLWDQGYQQIYVIPPGVVKSSRGRYGHSGARDDTLDAQLLADLLRTDRARLHPWRPDSQLTRQIRARVGFISFLTHSANRIHNRLRAALLRYYPQALELFSGLMVPTTLAFIAAYNTPQALDALSYEAFVAFAHQQGYWNQQVLLACYARLQHTPLQASPATVAVYQDEAQILAQQLRELILTKRQVQRDINTLFALHPDQAIFSSLPGTGDFLAPALLAKLGDDRDRFPSAASLQALAGTCPVTVASGKHKRVIFRHACDAEFRQIAQQWARCSLRKSVWAVAYWQHIRPRCASEHDAYRRLANRWLAVLWKLWQSREPYDEAYHLQQRRLRSQPVA

SEQ ID NO: 478536 - protein, 361 aa, unidentified
MKKVSRELPRMEAGIGKPEMTVGLDLGDRYSHYCLLNSDGEVVEEGRVQSTETALRRHFEGEDCLRIALECGTHSPWVSRLLNALGHQVIVANARKIPAITGSESKNDRNDAEKLARFAAFDPKLLSPLEHRSEERQVDLNLIHARSTLVRARTMIVNALRGLVKSAGGRLPACSTESLPARVLAAIPPALSAVATPLVEQIVLLNAQIDGMDKQIDKLSAKYPEIVLLRTAPGVGPIVAAAYVLTLGQPDAASNRSAGAFLGLRPAQSQSGAADPQRRISKTGDSFLRSLLVQSAQYVLGSFGPDSELRRWGLTLAATGGKRGKKRAIIAVARKLAVVLHALWRSGQRFQPFPQQAAVAV

SEQ ID NO: 478537 - protein, 347 aa, unidentified
MLHAGLDLSRRKVDVCLLSDEGKHLAQLAVAPDIDSLRTLARRIEEVHREPVCAVVESMTGARLVHDTLEQEGWDVEIADAQKVKGLAPLACKTDKIDSMVLAVLSHRDLVPAIWLPDPRVRDQRELARFRMHLVHHKSSLKNRVHSTLINFGRPCPVTDLFGAEGRRLLARLDVPEPWRSNVCASLELIDHLERQIDQINRRLRAGHADHPYIPLLMSVPGIRWVLAFTIAAEIGEIERFSSPEKLTGYTGLCPRVDQSGERDRRGPLTKHGPTYLRWALLEATMHALRHPAYSERYQRTKRRLGKQRGAKVAQVDIARRLAHAIWHMLTRNQSFAPRGAAFRLAA

SEQ ID NO: 478538 - protein, 397 aa, unidentified
MSNTFSVFLGLDVGKDAHHAVGLAPDGKRLHDGPLPNSEPTLRALFDKLTAHGTLLVVVDQPATIGALPVAVARAAGHQVAYLPGLAMRRIADLYPGRAKTDARDAFVIADAARSLPHTLRPVDVGDEALAELEVLVGFDDDLAGEATRIRGLLTGIHPALEHAIGPRISHPAVLEILSRCGGPSGIAKAGRRKLTAIAKAHAPRIGEKLVEAIMTALGEQTVTVPGTAAADTVLPRLADSLKTVLQQRKQVAEQVEGILDAHPLAGVLTSMPGIGVRTAARILLEVGDASNFASSGHLAAYAGIAPVTRSSGTSIKGEHPARTGNRQLKRAFFLAAFAALADPVSRAYYDRKRAEGTKHNAALICLARRRCDVLYAMLRNGTHYRHPEPAPVPSAA

SEQ ID NO: 478539 - protein, 372 aa, unidentified
MNNTTVYVGMDVHKESFTLCAYLIETEKAAYIRRTPADYKEILKYLEFLRTIYGNDTNFICGYEAGCLGYTLYHQLTDRNVSCVILAPTTMLETRSGKRIKTDKRDAALIGKCLAQHNYSPVHVPTATDEETKEFLRMRDDHKLALKKVKQQILSFCLRHNYRYDGKSHWTIAHLKWLKSLRPEALYKEILDEYLLTYTTLSDKLDRLDRRIEELASKDEYKESVKKLCCFIGVQTHTALSVLVEVGDFKRFATADKFASYLGLVPGEDSSGDEKTRLGITKAGNRHVRQLLTESSQTYSRGQIGHKSKALKARQAGNLPQVIAYADKANERLRRKYYKMVLGKSKKHNVAKTAIARELACFMWGMMTDKIA

SEQ ID NO: 478540 - protein, 360 aa, unidentified
MIVQGTSVGLDVHALSVVAHAVDEETGKVARARLCPDHGEVLGWLHQLRAPVRVTYEAGPTGFGLARAITGAGMECLVAAPSKLQRPAGDRVKTDARDAAHLARLLRLGEITAVRVPEREIEAVRDLVRAREDARADLMRVRHRLSKLLLRQGIVYSGGTPWTCVHEEWLRRHRFDDIHLKAAFDHSFDAVLAATAARDRLDEQIMVVAASPRFADPVNRLGCLRGISALTGLALTVEIGDWSRCSGSSIGAYVGLVPCEYCSGNSRVQGSITKAGNTHVRRLLIESAWHHRKSDSTSGPTLRARWAKVDPALRARGHAGNRRLNKRWRSFTERGKNPLVANVAIARELAGWCWSLATMH

SEQ ID NO: 478541 - protein, 337 aa, unidentified
MQVTTIGLDIAKSVFQVHGIDARGKVVLQKRLTRARMLVFFANLPRCLVGLEAGGGAHHWARELQALGHDARLMPPQYVKAYVKSNKHDAADAEACCEAVQRPSMRFVPVKTKDQQATCMLHRVRDQLIGQRTATINALRGHLTELGIVAAQRQAGVRQLLALIGEVEDDRIPPLARAMLATLAAHLSDLADKIAGLDQRLVALARTDPICRSLAAVPGVGPVIATAFAATVPDARAFRSGRHLAAWLGLVPRQHASGGKDRHLGLSKRGDGYLRRQLIHGARALVWRTPGREGRLWSWINGLLARRPFNVAVAAVANKLARILWAMLAHGEAYRAA

SEQ ID NO: 478542 - protein, 347 aa, unidentified
MNFYTQQHKHYCGIDLHAKAMYVCILDQNGTKLVHKNLPTTPEAFLRVIAPYREDVVVGVECMFTWYWLADLCSKEGIAFVLGHALYMKAIHGGKAKNDKIDAHKIAVLLRGGMLPQAYVYPAEMRATRDLLRRRCHLVQKRAELLAHIQNTNSQYNLPEIGKKLAYKANRAGVEEHFPDPSVRKTIEVDVSLIDHYDKLLGEVELYITRSAKAHDGQTFARLQSVPGIGQILALVILYEIQDIARFPRVQDFVSYWRLVKCAKESGGKRLGTSGKKIGNVHLRWAFAEAAVLFLRHNQPGKEYFTKLARKHGKAKALTVLAHKLGRAVYYMLTRKQAFDLQRFVSA

SEQ ID NO: 478543 - protein, 421 aa, unidentified
MNRTSKSAQFAALIGIDWASQRHALCLYDCATAKRESSILEHTPEAIAQWARGLQERFKGKKIALCLEQSKGPLIYALLEYPFFVLYPINPATAARYRMAFKTSRAKDDPSDAQVCLELVLHHREKLNPWLPNDAPTRELSCLLQHRRAAVDLRTLLTNMLRDALKSYYPQALELAAQDLFAPLGCQFLLKWPSLQELHKARKESVRKFYYAHNCRRMDVIEKRLDAIAQMTPLCRDLALLEPAMVQVRMLARQLLQLGGALKEYDSKIEQLFAQHSDALIWESFPGAGPTLAPRLACAFGTQRSRYQSAVAIQQYSGTAPVTEKSGKNQHWVHRRWARPHFTHQSFFEYASQSVLHCSWAKLYLKEQMARGKAYPTAIRALAFKWQRIMFVCWRDRVPYDETIYRQSLQRRGSHLARKLN

SEQ ID NO: 478544 - protein, 421 aa, unidentified
MQVLYERCAAVDVGKDVIAVAVRLPGDGPDGRATVKRTFKTFYGVLGAAARWLTGQGVTHVAMEATGIYSMPVYHALIEHGDFERVLVCNAGHVKNVPGRKTDLSDAEWLVRLLECGLLRGSFIPPADVKAARDVIRYRTKLTESRTSELQRLGNVLQDAGIKIDSVASKLATQSARAMVEALIDGERRPAVLADLAKGRMRAKIPDLARALEGRFGDHHALMCRLHLEHLDHLEDMIAELDAQVEEMMAPFRPQRDLLISIPGIGPRASAAIVSEIGADPGSWFPTPEQLASWTGLCPGNHESAGKRHHGKRRKGNQHLQPWLVECAWAAVRTDGYLRSFYRRQVRKFGGFGSPLAKKKAIIAVAHKLITIVWHVLTTGRPYQDLGADYFTSRLDPEIETRRLVAKLQAQGYTVTLEPAA

SEQ ID NO: 478545 - protein, 426 aa, unidentified
MSITQNEKISQVKNTTLVVGIDISSETHYARAFDWRGLELSKIFKFESTSYGFENFSEWLAEICKTNQKDNIIIGAEPTGHYWFTLAEYLKEHDIKFVFVNPMHVKRTKELDDNHPSKNDRKDPKVIAKLVIEGRYLIPYIPEDIYAELRIMNENRMRINREMIAIENRIKRWFAIYFPEYKNVFGNWECDSSIEVLINAPLPADAVNMGAEAINGLWRTKKIRAVGMKRANLLVETAKSSVGVKHGASAARCEISMLIEDYLRKKEQMQRVVEILETLCIQVPNAEKLLNIKGVGILTVASFFGEVGDIRRFDSPKQIQKLAGLAITENSSGKYKGRSCISKRGRKLLRYTLFQAVMSMTMHLPEFRELHRYYTTRDKNPLKGKQSKIALCCKVIRVFYTLLKKGVEYDSQKLMKDIVRPELMAA

SEQ ID NO: 478546 - protein, 351 aa, unidentified
MNEITTVGVDLAKELIVVCAGDAVGRTLFFRQFGCAGFAGWMANLPPCTVGMEACSSAHHWARVLAGHGHRPKLMAAEFVKPFRKSQGAKNDRNDAQAILSAVREPNMRFVSVKSLEQQSILACHRMREGWHAERTALLNRTRGLLAEFGIWLARSSAALYRALPRLSQEEAVPARVRALLGQAHEHLRQIDAQISHCEAQIRLHAKQSECAQRLTAIIGIGPITASAVVATVANARDFRNGRQMAAWTGLVPRQSSSGGKERLGSITRRGDTYLRALLTQGARSALQAALMRAPEKRSRLEHWMVELRQRVGYHKTLVAIADKHARICWAILAKGEEYDPQAWQRHALAA

SEQ ID NO: 478547 - protein, 332 aa, unidentified
MVAGTYGSFNKAGSTKMTQISRTAGIVTSKAKLDIAVHGGGEHWQVDNTSVGWRRLAADLSKAGVTRVGIEASGGYESGVVGHLRDKGLTVLVLQPIQVKAYARVHLRRAKNDKLDAALIAACAATIDQPRLAPDERLAKLAHHLTFVEQIEEDIARFKTRLEHVGDARLHRMVVADIARLKRRRSTELSRIVVALRAHDDLARRLDLVLSIPGLGERTAIALIIRMPELGRISREEAAALAGLAPYDDDSGKHKGQRHIAGGRGRLRRSLFAAALPAAFHWNKALIELYARLTARGKAHNAALIACARKLLIYANTVVERGTPWTERPAAI

SEQ ID NO: 478548 - protein, 482 aa, unidentified
MKAKPQEKNQRATNHPTQHHWHEMNRKQRRETMRKIQSEDLSLEVIHPDAAGIDIGNESHYAAVPPSRDSQPVRCFGCTTAELKAMAAWLQQCRIRTVAMQSTGVYWVAVYDILEQAGLEVYLVNARDTKNLPGHKSDVQESQWLMKLHTYGLLRNSFRPSQKIRTMRTYWRQRNDLVQSASRHILRVQKALTQMNVQLANVLSDISGVTGQAIIKAILAGERNPHKLAEFRDPRVQASEEEIAHYLEGNWQPDLLFVLKQEQDGYEFCQQQMAECDRQLEQYLQSTEDRSHGAPLPEEKRKGRLKKKKGNKPQFDLREGLFRMSGTDLTRIDGIDVMTATTVISEAGYDMSKWKTENHFVSWLRLCPDNRISGGKVIGKGRLPTNNPVSIALKMAATTLRQSKTYLGAQFRRLRTRLGAPIAIKAMAAKLARLVYRMLRYGMKYVDQGAAFYELKHRERQVHQLKWKAAQLGYKVSLISAA

SEQ ID NO: 478549 - protein, 412 aa, unidentified
MEGETVIAGVDTHKDVHVLCLLDGLGRKIWSGSFGADPEGYDRLAEAIGDPGSCMVVGVEGTASYGAGLTRRLVELGYNVVEVLRPKRDKARPGEGKSDPLDAERAARKAASGRGCSVPKSQDGWVEAVRQLYVARRLAVATSTSCVACAKSMLTTAPGALRERFRGRERPKDLMPLLARGRKAGDALEESVLASLRSVAAVWKEARSQVESLDERIRALLEANAPALLGIEGCGTTTAAALVVAAGDNPGRLKGEAAFSMMCGASPIPASSGKTERHRLNRGGNRQANWALYEIAIKRMAYDERTRRYVARRTSEGKSRREAVRCLKRYIAREVYRVLMDPNPDGAAPEGPELAKMRKAMRVTQKKAAAELGLSAATLGHLERGRRRSTKLERRYYELLCELKGALPQTAS

SEQ ID NO: 478550 - protein, 408 aa, unidentified
MLFVGDDWAEDHHDVEVQDDHGRAIRAARLPEGLDGMTRFHELVARFLPDDAKPSDVLVCIETGRGPWVRALIAAGYQVYGVNPKQAARHREGMSLSGAKSDKADAHTLADMVRTRRHQLRQVAADSDIAEAVKVVARAHQTLIWERTRHMLRLRTALRDYFPAALAAYQPLTLTGTDTLDLLAKAPTPAAAAKLTITQISAALKKARRRDIPAKATAIQQTLRTEHLGQADVVAGAYAATVRATVAVLQTLNAEIRTLEGEVEAHFGQHPDAEVYLSQPGIGAVLGARVLAEFGDAAGRYADAKSRKNYAGTAPITRQSGKSKTVHARFIHNDRLVDALHMQAGAAILHDPGVRAYYDELRGREVGHNAALRQVGNRLVGILHGCLKTTSPYNETTAWSHRTQSAAA

SEQ ID NO: 478551 - protein, 387 aa, unidentified
MKKIYLNVACAGMDVHYKFSNVTFRDPSGKVVRRQRLDHRHRKELQERLNRWPTGIPVVMEASFGWGWLSDLLEEAGQEVQLSNCYKVEQMRKARGWVKTNKKDADLISLLSFEQSDWWKVWRAPPEVRNRREQMRFRGDLVGLQTMVKNRIHAIFHRHGIFHEFSDLFGGKGRKFLAELCLHNPTDLSYQALLALRGQIKLLDHLRRQLADVARILHKQLVKTPLIMRLKTIDGIGLILAHVLAAEIGRIERFRNQKALASYSLLAPRSNDTGQDDPRHSPLGRHLGVRGNRTLKWAFIEAAHGAVRSGGKWRAIFDRVTNGGKKDRNRGYIKVARELVKVVYAVWSKGVDYQPVPPARPGSNKNKKKSRSETGQLLHPMVHALTA

SEQ ID NO: 478552 - protein, 383 aa, unidentified
MRRNATVTHMGLDIHRNFTQASACDQQGKLLWRARLKHADRQALREELAQWPKVPVVLESSFGWGWLSDELLLSGQEPHLASSRKIAGWRKAQGIAKTNRTDADLLADLWTEKKNWWEVWRAPAEVRDQREWLRYRMGLVRIQTETKNRIHATLHRHGIVNPHSDLFGVAGRRWLSLLINEPSSESLLRQTGRQTLKGHLLLLDQIRKHIAQATRQLRRQIKDSPVARRLMSLPGISWILAYTIIAEVGHIERFRGGRKLCAYSLLAPLADDSGDETDQTPIGRRIGHAGRLTLKWAWIEAAHGAVRRPGRFKAIFDRRSDNGKHDRGRAYIAVAHDLCRIAWSLWKNDVDYNDCPPTRPGSRLDTSRPGTGQPDHPMVPALA

SEQ ID NO: 478553 - protein, 432 aa, unidentified
MGSSKQSREKMNTHLLSSEHAEASIKYVCGIDIGSQSCSSCVTRPDKSVVVKPITFVNTQQGWKVLEEKLAQLDAAPDQIVIGMEATSRYHENLYHELEQRGYQMRLLHPGQTHHFHQQRGLRAKTDRLDAMTIARVLLSGEARMGYIPGEQVATYRELVRLHTQLSEEAARYQNQIQVLVVVLFPEFNQVFADPCGQGALAVLKAYPHAQAVAEAGVEAVYQVLRVIPATHFGRPTAQKLVAAAQTSSSSGRALSGRASSLRILCDQLEHTQANLTRLEEELEQLITTDPGTKGLQQMPELGPKTIAVLRAELGEVDRFACTDQAVAYAGMDIRIKESGKFKGKAKLSKRGSGLLRQILYLAALRSIRLEGSAFGAYYRHLVGRGLKKMSALMAVMRKRDGIVPSISKSWQKDYIYSKVTCFAPIDYYIPN

SEQ ID NO: 478554 - protein, 364 aa, unidentified
MVIIGCDYHPSGQQVFGIDTESGEVVADRWIAHTGKELEQFYRALPAGTVVGVESSGNMLWFERLLGQYGHQLRLGDAAKIRTKETRKQKHDRRDAELIARLLMDGSFPDLKWVPKLEERDQRQLLMHRHKLVRMRAQVKNQLQHIAMNQGQQKKRQLWTKAGRELLEKLPLEPWTARRRDDLLRWLDLLNSDCQALEEAVQQAAEARADARLLMTHPGIGPVISLGFVLTIGTVQRFERSRQLVSYLGLNPSEDSSGERRRLGGISKQGSSFMRLLLLQGAQTAVRGDEGLNRQYRRLANKKHRAVAKVMVARKLAVRMFWMLKTQKTHAELVRMRGSSSHPGVVKTERLSERPASPRIQPQG

SEQ ID NO: 478555 - protein, 440 aa, unidentified
MGRGHYGATQVNDVNWDQLAQGKDGLDITLGVDVGKFSLWAVCRWADGRFERPWRVQNPVEIPTLLALLKRVSAGRKLVVAMESSGTYGDALRQALADNQIELQRVGGKAAHDYAEVFDGVPSQHDGKDAAVVAELAALGKAMPWEYQPADPWEQELAYWVEWMVAHRQMLTIWQGRLEGLLARHWPEATQVLKLSSGTLLRVLKRYGTPQALAADGEAAKLLARWGGAFLAPEKIEKLLAGARASVGVRLGEWQQRQIQNYAQQALAARQEANRAGRRLRSLAEGHAVLQAQGKVVGVPTACVLWASTGDPRKYHAAGAYRKAMGLNLVERSSGTYQGKLRISKRGSPRTRQWLYFAVLRLVQKCGVRSWYEAKKGHDEADARRALVAVMRKLAVALYYVGVHNEEFQPRRLFGRIRRHRGSPGEQKSRTKRRSRAEQI

SEQ ID NO: 478556 - protein, 449 aa, unidentified
MSRAQVIDDQDHERVHDRVAAVDVAKDTGMVCIRTPHPSRPGARRATVWTVKARTGAVRALGRQLKAEAIEIVTLESTSDYWRIWFFVLEACGLVVQLVSPAQARQLSGRPKTDKLDAQWLARLTEWGMLRPSFVPPKAIRDLRDYTRARALLVRERTRCWQRLEKLLEGALIKVSSVASKLTTLSAQDMINAMIAGQRDPQALAGLARARMKAKHDDLVAALDGTFDEHHSELARLLLDHIAFLDERVAQLGARAAQLTAALPAAWGIDADGTTGPAAGTAPGAPVLPAVARLAEIPGISEDLARTIIAEIGLDMTRFPTAAHLVSWAGLCPSARQSGPRTRAGKKGQGDTWLRSALGQAVPGAARTPTFLGERYARIARRRGKAKAQVAVARSILIIIWHLLADPAARFTDLGPGYYQTRTDTDRKIRNHIRQINALGYDVTLTKTA

SEQ ID NO: 478557 - protein, 412 aa, unidentified
MEPIYTSCCGLDVHKKSIQACVRRVGKGGKIQQEIRPFGTMTQDIRDLADWLSQEEVTHVAMESTGVYWKPIYNILEGRFNILLVNARHVKNVPGRKTDVKDCQWLAHLLQSGLLKGSFIPDRAQREFRDLTRHRAKLVDQRASVVNRVHKVLEDANIKLGAVATDIMGKSGMDMIRALIEGRQNSSEMAELARRQLRGKIPQLRLALEGHVTDHHRFMLGQLIDQLDYLDRQIDLFSQRIEEVSRPFTGAIEEVMRLPGFQRVASENVIAEIGCNMDQFPSADHLSSWAGICSGSNESAGKRKSGRTTKGSKWLRATLAQAAWAASKKKNSYFYAQYGRLAGRRGKKRAVIAVAHSLLTVIYYVLRDHVDYKDLGRDYFDKLNSKRLVPYLVNRLKNMGYEVNLTPLESAA

SEQ ID NO: 478558 - protein, 350 aa, unidentified
MEHDSTLYVGLDVHKDSITVAYALGAGEVELLGKIGTSKADIDRLCKRLQSKASRIRIVYEAGPCGYGLYRQLAGKGFECMVCAPSLIPKKPGERVKTDRRDAVKLVRSLRAGDLSAVYVPSVEDEAFRDLSRAWVNAKDDLKRARQRLKAFLLSHGVRYSGRADWGPAHRRWISTFAFDTVWQQLAFDEYRRAIEDRLAQCSRLEAALREAVVNWRFYPAVLGLQAMRGLQFTTAIGMLAELGDLSRFVHPRQLMAWLGVTPAEHSSGEKRRQGSITKNGNSYARKLLIEAAWSYRHPARVSPEIQRRHEGIPNVTGPGTPRFDCAGAIGDLPRAARTRTLRWLRWPAN

SEQ ID NO: 478559 - protein, 338 aa, unidentified
MTRYIGVDLHTNCFTTCVVDTTAKQTFRDYKLSEVAQFAASLRQTDEVAVEATGTTRYFYEQVAAKVKRVAVVNPRAFEVVKRSANKTDKRDAANLALFLSKELLPEARMKSRDQAEVASLVQTRDKLVKQRTALINKLHALSVAHGRRESTAAFASEAGLGRVLQQAWSAVEQVEVEVLVAQVRSLSAGIKRLEGEMSAQGTKLEGHTSLTSIKGIGTKSATILLSVIGTVSDFESADKLASYFGIVPSVRQSNETQHTGRITKAGSKLGRTTLVQCTLVAIRYSPYLKKYYDRLKERRGAGKAIIATARKFLGIIYQTLKHKWVFADFPNFVLAEE

SEQ ID NO: 478560 - protein, 342 aa, unidentified
MYYIGLDVHKKTISYCVKDLSGRIQQEGKVGSTRRELDCWMKTLPQPWAVAMEATIFSGWIYDHLLPHATQIKVAHPLMLRAIAAAKKKNDQIDASKIADCLRCDFLPECHMMPAEIRDRRRTLRYRHLLVRQMVQMKNRVSGLLMETGVEYNKQRLHKVSYFRELLSGNEEVDPSIRPLLKLSRETIERCQRTEYALVNSLQRDPMLADRIKRLRMVPGVGPITALTWALEIGDVSRFRTIKQAISYCGLCGDERNSADKAMRMPLSKQRNKHIQRTLIEAAKLAPRQSHELALIYDREKQKGNRNRATLAVARKMVAYLLAVDRQQRDFVPAEERKAAAA

SEQ ID NO: 478561 - protein, 277 aa, unidentified
MIATPKLFIGIDVHKKSWQAHLRTDISDHKSFSLPPDPDILANYVFKHFPDHQVAVTYEASCCGFSAARAFLNLGWSVTVVNPADIPTINKHQYQKTDKIDSRNLAKQLEIGQLKPIYIPTETQEQLRSLLRQRNQLVKQVRRVKSQIKGLLLFHGICIPTEFDNSNWSKDFQRWIYQLPWTHVTGMQCLHSKLRVFQLLDREERQVSNELRAYCRKMHHTDYYLLKSIPGIGGILATAIIAELGDIRRFDNERQLANYIGLVAGIHQSSETDTLWV

SEQ ID NO: 478562 - protein, 356 aa, unidentified
MSVIIGVDAHKQTWAAVAIDLAGRPLGSHVARATTDGAHQLLEWSIAVGAGDGVLRWGIEGAMHYGRGLAQHLVTQGAMVVEVPGASTASERRRSRGREGEKSDQTDALAIARVALRDADRLPTIAPDGAAARCQALSEHRDNLVLARTATLNQLYAHVVHTHSDARRCAFQARRNRQWLRQLAATAPSGATPLAQARALIVGQLATMVLAHDQMIDGLDQELAQLAEQLAPSLLAIHGLGSLSAAKLVGIVHHVERFATPGHFAAYAGVAPVEASSGDRRRHRLSRRGNRQLNRVLHIIAVVQRRGYAPAQAYVAKKILEGKSRKEALRALKRHLANVVFRALQRDATAGLVRAT

SEQ ID NO: 478563 - protein, 443 aa, unidentified
MLKVMHHTCCGLDVHKKFVVATIVTTSATGVANYKTKTFGTFNDELTELKVWLLKKGCYELCMESTGKYWIPVYNILEDMINITLANPKYIKAIKGKKTDKKDSIWIADLHRHGLVPGSFIPPHDVRKLRDLCRYRTKLVSNRSSEKNRVQNSLTMSNIALSHVLSDTFGKTAQRIIEYILTCDVFDPEYCKTLIDGRVKADHDEITRSIVGYQLSLDQAAKIRFAKNHFNFLNESLDLLDEKIVKFSQPFVTQIELLSSIPGLTQTSATRIIAEIGVDMNIFHSAKHLCSWAGLVPQNNESAGKKKSVKISRAGVYLKPLLVQCANAAIKSKVEPYFRDKYEKIKKRRGHKKAIIAISRMMLTCCYHMILKNEVFKPVDENKQTEQLKKKTKERRLNSAIYFLKQNGFSVTINPDCTVEQSDFDPSTLNGVADHLNSNSQLE

SEQ ID NO: 478564 - protein, 341 aa, unidentified
MSNNTTICIDLAKSVFQVAVFNKAGNMVSNKEVSARKMCEIILQYPKADIFMEACGSAHHWGRRFEKEGHKVGLIPPHIAAKYRAGNKNDKNDTLAIYEASKSTSLHYVQIRTLEQQDIATLHKYREGYKKERNQIACRIRGFSQEYGVYFPVGIDKLRKQIPDALEDAENELTTVARRILLELSEQLIHVSDLYAKVGKEIEVLAKQVEACKRLFCLPGIGWLCASMLYAKLGSGEPFSCGRDASASLGIVPGHSGSGGRVSIGKITKRGDVYLRSILINGARAAVSNIGDKRDGLSCWIRKLLSTKSFNTTVVALANKLVRMALAMLKSGEKYRQPVAQ

SEQ ID NO: 478565 - protein, 313 aa, unidentified
MLGVGIDVSKDELVVVVHGEEAVHRFSNDRRGIGKLLRWLKGLKPSTVVLEASGGYETEALLRLTEASIAVARINGEQGKAFARAHNYRAKTDPIDASVLAHFAAVMPVTLFKAPSPELQRLNALSRQRHDVVIMLASQRCRLKQQKDSAALRSIRTLIRALEKETRRLAVELEHQLDSVPDFALKASLLSSLGGFRAINAANLIAALPELGTLSRPQAAALAGVAPFNRDSGLQSRKRSIRGGRTLARLPLYMASVTLVRRNPTFKAFYERLLVRGKQKKVALTACMRKLVVIINAMFRDQRPWQPLPATGS

SEQ ID NO: 478566 - protein, 388 aa, unidentified
MQDILTCAMGLDVHRDVIVACLARGELGTEPEIEIRSFSTLIPEMRKLRDWVLEVECRHVAMESTGIYWQPIYEMLEPCFDGQINILVVNARHMKNVPGRKTDMRDAQWIATLLRAGLLNGSFIPDKTFRELRHLTRYRKSIVHDITAQKNRIDKFLQSSGFRFTAFLSDAFGASGRNIIRHLMEYGDISREALDKCLKTQTRKRIDEILVALNGSLSEHQRSFLRMIFEHLESLERHRHTVEDAISEEIVKHEAALSLLCSIPGIDVTAAASIIAEIGTDMSAFPDSQHICSWAGLSPGNNESAGKRKSAHINKGDPYLKSMLCEVGWVISGKRSLYLSGWYWRIKQRKGAKRATIALARKLLALIYTMLKTGSPYSSFSEYTSELP

SEQ ID NO: 478567 - protein, 367 aa, unidentified
MGKNSTFVGLDTHRKTIAVAVLRAGAREALQWQIANEPVAVRRLIRKLGGLAPVECCYEAGPLGYTLKRQMDAAGVPCMVVAPSLIPVRHGDRIKTDHRDARKLAELLRGGLLTAVHPPTEDEESVRDLCRCREDAQQDLVRARHRLNKFLVRRGLYFNDGFAWSQTHRAWLGSLRFDRSADQVVFEDYLLAVEQQEARVAALDQRLEEVSGTERYCKPVAALRCFRGIDTLTALSVVAELHDMRRFATAPRLMAYLGLVPSEHSSGGHRRLGGITRAGNRHVRRLLIESSWHYRHKPGVGVKLGKRRRGQPPQIVALADRAQHRLCRRYRRMVAQGKHHNTIVAAIARELTGYVWAVLRMVEPTKI

SEQ ID NO: 478568 - protein, 343 aa, unidentified
MYYIGLDVHKKTISYCVKDAAGCVHQEGKIGSTRRELDSWIKTLPQPRTMAMEATIFTGWIYDHLLPHAEKVKVAHPLMLRAIAAAKKKNDRIDAGKIADCLRCDFLPECHMASTEIRNRRRILRYRGLVQRQAVQMKNRVSGLLMETGVSYNKLRLHRMGYFAELMATNEEVSENIRPRLSLCREHIDRSIMLDTALLRSLERDPLLADRLRRLRTIPGVGPITALTWALEVGDTSRFRSIKQAISYCGLCSAEKSSADKVMRTPISKQRNKHIQQVLVEAARLAPRYSEELALLYERERQRGNGNRATLAVARKMVALMLAVERRNTDFVPAGEFRRSAAA

SEQ ID NO: 478569 - protein, 355 aa, unidentified
MNDTKYIGMDVHRESISIAALNSAGKIVLECVVETKASIILQFIDGLRGELHVTFEEGTWAAWLYDLLKPHVRELVVCDPRKNASMKQGNKSDKIDARQLAELLRLDHLNPVYHGEHGLRSLKELVRSYLTITKDVGRVMSRVKAIYRSWGIACTGKQVYAPQHRVEWLAKITEPGVRRRAEFYYQQLDALRSLRREVRRELLEESKKHQAWKRLCQIPSIGPIRAAVLLGILQTPHRFRTKRQLWSFGGLGIETYSSADHRYVEGQLKRSKKPALIRGLNENCNHDVKNLLKGAAIIASTKPGPFQEFYTALLAKGMRPEMARLTLARKIATIVLIVWKRGVSFDAQHLKPQTA

SEQ ID NO: 478570 - protein, 351 aa, unidentified
MVYVGMDIHKNYSSVAVIDEQGALVGRRRVSHRYREELTGYFNQFPLKTQVVMEATCGWGWLSEVLQDLGLEVKLANPSKVKIIAESHIKTDKVDAQALAQLLRTNFLPECYLAPKEQREARDLLRYRISLVHLRSGIKNRIHALLIRLGIYHTYSDLFGKRGRRFLSSLELSPVHRRALDGYLCLIDTINKLIGEAEVDIRKVVKESADGKRLLSLPGVGFILAYLILVEIGDISRFSSYKKLCSYAGLVPSVYQSGAKSYHGHLSKKANRYLQWGMIEAAQKAKVIDPFLRRKAERIERKKGASVATAAVAHHLLVIVYHLLKEQREYYSSKLRGNLSGRPALTLVARS

SEQ ID NO: 478571 - protein, 346 aa, unidentified
MPYSTTVGVDLAKNVIQISVVSGRGKELSNRSLTRRKFAEFLGKQKPSLVAFESCASAHYWARAAKRHGHEARIIPAKAVAPFRQGHKTDSNDALAVAEAARRPNIKEAPMKSVEQQGLQAIQRSRELLIQECTALSNHLRGLLLEFGVTIPQGFASLLRALPEILEDGDNELPDLYRPTLHRMYTRLVELREDIDAMTKEIGLLVKQHPVCQRLTAIEGIGPIGALSLYAVLGTGNAFTKSREFSAYLGLTPRQFSSGGKTNIVGISKKVGNRRLRSILIQGARAYVYRMKEPRSLKDCWLKDLIERAGPNRAAVALANKNVRTAWAMVTQGTEYQRRLQLEMAA

SEQ ID NO: 478572 - protein, 472 aa, unidentified
MRAKAVIDLSDTIEELFLIEETSISRFFLLFTAFRQKGMNIIHSRLILYWTKNKTKAAMDKGSIEFEQVVERGCGLDVHKENVVATIQGKGIKTMTKSYSTFTGSLEKLRAWLKKHGITHIAMESTGVYWKPIFNVLGDDFEILLVNARHVKNIPGHKTDKRDSRWLAKLLLCGLLKGSFIPPRSIRELRDLTRYRKKLIGQITSDRNRFQKILEDANIKLSVVLTDIFGVTGMKMISAILDEGGYHPEDLLQFVHGRVKASRSDILESLRGHVTGHHRFMLRTILSNMHRLETTIAEVTVRIDELCAPYNLEIDRLSEMPGVDRNGAVGIIAEIGLDMGQFPSSHHLASWAGICPGTNESAGKNKSGRITHGNKYLRSLLTELGWAGSRSKGTYFGAKYRSLVGRRGKKKAIIAIGHKILVAAYFIIKDNVHFKELGPEHLDNFRKDKLVAYYKKQLKQLQPNLEFDGHAA

SEQ ID NO: 478573 - protein, 361 aa, unidentified
MEESSIKRTVGMDLGDKNHVLCILDEAGEVLDRPVVGNSAGKILVFFDQFEDPSSVRVAMETGTHSPWISRLLLERGFEVLVGNARKLRAIWQSDLKDDYRDAEILARIGRFDPQLLYPIIHRGAEAQADLAVIRARDVLVRSRTSLISCARGLVKSFGQRLPACSAPAFATKARDHVPEELAPAINPLLDQIASLTATIREYDRCIEGLCEHCHPETAAVRQIQGVGAVTALAFVLTIEDPSRFKKCRSIGPFLGLTPRRDQSGTTDKQLPISKAGDTCLRRLLVQAGHYILGPFGPDCDLRRFGLRIASRGGKAGKKRAATAVARKLAVLMLQLWKSSEKYEPFHRRPANEAKSVKPAA

SEQ ID NO: 478574 - protein, 347 aa, unidentified
MKHTVGIDLGDKYSSFCVLDEEGKAVDRGRMSMTQPAVRKAAGNWPSALVALEVGTHSRWVAEILEDCGHAVVIANPRRLKLITENVNKHDKADAMLLARLARADMDLLQPVRHRTREAQADLVLIRARDGLVRTRGKLINCVRGLVKPFGVRLASCATTCFAIRSAPQIPDELKSALAPILTQIDTLTEAISGYDSQIEHVALTRYPDMVLRLKQVAGVGTLSAMTFILCIGDPHRFRRSRDVGCYLGLKPAQKQSGESAPELGITKNGNELLRRTLIQSAQYILGAFGPDTDLRRWGLKLAGQGKGSRKRALTAVARKLAVLLHRLWVSGDSYRPLRQPPTEVAA

SEQ ID NO: 478575 - protein, 337 aa, unidentified
MLIIGCDFHPGFQQVAIFDNRTGEMEERRLRHREEAEQFYRSLMGQVARVGMEACGHYPWFERLLAECRIELWVGDAAKIRAMVVRKQKTDRRDAEHLLDLIRQDRFPRIWVPSLEERDARQLLVDRHKQVQARTRVKNQLQAMALGQGVQKKRKLWNESGRAELEKLELLPYAAQRRQRLLQALQQLDTEIMRLNRQVEEEVRRRPQAMKLMTHPGVGPVTALAMVLTLGPAERFENARKVGSYLGLIPSEHSSGGRQQMGPITKQGSPFLRFLLVEAGQSAARYDSELGRFYRRLAVRRHRALAKVAVARKLAARLYLMLREDWTYAQLSKAVCR

SEQ ID NO: 478576 - protein, 347 aa, unidentified
MNGDYAGRQVVGMDLHRRRSVLVRMSEDGRKLGTARISNSPAALRAELARAGKNPRVVLEATYGWYWAADTLAAAGAEVHLAHPLGVKAYGYQRVKTDARDAANLADLLRMGRLPEAWITPREVRDLRELTRYRQKLVGLRSSCKDQVHAVLAKLGLQVTCSDLFGAWGRSWMDGLALPQPYAGKVTSLRQLIGGLNTEITMLTEVIADLLAGHAGYRVIQRLPGIGPVLAAVIIAEIGDVTRFRTAAQLASWAGLTPKHRESDTSVTRGHVTKQGSRLLRWALIEAIQRARAGSWPGDVKDAIIARRGRQARNIAKVAAARRLLTLACYGLRDGQIRCLPEPTAAA

SEQ ID NO: 478577 - protein, 360 aa, unidentified
MRIIGCDLHARQQTLAMLDTVSGEVVNRTLQHEGNEVREFYSELPRPVLVGIEAIGPMQWFLNLLEELGIECQVGDATKIRAAEPRKQKHDRRDAELILKLLVERRFPAIWRPSKEQLDLRALLLHRHHWVRLRTQIQNALQAIALANGLRRGPGLWSYDGQAKIAFLPLPPHASYRRSLLQALYRKMEEEIEQLSAQVAEQAERRSGAQLLMTHPGVGPVTALATDVFLGDPQRFADGKALASYVGLIPREYSSGARQRLGALTKQGSPLLRFLWNEAGAHAARHDPELQRFYRRKLVHKGLGKARVAVARKLGIRLWIMLRDRIDYQEFCRRGQKHSGAACAGMPETGFGTYRHRPVD

SEQ ID NO: 478578 - protein, 355 aa, unidentified
MGVDTHLDFHVAVALDRLGRRLGEIKVSTTAEGYERVLRWAEGFGPVQCAGIEGTSSYGAGLARHLKATGIAVMEVERPKRRHLRRRGKSDPIDAEAAARTVLAGQAAGEPKSGDGRAQMIRTLRSARQSAVKARSQAANQLQSFLVTAPEELRHRLRGLSTKELVAAAARFRPGNDLQVVEAATRFAMRSVARRYQVLSEEIAELDAHLHKLVAEATPGLTSLAAIGTHHAATLLVLAGDNPERLNSEASFASLCGVSPVEASSGKIVRHRLNRGGNRDANRALHMICVVRMGSDERTRRYVARRTAEGKSKWEIMRCLKRYIAREVYRVLLSSAAAEPPPSGITAPALGADIA

SEQ ID NO: 478579 - protein, 312 aa, unidentified
MTDITIGADISKDHIDLHSLPDGQTLKVAKDRKGFVAILKWMGARSVQRIVFEPTGPYHKAFERFMTTQGLPLSKVNPRLARRFCEATGRLAKTDGIDAALLARYGALLEPRILQANTQIHNDLKELHMARLALIKDRTAAKNTAKSLSNPLLKKHNADRLRQIERQMRAVDEAIMALIGADASLKARFDILVSIPGVSQITAFTLLIEMPELGELGEKAAAALCGLAPMSRQSGRWTGRAFIAGGRANVRQALYMPALVACRFNPDLKAKYDQLKAAGKAPKVAITAIMRKLVVLANALLKNNRKWTSKPA

SEQ ID NO: 478580 - protein, 357 aa, unidentified
MHATPDSISIATVAIDLAKDVFELAFADAQGQLIERRRLNRSTLAKAFDNVPPRRIVMEACGTAHYWARRFQRGGHAVTLLPAHAVRPYVRGNKTDRTDAAGLLEADRCGAIRPVPVKAPEQQGIQGLHRVREFHKAQRTAAINLVRGLLREFGIVIPLGSTKVRAAVFAALEDGGNELPMPLRQTLHALLETIATIEREMAQIEERLQGFADRDPRSQRLQRAGGIGLLTATALSTSVGEFDRFDSGRCFASYLGLTPREHSSGKVRRLGRVTKRGDVYLRTLLIHGARAVLRSATLARKKQQPLDRTRQWALALAERVGHNKAAVALANKTARRLWAAEHHRTSFDPDHASAWPH

SEQ ID NO: 478581 - protein, 386 aa, unidentified
MQKMNDLSRCLTPLEPNSTLIAVIEMSLSSWLVAGIVPGVERQPLKKLAVDESVLLKLLHRWREEAEKAGYMIKRIAVAFEAGRDGFWLARWLRARDIEVHVIHTSSVAVSREHRRAKTDRLDTELLKRAFLGWLRGERDHCKMVAIPTIKDEDGKRPNREREGLVGEQSRIINRIKATLVRLGIRGFNPKLKKAAERLEGLRTPEGEPIPPNTLSELCRDMERRRLVRDQIRQIESARLDRLEHAPGEGAHAMVRLLARVMGIGIETADMLVQEVLSRNLRDRRAVARYAGLTGSPDESGKKRREKGLARSGNPRVRHGMIQLAWRFLLFQKDSALAQWFRVRTENARGTRKTMIVALARKLLIALWRLVREGVVPDGVILRPAQ

SEQ ID NO: 478582 - protein, 423 aa, unidentified
MNNLNDGQYTAFIGIDWADTKHDICLQAANSDQCEFDCIPHQVDHIEQWALSLRKRFGGPIAIALELSKGPIVYALQKYDFLVLFPINPSTLAKYREAFTPSRAKDDPTDAELALDLLLRHPDRFQPLEPQSVELRALATLVEQRRDLVNDRIRITNRLRSALKQYYPQILEWFDRINTPLFCDFITRWPTLEQVKRARKSTLERFFHQHNMRFSHVLDTRHQAIKAATPLTRDAAVVTPYRLHALVLAEQLRVTLQAIRRFDDEIAKLAPQHPDYELFSTLPGAGPSLAPRLLVAFGEQRERFTNAAELQQYSGVAPVTERSGRKHWVHWRWQCPTFLRQTFVEWAAQTVNKSFWAGAYYRQQKAKGASHQAAVRALAFKWIRILYRCWQARTPYDELIYLEALRRRGSSLLDQLSAVPEST

SEQ ID NO: 478583 - protein, 308 aa, unidentified
MTTIYAGLDIAKLNLQLHLADRLYDLPNTAAGHRRLLKLLAQQPSVHVVCEATGGYERDVVAALQQADVPISVLNPARVRHFARATGQRAKTDHIDAAVLSAYGQALHPKPTAPRTQQEQQLAELVRRRVQVLEVLVGQRQQAERLTMPALRRQARSLVRRLERDLEQIEEQLKVLRTQAAALDAKVQKLEAITGVGTITALAVLAELPELGTLNRRQAAALAGLAPHPRESGQWHGRRSIGGGRAPVRRALYMAALVAAHSNRQLKEFYQRLRAAGKPAKVALTAVMRKLIVLMNQILKNPNFVLSN

SEQ ID NO: 478584 - protein, 322 aa, unidentified
MTRIICGVDISSSSLAARIGQAGAQTSFSNHAEGIAELAAFCHAHQVELIAMEATGGYEQQAFAQLSEQGLPVAILNPRAVRQFAKSMGRLEKTDAIDAGMIAWYAEVKQSQPLCVAPRTQQHLRALVTRLRQLTEIRTAQLNQQRLILEPVVQVSFDDLLALIARQIRDLEQRIAALIQADPLWSQLNQAFRSIKGVADRTVARIMAEMPEIGALSNKTVSKLAGLAPLANDSGKHQGKRAVRGGRATVREILFLVGSVVARYEPDFIAFQQRLRAAGKPPKVVRIAVAHKLLIRLNAKAREVRRQNSVPPQLSCLATSQP

SEQ ID NO: 478585 - protein, 355 aa, unidentified
MTAVPLRFVKNEWRLTMMTSFVGVDLHRNNFTYCIRENGEEKKIGKCEISELKGFASLLGKDTAMAVEATGNTFMFCRFLKAHVGRLVVVNPSQFKVISTSTKKTDKHDAKILAEFLEKDMLPEVRMKDDLQAKISSLTQTREKLVQLRTVLKNKVNNLLAANFIVLKREELSTETGLRKALSFHFDPITDTELFVVVEQIRSLNQSIEKLDKAIEDHGSKMDGFKNLKSIKGIGSKGAATLLSTIGNIHDFRSSKQLAAYIGIVPRVSNSNDTVCHGRITKNGSKIARTTLVQCALIAKRYSPYLHAFHESVKSRRGGAKANIALARKFLDIVYRTLKNNWMFEDFTQFKLVKN

SEQ ID NO: 478586 - protein, 404 aa, unidentified
MKDTAVRFAGVDWASAAHAICIVDGGGQIVERFEIAHSASDLAALCRRLRRAGVVRVAIERPDGPVVDALMGAGLEVVVIASRSVKALRERYGSAGNKDDAFDAYVLADCLRSDGHRLRALRPDSPATVTLRALVRARRDLVEARVAAANQLRAHLGVVFPGAVGLFADIDSPISLRFLGRFSSAASAAWLSERRLGAWLRANGYSGRRSAGELYRRLAGAPEGLVGDEGRSRGAVTVAFVGVLVTLRAQIAELEARIAEQLELHPDGAIFTSLPRSGTVRAAALLAEIGDCRERFPTPESLACLAGAAPSTRSSGKHRAVTFRWAADKKLRNALIDFAGDSRHANPWAADLYAKARARGKTHPHAERILARSWCAVIWQCWQDHVPYDPARHGALQRLAAVGG

SEQ ID NO: 478587 - protein, 412 aa, unidentified
MEVVYPCCCGLDVHKKSITACVLWAEAKGKSRKEKKRFGTFTHDLLQLADWLAERGVTHLAMESTGVYWKPVWNILAEQFEALLVNAQHIKAVPGRKTDQKDSEWIADLLQHGLLRGSFVPPRPTRELRDLTRYRVSLVQEINRIANRIQKVLEDANIKLASVATDALGASGRAILEAMLAGEQDAARLAEMSKGLLRNKIPELKLALEGRMTEHHRFLLRQLYDHLRFTESKRSEIEREIDKRMRPFEDKVTRLCTIPGVDRVTAWGMLAEMGMNMNQFPSSGHLASWACLCPGSFESAGKRLSGKMRKGNVSLRRCLSQAAWAISMMKNNYLSALYRRIAARRGAKRAVMAVAHALLEIAYHMLKRKEDYRELGADHFDRIDVNRIRRSLVRRLERLGHKVTLEPLAQIA

SEQ ID NO: 478588 - protein, 354 aa, unidentified
MFNNSIVFIGIDLGDKFSEIFILDQDANVIEESRIPTTRNAFQRKFSMLQPSRIAMEVGSHSRWASQVLKEAGHDVIVADARKLRLIYENPRKGDRADAEYLARLARLDPKLLSPVYHRGMQAQAHLSVLRSRDILVRARTMLINHVRGMVKSTGTRLPSCSAASFHKKSPEFIPGDLLPALAPILDHIASLTHQIYAYDYQIEKLCADSYPETELMRPVSGVGPITALAYVLTLEDPHRFRKSREVGPCIGLIPKRDQSGDRDPQLRITKTGNKYLRRLLVTSAQYMLGPFGQDCDLRRWGLKLAKRGGKNAKKRAVVAVARKLAVLLHHLWVTGDAYEPFHSSNPVKVALIS

SEQ ID NO: 478589 - protein, 404 aa, unidentified
MAVREKIWVGVDVGKAGHHACAVDDTGKVVFSQKVVNGQSAIEELIMRAGRKARAVVWAVDMTSGSAGLLLALLLGSGQPVLYVPGRLVNRMAGAFPGEGKTDAKDARTIAETARLRGDLAPVTHPDELVAELRILTSRREDLMGDWVRGINRLRELLASIFPALERAFDYSTRSALVLLTGCCTPDGIRDAGRAGLTEHLRSGGAWPKSIPSIVDKAIAAAGEQTVALPGETATAPLTMRLARQLLDLNREIKDLDKHIAGRFGEHPHAGPITSVDGFGPILGAQLLADTGGDLRAAFGNSGRMAAYAGLAPVPHDSGRVRDNLHRPKRYHRGLRRVFYLAALSSIKVQDSPSRRFYLRKRDEGKLHTQALIALARRLVDVIWALLRDGREFHRSPQLTADAA

SEQ ID NO: 478590 - protein, 347 aa, unidentified
MLHAGLDLGRRKLHVCLLSDQGEHLDQLAVPPDVDSLRTLARRIDEVYGEPVCAVVESMTGARLVHDTLEQEGWSVEIADAQKVKGLAPLTSKTDKIDSLVLATLSQRDLVPAIWLPDPHIREERELARFRLHLVKHRSMLKHRIHSTLINFGRPCPVTDLFGVEGRRLLERLEVPEPWRGNVTASVALIDDLERQIAEINRRLRAGHADHPYIPLLVSAPGIGWVLAFTIASEIGEIERFSSPEKLTGYTGLCPRVNQSGDADRRGPLTKHGPRYLRWALIEATMHALKHPAYSERYQRNKRRLGKQRGAKIAQIDLARRLAHAIWHMLTRNEKFAPRGAAVRLAA

SEQ ID NO: 478591 - protein, 367 aa, unidentified
MTATIRYVGLDVHKASTTIAVAEGSGGEARVWGQVGSDPAAIEGVVRKLGSPHRVRVCYEAGPTGYGLARRLLAAGYACDVVAPSLVPSDTRRIKTDNRDAIRLAHFLRSGNLTAIAIPDAATEAIRDLVRARDAAKRAERVVRHQLDKFLLRHGRIWSGGGNWTQAHLTWVRSQQFDFASLTATFDDATAAVESAAERVKNLTAAIDVAAKDWSGAALVKALQAFRGVQLVTAATLAAEVGDFARFPTARHFMAYLGLVPSEHSSGGSRRQGAITRTGNGHVRRVLVEAAWNYRMRAALSKPILARNIGVAEGVKAIAWKAQQRLHKRYRRLIARGKCKAEVVVAVARELAGFIWAAARQPEYLAA

SEQ ID NO: 478592 - protein, 385 aa, unidentified
MDQTSSSTLSANNLHCALELSKKSWLLAIQFPDREQPSLYQIEGGDTEKLMAKLAAARDCWAKVSGARPMITLCYEVGYDAFWLARFLKARGIACLVIDPGSLQVNRRGRRVKTDRVDVKMLLRTLIAWCRGERHVWSLVRIPSIDEEDLRRSHRERTRLVRERTAHINRIKGLLFAQGIRGIKVKSQYKTLAVDKLVTGDGHRLPPRLACEIAREIQRLAMVQEQIAKIERERDTAPTPCEATERKRHLLLQLKSIGPAISALLSREVYYRQFANRQQVGSFLGLTPSPYNSGEEEHCQGISRAGNGHVRAIMIETAWLWIRHQPKSALTRWFVERTAGQSTRMRKIMIVAVARKLAIALWRYVEHGLVPQGAILNPPMTGNAR

SEQ ID NO: 478593 - protein, 345 aa, unidentified
MYATQPREPSYDDYQNWSGYRLFQVHGVDENEQTVVRRQLRRSEIAKFFNRLPPTRIGLEACGASHYWARLLRGLGHEVVLLPPQYIKPYLKRGKNDANDAEAICEAMSRPGMRFVPIKSAERQAELMPLGVRDLLIKQRTAVINAIRGYAAEFGVIAAKGPVKVAELLQQAHAEEASVPAVALDMLRLLAAQLDALDVKLKQIETRLVAIHRENPLSQCLASQPGIGPIGAVSFALKVTDPKSFRSGRHFAAWLGLTPKDNSSGGRRRQGRISRQGNETLRKLLVLGATAVIRFARPGHASPWLLNLLARKPRKLAAIALANKMARTLWAMMVSGEVYRRPLPA

SEQ ID NO: 478594 - protein, 373 aa, unidentified
MPRYSTAFGMDVHLRSTTVCALDAETGEAATRRFRGNPWGEVAEWMSGFPGPSLAAYESGYLGFAPQRELSGLGVDCVVAAVSKVPRSAADLSSKNDRNDAARMAKAILSHDISPVWVPSPEIEGLRDLAGAHDAATARLAAAKQRLLAFLARRGYAYGGTTPAGNPRKYWTYGFLRWLDGIHPADDGGIRALAALRNEVEAADETRGAVLAEYRAAVAAGPLSAEVEALQSIKGCGFALAAAFAAEVGDFSRFRSGRQVTAYFGLAPKQRSSADSVRLGGISGAGNALVRKLAVEGSWCYAQAGHQPKLMPKGSGVPLEVRMHGRKGSERLLRRREEMLARGMPQAKANAATAAELVRWLWALGAMCREAGE

SEQ ID NO: 478595 - protein, 344 aa, unidentified
MFNYGRLPQRKFMKKIFHFIGIDVSKETLDIALIKNNDKSRIYSFKVTNNLDGFKKMKRWLLTEKVVLEHSVFCIEHTGLYSKAVGRFVLSQNSNLWMEMSLKIIRSMGVQRGKNDKIDAIRIALYAHRHQEDMMLYDPPRPVVEKLRVLLQLRKKLIISRNSLKTPCKELALVNPEEGKEAMKLIIASVRALQKNIKAVDQKIEALIESDENLNHLFVLGTTVPGIGKITLAYLICFTNEFKSYTTGKQLACYSGVVPFEYTSGKSVKGKPHVHNMANKLLKKQLHMGAIAAVTYYKEFKVYYQRKLAEGKHKMLVLNNVRNKIILRLASVIKNDKPYQVFAA

SEQ ID NO: 478596 - protein, 346 aa, unidentified
MKNLTVIGLDLAKNVFQVHGMDDRGHKVCGARLKRSEVLSYFANLPPVLVGMEACGGAHEWARQLCKLGHQVKMMAPQHVKAYVQGNKTDARDAAAIAEAANRESVRTVAVRSVESQQMQAIHRVRELWMKQRVALGNQIRGLLAEFGEVMPLGLKKLKQEIALWQERASEELAVIKELIGQLLDGLRALEERISLLELKIKLLHKNNAASRLIESIPGVGLLGATAAIASFGDCGQFESSRKFACCLGLTPREHSSGDRQILLGISKRGNGYVRKLLIHGARAVLKARMNSEAHADDWVVKLAKRRGNNIAAVALAAKNARRIWAMLRTGELFRADYTQAEGACA

SEQ ID NO: 478597 - protein, 370 aa, unidentified
MNSIKFIGMDVHKNSITIAIANQGRRGPARTYGAIDNDLGALDKFCRKMVSTASQLQFVYEAGPCGYGIYRHLSEKGFDCMVAAPALIPKKSGERIKNDRRDAKMLARLHRAGELTAVYVPDCQDEAMRDLSRAREDAVSATRKAKQRLKAFLLRHHIVYSGRSKWSKAYFNWLSAIAMAHPAQQVTLQEYIDAVHENMNRVNRLTEQIRQLVPSWRLAPVAAALQSARGVSLIVAVTVLAEIGDLTRFESPDQLMAYLGLVPSEHSSGDKIKRGGITKTGNSHARKVLIEAAWAYRMKPRVSRVLLKRQQGLSDQIRQISWKAQLRLCTRFRRMAARGKPKPVVVTAIARELIAFLWAIAKQVQPVTEK

SEQ ID NO: 478598 - protein, 339 aa, unidentified
MSLYAGLDLHSSNTYIGILDPQFNRIFKKRVSNDLDLILETLEPFRGRLQGLVVESTYNWYWLVDGLMDAGYACVHLANPSAIKQYEGLKHSDDQHDAFFLAQLLILDILPQGYIYPKEARPVRDLVRKRLFLVQQKTANILSLQSLLARCCGQRVSSNQLRKVTGQDLKRWLKEEHLVLSAQANLDNIVFLKQQIGKLEAAIQKQVKLSEAFNCLLTVPGIGKILAMTIMLEAGDIRRFANVGNFASYCRCVSTQRLSDGKSKGSGNRKNGNRYLSWAFTEAAQMARRFNSRFRSYYDRKAAQTNSILATRALSNKLARVCYYIMRDQVEFREESVSN

SEQ ID NO: 478599 - protein, 388 aa, unidentified
MIYVGIDIAKLNHFAAAISSDGEILVQPFKFTNDGDGFQLLVSILDSFDKDSIIIGLESTAHYGDNLVRYLVACYFKVCIINPLQTSAMRKNNIRKTKTDKVDTYTIAKTLMMQTSYRFLDFEDLDRMDLKTLGRFRQKTIKQRTRLKIQLTSYMDQVFPELQYFFKSGLHQKSVYALLKEAPSPKAIASMHMTHFAHLLTKASRGHFKKEDAKRLRVLAQKSVGRNDSSLSIQVTQSIAQIELLDKQLTQIEAEMTEIMKYYDSVIMTIPGIGYINGGMILGEIGNIHRFSTSAKLLAFAGLDPSVYQSGNFQAKNTRMSKRGSKALRFALVNAAHNVVKNNSTFKSYYDAKIAEGRCHYNALGHCAGKLVRVIHKMLTDQVEFNLH

SEQ ID NO: 478600 - protein, 402 aa, unidentified
MNAVGIDVSKGKSMVAIMRPFGEIVSAPFEIKHTASDIHSLVELINSVEGESRIVMEHTGRYYEALAHQLSEANLFVSAINPKLIKDFDNDSLRKVKSDKADAVKIARYALDKWQNFKQYNVMDELRNQLKTMNRQFGFYMKHKTAMKNNLIGILDQTYPGVNTYFDSPARSDGSQKWVDFASTYWHVDCVRKMSLNAFIDHYQNWCKRKKYNFSQSKAEEIYGKAKELVPVLPKDDITKLIIKQAVNQLNSASTTVESLRTLMNETASKLPEYPIVMAMKGVGASLGPQLMAEIGDVSRFTHKGAITAFAGVDPGVNESGSYEQKSVPTSKRGSSDLRKTLFQVMDVLIKTHPQDDPVYQFLDKKRAQGKPYYVYMTAGANKFLRIYYGRVKEYLSSLPES

SEQ ID NO: 478601 - protein, 399 aa, unidentified
MLETIPLEVRVSVDIGCHQHSVAIGLSSGEVLEEFDIVHQAEGFAHFFSRLERYQHEYSCPVAVAMEGYNGYARPLDTMIRARDYRLYNINNLKLARFKEIFPAAAKTDALDARKGLELFQLRDHLPTAKDVLQEVAASPEENAILKRFTRRRRHLVREKGRVLNRLQGDLQAVCPGLLEMTNDAGNLWFLRFLTSRPELTQLARLRSNSLRKIKGVGATYTREIQAWQKHAVFSHEVDWVGDMIQADATRILELLSQIQALEAKIDAVAQESVIATILDSIPGFGRICSAELAGEIGTIERFRSDASLGVYIGMSNLDNSSGRIQGSKAPKHVNTRAKAAMMIAVDRHRKRVPESQRFYEKKRAEGKKHNQAIRALGRHLCRVIYKLLKEERAYKIRD

SEQ ID NO: 478602 - protein, 413 aa, unidentified
MQVMIERAAGLDVHQETVVACVLIGKPGERPTKEVRTFRTMTRDLEALREWLLSLGVTHVGMESTGIYWKPVYAVLEGSFELIVGNARHIRNVPGRKTDVKDAEWIADLVRHGLIAKSFVPPPPLRELRDLLRYRRKLVESQAAERNRLLKLLETANIKLASVVSDVFGVSGRAMLKALIEGTASAQAMADLAKGQLRRKRADLVLALEGRVEEHHRFLLGLQLRRLEAAEEEIAALDARIDEKLEPYRAPHALLMQIPGVDRLVAAVLIAEIGIDMSVFLSVYHLASWAGVCPGNHESAGKQKSGRARNGNVHLRTMLVGAAISASRAKGSYLKDKFYRLKARRGSMRAALAIAHKILVAAYHMLAKGVGYREIGEADLDQISQTRTVANLKRRLERLGFHVTLQSKAQPAA

SEQ ID NO: 478603 - protein, 341 aa, unidentified
MPGPRARIRKVGQPDSPSTSRKEPVKSESEVFVGIDVSKARLDIHVLPSQQAWSTANESPDLDDLVARFAALNPTLIVLEATGGLERRALALLLAAKLPAVAVNPRQVRDFAKATGHLAKTDTLDAAVLALFAERIRPAVRPPLDEQTQELDALMVRRRQVVDMITAEKNRLAAAPPSKRVVQAIRKIISCLQKQLDEIDTDINSAIRNSPAWKAKDDLLRAVPGVGKVVARTLLAQAPEIGSLTRKKIGALIGLAPLNCDSGTYRGRRRIWGGRAQVRAVLYMGTLSAIKHNSVIAAFHARLIAAGKLPKVAIVACMHKLLTILNAMLRSNSPWSPGISS

SEQ ID NO: 478604 - protein, 339 aa, unidentified
MRIVGGLDVHRAQITFDYVDLATGDQERGVIRPATRTEFRAFLEHFGNKEGAFALEGTTGWRFVVEELRRAGMEPHLAEPAETSFQRGPKRRAKTDRADARLLRDLLLMGRLPESWIPTDHIAELRTTVRLRKALIDERTAWLARIRAQLFHHGLPIAPDLMTYVGRQWLDEAELPAAARQVLDAGCRMVDRIDDEISEIDRELATIARRLPGCEVLQREWGVGHVLSVTILAELGDTRRFSSSRQAVRFAGLDVTVRASDTKRARGHLSRQGSPLLRWALYQAAGGAWRTRSPDHAYYLETKKRLGATQARLSVARRMLRRMHHQLVQAGETVFADAA

SEQ ID NO: 478605 - protein, 344 aa, unidentified
MEYFAGIDISLRSCALCVVDCKGTVLLERDLPCEVVEIAECLGAFPHPIERVGFEAGTLSQHLFFGLKAEGFDVVCMEARQVNAALSAMRNKTDKNDARGIAQVLRTGWFSPVHMKSREAHGVRALLSTRKALLKKTMDLANEVRGLLKIFGIRLPMTVKHGSFDGVVRPLIEMDDVLVHALEPLLDARVVLYQHFLELDRRVKRAASQDEVCMRMMTVPGVGPIASLTFKAAVDDPTRFKRSRTVGAHFGLTPRRYQSGEHDNPGRISKAGDRDVRATLYAAANALLMRTMAGSQIKSWGMRLMRTKGRRRAVVAVARKLAVLLHRMWVDGTEFRQDQVRGKA

SEQ ID NO: 478606 - protein, 349 aa, unidentified
MSQQCSPAIARMGIDIGKSVFHVVGLDAKGKPVFRNRFTRERLLEFLARASPTIIGMEACPGSNWLARKAIGQGHQVRIVPAQFVKPFVKSNKTDIVDAEAIAEAISRPTMRFTQPKTEAQLDLQALHRVRQRLVSSKTAIVNQARAFLLEYGLTIGAGPAYFVRDMPSILADDGNGLTPAMRELLQEQWQEYRSIEARLLQLRRQIEAIAGADDVATRLISVPGIAHLTATAITAFAGTGTQFKSSRHFAAWLGLVPGEFSTGGKQHLLGITKRGNPYLRKLLIHGARACVLHLDRTKDHLGLWISQMEAKGIHRNKVIVALANKLARIAWTILTRRGTFYLRQPQAQ

SEQ ID NO: 478607 - protein, 337 aa, unidentified
MKYCGIDLHGNNSWEVIIDEQDRVLYSRRHANDLPRLLAMLEVHRSELSGIVVESTFNWYWLVDGLQEAGYRVLLANTAAIKQYDGLKHRGDESDARQLAHLLRLGLLPQGHIMPKAARAVRDLARKRMQLVQQRTAQILSIESSLSRHSGWKLSSNRIKCLRQADLDEMRLDEMPMLGLKANVAVMQALQTQIDGLEKVLADYCRAEPGYQLLRTVTGIGEVLATVILLETGGIERFAEAGNYASYCRCVGSAHLSNGKKKGEGNTKNGNRYLAWAFVEAANFAVRSCEAARRFYQRKKAARNNAVAIKAVAHKLARACYHMLKTQQPFCVERCFA

SEQ ID NO: 478608 - protein, 368 aa, unidentified
MDRLLKTSPTHSISVNEESSGRVLDQSDRRFVRKVTQVGSTPATYTLPIGERVMQTPVDIGADISKDYVNVSCATHVFPNAKLLNRRAVLLAWLKRLPAGTRIGMEATATYHELLASLAHRLGLVVYVLNAKDVHHYAKATAQRAKTDRVDAALIARYVAKEHNQLHVWYPACPAQRQLQRLMRRRGKLTRTRASLRSSLQGVPSLRSDLRALLKHFDSLIAKLDTQARALVSRNVEREQAFGRLDDIPAVGNAVGIALLATLERWALPRANSFVAFLGLDPRADESGTRHGRRRLSKRGDPELRRLLYTAAMSASRTRVWAPLYQRAIARGLSRVQALVVLARHIARTAWSIYTHKPQFEPARVKNS

SEQ ID NO: 478609 - protein, 339 aa, unidentified
MFIIGIDPHKGSHTAVAVDRSETVVDTIRVDADRHQRSRLLEWATRFEPRSWAVEGATGMGAMLAQQLVGAGEQVVDVPPKLSARVRLLERGRIDKTDPNDARSAAIVAWRTPALNIVTASDEHRVVLRLLADRDHQITAQRTRSICRLHALLCLLIEGGTGRSLTVTRDEELLASVHVDGPITAERIATARQLLDEVGALDTARVEVRRRHVTALEASKTTVTEVFGIGPLMAAIIVGRVGDVRRFPTSGHFARHNGTAPIEASSGPTKRHRLNPRGDRQLNHAIHMAAVTQVRNDTPGRAYYLRKQAEGKSRKEALRALKRRISDTVYQRLLADVDR

SEQ ID NO: 478610 - protein, 313 aa, unidentified
MAASEVFVGIDVSLAELVVAVRPTDETWTAANDEAGIAALLERLRPLAPTLIVLEATGGYERAVVGALTTGHLTVVVANPRQVRDFVRATGQLAKTDTVDATILALFADRIRPEPRALPDAATQALAALVARRRQLLDMLTAERNRLGHAVPVIAKDLRRHIKWLERRIEDVNRDLDKQIQASPVWRAKDDLLQSAPGVGPVVSRTLLAAVPELGHLGHKALAALVGVAPMARDSGTWRGHRTIAGGRSAVRAVLYMAAVVGIQHNPVIRGMYRRLVAAGKPKKVALVACMHKLLTILNAMVRSNTAWRDAVA

SEQ ID NO: 478611 - protein, 348 aa, unidentified
MVHFVGLDVSVKETSVCVVDDAGKVIFEQKVLTEPADIIALLTSLGVTYGRIGIEAGPLSQWLVNALTAADLPVICVETRHMKALLTAQQINKTDRNDARGIAQMMRVGLFKPVHVKTLVAQEQRMLLTSRKLLQRKLLDIESDLRGTLRNFGLKVGVVSGGRYEARVRELVAGFPRLAAIVEPLLSVRRVMRQQFAVLHKMLLDTVRGDLVCRRLMTAPGVGAVVALTYRATVDQPQRFVHSRAVGAHVGLTPKRYQSGEIDYDGGVSKCGDALLRTMLYEAAHSLLTRNRKWSWLKAWGVRVAQRRGMRRAIVAVARRLAVVLHRMWVDGSEFRWSKDSTAVPAVA

SEQ ID NO: 478612 - protein, 403 aa, unidentified
MNNIAGIDVSKGKSMVSVLRPFGEVVAKPFSIGHTGSELKELADFLKSLDGETRVVMEHTGRYYEPVARFLHEEGIFVSAVNPKLIKDYGNNTLRKVKTDKADARKIARYGLDNWAELRQHTPMDTIRMQLKTLNRQQGLYTKTKTMMKNNLIALLDQTYPGVNALFDSPVREDGSQKWVDFATTFWHVDCVRSMSLTAFAERYRKWCKRHGYNFSQSKAVEVHTRAQDLIAMLPRDALTKTMVRQAIDALNAVSASLERLKAEMRTLAAQLPEYPVVMAMRGVGDSLGPQLMAELGDVTRFTHRNAITAFAGVDPGADQSGTHEAKSTRVSKSGPPELRRALFLVMDCLLKTQPQDDPVYRFMDKKRAEGKPYLVYMTAGANKFLRIYYGRVKEYLAQLENS

SEQ ID NO: 478613 - protein, 345 aa, unidentified
MMVIGIDAHKRSHTAVTVDEMGRQGFVKTVGTTTQDHLRLLKWAVGVAEERLWAIEDCRHLTRRLERDLIAAGESVVRVSPKLMAHVRDSARSYGKSDPIDALAVARAALREPGLPIARLDGIEREVRLLVDHREDLVAERTRIIARLRWHLHELDPGWTAPTKLERHSAFDKVQAHLSDHNDGAMVRRLALRLVEHLRLLTDEIDELTAEITVRVTRIAPSLLTIVGCGALSAAKIVGETAHAGRFRSKDAFARHNGTAPLPVWSSNRQRHRLSRTGNRQLNAALHRIALTQARCYQPARELLDRRKNGGDGGREGLRVLKRRLSDVVYRAMLTDETGPLPRTA

SEQ ID NO: 478614 - protein, 343 aa, unidentified
MERYVGMDVSLKETSICVVDSEGEVVCEGKVMSDPTAIAGYINDRAGGAKRIGLETGSTTTWLWHELRALGLPVVCIDARHAKAALSMQINKSDRNDALGIARIMQCGWYKEVSVKRLSCHEIRAVLNSRAQLVKIKCDLENQIRGLLKNHGLVIGKAGGTVFHRRVEELLDRHGLLRDAVRPLLEVRATIGQKIAALHQQLLRLARDNEDSKRSMTVPGVGPITALAFHSAIDDPHRFRRSRSVGAYVGLTSRRYASGEVDWSGRISKRGDQLLRTYLFEAAGVLLTRVPRWCKLKAWGHRLWKRIGFKKAKIAVARKLAVLLHRMWRDGTDFIWSNKEAPA

SEQ ID NO: 478615 - protein, 367 aa, unidentified
MKTVKYIGLDVHKKMIAIAIADAEGEVRSYGMIENNLSALDRFCRQQVSSGCELRFVYEAGPCGYGIYRHLKSKGFDCIVVAPALIPRKPGERIKTDRRDAVKLARLYRAGELVAIYVPDPQDEAMRDLTRAREDACLATRKAKQRLKSFLLRHGQIFTGRSPWSNAYWNWLAAVSMAHAAQQIVLQEYIDAVHESEGRVQRLTEQIRQLLPQWRFAPLVEALQAMRGVSLIVAVTTVAELGDLRRFDSAEKLMAFLGLVPQLYASGDTIRSGAITKTGNGHVRRVLVEAAWAYRLPARISTRLRQRQDSIAEPVRQIAWKAQLRLCARFRQLAGRKKIKPVIITAIARELSAFMWDIAKHVTVIGV

SEQ ID NO: 478616 - protein, 412 aa, unidentified
MQDILTCAMGLDVHRDIIVACLVKGAVDAEPEAETRTFSTLIPEMQKLRDWVIESECRNIAMESTGIYWQPIYEMLESCFDGEISILVVNARHMKNVPGRKTDMKDAQWIATLLRAGLLKGSFIPDKAFRELRHLTRYRKSVVHDITAQKNRIDKFLQSSGFRFTAFLSDTFGASGRNIIRHLIEHGSIDREALDKCLKTKTRNRIDEILVALNGSLSEHQRRFLNMVFRHLEDLEAHKHTVEDEITEEVLKHTDALNLLCSIPGIDVTAAAAIIAEIGTDMSSFPDSQHICSWAGLSPGNNESAGKRKSVHINKGNPYLKSMLCEVAWIMASHRKLYLSGWYWKVKQRKGAKRATIALARKILSIIYTMLKTGTPYNEECFEQRRLRCEWKRANRLVNELQRLGYVVTAPG

SEQ ID NO: 478617 - protein, 419 aa, unidentified
MSFKILKFNCCGLDVHKTWIYACIGITDSNNRTEYKQARFSSFTKGLNELCDWLAKYNCKDVCMESTGKYWIPVFNILEQHNLWVTLSHPKYTKPMKGNKTDRKDAKWICDLYMCGMVKPSFIPPADIRELRDLVRYRYKLTCMITGEKNRAQNCLTVSNLKLDDVFSDVFGKSSRSITEQILQHPGEKFDVALFVHGRCKTPIEEIQAAVDGAISIEQAVKLRQCLDHIDELNRHISEVEQEILRLSDKYEATLNLIRTVPGFDKNPMTAVQVLSEIGGDMSVFPTAKHLVSWAGCCPRNDQSNQKIKSTRISRAGSYFKPVLVQVANALIKSKKHLEFTNRYKRIKARRGHKKAIIAVCRMILTAIWHILSDLKPYTAESFLESRPVKEKKVLSTSQALNLLKQRGYIIKDEPLVVS

SEQ ID NO: 478618 - protein, 351 aa, unidentified
MQYYVGVDNHKKFSYLSVMDKQGVVVKEGKVVNTKEAVNKFLGKEYTRDTSAVLEAGRNWTVMYDWLEEELDEVKLAHPMKVKAIAEAKIKTDKIDAKTLAHLLRCDLVPEAYVAGKDTRIAKNILRQRMFLVKLTTMVKNRIHLIIDRHPEAKGQIDPSDLFGKQGLEWLKLVTLSKEDRRILDGEIELLEYLRQRIDASDHWVVQLGKDNIHVQLLMTIPGIGKFFALLIATEIDDIARFRDKNKFASYAGLIPSVHASAEKRFYGRIIGHGNKYLRWAFIEAVWPAIRKDLSLRELYESFKARKGANKAKVVVARRLAIIAHRVLSQRKPYQVNYSGCPHNFLAEATV

SEQ ID NO: 478619 - protein, 423 aa, unidentified
MKPAIEPSFTALVGIDWSDRKHDFCLQAAGSSQREFGVLVHSPEAIALWAKALYRRFGGPIAVCLEIAKGPLVHALQRHEFIVLFPVNPATLAKYREAFVPSRAKDDPTDAQLALELLLRHRDKLQPLQPQGPDMRTLATLVEQRRLLVGDKTRITNRLGGTLKEYFPQALDWFEDRDTVLFCDFLQRWPSLKHAKRARQATLRSFFSAHNLRRASLIEERIHGIRSATALTDDPAVLGPHQLLVQALVAQLRVTLQAIDHFDAEITAVAKRLPDYALFAALPGAGSILAPRLLVAFGEQRERYASAAQLQQYAGVAPVLERSGNKCWVHWRLACPTFLRQTFVEWAGSTIPRSFWASVYYHRQRAKGSSHQAAVRALAYKWIRILYRCWQTRTPYDESVYLLALKHRGSPLIAAMATTPQNT

SEQ ID NO: 478620 - protein, 337 aa, unidentified
MHKHFWHITALVEGDIVLAVTLARANHDSFKKVLTQFEGNYVRIVYEAGPGGFDLYDRLTTDGIECIVTPPSLIPIESGNRVKTDKKDSLKLAKLLESNMLKKVWVLSPEERAHRQLVRTRRQIVNHRSDVMRQIKSLLLFHSIEIPFPSNQQWSGPFTRWLHDLDLGNEYLNRSLKALIDLFDYLSTEKKRLTHDVIQLAREEKYASRLKLLKSIPGIGALSAMEILVELQDISRFKTADELAAYLGLTPSQYSSGEHIRMGHITHAGNDRVRTTLIESSWILIGKDPKMRWKYENIKHRRGGKKAIVAIARTLSVRIRRMLIDQVPYEIGLLKAA

SEQ ID NO: 478621 - protein, 344 aa, unidentified
MGEVSTIGLDIAKAVFQVHGVDGSGAVVIRKRISRAKVLEFFADVPACLIGIEACPSAHHWGRELAGLGHTVKLMPPSYVKAYLKRSKNDANDAAAICEAVTRPSMRFVPIKTKQQQTALMLHRTRQLLVRQRTMLSNALRGHLAELGIVSAKGRNGTTELLKIIADGADNRVAASARGILNVLARQYSALGAEIGSIDKGILTLHRSCEASRRLAEIPGIGPIVATALVAEIGDWRAFASGRNLAAWIGLVPKQHTTGGKDRLGSITKQGNRYLRWLLVVGAMAVVRYAKKHGTKNRPWLGQLMERRPTKVAAVALANKIARVAWAIMVHGDRYKEPKLLMAA

SEQ ID NO: 478622 - protein, 339 aa, unidentified
MTGGVDTHLDLNVAAALDPIGGLLAVADFPATSGGHRRLLDWLAGFGPVTRVGVEGTGSYGAGLARYLRAAGVEVVEVDRPNRQARRRAGESDPLDAIEAARAALSGRACGVAETRDGNVEAIRALVVAKRSARSVKIKTLNQIRHLSFTAPDQLRERLKGVSRQQLAARAAALRPSPREGADPVLMATKTALRILGRRVLALDEEKARIDALLSELVTQTAPELLTLHGVGIDTAASLLVTAGDNPGRLRSEAAWAHLCGTAPIPASSGKVTRWRLNRGGDRQANCALWGIVITRLRNDPRTQACMTRRLAGGRSKPEVIRILKRYVAREVYHHLPRP

SEQ ID NO: 478623 - protein, 371 aa, unidentified
MDAPTFDGINVPEWKCQQPLEPEGAPTMQITTIGIDLAKNVFQIHGADQRGKAVLRKQLRRDQVAPFFANLPPCMIGIEACSSAHHWARKLQALGHTVRLMAPQFVKPYVKSNKNDVADAEAICEAVGRPTMRFVPIKNAEQQSVLSLHRVRQAFVKARTAQTNQIRGLLAEYGLIVPKGIGFIATRVPDLIEDASNELPGLFRQLIDRLLEHLKLLDQQVDEIEVQIKAWHRDDETSQKLQKVPGIGPITASALAATVGNAKNFDNGRQLAAWLGLVPRQNSSGGKQTLLGMSKRGDAYLRTLLIHGARSVLYRASQKNDTESWLVKLATRRNANVAAVALANKTARIAWALLAHDREFRPDYTAATAAA

SEQ ID NO: 478624 - protein, 329 aa, unidentified
MSNLLKKVIGVDVGSKFLTLSFLDDEKGEQVLNLPNNERSILSFLSKISPSDYCFVIEATGNYSSRLLHFSIGKGFESSLINCMSVKHFARMKNIITKTDAEDAKLIRNYGEMFRPEFYIPKTQDIEYLDQEIKLLNDLEEEKRRYAVKLKALRFHPVLNPSTEKHYEKRLKQLEKEIKEVEARLPQLQDEEFTETKNLLQSVSGIGEKTSLQLMTATSGFRNFHSSKSLVKYFGLAPRIYQSGKKSYSPGKCRTSKTYIRSILYVCSWTAIKHNQKCKELYLRLLEKGKAKKLALIAVCNKLLRICFSVVKNKTAFQQDFQNKLKILT

SEQ ID NO: 478625 - protein, 401 aa, unidentified
MREFSPEQHWIETESALERVGNAGQEERHAAYVGLDVHKETITVAVAEPGRGEPVYWGEIANKPKTVEKLLGKLSEAYGGGLLRLCYEAGPCGYVLYRQILASGHDCQVVAPSKIPKAPGERIKTDRRDALKLARLLRSGDLTAVWVPDQEQELMRDLSRARDDMKSQERKARQQLNAFLLRHGHHWPRGKSRWTPAHENWLAGLKMDHPWQQVVLQEYIDAERAAGERVAQLSDHLMRALPEWSLAPVVDALIALRGVDKLAAIVLLAELGDISRFESPRQLMGFLGLVPSEHSSGGRRRQGAITLTGNGHARRMLVESAWSYRFPARQTKHLKGKARNASPEAKKIAWKAQTRLCGRYRTLTRAGKNTKLVCVAIARELAGFIWDIVRQEMPRLALQEG

SEQ ID NO: 478626 - protein, 510 aa, unidentified
MKRRRAYRAVDVKNVVLSEILERVPLGPVTAGVDNGKYEVFVVIRSHDGSFERPWKVANPMEIGLLVGILTDLAAIRPLIVAMESTGTYGDALRGKLAQAGLAVHRVGTKAAHDYAEIFDGVPSQHDGKDAAVIAELAAFGKSSVWPYREPSVEDADMAYWVDWLDAQQDIQRLWTGRLESLLARYWPELTRLLDLTSVALLQMLVHYGGAVAVAADPTASQQLVKWGRATLKAKKIEDVIASAMQTIGLRQGLREQERMRQYAAASLAAYRETQTARRELKRLAQGNEVVLRQARVVGTATACVLRVYLGDPRDYSSGDAYRKAMGLNLKERSSGEYQGRLKITKRGPSIVRRWLYFAAMRQVQDSPVRRWYEAKKAKDGERGKGALVAVMRKLALALHAVGAKGKRFEPWRLFPGHLLARQARQVKRKQKVVALEKAAARVSLEDSGRNDSSVGGSAPKPPGFIALRLIPKENERRAVCSARPSVLASETALGSVPTVALSSAPMEQV

SEQ ID NO: 478627 - protein, 339 aa, unidentified
MAIITTVGLDLAKRYFQVHGVDKQGKVVLKKQLSREGVLSFFVNLPPCLVGMEACGGSHYWAREIGKFGHTVRQISPQFVKPYVKSNKNDANDAEAICEAVSRPSMRFVTTKSIEQQDIQALHRIRDRLVGNRTALANQTRGLLLELGIAMPQGIRHLRTMLPIIIEDMDNNQTLLEKDYLSDLYSELVELDAKVAAYDAKLAAICKQSAECMRLLKVPGIGPLSATAIVAAVGQAKEFKNGREFSAWLGLVPRQNSSGGKTKLQGISKRGDIYLRTLLIHGARAVAYRGSSGNDARSQWLRAICDRRGMNRAVVARANKTARIVWAVLAKGEAYKEAA

SEQ ID NO: 478628 - protein, 408 aa, unidentified
MNPLFVGIDVSSRNNVAYLMKPDGSKHSSFSVQNNLGGAKLLSERIVSALGSMQLSDVVIGLEATSIYGDSLVYALREDGRLGQFQRKIHVLNPKQVRKFKEAYPDLPKNDWVDAFVIADHLRFGRIAREVYMDDYRYKALQTLTRARFEVIQNLTREKQRFANYLFLKCSGMAQDKDIANSSSTTIALMERFETVDDLANSDLEELTAFVTETGRGRFADPAATAKAVRAAAKGSYRLPKTVNDTVNQAMSVSIASMRALKEQVKVLDKAIEQQFEIIPNTLTSIPGIGKVYSAGIIAEIGDIHRFDSQASVAKFAGLVWHKNQSGEFEAEHSRMIKSGNRYLRYYLLEAANSVRRCDSEFRRYYDLKFKEVNKYQHKRALALTARKLVRLVFRLLKDNRLYIPPEG

SEQ ID NO: 478629 - protein, 469 aa, unidentified
MTSWVCGAVSPFDSGTLGPRPGAVHCCLEHATQTLVRLAVPRSRSSCTGRRTVRIMDTLVERCAGLDIGKADLKACVRTPGKNARRVREIRTFATTTVGLLQLRDWLTGHQVTVVGMEATGDYWKPVYYLLEDTFEVQLLNARHMRNVPGRKTDVADSAWIAQLIEHGLVRPSFVPPPPIRRLRDLTRYRTAVVQERTREIQRLEKVLEDAGIKLSTVASHTLGKSSRAMIEALIAGERDPQVLADLALARMRNKIPQLRQALLGRFTDHHAFVCRTMLERIDTAENTINKLTERIEQEIAPFHQTVTRLMTIPGVSARIAQILVAETGADMTRFATAAHLASWAGMCPGHHESAGKHHGGATRKGDSWLRGALGEAATAAARTKNTYLQARYRRIAARRGTKRAVVAVGHTILTSAWHMITAEIDYADLGADYYQRHQDRRAATIRLVGKLTQLGYRVTLDDAATVAT

SEQ ID NO: 478630 - protein, 487 aa, unidentified
MSKRVQKRQERKRVQPKVDWKALAVVHPDAAGIDIGGSEHWVAISPDRDEQPVRCFDCFTADLEQMADWLAARGVRSVAMQSTGVYWIPVFEVLQQRGMEVYLVNARHTKNLPGRKSDIAECQWLLKLHTFGLLQNSFQPSDEIRAVRTLWRYRGGLVGQASSTIQRMQKALIEMNIQLSNVLSDLSGVSGMAIVEAILEGKRDPQELAALADPQVKASQEVIAKSLHGNWRSELLFVLGQEMDSYRALRKRIAECDGKVQQHLQRMGSRVDLSVQPIGPRPKGKRARGNAPQTFDLRSELYRLTGVDWSQVDGIDVQVAQTVIAEVGTDLKAFPSEKHFANWLGLCPTNDSSGGRVLKRRTPKVVNRAKTAFRQAASTLIRSHSYLGAQYRRLRTRLGAPKAITAMARKLACLFYRLLTKGQPYVDRGAHYYESHHREQQIRSLIKRARQLGLQVLSGNGQPLGLTGSFPGGPIRMTVPAPWFLVS

SEQ ID NO: 478631 - protein, 388 aa, unidentified
MYYCGIDVAKRKHSAMVLNEKAETMQQNFTFKNDREGFDKLLSLLKPFSGDLVVALEATGHYWLSLYECLSTANYPVVVLNPLQVHAYQRSGIRKRKNDRIDAFWIADYARIANQKATVKQAPELMQLRELTRFRFRLTENIGNCKRKLLTILDRVFPEYETLFSSVFLTTSKQLLAKAITAQEFADFDLQELTELLSRASRGRFGQDKAATILEKARHSIGISTFSNSARVQVQCLLAQLNLLEEQCQEIDKEIEILMAQLPQHITTIPGVGAVTGAAILGEIGDIHRFDAPEKLVAYAGIDATVYQSGNFEATETHMSKRGSPFLRVALWQTASMAALYDPQLKEYYQKKKAEGKHHGTAVGAVARKLLARIFIILKENRPYEIRY

SEQ ID NO: 478632 - protein, 402 aa, unidentified
MRYIGLDVGRDFAHAAVVEGTGSARKLGRLRMGEELAAFAATLGPDDAVALEASGNTWALAELLGRHAGRVVVSNPLRTRAIADAKRKTDDIDAATLAELLAADYLPAVWIPDEATRRLRRIVAHRAGLVRDRTATRNRVSAILGRRLVRSPLSDPFGSRGRAGLAALELPPDERLALDSALRLNAVLDAEVDLADRAIATALIDDPRVRHLLTIPGIGLVTAAGILAVVGDIGRFPRPAKLVSYLGLDPQVRQSGDRPAHPGHISRAGQAHARGLVTEAAHAAVRAPGPLATFFLRLRARRGGGIAIVAVARKLAVLVWHLLTKDEDYRDARPDLVRAKQRALGRLAGRATARTRPSHRGATGSSHDQGRARLRGGDDPHHPALRHAIDRVQLDDTPVPGA

SEQ ID NO: 478633 - protein, 301 aa, unidentified
MNKDSTLFVGLDLGDRWSHLTILDPEGEVVEESRVPTSGGAMQRKFSALAQARVAMEVGTHSRWVSQALRDLGHEVLVANARKLRVIFDNPRKGDRADAHTLARLARLDPKLLFPIEHRSPQAQADLDVLRSRDALVRARTLLINHVRGVVKSTGARVPAGSASSFPSKAAGSLPEALRPALSPILDTVRALNLEIGSYDRQIEDLCSSKYPECQRLRSIQGVGPITALAFVLTLENPKRFEKSREVGPALGLVPRRDQSGGQDPQLHITPGLPQGRQDGQHVPASSFGQLSPVHPWTLWA

SEQ ID NO: 478634 - protein, 327 aa, unidentified
MDERSKIHVGLDVHKDSITVAAADPGRDKARLIGKVAHELPKLLKVLARMGAPQQLHLVYEAGPTGYGLQRALTARGYCCDVIAPSKTPRQAGQRVKTDGRDSLALAECSRAGQLSEIWIPDPADEAIRDLARAREDAVNSRRQVRQQLKGFLLRHDRRYGGKTSWCGTHDRWLAKQSFEAAAVHTAFTEYWLAVKSADERVQRLSQALQSSIAGWRFESVVQALQALRGVAAITAIGLVAEIGDLTRFEHPRKLMGYLGLVPSEHSSGERTSRGRITKSGNGHARRLLIEAAWNYRFKARVGKEINARQEGLSEAVRTMAWSSSSA

SEQ ID NO: 478635 - protein, 370 aa, unidentified
MLNTTTFVGLDVHARSIKAVALDAMTGEVRSATFGYDAAEVAGWVSSVDPSAKCVYESGVTGFDLQKRLASMGIDCVVGAVSKMIKPPADRKRKNDRNDAEFLARMLSVGNVVEVRVPDDGCEAARDLSRALDDAREDLKRRKQRLSKFLLRHGYAFSETTPTGRRKGSWTAAHWAWIKSISFPEKADDDVLAYYVDAVRQAMEDKARLERLVEAEASKPRWKRRIDSVRCLKGIDVTSAADLVFEAGEFSRFKSARSFAAWLGLTPSEHSSGESVRQGGITKAGNKHLRRVLVESAWHYLGCSPHSKDLAKGQVPDPAARRHAAKGVRRLVERRRAMLERGVHKNKANVATARELACWCWAVGRMIENG

SEQ ID NO: 478636 - protein, 349 aa, unidentified
MPKSNTAVATIGIDPGKNTLHLVGLDARGGIVLREKVARARIVSRLANVPPCLIGIEAGMGTHYVTRELLALGHDVRQVPPVYAKPFRQTHKNDFRDALAVAEAVQRPTTRCVPPKTDEQLDLQALHRVRHRLVGQRTAIINQIRCFLLEHGLTVRQRLHWLRHALPDILAQRTDVLSPRMVRILEDLAQDWRHLDDRIETVSGEIEELSKNTEPCRHLMTIPGIGPIISSAVVAAIGNGAAFTRGRDFAAWLGLVPKQISTGDRTILGRITKRGNRYLRMLFMQAARVVLLRPRNWMKNGYGPWLAAAALRLHHNVLATALANKLARIAWSVLAQHRVYEARLSPAAV

SEQ ID NO: 478637 - protein, 426 aa, unidentified
MWDARRRVLKIKSLKHGIIQDKRGNIMRTVFGIDVSKASSEVAILVNGEKIHGYTMLNDAIGFNRLLNDLKTVHNPEIIFEATGVYSRRLRAFLEEYGYAYTQLNPLEAKKQLDSLRVRKTDKIDAEKLAHSQFILNRKPTYAQEEVYQHLRDLSRFYQNLTEDIVRAKNRLHKVLQVTFPELENLLSTPTGEQYWNLVMAFPCKEFVLNLSQNELCKIIRQSTSKRISEKRIAYLTDKLIKLAKQSFCAVKKISPMLEEVRYYAQELLRLSEHRQVVLDDMVALAQPLPEYDILRSIPGIAETTATSIIGELGDIRRFQSTNQINAFIGIDLRHYESGNFLAKEHITKRGNPYARKILFKCIHNIASASHTNPCHIADFYEKRKRQSTIASTKPHAIASIHRLIRTMYYLITHNKLYDYSLTQNR

SEQ ID NO: 478638 - protein, 342 aa, unidentified
MSVYVGIDVHRKRSQVAVIDAKGVVLANRNVPNGVEPILKVIGGLPLGTPAAFEACYGTSWLVQLLEDYGFAPHLVHPSRCKAIASARLKNDKVDAAILAQLLRADLLPEAWIAPPAIRQLRALLRHRVALVRVRTRLRNRIHAIVADYGYDRPAGEYWTGPGRAWLACLPLPAVSRELVEDDLGLIDAMQGRIDRLDWEIRQRARSDPRVKVLTQLPGIGPFTALVILAEVGDISRFASARKLASWAGLTPTVRGSDRVAHYGHISKEGSVWLRWVLCEAAQTAKRHPEFAATFQRIAQRRGKKIATTAIARKLLTRAWHLLTDAKHAAPPHPAAPPAAAR

SEQ ID NO: 478639 - protein, 309 aa, unidentified
MSSWVGIDVSKNTLAVWVRPSGVNFIVCNSSEGHQALLLNLAEIQVERVLLEATGGYERAVMGCLAQAGHSVVRINPRRARAFAQAMGKLVKTDPVDACVLAHLAQVIEPSACQTVSLARDELQELVRRREQVVKLRDDERRRLTLARSGVVQESLQTNISQLNEQIARLNSAIEAAAQRTDNQLVKQLGAIAGIGPVTVASLLAYLPELGQLNRRQIAALAGLAPYNNDSGQHSGKRCIKGGRASIRRVLYMATWSVIRCHSSFGDRYASLRARGKCAKVALVACMRVLLIRLNAMVRDHSSWRAEAV

SEQ ID NO: 478640 - protein, 411 aa, unidentified
MPRVIGLDIHRDFAQAVALDGGNYTQMGRVQLDRDSLTAFGRRLLPSDEIVLEATANTFAVVRVLRPMVGKIVVANPLQVRLIADAKIKTDKIDAGVLAQLQATGFLPQVWIPDQETEILRRKFSRRSQLVRHRTRLKNEVHAILHSNLIVQCPFADLFAATGKKWLGTQNLPEGDREAVERGFRELDRLAADLAALDRDLATQAVNDVRLQRMITITGIDMVSGLGLLAVIGDHKRFESSEKLVSYFGLNPSVRQSGNGPARHGRITKRGANLARSLLVEAAWAASRAPGPLRSFFMRVMARRGSQIAAVATARKLAVIIWHVLHREEEYVFARPSLVGRKRRAVELRAGRPQQRGRRGIAGRYHNPITRAEERARLEQSERAYERVVSGWQPTGPRKPGRSPRQGDDPK

SEQ ID NO: 478641 - protein, 405 aa, unidentified
MDDKKENVMAIDVAKGKSMYYILSIHGEVILDAIEYEHTLSNFRLIDLKIREERIKQELTVFMESTSTYHYPVMRYFLEQGYEVIVVNPNLVKKSSTSFRKTKTDRLDCIKIAETYFKEEIKSNAAKTNDIYFNLMAMHRQFLSLEKALTAIKNRYTRLLDICVPEHELYYKNSADKYNSKYITLFQYIPHTEFIQNTRVDRIANILNLSFTRNYTKRLTKEAIRLKGISKNSYPGVSKYSTEVENLQQIISIMTNLMNEHERAKNRLISLGKQTKEFKHIHSIKGIGEQSASQIIAELGDISRFRSYKQINAYCGLEPSIYQSGKAFHNGKITKSGNGYARKVLYTTIMNIVQSSRSHWPEHPINVYYTKKKENKSTKESVIATSTKLIRIIFSLCKNKTTFTL

SEQ ID NO: 478642 - protein, 328 aa, unidentified
MSEPLAPTATAVTIGIDVSKHHLDAHRHPDGGSRRFVNGPPGHAELIAWIAPLRPGRVVFEATGAYHRGLQKALAEAGLPFVKVNPKQARSFAGAIGRRAKTDAIDAAMLARFGAAAEPEVRPAPDPAMDDLAELLAARRALVKDRVAALNRGKNLTLPLLKRQNLRRLKEIEAQIGEIDREHARLVAKNERLQARFDILLSIPGLGAASALALLVDMPELGTLDARRTGSLGGLAPMTRQSGRWQGKSYVQGGRAQLRQALYMPALVAIRFNPPLKATYQALRKAGKPAKVAIVAVMRKLLVLANALLRDNRTWTAERAKAPAEGQP

SEQ ID NO: 478643 - protein, 228 aa, unidentified
METMHYVGLDVHKKTISYCVKNYQGCALERGTISSTRPALLKWLDGRTVPWLGAMEATMFTGWIYDFLKPHAADLKVAHPEMLKAITVAKKKNDRADAEKLADLLRVNLLPECTMMPAELRELRRILRYRNTSRQAVSYCGLCSAQRESAGKELRGPLSKKRNKYLQTMLIEAAKLAPRWNPQLKIVHERALQKGNRNRATLEVARRLVKYLLAVDRRGTPFVPQSSQ

SEQ ID NO: 478644 - protein, 424 aa, unidentified
MKVTYQTCCGVDVHKSFLVATIVKTTGGIEPSYQKKRFSTFNNSILEFKQWLLDNHCHDVCMESTGKYWVPVFNLLEDDINVVIANPKWVKAVKGNKDDTKDSKWIGDLFRLGLVKGSYIPCKKVRILREYTRYRYKLVSCRSSEKNRYQNALTVCNVALDSVVSDIFGKSSTSIIDYLLEQSGTSINHEEIASKLLRSLKSKEDAVIESVEGYQMTDAQKYRMRLVRAHMDYITAEINDVDKMIENMISSNPDFENAVQFLCTIPGVKRDSAITIISETGTDMSQFSSSKRLCCWAGLTPGSNESAGKKKSVRITRAGVYLKPALVQCAHAAVKSDKSPYYKKKYESLVKRRGKKRAIIAIAHMILTAIYQMLSTGEQWNPSDLYKIDMPVALVEKQKAKAIKQAKKLLQREGLLPPDEPLAS

SEQ ID NO: 478645 - protein, 358 aa, unidentified
MSRCIPIDATAITLGVDTHKDIHVGVALDGVGRHQGTLSVPANPAGYRKLVEWASGFGPLAHAGVEGTGSFGAGLARFLKARGIKVSEVIRPKRRDQYRFGKSDPIDAEAAARAVLAGTATGEPKDADGQVEMIRALRIARRSAVKARAQAVNQIKTMLTTAPEGLKSELCALSTARLVEKTSRLRPGANPSEVETATKFALRSVARRCQRLSEEISELDEQLDRLVAEAAPELLAVEGVGTDTAASLLIAAGDNPERLKDEAAFAHLCGAAPIPASSGKTIRHRLNRHGNRDANRALYVIAVCRVRRDERTRAYVARRTAEGKSKKEIIRCLKRYIAREIYRILSSLSLRKPSISAP

SEQ ID NO: 478646 - protein, 332 aa, unidentified
MAYDFVIGVDVGKYFHHACVLDPQGRQVLSKRINQHEGSLRKLFGKFLTDNASVLVIVDQPNNIGRLTVAVAQDMGADVRYLPGLAMRQLSRIHVGNSKTDVRDAYVIAHAGLNLPDSLRSVDRVEEVFIQLKVLNGIDEDLARAYTRLINQMRSALVGTYPAFEHVLRGQMIHRKWILHLLAKYGDPTKIRRIGKTRLAAFARSHKARNPEPVIDAMLAAIHGQTVSIVGAEYAELGVAMSAKDALAKLEHRKEIEAQVLKLIQDIPQTEILLSMPDIGPRSAAQILMTVGDMSDFPDAAHLASYAGLSPRTNQSGTSIMSNSPNRAGNKN

SEQ ID NO: 478647 - protein, 344 aa, unidentified
MKEVITIGLDLAKNVFQVHGVDGSGDTVMRRQLRRSQLLPFFKKQRPCLVGMEACATSHHWARQLIELGHGVKLMPARYVKPYVKRNKNDAVDAAAICEAVTRPTMRFVAVKSAQQQSVLMLHRTRELLVRQRTMLVNAIRSHMAEFGIVAPVGVPRVKELFAVIADADDDRLPAIARACLEGLANQFLSLHEEIATAERRIHAWHRSNEASRRLETIPGIGPITATALVATITDPSVFTSGRELAAWIGLVPRQSSTGGKERLGRISKQGDQYLRWLLVAGAMSVIRHAKRRGTTSLPWLANLITSKPTKVAAVALANKIARIAWAVLRQGGTYQKPATAAAA

SEQ ID NO: 478648 - protein, 346 aa, unidentified
MKIMRVGVDLAKNVFHVHGVDRTGQSVWRRRLSRGKWLKTVLEKVEPGCEIGMEACAGAHHWARELQARGYPVKLMAAQFVKPYVKSNKNDRNDAEAICEAMSRPTMRFVEVKSVEQQDIQAVHRVRSELVGQRTAKANQIRGLVAEYGLVAPKYLSQLRAVIPNWLEDAENGLTERFRRLLAGLWGDLAELDRRIVELDEEIEAIAKSDPVAQRLQQLRGVGPVIATALVAAVGSGEQFAKGRDLAVSLGLTPKQHSTGGKDRLLGISKRGDPYLRKLLIHGARSVIHHSKDKDDGLSRWIKGLRARRHINVACVALANKTARIAWAMIRNGTEYQPELAAHPVA

SEQ ID NO: 478649 - protein, 400 aa, unidentified
MNPVVGLDVSKGESEVQAFLNKSIPYGKSFKIYHTSEGLKFFLQFLKDLENKTLVKPTIILEATGHYQAPVIQFLEKYNYLYIMINPLVSHQSKKTSLRKVKTDAMDAYNLCTMFYKEELEPYKKRGINLLNLRHLTRQHEAITGMYIQAKLQFHTMLDQVFPEYRRVFGDLFSKVSLNLLNEFPTSEKVLKESEVYLAEKIRSLCKTRSYQWALKKAAKLKEAAMNNPFDKIIYQSHLISLNMFIQMLLQYQEHLSILEEQIATLTKDIEEYKITQSIPGIGEKIAATILSEIGEIERFNHPKKLVAFTGVDPSVFQSGKFNATINRITKRGSTRLRHVLYMAVLCGIRSSRNKRLKEFYDRKRVEGKPAKVAIIACVNKLLHWIYTLLKRKETFLDLN

SEQ ID NO: 478650 - protein, 521 aa, unidentified
MPCPRTSRPSTARRGFVLQQPTGQLTPRVQAVGAEHFGIVAVDCAKARSRYFLADFYGRTLLEPATVAHNRGDFQAAIDRVRQAMRQHQLADLVVAIERTGEYHRPVQHAFRQADFETRLVHPFTSKQYRQPADPGNKTDDTDLAAIWRATTHGFGLLEPTWPDDYLTIQLLRRHRRDLVDKNTILQCQIREVLHAAMPGYAELFCHFWDDSPAPLVFARHTTSADAVRQQGIAGLQQIANQAGLRCRTETLHKILAWAEQAAPASGNVLDRCRILIGLDDDRLAKTRQILELERDLAHRVVHTPYLLLMVIPGINVVSVADLAGELGPISLYVNANAITGRAGLMPSRYQSDQVDCANGPLRRRGNRRLRAVLMQTADNLVQCNHYFHARADQWTRAGKDARWVRVKVAKIFSRLAFAMVAGEQLFPHPCCQKRHYIIGKLLSFHSGHGTELQAMRHDLEVAAAQLPAKQRALEAEPLQKQLDDLANRRGPQPLAEIIPLVLARLAGRVVQSTPSESAGP

SEQ ID NO: 478651 - protein, 373 aa, unidentified
MPRYSTAFGMDVHLRSTTVCALDAETGEAVARRFRGNPWGEVAEWMSGFPGPSLAAYESGYLGFAPQRELSALGVDCVVAAVSKVPRSAADLSSKNDRNDAARMAKAILSHDVTPVWVPSPEIEGLRDLAAAHDAATARLAAAKQRLLAFLARRGYAYGGTTPAGNPRRYWTYDFLRWLDKVRPADDGGIRALAALRNEVEAAAETRDDLLAEYRAAVAAGPLSAEVEALQSIKGCGFALAAAFASEVGDFSRFRSGRQVTAYFGLAPKQRSSADSVRLGGISGAGNALVRRLAVEGSWRYAQAGHQPKLMPKGSGVPLEIRMHGRKGSERLLRRREEMLERGMPQAKANAATAAELVRWLWALGMMCREAGE

SEQ ID NO: 478652 - protein, 431 aa, unidentified
MDTQQFEVIRPKCAGLDVHKKSVVAAVCTSDPITLTASYKTKVFNTTNSDIAALRDWLIAQDCHEVCMESTGKYWIPIFNILEPHMHVILTHPKYVKAIKGKKTDKRDAKWIANLFRFDIVKASFIPPADIRALRELSRYRLKLSYMRTAEKNRYQNSMTISRIRIDCVLTDPFGLSASRIMDYLLSDEPFDEEKCRTLIDHRVKASKDEVMNAVHGYHILEEQKFKMTHAKAHMDFINKSIDEIEAELFLRSRQYDSQIKRIATVTGITELSALFILSEIGADMSVFESDRHLCSWAGLTPANNESASKKKSTRCSKAGQYLKPLLIQCALAAVKSKKDPYFQIKYQHLTKKRGKKKAIVAIARMMLTSIYHMLSKGVDFHPDDYEATVNPKKQKTVVLTIENTLQFLREQGVDPETIKLIQQQCAAQAG

SEQ ID NO: 478653 - protein, 380 aa, unidentified
MKKVYESVASIGVDVHYRFSKVGMRDAQGRLVRRERLDHTNRQQLRRRLAQWPKGVPIVMEASFGWGWLADEMQAAGLQVKLANCFKLEKMRKARGLAKTNDKDADLLSDLPFEKSQWWRVWLAPPEVRNQREWLRLRMDLVALQTMTKNRISAVFHRHGIFHEFSDLFGRGGRAFLAELCRQGRHVDGELPDGALAALRSQVRLLGHVRDQLAAVTHRVRGRLARSELAVRLDRIPGFGLVLVHTVMGEVGRIDRFGNHRRLASYSLLAPISQDTGEPRPGAAPVGRHLGFRGNRTLKWAFIEAAHGAVRRGGRWRAMFDRYTDGGRRNRNHGYIKVARALVKVVYVVWSKGVEYSDSPPPRPGRKQRMQSWMSRPGTG

SEQ ID NO: 478654 - protein, 362 aa, unidentified
MYHIGVDLHKESLTVAVMDDKGVFIRVKKIDTSCIHKIEEFFKEFKESRVLVEAVGFYHWFWDMVNPLVKELVLVNAIEIRKYSLGEPKTDYKDARKLAEVSFNNEVNRNNSLRVYVPDKQLRSLREATRHRHQLARTLAYTRNRFRRYLLKNNLPGPKVLEPGLVERWLKGFEDRFSSFQRFALRQLQDQIISLSRQVKDTDRLIGEIVSDDRFKEVKERIASVTGIGNVIASTIIAEVGDFNRFSTPGQLASFSGLVPRVFQSADECRHGKITKQGSGNLRWVLQEAAWCAIRKNDHVRSIFNRIARRAGKKKAACAIARKILVWLWGMEISKTEFRYHNRPAETLELVLRQNPVGVITR

SEQ ID NO: 478655 - protein, 369 aa, unidentified
MAQVTTIGLDLAKRVFQVHGVDATGTVVVRRSLRRRQVLAFFAKLPSCLVGIEACATAHCWAREITKLGHDVRLIPPAYAKAYVRRNKNDPADAAAICEAVSRPSMRFVAIKTEAQQAAAGIHKVRAMLVKQRTMLINTLRGLMAEFGIVVADGRQHVEELIAVLTDPAEARIEAPLHDGLMAIVESLRSLEQRIERIEKQILGWGRSNPTCRHLTTIPGYGPILSSAMAAMVVEPTAFASARHFAASLGLVPRQDGTGGKVKLGPISKRGNGYLRRLLVNGAMSVLCSKRAKEDPWLMKLLASKPRKVAACALANKLARIGWRVMMRQEDFRSRRMISRTPDPGQPDAVLTALNPASRAPLAVACGPS

SEQ ID NO: 478656 - protein, 373 aa, unidentified
MKSTRFVGLDVHAASIAVAVAEPNGEVRALGTIPHEPEALRKLLRRLGAPQSLRVCYEAGPCGYALYWQLTQLGVACTVVAPTLVPVRAGDRVKTDRRDAAKLARSFRSGDLTPVWVPDAAHEALRDLVRAREAAKRDQLRARHRLQKFLLRHGCRPPAGVTPWTQRFRQWVGALTFANPAQEATRLDYVTEVAHAADRIERLERALDAAVAAVPVTMRRLIEGLQALRGIARVAAATIVAEVGPLSRFERPRQLMGYSGAVPSEHSSGPRTRRGHITKTGNAHLRRVLIEAAWAYQHRPGLGPTLHQRQRHLSEPVKAIAWKAQHRLHSRYRRLTGRGKPKQHVITAVGRELLGFIWAIGVQVEREQAAAVA

SEQ ID NO: 478657 - protein, 349 aa, unidentified
MIATTYAIDTAKNVMQLHWVDLETGEIHRKKLSRTKFIEFFAQLQPARVVMEACGGSHHWARTLIAMGHAVELLPAGQIRPFVRGNKDDMADARAIWVAAGHADIRRVPIKSTEQQATLSLHRTRSHWVSIRTATINSLRGVLYEFGVFLPQGRQAALRLLTQQRADIDATLPALMVRLLTEQLRSLREIDHNIAVLDEEISSVQQSMAAAKTLREVPGIGVMGATALAAALGDGRAWRNGREFAASLGLCPSHTGTGGKVRMGGISRRGDPYLRTLLIAGARAVVARKNCSPWVQALLLRRPTNVAVVALANKLARTAWALIAHNRTYDLQWQSTAPACPPPANPTLA

SEQ ID NO: 478658 - protein, 436 aa, unidentified
MSSSDVLSSPLDASGFASVVGIDVGSQACVYTVLQPDKRIIVKPTEVANRDTGFVQVHASLSHLGVPPQRILIGLEATSRSSENWYQFLAAQGYVLCLLHPRQTHQFAQQRGLRAKTDRLDAATIARVLLSGEARPGSVPDELIATYRELERLHSQLTDDGARYQNQIQALLVVLFPEFVQVFADPCRPTALALLKGYPSARALVKAGVEAVAATLREVAPRRYGRKTAQQLVALATQSSASGLATDARALSLKILCDQLQHTLANLAQVEHELDQVLDRDTGATGLKSTPEFGRNTVAVLRAELGDVTRFQRVDQVVAYAGLDLEVKQSGKWKGEVKLSKRGSGRLRRVLSLAALRSICLPASAFGAYYQRLVARGLKARDALTAVMRKMLIVAYHLHTFVGLLTNSMASTRQDVSDAGVAHRVMWVASSLEDLV

SEQ ID NO: 478659 - protein, 421 aa, unidentified
MNQKTGTPFTAYIGIDWASAKHDICLQEAGSEERVFERIAHTPEAIELWAQALYRRFGGPIAVALELSEGPIVSALEKYDFLVLFPLDPKRLARYREAFVPSGAKDDPTDAEFALDYLMRHPEKLKVLEPESVPMRKLRYLVEARDRIRGDQSRCVNRLVQALKQYYPQVLVWFNEHNTIVFCDFLKQWPTPSKARRARRARLERFFKQHNVRFARLIEERIQAIKAATPLTCDEAVVDAHRLQLEILVEQLRVTIHALKRFDEEIAAVAESLADYQLLFAPLPGAGKVIGPRLLAGFGEDRDRYQSAAQLQKRTGIAPITKRSGNSTWVHWRFQCSKFLRQTFIDFAGQTINKSAWAGAYYRQQRAKGASHNVAVRALAYKWIRVLYRCWQDRTPYDESKYLEALRRRGSPVLKQLAEAA

SEQ ID NO: 478660 - protein, 352 aa, unidentified
MQHFIGCDVHTRNQVVAWIEEETGEIRKRRLEHEGQEVKEFYAQFPPGTVVGIEATFPAYWFERLMGELGHELWVGDAARIRASEVRYQKTDARDAEGILDLLRSGRFPRLWVPSLDERDLRQLLVHRMKQVRARTQVKNQLQALAISQGVCRKRKLWSAKGRAELEKLVLLPWAARRRKELLEWLDRLDEQVRELDRAVEEAGRARPEVALLRTHPGVGMVVGLAFVLSVGPVERFPNRRKLVSYWGLNPREDSSAGRQRLGSISKQGNTMMRWLLIEAAQTAARLDPQLRRTYQRLKRQRNSGVAKVAVARRLVVRLFWMLRTRHNYAQLVHMSGSPSSAVVPPQGGPKV

SEQ ID NO: 478661 - protein, 390 aa, unidentified
MKETEAKRIIGLDMHPDVFAAAALDADPKQPTVDWVQDRLPTAGLEAWAKKQLRKGDVAVLEASGNSFEVAARLHAIGHTAVVLESAQAGKLRDNFCNDDRHSAVKLARIYRSGLAKEVWQPDARTRAHREVFFAHRNAVKDATRARNRIRSFLNEHCVRLATGVRLNQPSGEAVARAAKAWTPLQLELLADAFAQLRQVETRRRKLERVIVQALIAEPRWASLWRMMGIRHRVAFALMAMLGDVHRFPTAKQLVGYLGLAPRKTQSGNNAVGRDHGVGRFGRSDVRSLLIQSAQNALNQRDSPWHKWGWKLLMRKHRHEAAAAVARKITVAVWHLLMGHFTPLVEATDHLRAKLLRLATVIGKDSLKALGFADREAFVTAQIKTIQLSP

SEQ ID NO: 478662 - protein, 315 aa, unidentified
MTSKLFIGIDVSKDWLDIAVHEAGRPIRIANTDKAVAAWSATLVPQAVALVAFEPTGGYERVLRHALVTAGLAFARVHPNEIAAFRIRCGVKAKTDARDALLLAEFAARELSRRGLGPVVEGDPALREMAARRRQLVDLLQAERCRAALVQDEIVRASLTAVTGVLEAALATLEEAIAARIAAQAALAQRAALLQSLKGVGPVTVATLIAELPELGRLTGKEIAALVGLAPRTRDSGKRHARAATGYGRPGIRRVLFNAARAAIRWNPVMKEFYERLVRLNKRPGKVALTAVMRKLLVILNAIARDNQPWKFLTP

SEQ ID NO: 478663 - protein, 358 aa, unidentified
MRKKVKVISFKGQNIYVGIDLHLKSWTITVMVEEVMYKSFSQNPCAKTLANYLHRNFPGGNYFSAYEAGFCGFSVHRELRDNGINNIVVNPADVPTSDKDRKQKEDRRDSKKLSRSLKNHELEAIYILSEEMEELRSLVRYRKTLVKELSRHKNRIKSFLYLKGITIPAELNTASKYWSSTFTKWLKTTETTTSYGTSVLQETIDTAEFLRIKLLKVNRQLRSINDNSNFSKQIRLLRSIPGIGLIIALTFLSELETLIRFKNLDRLSSYVGLIPSTYSSGEKEKIGNITRRSNKPLRSSVIEAAWIAIRYDPALTLKYNELRSRMEPNEAIVRIAKKLLNRIRYVLINEQEYVSSVI

SEQ ID NO: 478664 - protein, 407 aa, unidentified
MEVLYPRCAGLDVHKDVVVACVRCVSTPVQQEVRSFRTTTSDLLNLAEWLNSCGCTHVAMEATGVYWKPVWHILEEDFELVLANAAHIKNVPGRKTDVNDATWIADLLAHGLIRSSFVPPAPIQELRDLTRTRKQLVREVSQHSLRIQKVLEDANLKLGSVLSDVLGRSGVAMLEAIIKGEADPEKLADLAQGTARKKRAELIEALRGRVTRHHRTMLKFHLDVIWALKNTLGELDAAVGKALTSIQERAQLLTTMPGISDIAAQVLVAEIGVDMTRFPDPGHLVSWAGLCPRNDESAGKRRSTRVRKGAPWLKTTLVTAAWAAARTKNSYLQAQFLRIKSRRGAKKAILAVAASMLTAAFFMLRDGVAYKDLGPDHFTRHDKTKTIQRLLRRLSDLGCTVAMPQPA

SEQ ID NO: 478665 - protein, 383 aa, unidentified
MKAVCGLDVHKDSVYLCILSEFGELIEKVFGVLTYQLEEMRDLMLHHHVVEVSMESTSVYWIPIWRVLSPHFKLNLANPYFIKQLPGRKSDVKDAQWIAECTMKELIRGSFVPPEIIQQLRQYDRRIFDLNEEIVRKLSKLDAVLQRCNIRLSNYVSNVDSKSYKAVVRAISQGITAPEELVKLIHGRIINHHGIDVITASLKGVVSLAEIDMISQLRDELDMAEGHKEKCQARMLEICEREFPEELKRLQTIPGIKERAATSLIAEIGTDMNKFETANHLASWSGLKPRNDESNKKIKSRSITHGNVYLRKTIIECAWAASRTKDCFFSRFSFHQTQVRKKNKMKVLVAVARKMLIAVWHVLHDNTIYIDFTTDRKTSRTKG

SEQ ID NO: 478666 - protein, 388 aa, unidentified
MQFAADRLEAPTAIRTDLGAIFISLELSRSSWVVTSLSPGGGEKMSKHTVRGGDVAGLLKRFAQLREKAKGRTGKVFPLIVIQEAGLDGFWIDRVVQNEGIESHVVDPASIATSRRRRRAKTDGIDGEALVRALLAYKRGEPRVCSMVRLPTPEDEDRRRLCRERKVLIAERVKHVNRIKGLLFSQGVSGYEPLRRDRRERLDALQTGDGRPLPPHLKGQVHRELDRLELLIAQIKTVEAERDALLAVEQTTAPVPPAMLLGVKGIGPEFAAVLWSEGLSRPFENRRQIAAYAGLAPTPWQSGSVDREQGISQSGNPRLRTTMIQLAWLWLRHQPDSALALWFHDRVKRNGGRLRKTTIVALARKLLVALWKYVTAGVVIEGAVMKTA

SEQ ID NO: 478667 - protein, 309 aa, unidentified
MDATIVGIDVSKDRLDVHVRPAGEELAFSRDAAGIEALVARLSPLMPRLVAVEATGGFETVVAASLHAAGLPVVVVNPAQVRAFAQALGKRAKTDPIDAAVIAHFAEATKPEVRPLPDAETERLADLVARRRQIIGMIAAERQRDKRATKRMRQSIARLVAALNAELAVLDQDITDAVRGSPAWREKEDLRASVPGVGPVIARTLIAELPELGGLDRRQVAALAGLAPFTRQSGQWRGKSFIGGGRATVRTALFQGALSAFRWNPTLKQFHQRLIAAGKPKMVALIAVARKLLTILNAILRDRIPWQNA

SEQ ID NO: 478668 - protein, 361 aa, unidentified
MAKLWIGVDIGKTHHHVAAVASDGRLVYSRRVANDETALLTVMAEVSTYGRPVCWAVDVTTGLSALLLTLLWRRQVQVRYVSGTVAFHMAAAFAGENKTDARDAVVIAQTIRMRHDIPIVEPSDRLLAELTVLTGYRADLVGQRVATLFRLQELLTGISPALERAVDLNRKAPMMVLACWQTPAAIRHAGVDRITALLRRGHVKNAVQVAEAMVAAARQQTVNLPGQRAAAVVVGQMATEILALEQRIAAVDDLIAEQLDQHPLAPIIGSMPGMGPLLTAELLVHTAGMTEYDSPAKLAAHAGLAPVSRDSGAVSGNHRQPRRFHRRLRHILWMAAFTAARECPTSRAYYERKRAEGKNHR

SEQ ID NO: 478669 - protein, 402 aa, unidentified
MSYYVGCDWASTAHQICVINAHGQIVWQNEVPHTAEGCAALRRRLQRFGAPADVPVAIERPSGLIVDLLLEWGHPVVPIQPNALKASRSRYRISGAKSDASDAFILADLLRTDGHRFRAMNPVADETRALRTLVRTRDDLVATRIGLANQLRAVLEGFWPGAAQVFADIDSPIALAFLERYPTPEGAEHLGEKRLAAFLGRNSYCGRRPARELLERLRRAPTVIVGEANTEASGEVVRALVTVLVDLVAQIQKLTSAIAQAMRVHPDGAIVMSFPRAGCTNAAQILAELGQERLRFPSVERLAAEAGVVPVTVESGKHRGVTFRWACNKRLRRAITIFADNSRRASPWAAQIYQRAQARGCDHPHAIRILARAWLRVLWRCWQSSTPYAVSNHGSAQRLSVA

SEQ ID NO: 478670 - protein, 494 aa, unidentified
MDKRKTETATSATVGKIAGMAKAYRKRCAKAHAKAAAQAAAEVRRVEGLAVVNEHAAGIDIGSRSHWVCVGVSADQDAEVIREFLAYTEGLQEIVAYLRHYQVTTVAMESTGVYWIPLYELLVANGFEVLLVDPSYTKQVKGRPKTDRLDCQWVYRLHSVGLLAAAFRPDEKTCQLRAYLRQRANVIRYAGQHIQHMEKALEQMNLKLTETISDITGVTGQAIIKAIVRGMRDPRKLAKYRDARIKASEEQIAQALTGSYRDEHLCELQLAFEAWQFYQKQLDQVDAQIEQQLGRMEQDRALPPLKPHKRSGGRKPNHPRFDVRRALYYAVGIDLTEIEGIEEMTALTIISEIGIDMSRFATVHHFCSWLGLCPLVRKTGGRVKSSATRPGVNRAAVAFRLAANALHASQGAIGAFLRRKKAHLGAPKAITAAAHKLARVVYLALKHGLTYVRQTQAEYEARVREQQVNSLHKKARALGLEVIETPPPQTPSLA

SEQ ID NO: 478671 - protein, 349 aa, unidentified
MEQNEVILGVDTHLDTHVGAVINDIGRLLGTRSVSTDMAGYLDLLTWASSFGPLRRAGVEGTGTYGAGLARVLRDHEIEVLEVNRPDRAMRRSKGKSDPTDAENAARAVLSGRATAIPKEQSGAAEAMRAVSVARRSAVKAKTQAINQLRALLVSAPQEIRDRLLKVKTAECIKGCIRLRSLGKTPMLQTLTTTLRLLAKRWLTLAEELKSLDTMLDDLTSQHAKRLRERFGVGPQTAAVLVAVAGDNPERLKSEAALAALCGTSPLQASSGKTVRHRLNRGGDRSANNALWTIAMVRMRSDPRTRAYVDRRTKEGMSNKEIHRCLKRYIVRELYPLILADLADSTRVV

SEQ ID NO: 478672 - protein, 367 aa, unidentified
MSSVASPEGPIHLGMDTSKNTIVVATLLPGEQSPVTDRIANEEAAVRRLVGRFADRSVLRAWYEAGPGGYELCRLLASMGVACQVVAPSLIPKGSSDKVKTDKRDSRRLARLGRAGELTPVRVPSEGEEAVRDLVRARDAMLADRKRAQQRLTAVLMRHGRVWRGATYWTAAHRSWIAAQRYGEPALAAAVGYYRATLAVREAELAAVEAELLPWAGREPLAGPVARLGCYRGIAELGALTLAAEVVDWRRFPAARAFMGWTGLVPAEYSSGERTRRGHITKAGSEPVRTALTEAAWAYRFQPAIGAGLRRRQHGAGPDTLARSWKAQRRLHDRYVHLTRDGGKAAPEAAVAVARELAGFIWAEMTA

SEQ ID NO: 478673 - protein, 356 aa, unidentified
MSHDVKYIGMDVHKEAVVIAVLNDSGKLVMETIVESKASSILQFIHGLRGELHVTWEEGTWAAWLYDLLQPQVQQVVVCNPRRNALLKEGSKSDKVDARKLADLLRTGMLRPVYHGENGLRTLRELARSYQTIGKDLTRVMNRLKAVYRGWGIPCGGTQVYAPRYREEWLNKLPQSGVRRRAELLYQQLDGLQTLRREVRPELLEESRKHKAAKLLRRIPCIGPIRAARLIALMQTPHRFRSKRQLWTYSGLGIETHDSAQFRFVGGQLQRSKKPQQLCGLNRNHNHEMKEIFKGAATRASCATGPFHDFYAALLTKGMKPEMARLTLARKIAAVTLTLWKKEERFDAEQLKTQAA

SEQ ID NO: 478674 - protein, 355 aa, unidentified
MKKQCVGVDISKDSFSATLCTRTLNDHIQYSTGKKFENNKQGFNQLVRWAGKEGDKEAPLAFLMEATGVYHEKLAHHLHGIGKSVYVVLPNTSKHFFSSLNIKTKTDAVDARILALFGVERLHQPWKPAKDIYRQMRDLSRYRIQLQEQKTALSNIAHGKEYSHGISADITKSNKKLINILDKEITKIKDKLEELVATDPEVAARIKKICTLKGCAIQSVAGLVGETNGFEGFRNGKQLVSFAGMDIVQHESGTSIKAKTRMSKKGNRFIRHLIHYPAMSASVRVDELKALRNRVMGKTKIPMKAQVAVQRKLLVLIYTLWKNETEYIEGYHQKKIARAKAQATQDILESIPLEA

SEQ ID NO: 478675 - protein, 421 aa, unidentified
MDTLYERVAALDVHKDTVVACVRIMTEGKATRECQTYSTTTEQLEELRKRLKESGCTHVAMEATGVYWIPVFRILDEGPFELIVANAAHIKNVPGRKTDVNDATWIADLLACGLINASFVPDEDVQELRSLTRTRKQLVREQTRHVQRISRTLAEANIKLDSVISDIMGASGRRIIEAMIRGVRQPSQLAELAGKRLKATPKQLYDTLHGRLTDHHRFLLDLHLKQWDVLDETIRKIDGELDQRTASMQKENNDHTPFRSLIDLLCTIPGVSTVSATAILSEIGCDMSRFPSAGHLVSWSGLCPGKNESAGKRKSSRLRKGAPWLKTMLVQCAWAAKRKKDSYYRAQFFRIQGRRGPQKAICAVAASILTAIYHILKDGTEHRDLGAAYFDRPIKTKVSRYIAALAKLGFAVQIQPIPEAT

SEQ ID NO: 478676 - protein, 388 aa, unidentified
MRIVALDLGARKTTYCELSQGQVVERTTVSEVTSLQPLLGPEQLAARVAIEACREAWFVHDLLVEWGNEVVLVDTTRSRQLGIGQHGRKTDRIDAETLARALEVGRIPAAHVLSPKRRELRRVLGVRRALVESRAQLATTIRGLVREQGGRIPSCATCDFVRKVRRQELEAEIAQLIEPLIATVEVVDTQLASIENKLALLCAQEPIVAQLATTPGVGTVVAATFMSVVDEAKRFQSAHQVESYVGLVPSEDSSGGKRRMGAISKEGNSYLRTLLVQAAWTIVRSSDKSDPLHLWVSQLIERRGKRIAVVALARRLVGVLWAMWRDGTVYDAPHLAQQGGRGLRGAVQTIEQQTAALALAAKKGSVKHPSPSTATPRRSRKTPAAKAA

SEQ ID NO: 478677 - protein, 342 aa, unidentified
MQAITVGLDIAKSVFQVHGVDCNGQVVIRRQLKRRYVLTFFEKLAPCLIGIEACASSHHWSRQLLALGHDVRLMPPSYVKPYVKRQKNDATDAEAICEAVSRANMRFVPTKTPEQQSGLVLHRTRHLFIRQQTSVINAIRAHCAEFGIVAPVGRQGVEELLNVIADAEDEQIPEIARACLSALGDQLHRIKAQILEFDRMIGAWHRSCEASRRLDEIPGVGPALATALVASIADPRTFRSGRDFSAWIGLVPKQSSSGGKPRLGSISKQGDRYLRGLFTAGALAVIRYAKIHGIGHRPWLTALLARRPIKVAAIALANKIARMAWAMMARGERYREPVALAA

SEQ ID NO: 478678 - protein, 347 aa, unidentified
MEIAVLGIDLGKNSCSVVGLDGSGRVVLRRRMHRDSVAKLASGLPPCIMAMEACCGAHHLGRLLHDMGHQVRLMSPEYVRPYVKAQKNDDRDAEAIAEAATRPTMRFVELKSAEQLDMQSLHRVRDRLVGERTALINQLRAVLLERGFTAPKGRRKLEQALTVLLGERSELPPSLALSPRLRTLVEDMRAEWAELDRRIAAFDDEFVASAKADAAARRLATIPGIGVLNATALVAAIGTAGTFARGRDLAAWLGLVPRQMTTGGKPRLLGITKRGNVYLRRLLIHGARAAMPSLLTSNTALGIWLRGLVGRVHKNAATVALANKLARIAWAVLRRGETFNAAKLTPA

SEQ ID NO: 478679 - protein, 432 aa, unidentified
MFTLALVLVTIWMIDVLKKKMEKTICNDPQVCRIVDLPVYYELETNNGNRDYRIQIGGHYMNYNTVYVGMDVHKESFTLCSCKYEDEKASHYQRTPASYKNVLRYLAFLRTIYGEDTRFVCGYEAGCLGYSLYHQLENFNVECVILAPTTMLEQRSKRRIKTDKRDAEIIARSLAQHNYSPVHIPTETDNQTKEFIRMRDDHKAELKKIKQQILSFCLRQGYQYDGSGNWTAKHVKWLRSLKPAGLYKEILDEYLLTYTILTDKLNRLDQRIEELASKEEYKESVSKLTCFLGIKTHTALSVIVEVGDFQRFVSARKFAGYLGLVPGQHSSGDDRNGLGITKAGNTHVRRLLVESAQSYTRGKIGYKSRVLRSRQAGNSPQVINYADRANERLRRRYYKMVLKDGKKYNIAKTAIARELACFIWGMMTDNIY

SEQ ID NO: 478680 - protein, 342 aa, unidentified
MLHAGIDMHKKFSVATVVDDDGEEIVRGRRLENSEEEIRRFFDGFDEELTVVLEAGPSWQWMCDLLDELGLDNKLCHPLKTKAIASARIKTDKIDSKILAHLSRMDFIPEAHKADRETRHLRELLRFRASMVRMRASVKNRVHSLLAKLNVKHSYSDLFGKEGTRFLRELTLPSVYREALDGYMKIIGALSAEVKKAEKRVSGEYKGSPEAQLLSTIPGVGPLLALTIASEIDDIDRFHSAKHLSSFAGLVPSTSQSGGNTHHGKITRQGSAWLCWALAEAIIHAVRYPGPLRDFYIKLEKRKGKKVARVAGARKLSTYVYHMLKEKKDYQAVTRYLKSDLE

SEQ ID NO: 478681 - protein, 407 aa, unidentified
MEVMFPRCAGLDVHKKLIVTCVRLVDSGRIVRKKERFGATTAELMRLADWLTQHQVTHAAMESTGVYWKPVWHVLEGDFQLILANAQHVKAVPGRKSDMSDAEWLAELLAHGLIRSSFVPPEGTQELRELTRTRKQMSRSLAKQALRIQKVLEDANVKLSSVVSDILGKASRAILEAIIAGETAPDRLAQLKGQLKATPHELEAALRGRVTENHRFLLRLHLDQVDSIQRAIASIDQRLEQRLEPFREHVDRLTAIPGVSTIIARVIIAEVGIDMTRFPTQHHMISWAGLCPRLDESAGKSRSRHIRKGNPWLKVDLTQAAMAARRAQNSYLRAQFNRLATRRGVKKAVVAVAASILTSAYFILRDGVAYHDLGPDHLDRRDAGKVARRLAKRIEALGFSVDLRPAA

SEQ ID NO: 478682 - protein, 343 aa, unidentified
MQISTIGVDLAKNVFQVHGVDSAGKVVITRQLRRKQVIEFFSKIPPCLVGMEACGAAHHWAREVSKLGHTVRLMPPSYVKGYVKRSKNDAADAAAICEAVTRPSMRFVAVKSTDQQASLMLHRTRDLLIRQRTQLINALRAHLAEFGLVAETGREGVAQLAALITDESDREALPFAMKQALQAIVDQLAALELQVGTLDRAIHAHHRANDMSSRLETVPGIGVIGATAIASAVTDPSNFKSGRDFAAWIGLVPRQHSTGGKERLGGISKQGDRYLRRLLVVGATAVVRHARQHPQKHPWVMRLLAKKPAKLVAVAVANKMARIAWAIMAKGGYYRAPELAAAA

SEQ ID NO: 478683 - protein, 356 aa, unidentified
METDETHMTVSVTKQDENGSVPIDFTAGMITIFPLLYFIREDGDMDNEVIIDKGCGLDVHKETVVACVMGSGIKKEIRTFSTKTNDLLRLKTWLSGLGITHIAMESTGPYWKPVFNVLEDGFTLILANARHIKNVPGRKTDVKDSEWICRLLRSGLLSASFVPPQGIRELRDLTRYRRKLTQALSAEKNRIQKVLEDANVKISSVLSDTFGVSGSQMIEAIMKGRLSEAEMADLAKGKLKSKKEEIREALVGYFQEHHRFMIRASLEHIKHLEKLISDLDQETKKKLAQYPKEYELLQTIPGVKEQGAAAIIAEIGADMDIFPTEGHLSTWAGMSPGNNESAGKKKVERRPTAIRI

SEQ ID NO: 478684 - protein, 450 aa, unidentified
MITEPQEIEDEEHEQVLQRVAAVDVAKDSGKVCVRVPHESKPGRRVSRVWDVDATTRAVIELGDHLVCQGIEKVTVESTSDYWRIWFYLLEAAGLDVQLVNAREARNMPGRPKSDKLDAVWLAKLTERGMLRPSFVPPAEIRQLRDYTRLRTDLVQERTRHWARLEKLLEDALIKVSAVASRIDTLSVRDMIEALIAGERSPRVLADLARGKMKAKRAALAEALTGRFDDHHAELARMLLDQIDQLNAQIARLTDRIGELIGAMPAARGVDADGSAGPSAGTGPDAAVVPALQRLDEVPGIGPGGAQVILAEIGLDMGRFPTAGHLVSWAKLSPRTIQSGATNRSGKTGKGNPYLKGILGEAAAAAAKTDTFLGERYRRLVKRAGKLKALVAVARSILVIIWHLLNDPAARFRDLGSGYYASRTDTGRKARGHIRQLEALGYTVTLTQAA

SEQ ID NO: 478685 - protein, 369 aa, unidentified
MVHSTEVFVGIDVAKARNAVAIADGERGGEVRYLGEVDASAESMRRLVKRIAAKHGLVHFCYEAGPTGYGLYRLISALGYPCMVAAPSLIPRKPGDRVKTNRRDAVALAKLLRAGELTPVWVPDEGHEAIRDLVRARAAAVETVRVHRQQVSAFMLKHGRIFARKTAWGARHLRWLQEQRFDHPAHQIALQEMVEAVRISKERVERLEAAIEEFVPTWSLAPIVQALQALRGVELIVAVTFATEIGDMRRFDSPRQLMGYLGLVPSERSTGDTVRRGGITKAGNGRVRHMLVESAWTYRHPPRIGKAKLYRLEAVPPKVREIAWKAQTRLTARYRALSGRGKKTTVVCTAIARELVGFMWSVAREAQTA

SEQ ID NO: 478686 - protein, 467 aa, unidentified
MKRPQRRRPWKKPGAAGPSLLERINPNAAGIDCGADTHYVAVPADRDATPVRAFATFTADLHRLADWLTACGVTTVAMESTGVYWIPLYEILEARGQDVVLVTARHVKHVPGRKSDVVDCQWLQELHSVGLLRGSFRPTAAIAALRAYLRHRETLVQGAATHIQRMQKALVEMNLQLSVVLSDITGVTGLRIVRDIIAGQTDPHALAQHRDVRCQASEADIVAALTGHYRPEHLFVLQQNLELFDMWHRQLAACDAAIEAYLAPLAAQAPPPATPLPAPRTQPKPRDNAPRFDMRTPLHQLTGVDLTQLDAIGPYSALRLLAEIGTDMRRWPTEKHFTAWLTLAPQNKVSGGRLLSSKTPPSANRAAVILRLSAMSLGRTDTALGAFYRRLAYRVGKAKAITATARKLAILVYRTLKQGLLYQDPGAAAYDAHHRARVLRHLRQRAATLGFALVNRGTGEVLEHAVS

SEQ ID NO: 478687 - protein, 354 aa, unidentified
MSNKSIATIATMGIDIGKNSFHVVGLDQRGAIVLRQKWSRGQIEARLANMPPCLIGMEACVGAHHLSRKLQAHGHDARLMPAKYVRAYSKGQKNDFRDAEAIAEAVQRPTMKFVATKTADQLDLQALHRVRERLVRQRTGIINQIRAFLLERGIAVRQGLRFLRTELPGTLAKRSDVLSPRLMRIIEDLAGDWRRLDERIEGLSADITSLVEKDPACERLMTVPGIGPIISSAMVAAIGTGDVFSKGRDFAAWLGLVPRRISTGDRTILGKISKRGNRYLRVLFVQAAWVVLIWPQSWERHGLKSWIEAAKKRLHHNVLAIALANKLARMPGPFLNKECKFECVTTHAMASRPE

SEQ ID NO: 478688 - protein, 337 aa, unidentified
MTLYCGIDLHANNSVISVIDDHDAVVYEKRHANDLREMRDVLEPLRDDLLACVVESTYNWYWLVDGLIDAGFDVRLAHTGAIPQYAGIKHSNDQTDARHLAHLLRLGILPEGHIQPREQRAIRDLLRRRLLLVRQKTLHHLSLQSLIARQTGERLSANQIKALDNAAIADKLTDPICLGGQLTHLARCWHEQAIAMLEDEVLKHLKPRKEYQLLTSIPGVGKVLASTIVLETGAIERFPDPGHYASYARCVNTAKVSNGKLKGRGNKRNGNKYLAWAFMEAAHYAAIWSPEIKRFYQRRQAKRHILVAKKTVANKLAKACYHMLKRREPFDVQRAFG

SEQ ID NO: 478689 - protein, 384 aa, unidentified
MNTQTIVRNEGEPALTVAAPQIHHVPATIQLGLDIHAKLYVVVAQYDHALPKPPRRFAPEEFMPWVEALLRAGHHVHVVYEACGFGFGLHRQLVAAGAHGYVIAPRKLDEARTGVKTDPRDALTLCQRLSRYLEGNTRELAVIRVPSAEEERARHVSRQREQLVRHRQKLEAAGRGLLVSHSLPAPAHWWKNQTWSRLGKSLPQWVLPHLEVYRPALQALHGQIGALQAQLEAAAPAELPSGLGKLTSEVLTREVCDWSRFRNRRQVSSYTGLCPGEHSSGGKRVQGSVTKHGNPRMRAALVECAWRLVRFQPQYPPVKRRLSVLAKGAKATGAQRKKAIVCSPVDRPPLVPGAAASAVARHLAVDLWRFYTGQCSAAQLGLTI

SEQ ID NO: 478690 - protein, 353 aa, unidentified
MLIIGCDFHPGFQQVAIFDNQTGEYQERRLGHRAEAEQFYRSLAGQQVRVGMEACGHYPWFERLLAELGYELWLGDAAAIRASVVRKQKTDRRDAEHLLDLLRQDRFPRIWVPSLEERDVRQLLVHRHKQVQARTRVKNQLQAMALSQGVQKQRKLWTAAGRAELEQLPMLPYAAQRRQQLLEALDGLDAEIEQLNRRVEAEVATRPAAVRLQTHPGVGPVTALAMVLTLGPAERFASGKQVASYFGLIPSEHSSGGRQQLGHISKQGSSFLRFLLVEAGQTAARQDAELSRFYRRLAGRKHRALAKVAVARKLAVRLYLMLREDWTYAQLCRAVVQASPSHPVVGRQNRALE

SEQ ID NO: 478691 - protein, 387 aa, unidentified
MRAVCGLDVHKDSVFLCILHDSGEIFEKVYGVLTHELRDMRRLMQSHGVTEVTMESTSVYWIPIWRVLEPYFHLKLVNPYFIKQLPGRKSDVKDAQWIAECTQKDLVRGSFVPPERIQQLRQYDRRIFDLDAEIVRKLSKLDAVMQRCNIRLSNYVSNTDTKSYKNVVRKLCEGVTDPEELIREIYGRIINRHGRETILAALTGVVSDAEKDTMRQLRDELDLAEKHKQECMDKMLHICQTYYPNELRRLMTIPGVKERAATSLIAEIGVDMTKFPTAAHLASWSGLKPRNDESNKKIKSRRITHGNIFLRKTIIECAWGASRTRDCFFSRFSYHQTQVRKKNKMKVLVAVARKLLIAVWHVLHDETGYKDFGANNDCETSVANNNG

SEQ ID NO: 478692 - protein, 362 aa, unidentified
MKHVIALDVSKGKSTVVIYDRYRQCEFEGELNHTRVDFERLHERIKEITRLDGQAPEIIFEATGVYSKPVEKFFIDFGYTYCRMNPLEANLQMASMRRNKTDISDAHELTKTHFKMEREPTYVQDDYYEQMRALTRYYDEIDEEVTLLKSRMHALLHVSFPELEKLITPRSALFLNIVQLYPHPALLLAHSKTMIKNRLKVNTRKNLSLARAEAKAEVLLEAAQNSYPAIQENDIRCDQIRDYAARIMDLVEKKEFIVRQMVEMSEGRNEYEVLRSIPGIGDTTACRLIGELGDIRRFQNAKQLNAYVGIDIMRYQSGNTQYRDRINKRGNKKLRKILYFMICTLIRFGKRPITISSIITIN

SEQ ID NO: 478693 - protein, 427 aa, unidentified
MEVIYPKACGVDVHKSFIVAVICDSTGPLPKYYKKRFSTFNNQLISFRNWLLDNDCQNVCMESTGKYYIPVYNALEGYISNLVVANPKWVAVIKGEKDDNKDAKWIADLFKLGIVRSSFIPPKDFRILREFTRYLYKLTCNKTSEKNRFTNALTVGNCKLDMVFTDIFGKSSQSIIETILNNDSFSDKDIISCLHKNCKSSREDILSSVTGISFTHEQKLRIKFVKDHIDYLTNRINELRDIVDTLVVPYEDYITLLMTIPGIDRNSAITILSEIGTDMTQFSSHYKLTSWAGLAPGCNESAGKKKSVKISRAGVYLKPCLVEVAHCAVKDKTNSYYANKFNKISKRRGKKRATIAIARKILVAIYHMLSTGEVWNPTDLASNETSDKDRLKYTKNNFKQSLKQLMSLGLTSDDLIDLIKQQNAKLE

SEQ ID NO: 478694 - protein, 493 aa, unidentified
MTTTAIVSVSDSEQTAITRERVYVGVDVGYRQHVAAASPLSVFTLRNPNGWRRVKTVRFGSDAAGFAQLQRYLDKHSTTATDFLVLLEPTGGYYALALILYLLGKGYRVVQVENRAVKDYREKVFGSETKADETDARLMARMGFLHELVGEEFSIRPVHLTNPDAAALKVMVGDLSTLQKEITRRRNQLQQITAATFPELKTFFRDSTASPTARALLASFPTPQDLAAATTEEIGDVMRVARSYRHAKRAGELRELAKASAGVRMLTQQHWRQSWIIKQIDVLEEARRDLVEQVQRISAEHRYTPIIESLPVKSPIWTATLIAVIGDVGRFRNYAEFRAYIGWSPQVERSGSSLDSSKLARGGVRLSRKVLGQMVMIMLAPVIRTTAFRAYYERLTARGMRPAKAMGHVAGKLSAVLYSMLKTMTPYDEPKHRKELGLAEAFDVVADATVDAPLDFIGSLDDDVEFLEDGAGPTEPQDDAGSPSNVRSLPSLT

SEQ ID NO: 478695 - protein, 455 aa, unidentified
MQLWCGIDWAENHHDVSIVDESGRQRVRLRIDDTAAGFAQLMSVLGEQQAVSSEPITVAIETAKGLLPAALRAASVALVAINPLAVSRYRDRHSPSRSKSDAGDAYVLANILRTDPHSHRPLPVDSELAQSIQVLARAQQDAVWDRMQIANKLRSVLREYYPTFLAAFDDLASKEARATLRLAPSPEQARLVRKSSLSAALRRAGRTRGIPAAVEVIHAALHVEQLRQPTLVESAMAEHATALLRALDTAVANVARLEQSLTVAFDQHPDAQIITSFPGLGSVLGARILAEIGDDRSRFASARGLKAFAGTAPVTRASGMKTLVTRRVVRNKRLGQAAYLWALPLLAHSPGAHAHFTTRRERGDSYSAAARNLTNRGMGMLHHCLQTRQRYDETRAFPNRPEQSVTSGRPPARNAHQETEAHPATPGNNRARKRPVTSIAPPANQARPKTEAQPA

SEQ ID NO: 478696 - protein, 363 aa, unidentified
MQTCERAKTLFVGVDVHKDTHTAVGLSPFGEKLFELTIGNYPQDFAELAEKVKSMAETANLSPRIGLEDCHGFGQRLAEYLDNDGYMVTHVAPILVDHKRKKAAHPEKNDSLDAQGVAEVMIQKIDTLPVNKITQDSQIAKDIQELSLDREYQVKEQTRLKNQLHLLLHRIWNSEYREKFKDPFSVKGLRFWKKSVPKNTSSFLSKNMKRKVKKLEALRLEIKELESDMETLIEKSGHKIHTANGCGTVLAAMIIGEIGDISRFKSPSALAKYAGCAPREHSSGKTHRHRKTRSGNRRLNCAFHRLALSQISRMGNKKAKTYFLRKISEGKSKQQSLVCLRRQIVNIIWMIMKHKTAYNLQKN

SEQ ID NO: 478697 - protein, 339 aa, unidentified
MPYYLGIDLHSTTCVLGMVDQKGGRIFHRKLPNDLPVLLETLRRYKRRIKEVAVESTYNWYWMVDGLREAGYCVRLGHPSAFKRYEGLKYSDDKHDAFWLAEMLRLHILPTAFIYPKAQRMVRDLLRKRAFLVRQRVALMVGLQNTLVNHGQKKLNANAMKSIRQNHVKGLLADDEALALSTQVSKECIDFYTTRIKRIERDVVQRVALEEPYKLLLTAPGIGVVLGLTIMLETGPISRFPQVGNYASYCRKVSSRWLSNDKLKDRGNERNGNAYLAWAFSEAAELARRFDPQVQAYYERKMRRSHRLVAHFAVAHKLARAVYFMLRDQVPYDGKKLFG

SEQ ID NO: 478698 - protein, 316 aa, unidentified
MKKSVVQNINVGVDVGKDCLDIHIRPLEEYLKVSNDKKGIGEALKRLRQLTVERIVIEATGRYEMAFVSACAKAALPFSVVNPVHVKRFAGAIGRKAKTDKLDAALIAHFSEVIQPALSTLKPENIQKMADAVARRNQLLEMQTREKNRLQIMPKTVQSSIKAMLTVLKKQIQKMDDELADLIQSCPEYQAKSELVQSMPGIGKVSAAALISYLPELGLMNSKQVAALVGVAPMNKESGRYKGKQVTQGGRHQVRTVLFMAMMSAMQCNAKFKATYERLVAAGKPKKVAIIACVRKMVVILNSMVRGGVMWEEKAA

SEQ ID NO: 478699 - protein, 355 aa, unidentified
MNSEKYIGLDVHQATISVAVMDSRGKVVMESILETKASTILEFFAGLRGTLSVTFEEGTWAAWLYDLLKPHVAKVVVCNPRKNALLKDGNKSDRIDARKLAELLRLDNLKPVYHGETGVRMLRELARSYLTIVKDLTRVMNRLKALYRSWAIPCAGRDVYYTRHRTEWLGKIREAGVRRRAEQLYQQLDMLQHLRQQARRELLAESRKHPITAKLRKIPSLGPIRSALAVALIQTPHRFRTKRQLWAYSGLALETRTSGEHRYVRGQLRRSKKQVSIRGLNKDHNHDLKGLFKAAATRASVQPGPFQDFYQRSLAKGIKPTMVRLTLARKIAAITLTLWKKGENFDVAKLKSQAA

SEQ ID NO: 478700 - protein, 314 aa, unidentified
MASSAERFIGIDVHKDTLEVCDDRREEHWECRNDAEGIAGLLTTLILLSPTRVVVEASGGYERRLVAEGYAARLPVVVVNPTRVRRLAEALGIIAKTDAIDAYVIARFAAMVRPPVREPQSAEQQHLNALVTRRRQLLEIRTAEKNRLSTCPDLMRTDIEEHLVWLDSRVEQLEDEINDMLVNNPSWRELTALVRTVPGIGQVTAATLIAELPELGTLNRQKIAALAGLAPYNRDSGPRKRTRRIFGGRASVRRVLYMAALSATQRNPVIKRFYHRLLERGKEKKVALTACMRKLLVIVNAMVRKQESWSYIPA

SEQ ID NO: 478701 - protein, 343 aa, unidentified
MQAVTTIGLDIAKSVFQIHGIEAAGNVIVRRRLKRRYVLPFFQKLPPCLVGIEACASSHHWSRELQALGHTVRLMPPAYVRPYVKRQKNDAADAEAICEAVTRANMRFVATKTLEQQSCLMLHRTRHLFIRQQTAVINAIRAHLAEFGIVAPVGRNGVEQLLDVVAHTSDRRLPEIARACVLALGAQLRTLKVQILNFDRQIMAWHRSNEASKRLDEIPGVGPALATALVASVADPKAFRSGRNFSAWIGLVPKQHSSGGKDKLGSISKQGDRYLRSLFTAGALAVIRYAKIHGTKHRPWLAALLARRPTKVVAIALANKIARMAWAMMARGDRYKQTIAIAA

SEQ ID NO: 478702 - protein, 329 aa, unidentified
MSGDYDGRQYVGIDLHRRRSVIVRTTEQGEQLGWVRIDNDPVALGLELAKAGPDPEVVLEATYGWYWAVDALQTAGAHVHLAHPLGVKGFAYRRVKNDVRDAADLADLLRMHRLPEAYIATPHERELRELVRHRAKLVALRSGLKAQVHATLAKQGQLPAASDVFGRAGTAWLRSAPLELVYRQRIDSLLELIDAYDGEIETFRTMIANRFTGHRGYRAIQQISGIGPTFAAVFVAEIGDINRFSRPEKLCCWAGLTPRHRESDTTVHRGPITKMGCGGRRRGLRLRSARVRGGCRGDRGWYRHSPGAVDIRLRGSRLRGSVPRADRPG

SEQ ID NO: 478703 - protein, 361 aa, unidentified
MSMIPKQSGKRKQAQIDFTGKACWVGVDVHKSSYAVAILDEDGQRQEFSTLADSQRLLVQLLKMGMHIQTLVYESGPCGYGLAWACQEGGVPVVVAAPSRIPRPVSKSGKTDRLDSMNLVGLLARGMLKSIAIPSREEFAVREMERARQSLVRARRRVRQEIRSFLLRNALTEPPNLSRWSQIAVRALHDMPLPEYLQNSLAVYLGEHASILASLSRISAQLAEATVAQGHGERIKNLQTIPGVGPTIAHTFTCEIFRPERFKRAEDICAYVGLAPMTNHSGAGKERAWTRPVGQGYLRSILVESAWRLVAVEDCYRDFYNRIRSRTGLAQKAITAVARKLLVLIWRVAIEGRTYRPAMTN

SEQ ID NO: 478704 - protein, 478 aa, unidentified
MVTARPSQLNRKQRKELARRLRVEDPGLTVMHPHAAGIDVGNSAHYVAVRPDRDPESVRRFECFTADLHRLADWLVHCGVTTVAMQSTGVYWIPLYEILDARGLEVYLVNARHTKNLPGRKSDVQESQWLLKLHTYGLLRNSFHPPAEIRVVRTYWRQRGDHVHAVSTCIQRMQKALTQMNIQLANVISDLSGWTGQRIVRAILAGERDPATLAALSHPGIHATPDMIAKSLEGTWQLDRLFVLQQEVAMYDAYQQRIAECDQALERHLKGVADKVADPSPDAEPSTTPPQATPRARPKRRRKAGSHAPQFDLGHELHRISGVDLTRIDGIDVGVAQTIISEVGLDMMRWKTEAHFASWLGLCPDNRITGGKVIRKGTRHVVNRAATALRLAATTLLRSQSYLGAQYRRLRARLGAPKAITAMAHKLARLVYRMLKWGHEYVDKGLQYYEERHREQQVQLLKKRAAKLGLQIVEPEAA

SEQ ID NO: 478705 - protein, 503 aa, unidentified
MWTYPSRNLVPETGVWIIGDGESLPDRKLLLMRPRPEAQKERQEMRQGKPKTVKIGVHEGLRQIRTDAAGIDVGASEIWVDVGVENNAEPVQRFETFTADLNRMAKWLNSCGIETVAMESTGVYWIPVCQILEDHGIEVALVNAAHAKNVSGRKSDVLDCQWLRKLHCYGLLAASFRPASEIGILRSLMRHRQMLIECAAGHVQRMQKAMTQMNLQLHHVISDITGWTGMKIIRAIVGGERNPQRLAALKHERTRVDEQTIAKALEGDYRPEHLFALKQCLESFDNYQKQIEECHGQIAQHLKTLESKADPQAIQPRRPRKSKGKRNQPAFDVREQAFRISGVDLTGINGISESAALGIIAEIGINMNAWKTEKHFASWLTLCPNNKISGGKVLQRSTRQSANRVRDILCLCAQSLINSRSALGAFCRRLRARLGAPKAIVATAHKLALLVYRMLKFGRDYVDIGQHRYDEKFKERSLRSLARKAQEFGFQLVPTPAEIELVP

SEQ ID NO: 478706 - protein, 407 aa, unidentified
MRRYYLGVDWADQEHEVWVCDEVGKKVAAMKVKQTVEGMSEFGRWLHERRGEGSELWAAIEKPEGRIVDFLLDHAVVVYPMNPKAVDRARDRFRTSQSKSDPFDARVLAEFLRTDHAHLKALLPSSEEAQELKMMARDYHRLVRHQTRVLNQLKATLKEYYPRSLEVFADLSAQLALDFLEGYPTPQALSDLSGKRWRVFVRGHHLSETCAAELWERLKKPQLPIPPHVVRAKARLVKVLVAQLRAAATAVEQYREEVESFFASMPAAELTKKLPGGKSGATVPSLWAELGDAGGRWESFQHLQAQAGSVPATKRSGKSQTVRFRYACNKRMRYAVHWLAFISLRQSEWAGAYYRSQRARGHSHHQALRALGAKWLKIIFVMWRDRTPYDENYHLANIPSLPISMRH

SEQ ID NO: 478707 - protein, 333 aa, unidentified
MNKCHSNTELSSHEGTRCQFNGGTGAIKFAEGRIRPVCGLGIDVHQDFYVVVMQEGGANPKPPQRFHKEAFVHWAAKLKSRATEVYAVYEACGFGFGLQRQLSALGIQCHVVCPQKLDEHNKRVKTDGLDAKALCLRLDRFVQGNRAALALVRVPSEQEERSRAIHRQREQLVKVRKQLEAQGRSLMVNHGIEPVKSWWKQGNFGALQVPEWMKELLGNSQPILLALQEKISALTLQLQAAAALKQPRGLGQMTSVIIDREIGDWRRFNNRRQIASYTGLCPGEYSSGNTRLQSCVTKHGNPRLRAALVELACPESLRGSSPATNRSSNGKGS

SEQ ID NO: 478708 - protein, 340 aa, unidentified
MKGTIIGIDLAKNVFEVYVEDGVKQTGTRTRLSRKKLLPWFANRSSALVGMEACGGAHYWARELEQLGHTVRLIAPQYVKPWVQTNKSDQADARAICRAVQEPEMRFVRIAGEAQQAVQALHRVRSRHMGNRTALVNQIRGILLEYGVAIPKGVASVRKALPLLLAEERWAPLIRQFLTDQQAELTDWDTKIEAVTAQINQESATQPVCQRLEQIRGIGPLGASALWLKVAGQPYQNGRHVAAAVGLVPKHTGTGGKIKLGGISKRGDRYLRWLLIHGARAVVAQVGEKQDRLSCWLRALVARRGMNKAVVALANKNARVAFAMIHEDQTYDVTKMCRPV

SEQ ID NO: 478709 - protein, 370 aa, unidentified
MARKLWAGLDVGVETTSICVISDTGEVLQEATCPTHVKSVHSEIRWLRRRRFARVGLEGSCGLTLARGLRSLGYCVDLYETRQLSKFLRARRNKTDAGDANGIAHAGRIGASLVSRVYLKSLECQSLQSRLVVRRHLVRARAAAVSLLCRQVEAYGGRVRSATHSMQLGLKVNAELSKLFGRSANPLVSELRTLLVHCEQLISYQRSVDQDLRRVACDNEVCRRFMEIPGVGPLCALTFFAAIGDPKRFRRSVDVGSYLGLTPKIHQSGLSLRRGRISKMGNSEARGLLVQAATAFMRWEKDGSRLRAWASDIEQRRGRGKSRVALGRKLAVVMLAMWKSGERFEARSSEQDQAPQGPAADSDPVKPQAS

SEQ ID NO: 478710 - protein, 391 aa, unidentified
MSDRMLEERNYKLSKLAERIAPGPVYLGIDAHKKSLHATVVDSSGSVVLRRTVSNEWAHVEGLVRELDGHEVFAVYEAGPTGYQLLWWLRDLKCTALLTPPSLVPTRLGDRVKTDRKDSLRLAEWLRAGALRSVYELTKEELFNRELIRTYHQIQRHRKDLVRQIKSKIQVFGIAAPWEDPDGPQVQGLRKSDVEWLLDSPTSSDSLNSALITLTTLYVSTKVELQRCKKELERLSQSEQYAERADLLLSIDGIGLITAMTWLLEVPRVSKFATVEAFANWLGVVPSERSTGDAGDESNKRRGAITHAGNSFLRAALVQVAWGMFSKDPSLRALWTRVRQRSSSQTAIVAVAHKLARRLYAVMRDMVQYRVPAPPELTATATATATATATA

SEQ ID NO: 478711 - protein, 386 aa, unidentified
MRINNHTMQTITLYIGLDVHKDSITIAIAEPGSKGEIRLFGTITNDMHALEKALIRIRKAHPNAQLELAYEAGPCGFGIARRLEQLKVPCLVAAPSLIPKQPGSPFKTDKRDSRNLARLLRSGELTAVYVPEPTDEAIRDLCRARTDAVDDLRRCRLRLKSFLLRHDYRYQGKANWSQPHMRYLRELVLPHPAMKAILEEYLQGIDAAHQRVQRIEASMLTLLETWRLKPAVKALMAFRGFQLVAAMITVSELGDIHRFAHPRQLMTYLGLVSVEHSSGPKQHLGSISRCGNGHQRWLLTECAEHYLLPPKVSKELSCRQEGQPPEVRALSWKAQNRLHLRFTRLLGRRLQRNKAKVAIARELCGFIWALLRTQSCYAQPSATAAR

SEQ ID NO: 478712 - protein, 424 aa, unidentified
MNYNQNIRIAQVTESTLIVGVDIGSTTHFARAFNWRGIELGKVFKFSNTREGFVSFKEWIELLQERNEKKAVIVGAEPTGHYWFSLGAYLEDSEIPLVMVNPYHVKQSKELDDNSQTKNDRKDPKVIAKLVVDGRYSKPYVPKGVYADLRVATASRQRIINELTSVKNRICRWFSIYFPEYLEVFGSFEAESSIMILKKVPMPLDIIKLGVEGINQIWRDVKLRAVGIKRAKTLVEAAQKSIGCKEGLEAARMDMELLIMDYEYKKAQYDRIMEHIEELCRQIPESSQMLAIKGIGLIGVSGFLAEVGNIRRFDSPKQIQKLAGLSLRENSSGKHKGQTTISKRGRSRLRAILFNAVIPLVAKNPEFRAIHQYYISREKNPLKKKQSIIAVCCKLIRIFYAILSKGIAYDSMKMQEDIRRPIAA

SEQ ID NO: 478713 - protein, 414 aa, unidentified
MEVIHGRCVGMDVSKRDAKVCVRIAGRGRRKTVETVRTWVSTTNAILALREHLINEQVSLVVMEATGDYWKPFYYLLEDAGFELMLVNARQVKNLPGRKSDVSDAAWLAQLGAHGLVRGSLVPPAPIRELRDLTRARTIMTRERGRDIQRLEKLLEDAGIKLSSVASDITGVSGRLILQALIDGQRDPAVLADLAKRRLRHKIPELTEALTGRFVDHHAFLARMYLEAIDQRSRAITDLTTRIEVVIEPFRSFCNLIGTIPGIGVRCAEVIVAETGADLSIFPTAAHLASWAGTCPGSNESAGRIKSTATRPGNPYLKAALGAAALSIANTHGTYLAAKYRRIAARRGPKKALVAVEHATLIAIWNMAHTGAEYDDPGADYFTRRDPVRARQRALDQLQHLGYRVTLKPVAASA

SEQ ID NO: 478714 - protein, 340 aa, unidentified
MTVHVFGIDIGKTVFHLVGLSKEGHIVVKKRFSRKQLLLHTVNIPACLIGIEACPGAHFLARALLAQGHNVKLMPAEYVRPFVKSNKNDYVDAEAIAEAVQRPTMRFVPIKNEAQLDLQALHRVRDRWIGRRTAVINQLRGFLLEHGITVNTGPAHLKRQIPSILEDADNLLSARMRMLLTELREEWEKLEEQIDATNRELAQAAKKEDGCRRLLTIPGIGPLTATALTAAIGNGAAFRKSRDLASWLGLVPRQHSTGGKTRLLGISKRGDPYLRKLFIHGGRAVLSRVKREEHQFGGWLNRLEARSPRNVAIVAMANKIARMAWAVLTSGQSYQATART

SEQ ID NO: 478715 - protein, 397 aa, unidentified
MNAYVKLHARVIIICPYQASETMDSDKEIVCGADIHRDFLIATMISRSGLKLQERFNMNQDGLLAFRSWIINHRCQRLAVESTGGFWYPIFTILEGHVEFILANAYQIRNIEHKKTDKLDSERIAIYCLNNLITPSRIYPKDYRDLRSITRARETLVNARSKIKNQIHQSLSTCCIKLSSVISDSFGKSGRYIIDRLLEGKTIDQIISGIPSKRIRKKEDELREAIKNGLDPVQVFLIKANLDVIDDISKKIKILEAEIAEKVKPFEDDLKIILSVPGVGFISAATIIAEMGDYRDFPSADKMAKYFGIVPSVYQSAGKLRTGKITKTGSKHMRRILVEVAKAISRTKKNSRLMRFFQRILARCGKKNIATVALARKVLCIIYHLLMNHENYPCVFG

SEQ ID NO: 478716 - protein, 320 aa, unidentified
MAIIGVDVSKLSLVAVRTSSTGIVKENFEIPNTAVEIDTWLNKLQSKHKYLLVASEATAEYHNALAKACLAKTIKFRLLNPILTKQFNRATIRKRKTDLTDAEIIAKLAIQGEGSVVTPASLSPAKVVHRTAIRLVKVEQTLESMCRRFNESLPEEKAVNQQLLDCMQLLKTSCEVLRSRARESTDPKLTKLLMSIPGVGERIVVTLVNEIEDIHRFPSPKSLVAYAGLDPRVRQSGTSLKRNTHVTKRGSIYLRRDLYIAATIAARWDSEIHEYCGKKLGEGKRYREAMMACSRKLLNRVYAVWKRGTPYERRLILTEA

SEQ ID NO: 478717 - protein, 407 aa, unidentified
MNQLFVGIDVGSRDNTVHIMLPDGSKHSSFAVQNNLGGAKTISKRVVSVLTDKSLPDVAIGIEATGVYGDSLMYFLREDGALGRFGRKLHVLNPKQVSKFKEAYSDLPKTDDVDAFVIADSLRFGRINTAVYMDDYRYHSLRNLTRARFFAVQNLTREKQRFMNHLFMKCSGLAQEKVFSNNYGAAALAVFEEFETPDDIADMDTNELAAFIAEKGKNRFPDPDEIAKAVQAAAHGSYRLPKTVNDSVNQVLSISVSSMRAIEAQIKALEKEIERQFENIPNPLISIPGIGKVFSAGIIAEVGDINRFNGHAGLAKYAGLAWGRHQSGMFEGQHTRLIRSGNRFLKYYLCEAAFSLARCDAEFKRYYNLKFKEVNKYQHKRALALTARKLVRLVFRLLKDNRLYRPA

SEQ ID NO: 478718 - protein, 428 aa, unidentified
MEEVTDEPLYRDRVCGIDLGKAEMHATIRVPSEKNPARRASETRVCGTMKRDVLALADWLRSWQVTAVAMEATSDYWKPVYYRLEAEGFELVLADPNQVKNLPGRPKRDPSDSRWIAQCLERGAIRGCFVATPEFRVIREHTRYRRDLTAERTREKQRAEKLLESAGIKISSVITDLHGVTGRDIMDHLIAGERNPKVLAQLARASARRKILQLEQAVEGAEFFTPELAALLARMLARIDELEAAIGELSAVIETLLEPYEEQLQQAESMPGWGRRAAQDALAETGPDMTRFPDGAHLASWAGRTPLDHQSGRKGKARAKKGNRYLGAILGETAVSAGKTATREGARYRRIRARRGKLKACVALGNTQLKVYHKLLSTPGARYQDLGPGYYDTHASTRRQIRHLEKRARDLGYALVPDLTSCPETTPS

SEQ ID NO: 478719 - protein, 341 aa, unidentified
MQLYGGIDLHSNNCVINLIDENDNVIIKKKIRNNIELMIRTLKPHYDDIVGLVVESTYNWYWLVDGLMEAGFKVHLANTTAIQQYSGLKYADDDSDANWLARMLKLNILPTGFIYPKEQRMQRDLLRKRMQLVQEKTKHLLSIQGLYDRHINVRLNNQEIKKLTHEKINQDFKDTNTQLTIQSNLAILQCLAVQVKTIEKSLLSQLKLDERYVKITSIDGIGVVLGLTIILETGKISRFNKVGDYASYCRLVSGARYSNGKKKAKVNTKNGNKYLCWAFIEAANFAIRYNETIKKYYQRKLAKTNPIIAKKTVAHKLARSCFYVLRDDLEFDVDKAFGYSK

SEQ ID NO: 478720 - protein, 379 aa, unidentified
MSDTLPLFVGLDYHQQAVQVCVLDAQGRQLLNRPLDNDCQAIAAAVAQLGGTVQRAGIESCSGAADLAQELADQCGWSIDLAHPGYVNRMKQSPDKSDYSDGRMIADLVRVGYLPKVWLAPEPIRELRRMVRHRAALVNERRAAKQRINAILREQRLRCVDHSRWSKAWMNWLCDVAPLSPAGRWIIDRQLQHLRHLCGEIQEAEKQLTLMTRADLTVKKLKTLPGIGEVTAWIVRASIGRFDRFATGKQLSRFCGLSPRNASSGTRVADAGLIKAGDPLLRATMIEMSHRLIRTERRWRELAEKMRAAGKPPCLIVAAVANRYVRWMFQQMNQPAASSSSASSGRTIRKNHQEEPKEEPMRAVAGTEADERELVDPLG

SEQ ID NO: 478721 - protein, 324 aa, unidentified
MHYFLGCDVAKAKLDVSLVDNTGRELFADTVPNEAETVAVLLLTIAGNYPGDELTSVVESTSTYHLTACEVSYAVGVDCRIYNPLLTKQQIRSTVRGKKTDRTDALLIARLGLRGEGYSYTPEPYRATKYQARSAQKLSVLASSFRRHHSHMAGLLETELSDQTEALMQGIQDAITLAKKQLYKDLAHSADGDIFRRLQTIPGVGPYVGASLIGEVQDMHKFTTTKALTAFAGLDPKIRQSGKSLNSTGRLTKRGSSYLRRSIFIAANAAKRYDPNMKALYDKKRAEGKSYKVATIVVARKLLSVIRSVWLHGVDYDAGYAERG

SEQ ID NO: 478722 - protein, 452 aa, unidentified
MAKKGKRRCDTLPVLHPDAAGIDVGASELFVAVSADRDPHPVRSFPTFTRDLHALADWLEQCGIHSVAMESTSVYWIPIYQILEARGLEVYLVNAQHVKNVPGRKTDVSDCQWLRYLHSVGLLRASFRPPGFICAIRSLWRHRSSLIQMAAEHVLHMQKALDQMNLQIHRVLNDITGVSGLRILDAILAGERGPLTLARLCHGGVKSSEDVIAKSLEGDYRPEHLFALRQSLAAFRYYQQLVLEADREIQLQLAELETAPTAQPTTPARTKPTAHYARHYEPRTFDLRGELYRVFGVDLTNVPGISALTAQTILCEIGTDVSRFRNASAFASWLGLCPEKKISGGKVLFTKSRRVRSRVATALRMGAQSLHHAKDYLGEFFRRITRKLGRPQAITATAHKLARILFHLLSTKEAYNESVFHRSEADTIRRAEYRLRRQAAQLGFQVIPAENS

SEQ ID NO: 478723 - protein, 373 aa, unidentified
MKDTIKYVGLDVSKEKIAVAIADEGRDEPRYWGMIPNTPESIRKLVKKLGEKENLRVCYEAGPTGYGLYRLFLSLGIESEVIAPSLIPKKPGERIKTDRRDSIKLAKLFRAGELTSVHVPTEDDEALRDLVRAREDAKEDELRAKHRLTKFLLRHDIRPPKSVKKWTTRYCEWLNTLKFERSASRIVYEEYMHQLTEIQQRLNRLEEEIERQAIVGVHAPMIQALQTLRGVAVVTAASLVAEVGSFQRFSSPKQFMAYVGLIPSESSSGELRRQGKITKAGNRHVRRLLIESAWSYRYPPAVKGKLKKRQEGQPPELLQISWKAQTRLNKRYFRLLSRGKVAGKAITAVARELSGFIWAITQEVEKKQKKNIS

SEQ ID NO: 478724 - protein, 402 aa, unidentified
MNAVGIDVSKGKSMVSIMRPFGEIVSAPFEIKHTASDINSLVELINSVEGESRIVMEHTGRYYEALAHQLSEANLFVSAINPKLIKDFDNDSLRKVKSDKADAIKIARYALDKWQNLKQYNVMDELRNQLKTMNRQFGFYMKHKTAMKNNLIGILDQTYPGVNTYFDSPARSDGSQKWVDFASTYWHVDCVRKMSLNAFIVHYQNWCKRKKYNFSQSKAEEIYGKAKELVPVLPKDDITKLIIKQAVNQLNSASTTVESLRTLMNETASKLPEYPIVMAMKGVGASLGPQLMAEIGDVSRFTHKGAITAFAGVDPGVNESGSYEQKSVPTSKRGSSDLRKTLFQVMDVLIKTHPQDDPVYQFLDKKRAQGKPYYVYMTAGANKFLRIYYGRVKEYLSSLPES

SEQ ID NO: 478725 - protein, 345 aa, unidentified
MHQNTVIGIDLAKTSFAVIELGRGGDVKRRKTFRRDGLKRFLAKHEPATVALEACGSAHYWGRWLEAHGHEPVLLPPQHVKGYLRGQKNDYNDAQAIAEACLHGAIRPVAVKSIEQQDEQAFHAIRRSLKVESTRLVNQMRGLLAEYGFTVPKSVSAFRRRVPELLEDAENGLSARFRMLLNRQWSRLKALLDEQAWYDQQLQQQAKEDDTCRRLTDIPGVGPVVASAVKSWMGDGQQFRRGRDASAALGLVPKQYSTGGKQSLYGITKRGDAYLRSLVVHGARAVVRTAKNKQDALSRWALAVEARRGHNRAVVAVANKIIRMAWVVVARQEHYRPAESQMAMA

SEQ ID NO: 478726 - protein, 321 aa, unidentified
MPVGIDVSKLKFNVHFLEKNIDAEFENNLNGFRKFLSWLKKHKAINSKICMESTGVYSYHLANFLFEKSVCVYVINPFCIKSFAGSKLKRIKTDEVDARLIAEFCLERGKELQLWKPLPAKHFELKELNKLKSDLIDDLTCLKNRLEGAHSEELKKRLEKLIKQREIELKEFKKDLAKEFDKDEDLKEKKELLETIDGIGEDTARTILLEAGDIEKFESARDLAAYAGITPSIRQSGTSLKSSGSISRKGNKRLRSDLYMPALSAMKYNPVIKEFAERLKAKGKAWKEIICAVIRKLLHLAFGVLKNRIPFDPNYINTQFA

SEQ ID NO: 478727 - protein, 315 aa, unidentified
MPNDKEHVVGIDVAKDWFDVAVLGEKRTRKFASTNKGIRDLVRWMSQLQPTLIVVEASGGYEEALVLALFEAGLPVALVSPQRVRQYARAKGQLAKTDPLDARLLAEYGKAIQPRLFVGKSEERKQLSALVGRRNQLNAMLQAEKNRLRMHSGAIRSSLEKVITCLTAQLKQMDQEIRTLLQQNTDLQAQEKLLRTAKSIGPVTAATLLADLPELGQLDRQEIAALVGVAPMNADTGRKRGYRKTKGGRPDVRRTLYMATLTGIRFNPVLKPHYEQLRTRGKEKKVAITACMRKILTILNAMVRDQQPFRYPAAA

SEQ ID NO: 478728 - protein, 417 aa, unidentified
MKDEVRWFVGFDWAMEQHRACLLDAEGKRVAERDVRHGGAGLLELCCWLLEKTGARPEEIAVAIETPRGPVVEVLLERGFAVFAINPKQLDRFRDRFTVAGAKDDSLDAYVLGHSLRTDRHAFRRLAIDDPLVIELREWSRMYDELKQEQSRLANRVRDQLWRYYPQASELGDPAADWFLDLWEKVPTPAQAARVREQTVARILKNHRIRRFDATEVLRILRQQPLTVARGTIEAATAHIRTVAARLRLVNQQIKEAERRLDELCAAIEAAAETTPGQICEQRDVAILRSMPGLGRITIATLLAEACEPLRLRDYHVLRVLSGQAPVTRRSGKSCIVLRRYACNTRLQNAIYHWGRAAVQHDPISKQRYAELRRRGHSHARALRSVGDRLLYVLCTLLQRQTLFDPNYASSQTAVAA

SEQ ID NO: 478729 - protein, 448 aa, unidentified
MSNGNGVSRGDRNRNARLSRLRVLVPMSNAIVGIDLADNKQMVVVTDHDSKVLARRTFRCRAWDLGLALDWAGQQASKAGFAGVTVACEPTGHRWRVLGQLAADRGMAFVCVQTLLTSWARRSEDLTFDKTDEKDAVLIARLTAQLRCYIPEPLDETWGRLRHLGARRERLLAETVSQVQQIRDLLECVWPAALDSAKQPFRSRTWLAAVSVVLARTDGDPARLRRLGPARFEAAVRGEVLARQGKRPCLRIVRLLFTAATDPRGVTAHRPGALERVQLLLDDFRDTGRRLGETEARMVAVLDELQLSELVCSIVGLSALGGATILAQTGDLTRFASARAVVKHSGLAPREKSSGTYTGRTKLTGQGRPGLRAAAWRAIWGAQKANPVYAAKFTHLTSRTENKLNRGQAHAAIAAALLRQLYAVVTTRQKWDAAIAAGGRCEVIEPAA

SEQ ID NO: 478730 - protein, 428 aa, unidentified
MKKRMKFDHLSTLCVGLDIGSRSNFITALNFDSDRLINMRPVFNAANGVETMEAMILAVLEGSPQFRYLLVAMESTSFYGVHVANYLSTSDLLKPYGVKVFCLNPKTVANYKKTFTGLGKNDGIDSFIVADYVRAGLIEIEPWRGSQYLALQRLTRQRRHISEAIAREKNYVLNNIFLKFSEFALLSGEDSPVSNKFSTTAEAVLTEFKTTEDIANAPLDELIDFISTSGHGRFSDPGQVASLLQKAARNSYRLDKALYEPITTSIACSFNCIRAFEKEQKALDKAIAATVAGLNPTEYQILKSIPGIGPVYAAGILAEIGSVRCFNSNNALAKYSGIIWRDNQSGEFDSEDTPMMKAGNRYLRYYLIQAAGSVIRYCPEYEDYYNKKFAEVPRHQHKRALALTARKLIRLIFGLLDKNQLYSPAKGR

SEQ ID NO: 478731 - protein, 343 aa, unidentified
MQTIKTIGLDIAKSVFQVHGIDAAGSVTVRRQLKRRYVLAFFEKLAPCLIGIEACASAHHWSRQLQALGHTVRLMPPAYVKPYVKRHKNDATDAEAICEAVTRANMRFVPTKTAEQQSGLVLHRTRHLLIRQQTSVINAIRAHLAEFGIVAPVGRHGMEELLHIVADTNDKRLPEVARACVAALGGQLRMLKAQILHFDRMIIAWHRGNETSKRLDALPGVGPALATALVASVADPRAFRSGRDFSAWIGLVPKQNSSGGKQKLGGISKQGDRYLRGLFTAGALAVIRYAKIHGTGHRPWLTALLVRRPTKVAALALANKIARMAWAMMARGERYREPVALAA

SEQ ID NO: 478732 - protein, 345 aa, unidentified
MLYVGVDIHKKNLQVCVLGEDGKQLGNCKVANERESVVGYFCNLARPAAVAMEPTHNWGGLYDLLETMGLEVHVAHPRDVELIGKCKVSTDKTSAYKLAALLRAGFLPEAYVADPEGRELRRLARGRASLTRQSTQIKNQIHALLRENWIKVPFSDAFGVGGMQFLRDLKLPRTSKLLLDLRLERLVDIHKGIASLDEEISRRAFGDRRAVLLMTIKGIAEYSAILILAEIGKIERFGRAESLVRYAGLNPTEHSSGERTRRGSLEKAGSRWLRWILVEAVEHTIREEGKIRDLYLRVLEKKGHNWAIVAAARELLVSIFWMLTRMEPYRPSGKRQLLSQAGEAR

SEQ ID NO: 478733 - protein, 377 aa, unidentified
MSKIRFVGLDVHADTIAVAVAEEAGEVRSLGSIPNRLESVRKTIGKLAPVETLKCCYEAGPTGYVLYWQLIQMGVACEVIAPSLIPKKAGDRVKTDRRDAEKLARCYRAGELTAVWVPDEAHEALRDLVRAREAAKKDQLRHRHRLGKFLLRHGKRPTDAGKAWTQKYVNWIRIHVRFDQPALDATLAHYLEEVDHIAERIAKLEQAIDEAIAQAPPEIRAVIEALQALRGVAQTTAATVVCELGSLTRFQSPRQLMGYSGLVSREHSSGKSIQRGAITKTGNAHLRRVLVEAAWTYQHRPNVQGRVLRRQKSMALSDEARRIAWKAQQRLHKRFTALAARGKNHNQIVTALARELLGFVWAIAVHTEAQFKLTKAA

SEQ ID NO: 478734 - protein, 442 aa, unidentified
MSNLTVLDPRAAFVDVGSEKMHVSIGGGPPEVFGTVTSQLHALRDYLVEHQVGSVAMEATGVYWLPLYGVLEAAGLDVRMVDGRQTRHLPGRKSDMQDCQWGSTLHAHGLLRAGFVPPAHVRRLQDYLRLRGEHVAAAGGHVQHMQKALERMNIKLHGVISSLTGASGLAMVRAILAGERDPEALLGLCDVRIRKAKAERVLEALRGDWADEHLFALGQAVGSWDHYQAQITDCDGRIAEILAQMPGGDAPTAGVEKPAKRRTRPGVNAPQIDNLRELLRRMCDGKDATTLPAHSEYTVLQIVGEVGTDLTKWRTEKHFTSWTGLAPGSAQSGKRRTAVKRRCNRAGRLFCVMARSLARSKYVALGGYYRRMAARRGGLVANKALARKLAILFWRVMVKGMDYVENGLAHYEAQVLDTRQRLLRKLAKQFGQQLVPIHGTPP

SEQ ID NO: 478735 - protein, 338 aa, unidentified
MNSLTIGLDTAKSVFHAVEKNSRGRVLSKAKLTRAKLFTYFANKPPCTVALEACGASHYWCRVISAYGHKAVMIAPQYVASHRKGNKNDFNDANAIADVAQRDDIRTVPYKSIEQQDIQLLHRVRERLVRQRTALGNQTRGLLSEYGIVLRQGLAHLRKELPFILEESNNELTELACRQFFLLHEELLVLDEKVKQADNEIQRVALSHPISQRLMTMSGVGPIISTILLVALGKGEHFRNGRHFSAWCGLVPKQHSTGDKARLLGISKRGNTYIRTQLINGARSALRNASNKNDQVSRWAASLAERIGFNKACVALANKMARFAWAMVHNGQNYQLKP

SEQ ID NO: 478736 - protein, 318 aa, unidentified
MNTKTNQSINVGVDTGKFQLDIYIRPLDIYFTVTNDEKGIKEAVKTIKKHKPERIVIEATGRLEMPFILACANAKLPFTIANPVHVKRFAGALGQRAKTDKLDAQLIAHYSEAIKPALSQLKPENMQAMSDLVSRRNQLLSMQTMEKNRLQIMPKALAMTIKPVLTLLKNQIVKIETKIAKLIENCPEYHAKNEILQSMKGIGKIAAACIISNLPELGYINSKQASALIGVAPMNRESGRYKGLRKIQGGRPQVRTVLYMAMMSAMQSNPVFKATYQRLLSAGKPKKVAIIACIRKMIVILNSMLRDGVMWEAPKEIN

SEQ ID NO: 478737 - protein, 328 aa, unidentified
MKSNDSVSVAAELPVLGLDVAKASVQAELRTNGKRVRFGFANNGKGFAQLARILKEHNVPKVWAGLEATGPYSHALALWLHGQGHRVSLLNPRRVKQYARSAGNRNKTDLLDAGIIADFVCAIEPAPWQPPTQEVAQLQALVRRREELSLMLQAEKNRLEGVAPNVRSSLGRMIAALSAEKTRLEKLILQQIRSHQQLSRDHQLLCTIKGIGSLTAAILLAEMARPGQVERARQAAAHAGLAPRREESGTSVRRNRGLGKEGNRYLRKALYMPALVAIKYNAPLRYFASRLHAAGKPKMSVICAVMRKLIHIAFGVLKHQKPFNPSLA

SEQ ID NO: 478738 - protein, 351 aa, unidentified
MIIIGVDYHPSDQYIALVDTETGEYGERQLNHGDREAEKFYRELAARGVSVRVGIEATGYSRWFERLLAELGIEVWIGDAAEIKTKRVRKQKTDREDARLLLRLLRENNFPRIWVPSAENRDLRQLLWHRHRMVQMRTRIMNQLQALAMNEGQRRKKKLWSEAGRAQLEKLPLAPWASRRRKDLLELLDRMNPTIEGLTATIEQEAKKWPEVLRLMTHPGVGPITALAFVLIIGTPERFPCGKQIGSYVGLIPCEDSSAGQQRLGHITKQGSSLLRFLLGEAAQAAARWDADWRRRYMHLALRRQRNIAKVAMARRLAVRMYWMWRNGWEYAEWVKFGSHAGQLGIRHGVN

SEQ ID NO: 478739 - protein, 343 aa, unidentified
MSMKSQYYVGLDVHKKSISFCVKDERGEIHREGKMASTRAQLDRWSQQLPGAWIGALEATLFTEWIYDHLKPRAVELKVAHPARLKALIAGKKKNDRIDARILADLLRCNLLPTVHMLPAELRELRRMLRYRNLLVSETTRLKNRMAGLLMETGVEYNKQRLHGQRYFQQLVSSLEEVPDSVIGLLKMSRNSLDFLKALERRLIRTLLEHEQLRHRVELLQSIPAVGVIVALTWALEIGEVSRFRTISQALSYCGLTSRQHESAGVNKRGPLSRQRNKYLQRVLVEAAKLAPRFHPPLEVVYHRQRQKGNPNRATLAVARKLVAYLMAVDRRQQPFQRRPVAT

SEQ ID NO: 478740 - protein, 457 aa, unidentified
MESYYMGIDVSKGYADFVILDAKKNVVEANFQLDDTFGSHCKLFEILKRFFDHHSGSLLFAAVESTGGYENNWLHSLSGFQGALNIRSARLNPLGVRANSQASLRRVITDKISARDVAEYLIAHPEKVAYQQEDSLAGLRRQWGFVRLLVKQKTQILNQFASLLYTANPELIAYCKSGVPAWLLKLVKQYPTAAKLAKAKATSVARIPYVTTDRAGALIDQAKKSIASATDETTGGLITVMAEQIIRMEETIRIQTQQMAKQCTIPEVALLKTFPGISDASAIGLMLEIQSVKRFSSVKKLAAYFGLHPAFKTSGDGTSSVRMSKQGRKEPRKILFMVAMVALTANPHIRKIYEEHTEKGMKKMAAIGLCMHKILRIIYGMLKNNRAYDSQVDQKNRENRTVRKTTHAVKNENRRYERFDQQAPISRRQSTKRKEWKQSQGDNITKCGIGVPIPSVA

SEQ ID NO: 478741 - protein, 379 aa, unidentified
MTLGDFFRQCVGIDISKKKFTACLYMYDRASDVGCYTKSIDFANTKSGFNQMVKWSRKEAVKEYPLTYLMEPTGIYYEPLAYHLHKIGQTVYVVLPNKARKFCEAEGIKTKTDAVDARCLALMGCVSRKLSPWSPPSTIYHELRQMTRFHADLCKVRASVSNRMEALDHMHGPDKSVIRHCQKLLEEIDKLMEKNGQALLQKLSENKELEERVKRIATAKGISVQTILCVVAETNGFHLIRNRKQLTSYSGLDVIAKQSGNEDPKHRISKKGNVHIRAALYMPALVAIRYNRQLKTTYDRICQKHPKEKMIGITAVMRRILLLIYTLWKNGEEYDETRDMIRMPRKKGLEPENGQEDLVGIDREPIDWNAVGDNGEPPF

SEQ ID NO: 478742 - protein, 336 aa, unidentified
MNIKRIGLDLAKQVFQLHAVDHQERVVLRKTLHRARMLTFFTRLEPCLIGIEACGSSHYWARELTRLGHTVRIIPPQFVKPYLKGNKNDANDAEAICEAVSRPGMRYVAIKSGAQQSMQAEHRVRARLIHDRTALSNEIRGMLGEFGFVLPAGLSALRKALPEIFSQQEKWDNRFIRLLSELTEELQALDERLNRYDRRLKQLAQEDERIRRLQEISGIGPVTASALVAAVGDAKQFKSGREMAAWLGLVPRQHSSGGKTKMGHISKRGDSDLRTLLIHGARAVLNACDHKEDRRSRWLQSVAERRNRNIATVAMANKNARIAWSVLSRGEEYRVM

SEQ ID NO: 478743 - protein, 363 aa, unidentified
MSVYVGIDVHRKRSQVAVVGEDGRVALNRNVVNGSQPMLGLLGGLPSGTPVAFEAAFGWGWLAGLLEDYGFEAHLVHPLRCKAIASARLKNDKVDAATLAQLLRADLLPEAWIAPPEVRALRALLRHRIQLVRLRTLLGNRIHAAAADHGYDRPAGYWSGPGRAWLASLDLPPAFRQVIGDDLALIDALAAPIAALDEQVHQRAKADPAVKVLTQLPGAGEFTALVILAGTGDIARFGSARKLAAWAGLTPIVRSSDRTIRHGHISKQGSAWLRWALGQAAQTAKRSPEFAATYQAIAARRGKQIATTAIARKLLTRAWHLLTDAGLTGPQTSPLPRLSPGGAQAPGELAKVHEPAPPPRTSC

SEQ ID NO: 478744 - protein, 398 aa, unidentified
MISVGIDVSKGKSTICILKPYGEIVSSPFDVEHTDNSLLELSKMLLRLDGETKVVMEATGAYHMPILSYLKDQGLFVSVINPLVMKEYRCKGLRKAKTDQLDAKMIANYGIDHWFHLVDYTPDSEVYQTLRLLGRQYAHYMRMKIESIQVLSNMMDYTMPGIRTLLKGYSDCNGKNKVADFMEYYWHYDNITKKTESQFVKSYISWAKKRGYHQSESKALKIYALAKNGVPTLRSTSPSTKMLVVEAARVLKEIENTLRTILTQMQELARDLPEYPVVRAMNGVGDVIAPRLIAEIGDVRRFYSRKALIAYAGIDAPPYQSGRFTGSNRHITKRGSATLRKIGYEIMQCLKSFKPPEDAVYLFMMKKESEGKAPKVAKMAALNKFLRIYYARVTEVYT

SEQ ID NO: 478745 - protein, 373 aa, unidentified
MLYLGIDLHSKQLTISLRGEDGEVLLRRQVSTRGEEPRRFLEDVALRAGEGGYVAVVEVCGFHDWLAELLAASSGCREVVLIQAEKQHTRKTDRRDAHTLSEILWVNRDRLLSGRKVQGVRRVVPPTPQDRDDRRLTQLRRNVGADLTRVLNGVRHILRRLNFEQHCPTKGIQTVAARQWLEKVVKLPELDRLEMDHLLARWKLLEEQQQQLDRRIRERTAVHEQAVILRTVPGASGYTALALASRIGDIDRFPTPRSLANYWGLTPSCKNSGEATKRLGSITKEGSLLARFLLGQLVLHVLRRDAGMRAWYQRIKKRRGSKIARVAVMRRLAVIFWHMLKQRQPYALSVSAAQKPPPRRRRKMSPEPAAASP

SEQ ID NO: 478746 - protein, 423 aa, unidentified
MKYALVRVLPEVPPGGVCAGIDWASADHAVCVVDLAGQVADRFAAAHDRAGIAGLIARLRGRGAAEVAIERGDGVLVDALLAAGLTVVVIGSRQVKNLRSRYGSSGAKDDRFDAFVLADTLRTDRARLRPLVPDSPATLALRAAVRARRDLVAHRVSACNQLRAHLQVAFPGAVGLFSELDSPLSLAFLAAFPGQQAAARLDEQALAAWLATIPRRGNTAPAGVLAARLAAAPRGAAGADAAQAAVTAELAAATAGLAGRVRALEAEIAAQLAAHPDQHIFTSLPRAGTLRAARLLAETGDCRARYPDPWSLAGLAGVAPVTRRSGTYISHEFRWNVNRQLRDAICDFADGSRHASPWAATVYAAARDRGKDHPHAVRITARAWVLIIWRCWQDGTSYDPAKHRALQDVLTRQAAAGTPQPHR

SEQ ID NO: 478747 - protein, 317 aa, unidentified
MSKSKSLPTTAVGIDVAKESVDVCFLDQNETENYSGSYPEDAYKSLVKKIAKAKPNIIILEATGGYERVIVALLAAAALPYRIVSPNRARHFAQAIGELGKNDRIDARMLALYGLRNKIEPITPPTENTLKLKALLKRRRQLLSIKTAEQVRAQLTEHKIASKSIETILNTITAELQTIDAELDKVIIDDDDFRQKEEIITSVPGVSTQTARTLLGDLPELGSMTRNEAAALVGLAPFARDSGKKSGKRFIRGGRVNVRNALYMPTVSAIQHNPAIKTVYQRLLGTGKPKMVALTACMRKLLLLLNALLKKNELFAQ

SEQ ID NO: 478748 - protein, 348 aa, unidentified
MDYYAGIDVSLEESSVCVVDSDGKIVREAKVLSEPEALIAWFGGLGLGLARIGLEAGPLSQWLYAAMKKEGLAVELLETRHVRDAFKAMPVKTDRKDARGIAQLMRLGWFRPVHCKSMSAQEVRALLTARKLVQSKLLDVEMSLRGILRGFGLKVGATKPNRFGRRIEELVAGHATLEIVAKALLAAHEVLLRELNGFEKRVRAMARDDKRVRLLMSAPGVGVIVGLTYVAAIDDPGRFKSSKQVGPHFGLTPKKYQSGEKDVSGRISKIGDAAVRTALYEAAHIILTRPLKGASMLKSWAMKLARRAGMKKAKVALARKLGVILHRMWVDGTPFAGEPVGSLKPVAA

SEQ ID NO: 478749 - protein, 440 aa, unidentified
MNQEDRSRLEEFRQFRKEVRGSTEYLLVGIDVAKDKHYAFFGTAAGKTLFRRLVFENSIEGFRKLLGQAEAMKVQEGLTKVVFGMEPTGNYHKPLGEHLIRCGHGVVLVSGVAAHENRKTLDGRWDTNDSRDAANVADLMSQGKCLFYEFPVGVLQDLRNLLSLKRRLKRMEHGHRVRIRNHLVAKYFPELDRYYDQSESTALAIVRWCLDPSEIAGLEYKRFVQMVSSVRGRSSQEKRLQTIWKMAVDSVGCEAGPTVEFEAQVMVEGLKQIRESIRQIDEKIQEICSPFPEYEFLLSIPGFGPDVSAKVLGAIGDPFRFQNGRQVLKMAGLDLSAERSGKGSERVVPVISKKGKADLRYALYQAALIASIRDRHFMVYFTHQLSGREREPGIKTKMRVKLAAKLLIIAWTLMKKKEPFDPSHLRVESQSSFAAAGRES

SEQ ID NO: 478750 - protein, 341 aa, unidentified
MIAVGVDTHKDAHVAVALDDLGQPLGELVIDANLSGYARLAGWAQDLATGAKGELVFGVEGTGSWGAGLVEHLREAGEVIYEVERPRRRERRAGKTDRIDALMAAKRVLSGEGLATPRTRGTRRALQAILAVQRSCVGERTRLLNQLQSLCVTAPASLRERIGTGRGAALQTRILGMRARAAADIEEQVTFAVLRDLATRARALEQTASRYERELADLVRQLNPTILEEPGIGPISAAKLLAADPARFEHERAFARCNGTAPLPASSGKTVRHRLSRGGDRQLNNAIHTIALSRSLHHAETRAYLERRISEGKTKREAMRSLKRHLSRRLYKQLTAQPLTP

SEQ ID NO: 478751 - protein, 363 aa, unidentified
MVSPILAQWTTLSEDFVLLGAIMDTVSLIGIDLGKHCFHLHAQDGSGRMVLRKKLTRSQMFALLGNFPSCTVVMEACAGAHWIARRLQALGHEAKLISPHFVKPFRQGNKNDFADAQAICEAASRPSMRFVSPRNEAQQVVSALHRVREALVRERTGTINQIHAFLLEFGISLPRGMAVMRRLPAVLEAEALPPRLVAVLERLQAHFKYLDEQIGQLEHELLTQLHEDERSERLLEIPGIGPITASVLMSELGDARQYGSARQFAASIGLVPRQYSTGGKPTLLGISKRGDKGLRRLLVQCARVIMLRIERRTDSLGTWVRSLLVRRHSNVVACALANKLARIAWAILAKGTHYRSAPAALAA

SEQ ID NO: 478752 - protein, 472 aa, unidentified
MVKPSPSSSWDALFPERILRNRLEVSTTHYKPFGETKQPAHKEDRVSEQQQSADEKAQFAAYVGIDWADQKHVWSLQVAATGKREHGDVGHSPEAVEEWINGLMARFPGQQLAVALEQARGALLNMLSKYQQLVLFPVHPATISRLRAALYPSGAKDDPKDADLVLDMLVYHRERLRPLVPDTVETRELRFLVEERRGLVDQRTDQSNRLTSALKQYYPQILDWFDDPAAPLVAAFLSRWPTVEMLHKARPETLLHFFHEHNCRSQELIDQRLEQIRKAVPATRDQAVLESSIVLTHWVCKIIAVLNQGIADLDERIRPLAKAHPDHPIFDSLPGAGEVMVPRLIAAFGTNRDRFSNASHVQNFSGIAPVTETSGHSEWIHMRWACSKFLRQTFHEWAGHSIPQCEWARAYYRQQIDKGNGHHAAVRSLAAKWIRIVYRCWVNRTPYDERVYLDALRRHGSPLVSAMAKAAA

SEQ ID NO: 478753 - protein, 353 aa, unidentified
MSSSLWAGLDVGVETTAICVIDDTGAILQQSSCRSDLQSVHCELRWLRRRRRARVGLEASGTVALARGLRSLGYSVDLYETRQLSKFLRVRRNKTDAGDAIGIAEAGRLGASLVSKVHLQSLECQSLQSRLTIRRYMIRQRVAAVNLLCRQIEHYGGRIARCPRSLRLAEAVEREIGRLFGKTSSPLIAELRRLARDCERLVAYQLELDCELRRMALGNEICRRFMEIPGVGPICALSFYAAVGDPHRFSRSTDIGCYFGLTPRLHQSGLTRRVGRISRMGNAAVRSLLVRASLTLIKSGGGAGALQQWASGVEQRRGRGQARVALARKLGVIMLTMWKKGEPYQPGPSAAEP

SEQ ID NO: 478754 - protein, 430 aa, unidentified
MKSNTQNAKIEAITEKTLVLGIDVGSETHYARAFDYRGIEYSKKPFKFSNTEAGFVTFKEWILDLKEKHEKDKVVPGMEPTGHYWFNLGKFLQDNEMKPVLVNPHHVKKSKELDDNNPTKNDRKDPKVIAGLVREGRYMIPYLPDGVYADLRTASNIRFQLQAELTRIQNRISRWFNIYFPEYKTVYGKPDAKSGMLILKQAPLPEDILTLGIDGVNQIWRDAKMRAVGKARAKTLIEAAEHSVGSKEGAVSARMEIRMLLEDYESRNIRLQEVMTLIEELVNQIPMAEKLLEIKGVGIKTVSGFLAEVGDISRFNNPKELQKLAGLALVENSSGKHKGKTTISRRGRKRLRYLLFEVAMSLVAKNPEFRELHNYYTTRKLNSLKKMQSLMAVAAKLIRVFYAILTKGVDYDPKKMVGDIKRPAVYLPAA

SEQ ID NO: 478755 - protein, 349 aa, unidentified
MKNIFIGVDFSKKTFDATMIREGEEENEVLGYNKFDNNKRGYKRFLRWAKSAAQNDNLSEWLVCGETTGYYSLGLADWAYEHQMDIWIENAYSIKHSLGLARGKNDKLDSLRIATFAQEKKLKAHLYKPLQQTLSTLKTLIRRRQILDTARKAILNGMKEFEEAFAPTGELEELDDKLKDVSKSIKVLENDIERLMAKLCREDPEISTNYAIVHSVKGIGTINTVAMLVYTANFTKYATANHMATAWGVAPFKEDSGTSLHTPAHVSNLCNHWLKGLLTCSAVIAIQTDSKISAYYQKMTGRGKKKGVALNNVKNKLIHIVFTMVKNQTMYDPDYDVKKKERNTKAVLN

SEQ ID NO: 478756 - protein, 350 aa, unidentified
MANTKISYLGKKVYIGIDVHKETYSMTSICDGLIVKKVASIPADPAQFAQSILNWFKDAEIHSAYEAGFSGFGLHRELEKAGIKSNVVNAASIEVASNDKVKTDLRDSKKIAEQLANHRLKCIHIPSEAEEARRALTRGREQVVEMRATISCQIKSKLQYFGLMARNDKRPISNRYLKEIEAKNLASEVKLAFRMLIEQWRFFTTQIAEFQAALKEQGKKDEKLESVYRSVPGIGLITSRTLANELGDLTRFKNERALFSYTGLTPSEYSSGEHIRRGHISRQGAARIRWLLVEAAWRAIAKDVALKETFERIAKASGKKRAIVAIARKLIGRIRACFRTGKEYAVGTYT

SEQ ID NO: 478757 - protein, 341 aa, unidentified
MNATMTSLDIAKSVFQAHGEDEGGRVVFQKRLRRSQVEPFFAKLPPATVGIEACGSAHYWGRTLRALGHEVKLIPAAYVQPFVKRNKTDARDAAAICAALARPDMRFVPIKSIEQQAARALEGSRELLVKQQTQLINSVRGRLAEFGIVAAQGRRGFATLTAQIKDGDPAIPQAVLAALHPLVDQAESLATSIAGLEAKIVEAAKADAVMRLLTTVPGIGAITAHAIVSAAGTGEQFASARDFAAWIGLTPRQHSSGGKQRSGGISRQGDRRLRTLLTLGASTLMRAARTRSDRATAWQRAILARRPMKVAVVAQAAKTARIAFAILRSGEPYQAPQAATA

SEQ ID NO: 478758 - protein, 346 aa, unidentified
MVHVGLDLSRTRLDVHVMDEAGTALAVTTAVPDNGGLAVLAHRIGGFGEPVYAAIESMNGARFVHDQLELAGWQVEIADAQKVKGLAPLACKTDKIDAWVLAELSRRDLVPAIWLPTPTVRAERERARWRLHLVRHRTALKNRIHATLLTFGHPCPVSDLFGVGGRELLRRLELPEPWAGDVAAALHLIDELDHQIADCERALRQTGADHRYVPLLMTTPGVGWVLGYTMAAEIGDITRFASPAKLAGYTGLCPRVYQSGGKDHRGPLAKNGPKYLRWALIEAAVHAARHPVYAERYRRTKTRLGRQRGPKVAQVDLARRLSEAIWHMLSTNQPFAPAGAAQPLAS

SEQ ID NO: 478759 - protein, 361 aa, unidentified
MDEITRVGVDLAKRVYQVHAVDGSERTVLARPMSPQRFEQWAATLPAGCVVAMESCSGAHHLARRLRLMGLDARLIAAHFIAPFRVQGTSGKNDAYDAAAICEAASRVRTRCIAVKTPQQQGWQGIHRLREGYKEERTACINRIRGLLAEFGLVFPQSPDALRRVLSHALEDASNELPGMLRLGLQRAQAHWRLLDEEIAWCDSQVKQHVRQDQAAARAAQLHGVGELTASALVAAVGDMHQFKSARQFSAWLGLVPSQNSSGGKHRLGRITKRGNNYLRTLLIQGAKSALLAAPKRCDRISQWLLQLRDRVGWQRALVALANKNARILWAVLTRELDYDPEHVPPIPQCKQPAPTAPLPA

SEQ ID NO: 478760 - protein, 386 aa, unidentified
MKRNDLSRSLVAFEQNSTLVAVIELSLKSWLVAGLVPGLGRRPLKKQDPDANALLRLLHRWRDEAIKAGSKIERIAVAFEAGRDGFWLARWLRARGIEADVIHPTSIPVSREHRRAKTDRLDTSLLMRAFLGWLRGEPKHCSMAAIPMLAEEDARRPNREHQHLVKERGRIVCRLQAVMARHGVRNFNVKLRKALERLGELRTPEGAPLPPNTLAELRRDMARLRLIRDQIKEIERTRLERLQRAPQEGAHPMLLLLAKVMGVGVETADMLVHEVLSRNLRDERAVGRYGGLTGAPDESGSKRREKGLARAGNARVRRGMIQLAWRWLMFQKESALAQWYRARTADARGDLRKTMIVALARKLLIALWRYVTTGEVPAGAKLRPAI

SEQ ID NO: 478761 - protein, 316 aa, unidentified
MNSQVFVGLDVSKHHLDVAVRPQGRHFVTPNDDRGIKQLVKRLAALKPQLIVLEASGGYEFLVTAALAEVQLPVALVNPQAVRKFAGATGKLAKTDKIDAQVLAHFAEALRPEPRPLPDQAQQMLKAALQRRLQVVKMIGQEKNRLEKTFMPAVRQDIQAHLTWLSQRLEQLDRDLSDQIRQSPLWRDRDRLLRTIPGIGPIVSRAVIAQLPEAGALPGKKAVALVGVAPYNRDSGRFRGKRMIRGGRSYLRRMLYMAAVVASRWNPVIRAFYQRLLAAGKPKKLALTACMRKLVLILNAMVKNNQPWNQFITQVP

SEQ ID NO: 478762 - protein, 479 aa, unidentified
MVGWSRIHPPRPWLVIEWRRCSSSRSETGVQTLDMKTIGKEVHPRALTENSGGTEPAGVPLYIGIDAGRRHHVVVGIGQERMENGSWERAGARRVSSNSAGFSEMLDWLQAFGLRPDQVRIGCEPTGGWCAETLVAFLERHGYRVSWLQNWALHERRRLAIGKQTKTDALDARLIARLLYERDCHGQTKGFLGRPPRTTDGLRLLVRNRARLVVQRTRYRLQLTQIQDILFPELKDFFKDSNTGPAARRLLELYPTPANIAAASEEELFDLIARQAHSHIHGARIGELQRLARGSAGLTAGLEPVLQTQRWLLENLRRVDEQVDDLEETILSVVESWPESQRLVLDSFPCMSKLRQAVLIAMMGDISGFRHDGQLRKLFGWYPETRESGTSVFSQHLGSSGNRLARREVWLWAMQLISPRCSPTPFRTYYERLRKRNMKGNVAVGHLASKLITVLFFCLRSEQPYDPRRHAVDLGLRDA

SEQ ID NO: 478763 - protein, 312 aa, unidentified
MTNLPKVYIGVDVSKKTLDIHVYPIGKMIKIDNTKSGINSLIKQLNQYEIVQIACESTGGYEKLLCQVFGQNNYKVWIVDPRRIKGFIISSGCRSKTDKIDAKKIAEFASKNTKDYDAFEKTNNQEHLLALVNRKNDLTKFLGVEKTRLKHPSHALSEASIKRFIKVLEKEIKSIDKQMQELIKQDKDLNKKSEILESIPGIGKATAAVLLSAVPELGQISNKEASALIGVCPYDNQSGKHNGKKFVKGGRQLPRNALYMCALTTIKYSFALKEFYNRLRITKPFKVAMVAVMHKLVILANSLIKKGELCKV

SEQ ID NO: 478764 - protein, 345 aa, unidentified
MSESYAGQQIVGIDLHRRRSVIVRMTEAGEHLETVRILNDPERLAAVMARAGETPEVVLEATYGWYWAADTLAELGANVHLAHPLGVKMFSYRRVKNDECDAADLADLLRMGRLPEAWIAPPATRELRQLVRHRAKLVGLRSNLKCQVHAVLAGAGVQVVMSDLFGVEGQKLLARVELPIAARARVNSVLGLIAAMDVEVELFAKLVAARLREHPGYRAIQVIPGVGPVLAAVFVAEIGDVTRFPGPAQLASWAGLTPKHHESDTTVHRGRITKQGSRLVRWAAVEAVQRVPVHTRLGQTRDRVAQRRGRNVGVVAAARELIVLVFYGLRDHHIRCLTPARTRTA

SEQ ID NO: 478765 - protein, 355 aa, unidentified
MSSEKYIGLDVHQATISVAVLDSRGKLVMESIVETKAATILDFFAGLRGTLSVTFEEGTWAAWLYDLLKPHVDKLVVCNPRKNALLKDGNKSDRIDARKLAELLRLDNLKPVYHGETGVRMLRELARSYLTIVKDLSRVMNRLKALYRSWAIPCAGRDVYYTRHRAEWLGKIREAGVRRRAEQLYQQLDMLQHLRQQTRGELLAESRKHTITVRLRQIPSLGPIRSALAVALLQTPHRFRTKRQLWAYSGLALETRTTGEHRYVKGQLRRSKKQISIRGLNKDHNHDLKGLFKAAATRASVQPGPFQDFYQRSLAKGIKPTMVRLTLARKIAAITLTMWKKGENFDDEKLKSQAA

SEQ ID NO: 478766 - protein, 346 aa, unidentified
MDYHPSFQQIAFLDQETGECGERRLNHSDGEAERFYRELKQRGARVRVGLEATGYSRWFERLLAELGIEVWIGDAAKIKTKRVRKQKTDRQDAQLLLKLLLENNFPRVWVPNTENRDLRQLLWHRHRLVQMRTRIMNQLQAIAMNEGKRWKMRLWSEPGRAQLEKFPLALWASRRRQDLLELLDRLNPTIAELTAAVEQEAKKRPEVLRLMTHPGVGALTALAFVLIIGTPERFQCSKQIGSYVGLIPAEDSSAGRQRLGHISKQGNALLRFLLVEAAQAAVRYESNWRRRYLHLAMRRERRIAKVAMARRLAIRLYWMWRNASEYSQSVEFGSYAGELVTGHGVN

SEQ ID NO: 478767 - protein, 323 aa, unidentified
MGKSGKVLKKGKVETREDLLLGFVRSVKGPRKLIFEEGVMSHWLYMLLKKEVDELVVCQPRERKGPKTDELDAEELAELLRSGKPKSVFHADDVLMDLRIIVSGYDDVIQELGRAKNRYKALYRQAAIQTDVTKFYESEEMLLSLDGEERYYVACTLFEQIRFLEQQRAGYVERFEENARKQKAIKLLMSIPGIGLVRANQIVAIVVTPYRFSKKYKLFAYAMLTKHSRTSDGKEYGKQQAMGCAELKRVFKSAALSSIKSDNAFRRKYDEMRAAGKSDRTARSAVAKKIAATVLGVWKSGKKYNDKHKEVTQRANRNCHSGA

SEQ ID NO: 478768 - protein, 367 aa, unidentified
MKKGSTPAAKQSSNFSQQKLTIGLDLGDRSSWYCVLDEAGNVVGEQRVSTTAKAMREGFSRIARSRIALETGTHSPWVSRLLSELGHEVIVAHARNVRRIGESRRKDDRLDAQTLARLVRIDPQLLCPVKHRSAKAQADLTVIRARAGLVRARTALVNTARGLAKSYGERLRSCNVRNMNPEKAEQLSPELQTALEPLLAGIETLSEQIREYNQRIEALAQQSYPEMALLTQIKGVGTLIALTFLLTLEDAHGFGKSRDVGCYLGLQPGRRNSGQSEPQMHISKQGDPYLRTLLVQGAQHILGPFGADCDLRRWGLKLAERGGRNGKKRAIIATARKLAILLHHLWVSGEIYEPFYNRNCLATAAVA

SEQ ID NO: 478769 - protein, 330 aa, unidentified
MKKVFIGVDISKNTLDISLCYGETKEMIESFQVPNTLKGIDHFIQKIRKHSSLKNSWICFEHTGNYGFLLAHKLDMIQACYSVVPAVEIKNSQGLTRGKNDIIDAQRIALYAATNVHKLRVSKLPVVPLMEIKHFLTHRDLLVRTATGFKNHLKSLLVSQQVVDLSDIIDSTRNQVDLLTKRIQQIEKQIEELIYQDDDIKRNYELATSVIGVGLQIATQMILCTHNFTTFNNPRKFNCYSGLAPFENSSGISIRGKTKTSQWRNKTMKKLLFNGAYSATRYDRQIAKYYQRKIKEGKAKQSVINAVACKIVYRVFAVVKRGEPYIKLAF

SEQ ID NO: 478770 - protein, 329 aa, unidentified
MSEVVVGLDVHLKNTQVTVMKLNGEIVKKERIRTCKSELSKCLEDVPKGSKVALESVGFCWPWIDFLDELDFEPLLANPMRVKLRAEDVKNDKVDSKTLADLTRMNWLPTCYVPSSEMRWLRSLLRHRAFRTKLCTGVKNRTKSEFRKRAIDLDVNLGTLKGRKLASDLGVFEVSQNLELLEVMDRQTKEIEGMLFKEYGHVKPVELLMTIPGIGFLSAVTLYAEICDIKRFSSAEKLAHYAGLVPTVRQSGEHSFAGKETRGDAWMKSILIEVAWAHVRYCPDGHLVEVFKDACKRKGDSRDAIKIVARKLVNVVWAVWTNEKEFMVK

SEQ ID NO: 478771 - protein, 310 aa, unidentified
MIIIGVDYHPSFQTIAFLDPETGECGERQLNHSDGEAEKFYRELKQRGVSVRVGMEATGHSRWFERLLAELGFEVWIGDAAEIKTKRVRKKKTDREDARLILKLLLENRFPRIWVPSPENRDLRQLLWHRHRLVQMRTRIMNQLQAVAMNEGYRWKKKLFSEKGRGLLEKLSLAPWASRRRKELLELLDQLDPKIAELTAAVEQEAEKRPEVLLLMSHPGVGPITGLVYVLVIGTPDRFPCGKQLGSYTGLIPCEDSSAGKQRLGHISKQGNKLLRFLLGEAAQAAARCNRTADVGICRGGRASVLPWST

SEQ ID NO: 478772 - protein, 403 aa, unidentified
MAGTRTAGIDWASEAHEVCVSEEGRVIERFSATHDERGIAALGRRLVRLEVNRVAIERPDGILVERLLSTGLEVLAIHPNQVKAARPRFAVAHGKSDRFDAFVLAELARTDAHRFRALRPDSEETKALRVLTRAREDLVGVRVELANQLRAQLQAFWPGALVFHDIDSPISLAFIARYPSPADAKSLGAKRMAAFLARHHYSGGADPGALVERMRAAPRGTAGPVEREARRVVVLGLIAALKPIVAEIGELNGQIREALACHPDMAIFAPLFRDRKTTICPATLIAELGDCRGRYPTEAALAADAGMSPVALESGKLRVATFRRACEKRLRLAVATLADSTRHWHPWAEEVYRRARARGQDHPHAIRTLGRAWIRVLWRCWHEEVPYDPGRHGNFRQLDMARG

SEQ ID NO: 478773 - protein, 338 aa, unidentified
MNKVITIGLDLAKRVFQVHGVDEAGAVVVRRTVRRSQLVSYFSRLPPCVVGMEACATAHYWGQVLGELGHTVRLIPPAYAKAYVRRNKNDAADAAAICEAVSRPSMRFVPIKTAEQQAAAGIHKVREQLMKQRTMLINGLRGLMAEFGIVVAEGPQHVGDLVAVLADASDRRVPAPLHAGLVTMAAALAGLEQHLEAIDRQIADWGRGNQTCRHLITIPGFGPILSSAMAAVVVNPALFASGRDFAASLGLVPRQESTGGKARLGPISKRGNGYLRRRLVNGAMSVLSSKRAKGDPWLVRLLETKHRMVAAVALANKMARIAWAVMVRQEDFHFQPAA

SEQ ID NO: 478774 - protein, 338 aa, unidentified
MKLYGAIDLHPTNNVMVVINEHDQVVYQKRLPNDLSLIAQQLSSYRRSLEGIVVESTYNWYWLVDGLMEKGYRLHLANTAAIQQYNGLKYTDDHSDARWLAHLLRLGVLPEGYIYPKQERAVRDLLRKRGQLVHQRTANLLSIQSLISRTTGNSISAQYIKALNIERVDGVLPNSDLVLALKANLAVMNSADGQIEILEKAVQDRVKLRPQFRFLKTVPGIGPILALTIMLETGQIERFASVGNYASYCRCVGSKKISNGKRKGSGNTKNGNKYLAWAFVEAANFAIRFNSKIKGFYQKKKSKRNAIVAIKAVAHKLCRACYYIIKDQVAFDITKAFA

SEQ ID NO: 478775 - protein, 356 aa, unidentified
MSCPHSGDVASGQVVIAIDPHKASWTAVAVDSRLQPLDAVRVAVGKAGYRQLRKFARRWPGAIWAIEGAAGLGAPLTARLTEDQITVVDVPAKLARRVRLLSAGHGRKTDEADALSVGIAAHTATRLHTAQIDEAITALRALIEHREDLVRTRTQTINRLHALLTNLVPAGLPRKLTAEAATTTLRGIRPRTTLGRTLRGLAMELVAEIRRLDRRITAVAEQISAAVAESGTTLTGLHGIGDLLAAKILARTAGVHRFRSAAAFASYCGVAPLEASSGDVKRHRLSRAGDRQLNSALHIMAITQIRRPTEGQAYYQRKRAEGKSHKEALRCLKRRLCDVVYRTMLRDTDTSLLAAA

SEQ ID NO: 478776 - protein, 361 aa, unidentified
MLFIEQVKKKLTQKKGTEMNDTIYDHYIAIDWSIKNMAIARMTKKSNKITAIDVPSDIEDLQAYLKNLRGAKILAIEETTTSQWLYAELKDYADRILICDPNRNKLLNEGPKTDKIDATKLVQLLKAGLMKEVYHSTDKFLYLRRIVSGYEDLVKAGVRLKNQRYALLRGCGKRGKEKTGSTLNSQGEQFVVDCFDRQIELYEKEKQCYENEFERLARKNSAIKHQKTLPGIGTINAVKIIARVVTPHRFPDKGHYLSYTGLTKLEKTSGGKYYGKRNPRYSRQLKSVYKSGALAAIGGNNPINDYYEYLIHEKGYSEHNARHKACRRLAILSLGVFKSGKKYQPYRRAHIEGGKEDTSGL

SEQ ID NO: 478777 - protein, 416 aa, unidentified
MEVTEPLSVVHPRCCGLDVHKRQVQACLLVTSPAGTVQHEQRSFGTMSEDLLALREWLLAADCTCVAMESTGSFWKPIYNLLEGSFAVQVVNAAHIKQVPGRKTDVRDAAWIAGLLRHGLLRPSFIPERDQRELRDLTRYRISLVDERSAEVNRLQKVLEDANLKLAGIATDILGKSGREMLDRIVAGETDAAALAQSARGRMKAKIPLLEAALAGTVNDHHRWLLARMLARIDDLDAVLADLSAQIAERLAPFEELLVLLDSIPGVGRQTAEHLLAEIGVDMCRFPTADHLASWAGMAPGNHESAGKRKSGKTRKGSRWLRATLVVAAQAAGRTKDTALGDRFRALAARRGKKRAAVAVGHSILVAAYHILSDRQPYDERRQQPTLPRPANPAHLVEQLRALGYEVTIQRAAPAA

SEQ ID NO: 478778 - protein, 367 aa, unidentified
MLGLDVGKSSHWACLIDRDGEVLSSAPVRNREAELDALFASVPAGTLVVVDQFRNIGSLAVRRARAAGLGVAHLPGLAASRAAGLFAGEAKTDERDAAVIARTALGVPDSLSGVPGRGEALEAARALSSQRDHVVACATRDKNRLRAVLLESCPALEAAVDLSDRRWLELLAGFGGAWGIARSGAEGPRAEAAGEAAAASTAPPPALIEAENRQVRFLAARISEALDEAGALEAETAALLEGDETYACLLTVPGIGPRTAAQLAVSVDIGRFPDHDHLASYCGIAPRVRSSGTSVRSVRASRRGDARLKSLLIFSCNSLVRSSGRYGEYYRACRARGMGHGRALKAVARKRLRAIYAVMRDRVPYRE

SEQ ID NO: 478779 - protein, 364 aa, unidentified
MHATTKPVSAESSAVMLAIDLAKDVFELAFADADGHIVERKRLKRGPFATCLQNRPALRIVMEACGSAHAWARRFARYGHEVTLLPAQHVRPYVRRNKTDRADAAGLLEAARCGDIRPVPVKTPEQQGTQGLHRIREHHKAQRTAAINLVRGLLREFGIAIPGGADKVRPATLAALEDGDNDIPMALRHALAGLLDQITACQEAMQAIEKQLADIVQRDTRSQRLMAASGVGLITATAMSAGIGDFARFPSGRHFASALGLTPREYSSGGTRKLGRITKQGDVYLRTLLIHGARSALVVAATAKKRGQPLDRTQHWALALAERKGHNKAAVALANKTARRLWAAEHHGTSFDTEHISQRKTRAA

SEQ ID NO: 478780 - protein, 342 aa, unidentified
MERVTTIGLDIAKSIFQVHGVDATGGVVVRRRLTRARVVPFFEKLAPCLVGIEACATSHHWARELRRLGHDVRLMPPNYVKAYVKRQKNDTADAEAICEAVTRPTMRFVEVKTPEQQSILVLHSTRMMLMRQRIQLSNVIRAHMAEFGVVAPVGREGLLTLIDSLHEETDDRVPAEARHCLRMLAAQLRLVNAQILENDRRIRASARATDVGRRLMGFPGVGPVLASAFVATVPDPHAFRSGRSLAAWIGLVPRQNSSGGKERLGGITKQGNRYLRQLLFVGAMAVIRYAERHGSRRPWLVQLLARRTTKIAAAALANKMARMVWAIMTSGLPYREPELRAA

SEQ ID NO: 478781 - protein, 347 aa, unidentified
MLNTITTLSAIGIDLGDKDAYYVCLDQSGREVEEGRIALTTVGLRKTFTLPKTRIAIEAGAQSRWVSTLLEGHGHDVIVANPRQLQLITSSNSKNDPNDARLLAKLARVDPSLLSPLKHRDAKEQTTLLSIRARAQLVKSRVAVMHSLRGMVKGFGIRLPHSDDDQFLERCRKIVPPEVLSHLEGIFKIVQSLTEQIDLYDKRIEEIAKVEYPVVQKLETISGVGTLTALTFVATIADPSKFAKSRTVGAFLGLRPRQQQSGAKNPQLHITKAGDKYLRALLVQCAHCVLRKDGEDSALRQWGMKMCERGGASAKKRAIVAVARKLAVLLHKLWVSGQSYRPFPACN

SEQ ID NO: 478782 - protein, 397 aa, unidentified
MATIGIDIGGRSHAVARCREGLARADREVLRVSQSRAGFAALDTWLERQAEPVSLVTMESSGHYWMPLASHLRRQDVPVAVVNPLSAKYFARSRLARTKSDPADARSLADMGMRDQPAARDPLAGAELRQAARFAMTLVDEQAKVCQRLIRLVELGFPELGELFDDPTCRTAREVLRIAPTARAATKRRTTTLANANAGPGHRRLGQTKAERLQAAAADSIAVPELDAEVAFEVGILLDQYDLLERQIEVADARVAGLLDGETARRLRTIPAVGPAIAATFLAEIGDIDRFSDFDQLLAFAGVHPAERSSGRKGSNPETAWHMSKAGNSHLRAAAYRMAAVVGVQHNPVIRAHYERKRAAGKSKMNALGHCMRKALSLVWGVWRNGQDFDPNWGLEA

SEQ ID NO: 478783 - protein, 376 aa, unidentified
MEHDSTLYVGLDVHKDSITIAYALGMGEVELLGKIGTSKADIDRLCKRLQSKARHIHFVYEAGPCGYGLYRQLAGKGFECMVCAPSLIPKKPGERVKTDRRDAVKLVRSLRAGDLSAVYVPSVEDEAFRDLSRAWVSAKNDLKRARQRLKAFLLSHGVRYTGKADWGPAHQRWLSAFAFGSVWQQLAFEEYRRTIEDRIAQCSRLEAALRDAMVNWRFYPAVLGLQTMRGIDFTTAVGMLAELGDLSRFTHPRQLMAWLGVTPTEHSSGEKRRQGSITKNGNSYARKLLVEAAWSYRHPARVSPQIQRRHEGIPKAIVDRSWDAQVRLCRRYRRLAARGKNPNIAVVAVARELSGFIWDISRLAMALAVPNEAPTM

SEQ ID NO: 478784 - protein, 367 aa, unidentified
MKKISTAAAQKIEKVEGQKLTIGLDVGDRSSWYCVLDEAGDVLLEQKVATTPKAMKEVFGGMPHSRIALETGMHSPWVSRLLSEVGHEVIVAHARTVRLIGESRRKDDRFDARTLARLARIDPDLLGPVQHRSRKAQVDLMVIRARAGLVRARTALINTARGLTKSYGERLRGCSPRKMNRELAEGLSPELQSALQPLLDEIESLSERIREYNERVQQIAEESYPEVARLEQVKGVGTLIALTYVLTLEDSRRFRKSRDVGCYLGLRPGRRNSGQSEPQLHVSKEGDPYLRTMMGQSAQHVLGPFGADSDLRRWGLRLAERGGKNAKKRAVVAVARKLAILLHRLWVSGEIYEPLRNSSQAMLSAAA

SEQ ID NO: 478785 - protein, 414 aa, unidentified
MADEETISWFAGVDWGSEKHQVCLLDAQGTTAGEHEFPHSGEGLTELGDWLLSMASVASTVAVAIEVPHGPVVDALIDRGFVVYAINPKQLDRLRDRFSVAGAKDDRRDAYVQADGLRTDRRLFRRLQVADPRLIELRAWSRLAEELRAERVRLSNRVRHQLWRYYPQMQKLTDDLAAPWFLELWTIASTPAKAVRLRKSTVERLLKQHRIRRIDAETALRILREPAIKVAEGVAEAASIHMRSLVARLRIVNRELREAERKLDELCTVISEIEQTSGEGLQRRDVEILRSMPGIGRINLGTLLSEASGPLSRRDYEGLRTLSGAAPVTKRSGKSVIVVRRYAAHVRLRDTVYHWARVATQRDPKCRARYTAMRKRGHSHGRAVRGVADRLLALACVLLQRQTLFDPYFGRLTK

SEQ ID NO: 478786 - protein, 453 aa, unidentified
MAKGKHPRRRKGSRNRPTPVINPNAAGIDVGAREIYVAAPADRDPEAVRTFATFTPDLIALAEWLRACGVTTAAMEATSVYWMPLFTILEERGIEVCLVNARHLRRVPGRKTDVLDCEWLQYLHSVGLLRGSFHPPETIAAVRTLLRHQASLTQMASTHVQHMHKALTQMNLQIHHVISDITGLTGLRILDAILAGERDPEVLAELRHPNIKADKETILKALTGTWRPEHLFTLRQSLNAYRHYQEQIEQCHRELHRLLGTFESRVDPDENPLPRPRTKRRPDPLDFDLRAEFYRIFGVDLTAIPGVEIHTIYTLFAECGRDLSTFPTAKDFASWLGLCPDNRITGGKVLSTQTRKVVHPLATALRLAAQALHHSKSALGDYYRRMRYRQGPQKAITSVAHKLARIIYCLVTTRQAYDESVVARQDQHSLARKTRRLNAQAAALGYQLVPVAA

SEQ ID NO: 478787 - protein, 367 aa, unidentified
MTCFFGVDLHKTQFTVHARTENRVEALDQIIQYPTTNEGYVNFLKRIRNLRTRGYSVKVGVESTGNTRFFKNQVEKAGAEVTVINTLKFKVINESTKKTDKHDASTISEFLSKDMLPESHICSKETENIRRLLKSRERLVRSIVGQKNEIHALLVSMGFSDELRSLQTKKGRQKVLDTLESNDDYVLEAQSVKLMISIIEQMEASVKSVEKQLEELTKDDEMVNRLLTIRGCGNITAWTIRAYTESISRFSNAKKYAAFCGLVPWVQDSNETVHHGKITKHGPQELRTAFVQLVLGIRRCKDTSDWRMMQRYEYMKKNKGSGKSIVAAARKLAEIVWTMLSEKQDFDCRKMKGTYKSPNLVSQALAG

SEQ ID NO: 478788 - protein, 368 aa, unidentified
MRKNSINFGSARASFIGLDLADKQSTFVGIDGRGRLVEEGKVTTDAGGLQREFADRQRCRIALEVGTHSPWVDRLLREMGHEVITANPREVALIYRNKRKSDKLDATTLARLARSDPELLHPVKHRGKQAQIDLAVLRARDGLVAARTQLVNLVRGAVKSYGERLPKCSTESFPAKAAAALPADLSPALTPVIEQIAALSERVRQYDQEIERLITERYPEALGLQQVKGVGPITSLAYVLTLEYPGRFPTNRDVGAYLGLTPGRRQTGESDPEMHITKAGDVFLRKLVVQAAQYILGPFGVDCDLRRWGSRLAGTPANADGQPRKGSKQRKKRAIVAVARKLAVLLLALWRTGEVYEPLRWASRKEAA

SEQ ID NO: 478789 - protein, 347 aa, unidentified
MHLRLSLFFFFSLSLTDQTNDKEDYYMTVVGFDVGKDSLFGARLNRSGIVKEHYEIANTTEAITTFLDELQARHKRLLLASEATAEYHRPLALACLTRNIPFRLLNPITTKRYTRATVRKRKTDKTDAEIIARVALQGEGTVVTAATFNSAKPTIRTSMKLAQLHRMLQLMRLRLSDIMPAEQALLDELVGCQDRLTEAIRVFRKQAAEQADEQTLKLLTTIPGIGVVTALTLMAEVGDINRFRSPKALVAYAGLDPRIRQSGLSLKRNTRLTKRGSPYLRQSIYLAATVAERHDTQFQATFTRKRAEGKRYKEATIVVARKLLNCVYAVWKNNTAYTKPVEPTRSS

SEQ ID NO: 478790 - protein, 415 aa, unidentified
MEKQRNKVCGADIHKKFLVATVLSRDGTKSSGRFGMTLDEIFRFKEWVIENNCEQVAVESTGVYWVPIHTVLEEKIEVIIANAYKIKHIPGRKTDMRDSEWIAELCLNGMIEPSRIFPKEDRELRTLTRARESLVNNSTQMKNRTHQALESSCIKISSVLTDIFGKSGQKIVNGLLEGKMIDEILAGINSKTVKKKEQELRDAVKNSLDPAKILLIRNCLELMEEIEKKIKKLDIEIMSRSVRMKEDVEIAMSIPGIAFISASAILAEIGDYRDFKNGEKLAAWCGLTPRVSQSADMLVTGSITKQGSKHVRRMLVEVAHSISRTKNIVLKRFFLKIKEKKGTKKAAVALARKVLCILHHLLINREKYQENGNAKSKPVKFDWTSSQIQMTEQDMINVLANAGYIIKKKDARGCI

SEQ ID NO: 478791 - protein, 425 aa, unidentified
MVLGVGVDWAESFHDVALGRPGEGVIEQFRIEHGLSGVTGLVARCLELEPDPAEVRVVLETRHGLLVEALADAGFTVLPVNPDLVARRRGPAKKKDDAEDARSCCLLALDAYLDLRRLIPHGQIGAELRAIARDDERAARDERRIGNRLRADLLAVFPAAAGIAAGDLGSAVFLRLLERWPSAAALAQASREELEAFARTAGHGWPGRFADRVTEAMAAPRLAARPELARAKAGSIRLAAAQLLAIGAQRRAWERPMGELLPGAPRTGRDRTVKDPGPGKAFPGGEIYLSMPGLGDRLAARAAGEIGEHPEQFTTPNALQCYAGRAPVTRRPGRSEFTIARRLACNRHLGEAVHQWAFCSLTRPAWAREFYDTKTAAGDTHHAALRKPGNRWLEVLWHCLDKGACYDEAIHTANRARARSLKPAA

SEQ ID NO: 478792 - protein, 461 aa, unidentified
MQASMKSEKTTPAVPAFDEIRRNVAGMDLAWRADHFVCGPRREDDTHEIASFGTTTPELHKLLKWLQDRNVESVAFESTSVYWIPTADLLEANGIEVVLVDSREVRMVPGRKSDVEDCQWLQQLHRCGLLRGAFRPPEAVTAIRSILREKENMTAMRTQAIQQMQKSLDQMNIRVHHAVSDIDGKTGTAIVKAIVEGERNPANLAKLRDKRCKKSEKEIADYLTGTWRDEHLFNLSKAFKAMQFFDEIIAEYDAKTSEMVAALAATSGNPPLPPPLSGAKLSVKERSNFEGKADISRLLGFDPTTIPGIGYNTVRIIVSELGTTFDSFPTERHFASYVGLAPSLSKSAGKKVRQKRRCRNTSRVGQVLRMAAVSLQKSQTELGAFFRSVARRTDKKTAVKATARRLAHMVYRGVRYGKDYIDRGAEAYESRLRERTLKTIKKLIKSHNINSMELESAFVNI

SEQ ID NO: 478793 - protein, 456 aa, unidentified
MKIPQSTIRLLTGRLVKILLYREVSIMKSNTQNAKIEAITEKTLVLGIDVGSETHYARAFDYRGIEYSKKPFKFSNTEAGFATFKEWILDLKERHEKDKVVPGMEPTGHYWFNLGKFLQDNEMKPVLVNPHHVKKSKELDDNNPTKNDRKDPKVIAGLVREGRYMIPYLPDGVYADLRTASNIRFQLQAELTRIQNRISRWFNIYFPEYKTVYGKPDAKSGMLILKQAPLPEDILTLGIDGVNQIWRDAKMRAVGKARAKTLIEAAEHSVGSKEGAVSARMEIRMLLEDYESKNMRLQEVMVLIEELVKEIPMAEKLLEIKGVGIRTVSGFLAEVGDISRFNNPKELQKLAGLALVENSSGKHKGKTTISRRGRKRLRYLLFEVAMSLVAKNPEFRELHNYYTTRKLNSLKKMQSLMAVAAKLIRVFYAILTKGVDYDPKKMVGDIKRPAVYLPAA

SEQ ID NO: 478794 - protein, 363 aa, unidentified
MNYVGVDIHKKYSVLCALDESGRKLREGRVEGNSARGFAQFFAGLEGPSKAVVEACWNWGLIHDELEELEPVEEVVLAHPYKTRLIADAQIKTDRLDAHALGTLLRGNLVARAHVPGRETRARKNLLRQRLYWARLRTMLRNRIHALLDRQRELELPQCSDVFGVRGLGFLRRLELAEPDATLLREQLALHDLIAQQMKAQEKRIAAEFKTEAVHQHLLSVPGIGITLAAVIGCEIDQIGRFNSAEKLCAYAGVVPTTHASGGKTSHGRLLPFCNKWLRWALVEASWVAIGCSPYFGSLYRQHRARGKKANTAILIVARRMCRIIWQLLEQKRDFEKRAPRPKLYSFPGCSALALTVNPALAS

SEQ ID NO: 478795 - protein, 400 aa, unidentified
MLSIGIDVSKGKSTVCGMKPGGEIVYAPFEVQHTREGMSELVSLLRSSGEEVRAVLESTGSYHCPVVAALLENGIFVSVVNSLRMKRFCSQSIRKVKTDRIDAMQIALYGLAYWQELQPTRLPEDTYRELQLLARQYYQMTSMLIKAKVDFNAICDQVLPGMQELMNDHAGRHKLSDFVLRYHHTTHILEMGETRFRKDYCKWAEKKGYRNCERMAVLIFATAQNGIPVLPNAPSTQIVITEAIRVLHTVEASRDAILTQMQALAKTLPEYSLVREMPCIGDTLAPRLIAEIGDVRRFHSKRALIAYAGIDAPPYQSGKFCANNRHISKRGNRYLRKTGYEVMQSYVMHKPANDPIFTFIEKKRSEGKSGKLAMVAGLNKFLRVYYGKVTELYRSLPAIE

SEQ ID NO: 478796 - protein, 326 aa, unidentified
MQGKEASKQETEGKSTVGIDVSKSWLDIHVLPGGETHRFANAELGIRQLKRWLQRFDLALVVVEATGKWHRQVRRSLHASGVPVAVVDPYRVRMFARATGTLAKTDRLDARVLALFARAMNPAQRPPAPEALDALNELVSARDAAVDEQTALKNQRHAVTDKFLIRHLAHRLTRIAKAIEAIAGEIAKRIAADPCLARRHDILISIPSFGPAVATTLVAALTELGTCNIKQISLLAGLAPIADDSGERQGVRVIWGGRSRVRRVLYLAALSATRCNVDMKSFHDRLIAKGKKPKCALIAVARKLVVLANTLIAQDRTWATHAPKQA

SEQ ID NO: 478797 - protein, 387 aa, unidentified
MGVIIGMDPHKRSATIEVIDERAGVLAAGRYGTDKAGYAEMLRAGRKFEDRVWAVEGCNGVGRHIAHRLVASGETVLDVPARLSAQVRVFATGNGRKSDPVDAHSVALAALRSPRLVQVEVSPDLLVLGMLADRRDELGRARTQTINRIHRLLLELIPGGAKQFLSAAQARALLATTRPRDIVGKTRRRLAAELITELEAIDRKIKTCKKEITAHVQAHGSTLLQLHGIGPSSAARLLADVGDIRRFASRDHFASWNGTAPLDASSGQQLRHRLSRAGNRRINRALHIMAIVQLRNATEGRAYYDARKAAGKTSMEAMRCLKRRLSNVVYRQMLHDQHNRQVTGPGGHSGTTLKSSVTDLTPDIGSSDKPLPGPAAPQPRTPVRAAS

SEQ ID NO: 478798 - protein, 352 aa, unidentified
MNHYVGLDVSLKETFICVVDHQGEVVYEGHTKTDPSSIQRKLLKTGVQLDKIGIETGSLSHWLVTELRKLGLPVLCVDARHMSSILSMNINKTDTNDARGIANAMRGGFYKEVFVKNQELVDTGVLLQSRSTLVQERTKLKNAIRGFLKAYGLTVSTTGKLLFIKLVRECIQDQISSVQAAIEALLKGYECLTEQITNLEKQISSIARDNADVQLLMTIPGIGVLTSLSYLVAIGDYTRFKNSKNVAAFLGLTPRQYSSGETQRLGRVSKCGSRQTRSLLVESAVVMLSRTRSWCKPKAWALKLQRKKGFKKATVALGRKLAVIMHAMLLKREPFRYGDSKEESIKKEPVAA

SEQ ID NO: 478799 - protein, 342 aa, unidentified
MITVTAIGLDIAKSVFQVHGVDAAGQVVLRQRLARGRVLAFFEKLAPCLVGIEACGSSHYWARELTARGHEVRLMPAQYVKPYVKRSKNDAADAEAICEAVTRPTMRFVPVKTPEQQSVMMLHRVRLMLNRQRTQLSNSMRAHLSEFGIVAPIGRRGLDQLLAVVADAEDTRVPADARLCLQMLAAQLAVVKEQILENDRRVRTSARTELGRRLMQVPGVGPLLASAFIATVADPAAFKTGRDLAAWIGLVPKQNSSGGKERLGSITKAGNRYLRQMLVVGAMAVIRYAERHGTRRPWLVQLMQRRSTKVAAVALANKTARIIWALMTSGERYREPTAATAA

SEQ ID NO: 478800 - protein, 343 aa, unidentified
MAHRAEETAVNERKDIVLVVDYHAENIEFRWFDEATGEERTGRYPTTRAGILRQVEQAACELEPGGQVVWIMESTTGWARVKDLLGDRVRFILANVLAMPLPPKAKRRKTDKIDTGRMLREYIHGDLPRSFQPSVWWREVRRVVDCRQDLVERQTAIKNWIGSLLHHETWDDRENLWSGKGLRRLGAMKLSPSDRMLVELKVEQLKQLSMHLEQIEARMQTIYDAWPEAQWVDAVRGIGMVTAVSLLAHIGPIDRFATAEDLISYAGLAPGMWQSDGTCHHGRIGGGGTDSHLRYLLIEATTWLCQIPRYRSHASAGYDETRQEDRPDRGGQAAAAEHTQDAH

SEQ ID NO: 478801 - protein, 386 aa, unidentified
MIEAVIERCAGIDVGKKFLVVCVMSGSLEAEPKTEIRKFGTIVAELEHLRDWLIQEGCSHAVMESTGSYWKPVFNILEDSVEVVLANAYDVQNRRGHKTDPNDSRWLAHLLRHGMIRPSFIPERAIRELRDLTRRRRQLVGERARERNRIQKILEDANVKLGDVLSDVLGLSGRLMIDALLEGRLQVEEIAQLAQRKAKQKIPDLIAALQRNRLTDHHRFLLRHALRHLDFLAEEIEALNIEIRSRLTTEQLKQKHALLQSIPGIQEESSAAILAEVGPNMAQFPSDAHLASWAGLCPGNHESAGVRKTGRTNRGNNWLRSILTQCAWAASNKKNSMLQSFYFRLSSRCGRKRAIVALGHRLLRVIYHVLLRDQPYQESNMRPLSA

SEQ ID NO: 478802 - protein, 349 aa, unidentified
MILVGCDLHTRKQQVALLNTDTGELWDQELSHDGDAVERFYATLPPPVTVGIESTGYSLWFHALLQRLGHTLLVGEAAKIRAMVVRKIKTDRRDARHLRDLLKDDRFPVVWIPDPATRDLRALIKHRLRLVRMRTMVKNGLHAIALNQRLALGPSLWSRAGLAQLHALVLPPHTRRRRDDSLELLQWLNGHIDELDLHVATAAAADPDARRLMTHPGVGPLTALATVLVLGPVGRFPGSKHVVSYIGLAPAVNASADKYRLGHISKQGSTLLRWVLGQAAPLATRGDAGLKRIYFAVLRRRGRPKAKVALARRLLIRLFVMLRDQIDYDEFCRRGRTQRPGLEPARIPV

SEQ ID NO: 478803 - protein, 386 aa, unidentified
MQQNDLSRSLVAFDQHSTLVAVVELSLKSWLVAGLVPGLTRQPLKKLGADEEALVALVDRWRAEAVKGGQRIERIVVGFEAGRDGFWLARFLRERGIEAYVIHPTSIPVPREHRRAKTDRLDTGLLMRALLGWLRGEARHCSMASIPSLAEEDAKRPSREQEKLSADRGRIVNKMKAALVRLGIRGFIVTLRKAAERLDGLRTPDGLPIPPNTLAELRRDLARLKLIKEQIKEIESARQQRLEQAPRAGAHPMLLMLARLKSIGVDTADRLVHEAFYRPLRDRRAVARYGGVTGAPDESGAKRREKGLARAGNARVRKAMLQLAWRWIMFQKESALTQWYRQRTAGAKGDVRKTMIIALARKLLIALWRYVTTGEVPAGAVLRPAS

SEQ ID NO: 478804 - protein, 420 aa, unidentified
MKPIKTIKGSFVNGKHLIVTADIGKDKHFGYWRCPDGTDVKPFAVPNNRAGFGEFWERVSRAQKLHKLEGIIFGFESTGPYGEPLAHFMRTRGAELVQVNPLHTKRFKEVTDNSPNKTDQKDPKVIADIIAMGRFLTVVIPEGPAAELRRLSQARERSTRRHTALANQIQCLMASIFPEFLPAMKGVKSASAQYLLKHYPTPQEIAACGLTELTRTLRKVSRGKLGADRAQALYEAAQSTVGVAEGQASMVLEIQELLALMEASQRFTKNLELKMITHLAQIPYSNTLLSLKGIGDVTAAGLIGEVGDFRKFRTLGEVMKLAGLDLFEVSSGRHKGQRHISKRGRPLMRKLLYFAAINTVKQGGAMHQWYRSACERGMLKTKALVAVSRKLLGILFALVRDHSEYVPNYSETRCQLTEAA

SEQ ID NO: 478805 - protein, 351 aa, unidentified
MPRTTTLHAVTAIGIDMGKNTLHLIGLDARGAIVLREKVARGRIALRLANLPPCLIGIEAGMATHYVARELAALGHNVKQVPATYAKPFRQGHKNDFRDAHAVAEAVQRPTTRFVPAKTNEQLDLQALHRVRSRLVSERTAVINQIRGFLLERGIVVRQGLRFLRQQLPDILAKRADVLSPRMVRIVAELAGDWRRLDERIETVTDEIEALAKSDDSCRRVMTVPGIGPIISSAMVAAIGNGAAFARGRDFSAWLGLVPKQMSTGDRTILGRISKRGNGYLRTLFMQAARVILLRSANWPKHGFGLWLVRAAQRLHPNVLAAALANKLARIAWTVLAQERSYEARVTKAAA

SEQ ID NO: 478806 - protein, 385 aa, unidentified
MTIQIQVPRFIPRDYDVFAGLDVDKKSMAVTFADHAGSQRALRMAHQVTPLLNYVGKHFAGQRVAFAYEAGPTGFGLHDELVRRAYTCVVVAPSKVPRAPGERVKTNRLDSRKLAESLRGGQLHSIHVPSAVYRNLRHLVQMRDTHVRQLTSSKLRIKSLLLFEGIAFPDPHEKWTARAMRELQTLPCSDPVRFKLDDLLDTLHFHFQAAARATKQIRQYCLQEPELQQSIEVLLSLPGIGWIVASHLVARLGNHREIKNGRQIAGFLGIVSSEHSTGDKENRGEITRSGDSRLRNKLIQSAWTAIKRDPELRAFYRRIYQRHPKKVAARKAIVAVARKLTNRIYVVLKEQRPYVIRPDSSIAPLTAEETVGPRERLDGAQNDQS

SEQ ID NO: 478807 - protein, 335 aa, unidentified
MQVFGIDLSKEKFDVNFIDAKGNEKKQEVKNTVASISRFLSSVSGEVILCAEHTGVYGDLLVYLCNQMNIPIALVSGYAIKHSLGLVKGKSDPLDSKRIREYGERFTDKLEYVEYTEENITELKQLYTLRHQLVKQRKSLRTLDKGRGHLPMQSISVHNHINTVLDGLDKEIAAIEEEIEMLIRRDQEMNENYELVTGIVGVGPVIATDLIIKTGNFRIIDTYRKAASYAGVCPFPNTSGKMVGKSKTSPFADKKLKTLLYMGARAAVKHNKEYALYYQKKQLEGKPHYLIMNNLSNKLLRTAYSVVRNKTPYAQDHVCLDPRERNMNSSTKKVA

SEQ ID NO: 478808 - protein, 439 aa, unidentified
MQVVYSRCCGLDVHKDSLTACVLVFDEQGRRQVRKKEFPTYWQQLQRLKLWLYANKVQHVAMESTGVYWKPVWNILQGHFPLLVTNPYHMKNIPGRKTDQNDAEWIADLLAHGLLRGSFIPPPGIQELRDWTRYRVKLMQEYNRIHNRIHKVLEDANLKLSSVASDILGATGRAIIQAIIRGQEHPDWLADKAMSTLRNKRDQLRLVLKGRITDHHRHLLRELMDDVDRVEEKICRVQAEIAARMQIYQPLVDRLTTIPGVDTLTAWTLIAELGPDMSVFPDADHAASWAGLVPGSFESAGKRKSSRTRHGNRWLRRALCQSAWAVAHKKDCYLTAHFYRRASRQGAKKAIVATAHQILIIAFHILRDGTIYRERGGDAFDRMNPARTTKRLSQRLERLGYEVILKPRAELPEPPLPHRRGRRCKCAERGIDCKHRPSG

SEQ ID NO: 478809 - protein, 341 aa, unidentified
MKECIGLDVSMKETAVSIRRDGERVWRGKCVSDPAVIAQLVRKRAPTVDRIVFETGPLSVWFYHALRAEGLPAICIDARHAKSALDMAPNKTDANDADGLAHLAEIGFFREVRVKGFDSMLARTLIAARNRLVRITVDLSNHIRGFMKTFGLLIPAGKGSTFEAHVRRLLSDQPKLSEILQPMLDAWCATRLQAARLARRIAAEARQNDGCRILMSIPGVGAITATSFVTAIESPDNFRKSRSVGAWVGLTTRRYQSGEIDYKGRISRRGDHHLRGLLYEAASVILTRSSAESDLRSWGLKLRERIGFKRAAVALARKLAVTMHAMLRDGTLFDRGLNPTT

SEQ ID NO: 478810 - protein, 333 aa, unidentified
MKSIASVVMAGASSVVVGIDMAEEKFDVSMTGATKEIKTFVNNATGHSEFIKSLKGLNIKLVLMEATGKCETLLALALEKAQVPYKIESPVKLRNFSKALGIIEKTDGIDARAIALAGERLNIQPSERGLNIAAVRLRENIQLRNSFIDEKVRFENQMRRLVDTEVPKILKSHIASLKKLIAELTKRIKSLITENEALKAKYDLMTTATGVGFATASTLIAELPELGEISRTEISKLAGLAPMAKESGKITCRRHIRGGRRNVRCALYMATLTAMKKNELIKPFYDRLREKGKAVKVAMTACAHKLLIMLNAMLKLNRPWNEFCQMAKEKNIS

SEQ ID NO: 478811 - protein, 341 aa, unidentified
MRKTLYCGVDLHSNNAMYVITDQRDKQLLRKRLPNELPVVLKALAPFRARLKVVAVESTYNWYWLVDGLMDHEYPVVLAHPSEMEQYDGIKEADDLTDAAFLARLARLNILPTGYIYPKEDRPVRDLLRRRMLVVQHRTGVILSLQNMAERQTGQKVGWRALRKLREEERAELLGDHDCLTFVTAEQVDLIELLNEKIKRFEQKVLEHAQLRPAYACLQTLPGVGTILALTILLETGDIGRFKTVGDYTSYCRCVRATHTSNGKKKAHNNGKNGNPYLAWAFVEAVHHALRTCPQAQSFYEKKRAKRNGALATKALAAKWSKAAYYMMKRQENFDLTRVFG

SEQ ID NO: 478812 - protein, 416 aa, unidentified
MDKGERGHRLRGSRQPPSDKGKGVRFAGIDIAAEKHFVAVLDEQRVVLVKPTAFAEDAAGHAKLLDLLGPPGDLLVAMEATGHYWRNVFASLAATGHTVALLNPLRTSRFAGEDLQRTKTDAIDAVSIARFAAEKRPVPTRVPDTATQELRELVRLRDRLMQDLGDRVRQLHRVVDLGFPEFTRHVRTLDSELATAILHEYPTAEAFLGLPWKQLAKLCYDGRHKVGEEIAKGLVETAKVSVGRHHGPAYRTQVRFACEDIDLLRRRLRELDADIERTLGDHEVGSLLTTTIAGIGPTTAARLVAEFGDIAAFPDAAALAAYVGCIPGLRQSGKRLATRAGLTPHGSARLRTKLWMPTLTAVRKNVWLRSYYEGLRARGKLPKVALVASMRKLLVAVHYVAKSRKPFVPILAGARA

SEQ ID NO: 478813 - protein, 406 aa, unidentified
MRGPVITVDVSKGSCHYQPFLENGKPLRKPKVLHDTIEGFNQLMETIEKTREKSSEEKVPVVFEATGVYHRCLQKYLDDNGISYYIISPLLSAAYRKTNLHSNKTDPLDCAHIAKAYYCEGNLLPFPQQEDIYVKLQKMNRYYETELIHLKKRKVSFRSFMDIVYPRLDKSFGSNATLYDPIPMEVLKKYPHPSLLLKHREETIVKAIEKKVNHDKRFIEKIVHKMYECASHCYSGAEIEDIEVIKLPEMIEELQDQIKLCDSILDGLICEAEKIPYFNCIVSIVGIGRNLAARIIAELGDMSRFPNRRAISAFAGLNPKILQSGDVDGTHLKISKKGNRHLRCLLYLGATCNFRFKKHDPLYEFNQKKRQQANFPLKPKAANTATAHKLLIMIYAMSQSGESYRF

SEQ ID NO: 478814 - protein, 403 aa, unidentified
MNNVAGVDVSKGKSMVSVLRPFGEVVAKPFSVGHTGSELKELADYLKSLDGETRVVMEHTGRYYEPVARFLHEEGIFVSAVNPKLVKDYGNNTLRKVKTDKADARKIARYGLDNWMELRQHTPMDTIRMQLKTLNRQQGLYSKMKTMMKNNLIALLDQTYPGVNSLFDSPVREDGSQKWVDFAASFWHVDCVRSMSLAAFTERYRKWCKRHGYNFSQSRAIEVHTKAQDLIAMLPRDALTKTMIRQAIDALNAVSASLERLKNEMRTLAAQLPEYPVVMAMRGVGNSLGPQLMAELGDVTRFTHRNAITAFAGVDPGADQSGTHEAKSTRVSKSGAPELRRALFLVMDCLLKTQPQDDPVYRFMDKKRAEGKPYLVYMTAGANKFLRIYYGRVKEYLAQLENS

SEQ ID NO: 478815 - protein, 334 aa, unidentified
MDTHADVHVAAALDSVGGLLGVEEFPVSPAGYARLLGWLGGFGTVCLVGIEGTGGYGAGLARHVAAAGIRVVEVDRSDRQDRRRQGKSDPLDAVSAARAAQSGRARGAPKGRDGAVEAIRALMVAKRSAAGERTRTINQARALILTGPDDLRARFTRHTPAALVAGIASLRPRPGDVPGYAVRVALRELGRRAVFPGGQLERLDELIVPLVTARAPGLLALYGIGPNTAALLLIAAGDHPGRLRSEAAWAHLCAAAPIPASSGKVTRHRLNPGGDRQANHALWRIVFTRMGSCPATRAYVERRTKEGKSKAEIIRCLKRYVARQVYPHLRPDAG

SEQ ID NO: 478816 - protein, 337 aa, unidentified
MKYCGIDLHSNNSVVVVSDEEDRIVFNKRLPNDLGQIRAVLEVHREELAGVVIESTYNWYWLVDGLMDAGYRVHLAHPSAIKKYEGLKYSGDFADAGYLAHLLRLGLLAEGYIYPRAQRGARDLARKRMQLVRYRTAQILSIESILARQTGARMSGGAVKQLTAEQVEDLGFMPDVALAVEANRAVSQALGQQIEALEKRLKERVSVRGEFKLLKTTPGIGEILATTIMLEMGTPERFAKVGNFSSYCRCVDSLRESNNKKKGEGNAKNGNKYLAWAFVEAANFARRYCPQAKAFYERKKRKTNSVLATKALAHKLARACYHMLREHKPFDVSRCFG

SEQ ID NO: 478817 - protein, 367 aa, unidentified
MISVGIDVSKGKSTVCILKPYGEIVSKPFNITHTQKDLSELSSMLFRLNDEVKIVMEATGIYHLPVLTYLQEKGFFVSVINPYLMKSYRNESLRKAKTDKIDSRIIANYGIDHWFKMKEFQISGVIYEELKLLGQQYRHYMKLHLLSLAELTHLLDLTMPGIKNLLASWNETNRKDKRSDFVERFWHYDVITSMSEQEFTEKYILWAKEKKYVPSQEKAKVIYTLAQESIPTLPSETSSVKMLVTEAVRVLKEVDATLGLILSRMQEIAKTLPEYSVVREMGGVGNTLAPKLIAEIGDVRKFRNGKALVAFAGIDPPPYESGQFVGCNRKISKRGSASLRKVGYETMRSLKMRSRPEDPVYRYVVKK

SEQ ID NO: 478818 - protein, 338 aa, unidentified
MDNCAECGIDVAAKELLAVLRRQGKSEAERRFPNTPSGHKELQRYLTRAAARVRVCLESTGLYGLDVALYLQADSRLEVMVANPRAVKDFAKALLERSKSDPIDAWVLAEYAARMPFRAWQPPSSAALSLTALVRRLHALTETATREKNRLHALSVTATSLKIIVTELKRSLQWIERSQARLRREARKLIAADAWLQRRFQLLLSLPGVGETSALQLLGELALIPADAEVRQWVAYAGLDPCQCSSGSSLRKRPRISKVGNRHLRRALYMPALSAAHHNPAFAAYYGALQQRGKCRMVALVAVMRKLLHAAFGMFKHDALFEGTRVFRCPAAATGAAA

SEQ ID NO: 478819 - protein, 390 aa, unidentified
MARGPGLVTIAVDPHKRLNVVEVVDGASTVLGRQQFDHSTAGFKELMRFARTWRRRQWAIEGATGVGKNLAQRLVAADEVVLDVPSRKSSLVRAFSASSGRKSDEVDAHAVALAALNSPDLERVHADDHATALRLLASRRKELVGLRTQAVNRVHRELQILSPGGAKRGLSATRAKAMLSSVRPRDEVGKLRKALVADQIADLVAIDKRLADIKKQINAAVTAAPTTLPELRGVGPVITAIVVGEVRDVARFVDEDHFASYNGTAPTTWGSAGDTRPCVNPGGNRVLNHAIHMAAVTQLRNPGPGRDYYQRKIASGKKPKAALRCLKRRVSDAIYRRLVADAEKELGGPGGHVGATRNTSATGSTPTAGSSVKPQPGPRRNATPAVAHAS

SEQ ID NO: 478820 - protein, 332 aa, unidentified
MKGNSRMSRIQGKTSSLQLATHQVYVGIDVSKSHLDVYIHPCGIARRVRNDKTGIAALVRVLRPHTPETVVVEATGRYHRLCHRHLHNAGFCVAVMNPYRTRRFSDVLGQLAKTDKIDARMLAQFGAMVQPVASSPPAPAVAILSELLTARRQTGTEKTALQNQLSEAESNLVKRQIRARLKMCERHQTVLAKEIRTTIQQHSELKFRFDILTSIPGIALITAATLIAELDELGAANASQIAALVGVAPMNCDSGVWRGQRRIRGGRQNVRNALYMAALTASRASPDMAQFYNRLRNNGKPFKVAITAVMRKLAIIANTLITENRKWSPIHP

SEQ ID NO: 478821 - protein, 350 aa, unidentified
MIIIGCDYHPGFQQIAYVNTDTGDLSEERLGHKEQAEQFYQGLRTRGLTVRVGMEASGHARWFERLLNELQIELWIGDAAAVRTKRVRKQKTDRQDAQLLLRLLVENRFPRIWMPDAENRDLRQLLWHRHRLVQMRTRVMNQLHVVALNEGLRRKKALWRPAGRAQLESLALAPWASRRRQDLLDLLDQFTPKILELTRRLEEVVEKRPVARRLQTHPGVGPLTALAFELVIGTPERFQCAKQIASYVGLVPSEESSGDRRRLGHISKQGNALLRFLLVEAAQVTVRSDPQWRSQFFHLAMRRGRKIAKVAMARKLAVELYWMWRRGWDYNEMQQLGSHAGEPGNRHGVL

SEQ ID NO: 478822 - protein, 330 aa, unidentified
MNTSQLVIGVDVSKSFLDIAWGSKDPKPVRFNNDAQGMQRALKRIRRKKPHLIVLEATGGLEKPFMALLQSEGWNVARIQPTRIRQFARSNGTFAKNDRIDARIIAAYGEAFDPRPTPKPSPQQERLAALVRRRAELIEMRVSESNRLSTAHSSIRDSISEHIEILNKRIEEVEKEIDALVAAEEEISEEVAIMESMPGVGRVTAVSLAALVPELGKLSGKQISALVGLAPYSRDSGRKRGRRHIYGGRADARRVLYMAALSAIRFNPVLKEFYQRLKAKGKPFKVIIVAVMRKMLVILNAMLAHKQVWQIPERKSEADPARDSAPLPVA

SEQ ID NO: 478823 - protein, 345 aa, unidentified
MEHYVGIDLHARTLQLCVIDAEKGERTLERARVPNRLPEILELLKPFKEGGASIAVESTFNWYWLVDGLQDAGYEVHLAHTLGNARITKAKVKTDRRDAYRLARLLRSGDLQEGYIYPRETRPIRDLIRHRQRIVAARSGEYARIRIQLYREGILEHSRVSVQAMTDDEIDALFVHPAVAAVAHFELERIRLLKAQITKIERHIEDYAGELPEIVSLRSLPGVDLALAPIIVFETGDISRFASHRTYSSYCRLVPGCANSSNSSKPGRSRKEGNPLLKSAFTQAATHATRTNERVRRYANRQLSRRSGRGRKAIVRNNVGHKLAIAVWMMLTHGVAYDEKLLFGN

SEQ ID NO: 478824 - protein, 319 aa, unidentified
MSEVVLGIDVSKKTLDAALVFDNRTLCKQFKNSLTGFDLLAVWLASFQIKQVHACLEATGVYGEAVALFLHERGDRVSVVNPLRIKGYANANMQRNKTDRLDARLIASFCQTQKPDAWQPPSEEVKQLQSLVRRVEVLAEMLQAEENRLANAASEIKPSIERIIGLLTEELKELERQIKRHVDQHPNLKEQNQLLQTIPGIGRRTANLLLSEIEFERYSSARSLAAQAGVTPRKRQSGTSLKQTNLSKLGNARIRRALYFPAIVAKQHNKIIKEFAERLKKNGKTPMQIVCAAMRKLLHIAFGVLKHRRAFDASLAFSA

SEQ ID NO: 478825 - protein, 365 aa, unidentified
MKKISTAAAPKIEKVEGQKLTIGLDLGDRSSWYCVLDEGGEVLLERKLATTPKAMKEVFGGMPRSRIALETGMHSPWVSRLLSELEHEVIVAHARNVRLIGESRRKDDRFDARTLARLARIDPDLLGPVQHRGRKAQVDLTVIRARAGLVRARTSLINTARGLTKSYGERLRRCSPRKVSRELAEGLSPELQGALQPLLEEIESLSERIGEYNERVQQIAQESYPEVARLEQVKGVGTLIALTYVLTLENPRRFRKSRDVGCYLGLRPGRRNSGQSEPQLHISKEGDPYLRTMMVQSAHHILGPFGADSDLRRWGLKLAERGGKNAKKRAVVAVARKLSILLHRLWVSGEAYEPLRNQRVLTAAA

SEQ ID NO: 478826 - protein, 372 aa, unidentified
MSSSIIWIGMDVHKDTVMVAVYEGGAQEAEVVQQLPNDLHKLRRFFQRWSRGGEVRACYEASGAGYVLHRELTDWGVHCVVVAPSLTPVRPGDQRKHDRRDAIQLARLYRAGELVAIRIPTPAEERVRDVVRCRQCFQREILRSRHYVLKFLRRRGFVFREGSHWGRKHRRWLESLLHGEKLAQEDRAVFGEYLALLDYKISRRDELDEQITEIAFSPQYRAVVERLCCFRGINTLAAITLATEIGDWRRFERPGQLMAFLGLVPKEHSSGDRDRKGPITKAGNSRCRHGLVQGAWKYRHRPAIGVDLKRRQKGQLPEIIAHAWKAQHRLYKTFHRIAYRKSNQIAAVAVARELVGFLWAAIRDMEQREAAA

SEQ ID NO: 478827 - protein, 376 aa, unidentified
MSKVLFVGLDVHAETIAVAVAEMGGEMRSSGVIPNRLESIRKLVHKLGPVQHLRACYEAGPTGYVLYWQLTQLGVACEVIAPSLVPTKAGDRVKTDRRDAEKLARCHRAGELTAVWVPDAAHEALRDLVRAREAAKKDQLKARHRLGKFLLRHGCRPEGIKAWTKQHREWIKSHVHFDQPALEATLTDYREEVDHVWERIVKLEKAIDEAIRQAPPEIRAVIEALQALRGVAQTTAASIVSELGSLSRFPSPRQLMGYSGLVAREHSSGNRVQRGGITKTGNGHLRRVLVEAAWAYQHRPNVIGFLARRQKSLAISEEAKKIAWKAQQRLHKRYKAMDARGKNKNQIVTAIGRELLGFIWAIAIETEKQHRLAKTA

SEQ ID NO: 478828 - protein, 345 aa, unidentified
MIIGCDFHPSWQQVSWLDTETGETGERKLVQASGDAEQFYRQLPVPSLIGVEATGNCHWRVDLLAEIGHELWVGDAAQIRASCVRQQKTDQRDAEHILKLLVEGRFPRIWMPSSEVRDLRQLLLHRHKLVTIRTRVKNELQHLCLNQGVQRKHKLWSKAGQQVLRELPLKPWAARRREDLLGLLALLDQQMEPLDRAVKEEAQRDKMALLLQTQPGVGAVTALAYVLTMGDVSRFARGKQVASYLGLIPREHSSGGRQKLGAITKQGNRMLRTLLVEAAQMAVRCDPGLRREYLHRCHQKPKAVAKVAVARKLAVRLYWMLRTQKPYPEVVRIESSSTEALVSES

SEQ ID NO: 478829 - protein, 442 aa, unidentified
MVRADVAGVDIGSQRHWVCAPTQDGGGREIADFGATTPELIRMAEWLKARQVKFVAMESTGVYWIAPHEVLEAHGLEVLLVDTRQLARVPGRDKKTDPTDCEWIQRLHSCGLLRGAFRPTEAICMLRTLVRDKATLVAESGDWVRRMQKSLDQMNVRVHRAVSDLSGTTGMNMVRAIAGGERDARELAKLRDPRCHKSEEEIAEQLSGHWREDHLFSLCQAVKIYDAIEERIAAYEKEILRKLGEMEHPEHRGENAPALKNANKARLIKNRGQEPKRQAWYRFRGADATQIDTIGVETVEVVISEYGPDLSRFPTEKEFVSHATLAPHVPKSGGKPLRKKRRSSASTRVANALRMAAQCLRNSHTALGAYYRYIAQRKGADIATFAAARKIATLIYRLLRWGQPYVDEGVAAYEKRYQQQRLKALQSRAKQLGYQLTPVTAP

SEQ ID NO: 478830 - protein, 400 aa, unidentified
MLSIGIDVSKGKSTVCGMKPGGEVLYTPFEIQHTREGMLELVSLLHSSGEEVRVVLESTGSYHCPVVAVLVENEIFVSIVNSLRMKRFCSQSIRKVKTDRIDAMQIALYGLTYWQELQPVRMSEDTYRELQLLARQYYQMTSILIKAKVDFSVICDQVLPGMQELMNDHAGRHKLSDFVLRYHHISRILKMGETRFRKDYCKWAEKKGYRNCERMAARIFATAQNGIPVLPNAPSTQSVITEAIRVLHAVEASRDVILAQMQTLAKTLPEYSLVREMPCIGDTLAPRLIAEIGDVRRFHNKRALIAYAGIDAPPYQSGKFCANNRHISKRGNRYLRKTGYEVMQSYVMHKPTDDPVFTFIEKKRSEGKCGKVAMVAGLNKFLRIYYGKVTELYHSLSAIE

SEQ ID NO: 478831 - protein, 414 aa, unidentified
MGGFPVFTLLPFQGGVALSALYIGIDVSKDFSTAQAIDEKGNKCFYLELAMTADGFDKLLKAITTHGKDNAQVTVAMESTGCYHINLFSFLTHKGIRCVIINPLLIANFTRLSLRKTKTDKKDALTIAQFLLVHKDALLKTELSPGRQDLKDLAREHESLTNLIAGMKNDIRRMLQITFPELESLCNIFSETILDLLRQFPSARLIKIAKPNTIVKALLHEDKRKKISVSAEDIIRAAKASVASHGAAKEIILPEKISTLQHLIGKKVRMKKALVEACEGMMVEDIEIITSIRGISEITASRLLAEIGDYRAFSTYKHLIAFAGLDPSVHQSGKFEGISRISKRGNRHLRYIIYLMTTCVVRGDNIFRTYYQKRRAEGQPFKKAIMATAHKLIRVLFTMLSKRTTYQALEVNAI

SEQ ID NO: 478832 - protein, 490 aa, unidentified
MSRPKRSAAPARPSATQAPPKPAPQPPRAQPAALPVLNPNAAGIDVHSDMHMVCVPADRVAPAPAQAAGAPANVRSFGANSCDLTAIADWLAECGVTTVAMESTGVYWVPLFELLESRGFEVWLVEPGQLSRCGARPKTDVLDVQWIQRLHSYGLLRASFRPPDSVLALRGYHRQRQMQIRYAGSHTQHMQKALEQMNVKLTEVVSDITGLTGQRIIAAILAGERDPAELARLRDPKCKNDATTIARALEGTWRPEHLFALRQAYELYRFHHQQIADCDAIIQEELAQLPNRAGDKSFTAKPRRCGRKPNDLVFDACEPLFQALGVDLTRIEGIEVGTALIILAEIGVDVSRFPTEKHFASWLGVCPRQQESNKTKKKRSPRKGKNRVAIALRMAAQSLGRTQSPLGLFYRRIKSRIGGKGAVTATAHKLACLVYRMLKYGTEYVQQSMQEYERKVRGQMERALQRKAAALGYQLIRTQALSAEPVQAPM

SEQ ID NO: 478833 - protein, 319 aa, unidentified
MAQNDLIVAGIDVAKDKVDVCIRSLSLRRTFASTAEGRRELASWLRRQKVGKAVMEASGGYEREWAKALRDAKIKVRIVDPKRVRSFARSAGRLAKNDTIDAEMIAWFAETFDEARGQAYDATREQLHQMVNARQAMMDMQARLENQGEHAVPAAVQRMHAQVLKKIGAELVKIEAAISTLIQATPHFNELAEIIESVPGLGRTTSAALIAAMPELGQANNRIVAALLGVAPYDDDSGRRRGERHIKGGRRRTRNVFYMACLGAATQHNPVLKAFYDRLVAKGKEKKVALIACMRKLISILNIMIERRQKWDASRHALS

SEQ ID NO: 478834 - protein, 342 aa, unidentified
MHNRQNYLYVGVELHKEHHTAVIINCWQEKLGEIQFENKPSAFSKFLLEVETYVSAGVSVVFGLEDVGGYGRALAKYLVDHEQVVKEVNPALSFLERKSHVTTQKSDSWDAECVARILVNKFNQLPDAKPKDLFWSIQQLVSRRNALVKAQSALKNQLHIQLNHHYPSYKKFFSELDGKTALAFWQQYPSPSCLEGANIKQLTAFLLDVSNNTCSVKKASEILKLVKEDEHTMKEYQETRDFLVRSIVRDIEFKKTEIKYIERELKQLVKLLAYQLETMPGIELVTASALIAEIGDVRRFPNANKLARFAGIAPVYFGSLVGKVRHTKANKETGRYTLYFII

SEQ ID NO: 478835 - protein, 386 aa, unidentified
MRRAAKRGPGPSHLLITPDHAGNVVGIDPHKQTLTATVVDPCGGIVASEHFKVSGDGHRALEAWAKQFGAIARWGVEGAVGWGRHTAMFLTGRGYDVRDVCANRTARNDRGRQRGKSDVLDSERIAREVLAHPLLPKAFKRAGQDQGPDEQHQLLAIWHNRRQSILKSRQHLVNEAEHLLCELPLELREQLPASKAVRPRLTALAARNRRRRYDPPTKLRLQMLDEYHAQIAALDREEKQVVAHLTELVRESGSTLAELCGLSVRSVAELLVEVGDVRRFTEGGFARFNGTAPLPASTGEGPGEPIRHRYNPGGNRRINAVLHRMAITQLRCEPRAQAIYANARASGPHTKKEARRVLKRHLSDVVYRRMTRDLAAHTTTEPLLAA

SEQ ID NO: 478836 - protein, 366 aa, unidentified
MQKISTVRRDGNRILKRKQFTVGLDLGDRSSSYCVLNENGEIVLEQKVATTPEVIQQAFGKMPRCRIAMETGTHSPWVSRLLTALGHEVIVAHAQRVRLIVKSRRKDDRLDARTLARLARIDPELLSPVQHRSAQAQLHLTEIRARAGLVSARTALVNAARGLVKSYGERLRKCGTQQFRRETTSKLSAGLREALEPLLREVESLNERIQEYDWRIEKMAKETYPETALLKQVKGVGDLIATAYVLTIEDPHRFRKSRDAGCFVGLQPGRRNSGESEPQLHISKEGDEYLRTLLVQGAHYILGPFGEDSDLRRWGKKLAARGGKNAKKRAVVAVARKLAVLLHRLWVSGEVYEPLHNSQKAMNAAA

SEQ ID NO: 478837 - protein, 405 aa, unidentified
MKIIALDVHRTFAQVAILENGKIRDAGRLELEREHILKFAKRLNVEDEIVLEATVNTKAIVRLLSPHVNRVVISNPLLVRAIAWAKVKTDKIDASVLAKLHASGFLPEVWMPDEETERLRRVVAERVQLVSQMTRLKNRIHSVLHANLIPPFSGSLFSKRGRAWLEALPVAEDQQRVILRHASELDRLGHDLKQIDEDLAQAALQEPRVKQLMTITGVNMIVALSVLAAVGDIGRFSSPEKLVSYFGLNPRVRQSGDKPAYHGRITKQGRSHARAMLVEAAWSVSRTPGPLRAFFQRIKEKRGNQVAAVATARKLTVVIWHMLSKGEEYIWSRPALLDWKLRKLELAAGYPSKRGGRTKGSAADYSLKSVRDREREAVGHAEEVYRRFVTKWKQRSPMANPVSHQ

SEQ ID NO: 478838 - protein, 409 aa, unidentified
MRYYIGVDWGDEAHAVWGEDEQGQRVSAGMVAHSPVGFSEWGRQLDEWRAQGLGLWAAIERPEGRVVDVLLDHGVRVYPVNPKALARARDRFRQSGAKDDLFDARVLAGFLRTDHAHLMALEPSSEGAQELKLLTEDYQRQVRTQTRLVNQLTATLKAYYPRALDVAELTTALAAAFLQAYPTPATLMTLTERQWQRWAKGHHLSEVRTTDLWTKLQQPQLPVPPHVVRAKSRLMQALVTELTAVVAAVASYRQAIDDFFATMPAAAQARTLPVGEHGVTVPTLWARLGDAPGRWESFRHLQAQAGMVPITVRSGKLVVVRFRFACDKQLRYAVDQLAWLSLQRSEWARAYYDEQRARGHRHRRALRALGAKWLKIIFIMWQRHVPYSEEHHLATMARQALRHPEKKIA

SEQ ID NO: 478839 - protein, 347 aa, unidentified
MAPQLTLGVDTHLDVHVAALLDERGALLGVESFDTTPDGYRNLLAWAASQGEVVLAGVEGTGSYGAGLTRHLHAEGVKVLEVDRPNRQRRRRRGKSDPQDAITAARAAQSGDAQGEAKTRDGNVEAMRVLRVARSSARKSRTQALNQMRSIISTAPDQIRSELRDLNVYRLLERASAYRPGTRRDVASLTKLSLRALARRALALEAEIADIDVILKELVHDTAPELVARVGIGVDSATALLVAAGDNPGRLRNEATFAHLCGVAPIDASSGKHERHRLNRGGDRQANSALWHIVITRMVYDPRTRDYIDRRTKEGLTKKEAFRCLKRYIAREVYNHLPHDQLAIDSP

SEQ ID NO: 478840 - protein, 430 aa, unidentified
MAFLVILRISYEVVALISSEEHKHYLTLIKIGVYTMLYLGIDIAKHKHYASIMDSNGNPVEKPFPVYNHRKGGQALLKKIYQHIDAPTEIKIGMEATGHYWLALYSFLLDHGFSVIVLNPIQTNAWRKGTEIRKRKTDAIDATMIADVIRFGNFLETPLVDEKMFALKQLSRFRNSLVSSMGDLKRKSLVVLDQTFPEYQKMFSDVFGKTSTQLLLAYASPSDYEQVSIDDLTQIIEQASRNRLGKEKAHQIIESASHSFGITFGKEAFSFQLKMLMEQIHFIEIQLKQCEEQMDELLIELDTPITTVPGIGPILGATILGEIGDIKRFDKPSKLVAYAGIDASVSQSGQYNSTSMSISKRGSSHLRRALFQAAVTGYRYDPILKAFYEKKKQQGKHYYVCICAVARKLCHIIYAILKNNKPYKVPIPIA

SEQ ID NO: 478841 - protein, 408 aa, unidentified
MSQNIIFGIDVSSRSSTVCVVIDRVKQGNSFTITNDSFGYQDLLDHLNQYLITPLVVFEATGVYSLSLQAFLEDHHIKYLRLNPLQAKKLMDNNLRHNKTDKLDAYHLALIQFSAPQKLQAPQSREYHELQAASRYYEELTRALIVNKNQLHRNLQSTFPQIEHILSNPSGKIYWTIVSLFPHAQYVLDMNEDQVKQRLLSISGIGRQRAQYLTARLYAFARQAYPYDRKDGITVRAIQRTISNLLSLSNERDQVINYMEKLTKVVNARALTIYLSIPGIARTTALRLIAELGDLRRFNTSAQVDAFVGIDPGRSQSGDKDSRLGITKHGNHIARKILYRVITQMETVRATQPCHITDYYDKKKQSSHSPGYKKIAIASVHKLIRTLFALIKHNQLYDYNIATKNQRL

SEQ ID NO: 478842 - protein, 475 aa, unidentified
MNVKGTKKKNQVVKANIMEQQELLKKAEVIKSNLTASTWHELETKGKFDKNEKLSFISDDMLILGCDVGSETHYLRAIDTRGRELSKSAFPFSNDSEGFQSAKEWAVKIAAEHDKKQIVLGLEPTGHYWFCLATWMISNGISVVQVNPYAVKQTKEVEDNSQLKDDTKDPKLIANLVKDGNFGMSYLPEKLYAELRRLSMFRDQLNEDRIRAINRMHREMKIYFPEYKDAFGKVDGAFSLELLKAAPFPDDLKALDENGIRQIWREAKLRGGGYSRSGEILGYARLSIGIRDGADAAKIAVQWFVKKIMELDEELAVIENLINQKCQEIPHAGNILEISGIGENTLSGILADMGDISRFDDVKEIQKLSGLGLVACSSGKHKGETKISHRGRKRLRYWLFQAAKSAVAHAEEFKELHVYYTTRPDNPLKKMQSLIVIACKLLRIVYTILKKGTVYAPKKMLMDIRRPEKKEAIAA

SEQ ID NO: 478843 - protein, 402 aa, unidentified
MDWGSEKHQVCILDQHGTIVGERNFPHGGAGLAELGDWLLSVAGTATAVAVGIEVPHGPVVDSLIDRGFVVHAINPKQLDRLRDRFSVAGAKDDRRDGYVLADSVRTDRRLFRGLHVADPRLVALRAWSRLAEELTEERVRLGNRVHHELWRYYPEMTKLTDDIAASWFLELWTIAPTPAKARQLRKATVGQLLKQHRIRRIDAETVIRTLREPAIKVADGVAEAASVHMRSLIARLHVVNRELREAERQLDKICAEIGAAEAASGDGLQRQDVMILKSMPGIGRINLAALLSEGSGPLSRRDYPALRTLCGAAPVTRRSGKSQVVIMRYAAHVRLRNTVYHWARVASQHDPTSKSRYAALRQRGHSHGRALRGVADRLLGLACVLLQRQTPFDPQYGHPAT

SEQ ID NO: 478844 - protein, 344 aa, unidentified
MDHIGIDLHKRESQICVERGDGELIERTIHTTRDRFAAVLGGRERARILVEASTESEWVAQCLEGLGHEVIVADPNYAPMYPERRRRVKTNRRDARTLATACRLGAYRPAHRVSAEQRRVRQQLTVRDLLVRSRTRAIAMTGALVRAEGLRIRPGAPEQFLVRLDELALPPALHATLVATRALMLTLDVEIRQADEAIRQIVLHDPVVARLISAPGVGPVTAAAFVATLDRADRFAGAHHVESYLGLVPSEASSADSHRRGHITKAGNPRMRWLLVQAAWAVWHSRQPDAQPLRVWAQRIAHRRGQSVAIVALARRLAGILFAMWRDETPFEAARLDRPARTAR

SEQ ID NO: 478845 - protein, 341 aa, unidentified
MKQFIRIGVDLAKNYFQVHALANEGAPAVTRKLRRSKMHEFFSQIEPCLIGMEACGSAHYWARELKAMGHEVLLMPPAYTKPYVKRGKNDAVDADAICEAVSRPGMRFVPIKSTGQQATLMLHKTRELLIKQQTMSVNSLRGHLSEFGIVVAKGIGRVDELLELAENDTTLPEVAKAAVKILAQHLDGLEMSIDDLEKQIGRAHAQNEMSQLLDKVPGIGKIIATVITASVPDPSVFKSGRDFAAWLGLTPRQNSSGGKQTLGSITKQGNRYIRKQLVLGATSLLNVVGKRKGPLRDWIVALLAKKPARLVTVALANKLARILWAMMKTGESFRAEMFAKA

SEQ ID NO: 478846 - protein, 417 aa, unidentified
MNSPPETIPIQRYIGIDIHKYYLMIGGQNIHQEWTLRPRQVQMPRFQDWAEKNLKPGDAVVIETTGSVWDIYDIVAPLVSKTVVAHARKVRQIAEARVKTDKEDIRRLITLLIADIVPEVWVPPMHVRELRSLISFRWRLNKQMTMSKNRLQSVVQRFNLNPPEGGLLADKNKPWWEEQEFSDLTGFEVEQDLEIVKTLERQKEALDQKLSELSNSEPWASDMVYLMQIPGLGPIFSMVILSAIGDIKRFSHPKKLVGYAGLGAGVHASGEKYQEKSITKEGRKELRWALVEAAWRAVGSDPYWKAQHKRLEKRMHRNKATVAIARRLLVSIWHILTKREPYRHFDEETIAYKMLIWSWAMDEKSRDGMTPQQFAKYGLLRLGIGQDLERIERGGAFRRIAPTEEILALKPELAPPR

SEQ ID NO: 478847 - protein, 331 aa, unidentified
MNQIGIDVSNDVFDATMCFGGKIARRQFSNSPSGHRQFMTWALRRTNSARVCLEATGIYHLQLSLALHRNPSIELMVVNPCAARRFAQANMVRAKTDTIDADGLLQYLQRMPFRPWCAPREEVLQLQCLAHRVAQLDKEITRERSRLHAVRRAGPHTRPVQQDIQAHIKQIKRRLETIKAKAMDVIMSDRQLADDARIIDTAPGFAELSSMKLVAELSPLPDDMMAPQWVAQAGLDPRPVESGSSQRSPRRISKQGNARIRSALYMPALVAKQHDPNVKAYYEKLVAAGKPKMQAIVAVMRKLLHALWGMLHHRQEWDGEKFYRLNHPNPA

SEQ ID NO: 478848 - protein, 410 aa, unidentified
MTVITIAQNTPVLVAVDIAKARHEVLISVPGKKRHRRLTVLNELADFTRLIAALKDYGHPVRAAFEATGNYHRALAYHLATAGFEVKLVSSVALARTREALHNSWDKNDPKDAQVILHMMEIGNEQFYHDPLVRGTNDIQELSKTHDIVSKSKTELWHRILTHYLPLYFPEADRFHRSSRSDWFFAFLERYPSPHFISAMSKDAFIADAWDVVGRKVAKERLLADIYETSKASVGLPVDLDSDAISMFRLVLGEGRSLIAQRNQIEDRAVALLKDLPDYQLLTSIPGIGPINALTILAEAGDLRRFGHHRQFLKFCGMDLATIQSGTFRGQTKLSKYGNARLRRTLWMAGQVAILQRANSFRDKFERYIAKDRYNTHLRRKAYTAIAAKMARTVHGIIKNGEPYRPFFEG

SEQ ID NO: 478849 - protein, 346 aa, unidentified
MRILALDLGKYKSVACDYEAETGRHCFTTIATKPQALHDLIVDREPDCVVIEICSIAGWVSDLVRALGIELQVANPNDERWQWRKVKTKNDRADALKLAQLSALNQLRLVHVPQSEIRQWRALITYRQHLVQRRTKIKNHIRDLLLREGQLLPRYRSAWTQEGVANLEAMSKPFSEVSLDELWRGELGVELAQFKAVQRQLAEVVTKLDELGAANHSVQLLRTIGGVGPRLAEAVVTMFDDPHRFRTAGQVSSYIGMVPKQFDSGETQRAGRITRHGNRLVRSLLVEVAWCALRHNPWARETYKRISGGKKSRKKIAVVAVGRKLLVCCWAMLRKQTEWRAELSVA

SEQ ID NO: 478850 - protein, 418 aa, unidentified
MSYTVAGIDIHKKVLMVVVAIAGDEVADPAGEAIVFECRRFGAGASERNHIVSWLREHNVTEVVMESTAQYWKPVWLDLERHFAKLHLAQAHSNRAPKGRKNDFGDAKRLARRLLADELILSFVPDGEQRAWRTLTRGKHQLVRDRVRLQNQLEALLEEMRIKLSSVVSDLLGVSGRRILAALAGGETDPSKLAELGDDRLKCSKAELADALNGHAEPMHRQMLQLYLERLQLLDRQIESLDRMAAEALKKHEDAVIRLAEIPGFGVDSAQQLIAEMGVDAEAFASPGRFTSWAGLCPGTEESAEQNHSSRSAKGNRFVRRILTQAAQAAVKKKGSHFQSLFRRFLPRLHYNGAIWAIAHRLGCLVWKILHQGISYVEQGQETNPAAKKRRAQKMVLALRKLGYAVALTPIVREPARG

SEQ ID NO: 478851 - protein, 351 aa, unidentified
MLIIGCDYHPSVQQIAWVDTETGETGERRLKHSDREAEGFYRELKEKGFSVRVGMEATGHARWFERLLGELGFELWVGDPGKIRAKQVKKQKNDRRDAEHLLKLLMKDDFPRLWVPTPENRDVRQLVLHRHRLVGMRTRVMNQLQAIAMNEGIRRKRGLWNKQGRALLESLSLPPWTSRRRQELLELLDHLDPSIEQLSQAIEQEAEKWPEVQRLLTHPGVGPITALAYVLVIGTPHRFRCGKQVASYLGLAPSEASSGDRQRLGHISKQGNAMLRHLLGQAAQSVAHCEDQWRGQYVHLALRRNHAIAKVAMARKLAVRLFWMWRKEWDYQQVKNFGSHVGQLVKSHGVE

SEQ ID NO: 478852 - protein, 330 aa, unidentified
MKQVSHIGVDVDSQELVCAMQRAGQRAPVATFANTAAGHKQFIRWVTKGGRAARVCLEVTGIYSLEFALALHHANHVEVMVVNPRAIKDFGRACMQRAKTDAVDAGVILDFLERMPFTPWQPPAPEILALQAINRRIVQLHTELTREKNRRHAAEFAGASADAIAHDIEVNMHHLERRLERMHQRGLQLVHDTPTLSTKLAHLVSAKGIGEASAMRLLAELLVLPDDLAAPQWVAHAGLDPRPCESGTSVHRPRRITKVGNRYLRAALYMPALVAIQHEPNVKAFYNKLVTAGKKPMQAVVAVMRKLLHAIWGMLKHDQDFDGNKFFKMA

SEQ ID NO: 478853 - protein, 321 aa, unidentified
MNASIFVGIDIAKFSLQIACLELKLDTQLPNSLVGWNRLVKLLKIHGAKVLLICEATGGLERGLVDQLQKADLKVCVLNPRQARDFARAANRLAKTDKIDAAMLAEFGRRMAPRPAAKVAPWVRTLAALVGRREELTAMRTAESNRLEQNFLSFVAKQLNASIKRFNQDLKALEVQIDRLIESSPELKTKHQLLCAVQGVGSITATTLLATMPELGSLEPNQVANLLGVAPLNCDSGQWRGKRRIYGGRRFARRVMYMASLSATRHNEILKAFYGRLVQAGKPKKLALVAVMRKLIIYLNRVLKPKNIVTFPVPTAQAPCF

SEQ ID NO: 478854 - protein, 370 aa, unidentified
MLDTTTFIGLDVHARSIKAVSLDVMTGEVRAATFGYDAGAVAEWVRSVDPRARCVYESGVTGFDLQKRLSGLGVDCVVGAVSKMIKPSADRRRKNDRNDAEFLARMLSVGNVVEVWVPDDECEAARDLTRALEDARDDLSRSKQRLSKFLLRHGLAFDERTPTGRRRGNWTRAHWSWIESIRFAEGADNDVLAYYVDAVRRAAEEKARLEGLVEAEARKPRWRKRVDSLRCLKGVDTASAADLVFEAGEFSRFRNARSFAAWVGLTPSEHSSGESDRRGAITEAGNKHLRKTLVEAAWHYLTCSGRPKDLARGQAPDRGARRHAAKGVRRLVERREALLARGVHGNKANVATARELACWVWAVGLMAEEA

SEQ ID NO: 478855 - protein, 342 aa, unidentified
MMIIGCDFHPGFQQIAYVELETGEYGERRLNHPTEAEQFYRSLAGKQVRIGVEATGGLRWFRKLMHELGHELLLGDASAIRASSPRKQKTDMRDARHMLRLLEENRFPAIWQPPMENEDLRQLLLHRCRMVRMQTRIKNQLDMMAKNEGLVSSRSWSKKRRQQIEALPLSGWHVQRRKDLFQLMEELDKRIEPLDKAVLEASKQSPEAVLLMTHPGVGPVVSLAYVLILGDWRRFPRGKQVGSYLGLIPAEASSGKRQQRLGHISKQGNTLLRWLLVQAATKAQRHDPSWHRQYLRLSIQKHHGVAKVAIAHKLAVRLYWMLRSGQDYKQVKERGSHAGQSV

SEQ ID NO: 478856 - protein, 343 aa, unidentified
MQTVTTIGLDIAKSVFQVHGIDAEGKVLIRRQLKRRYVLAFFEKLPPCLVGIEACASSHHWSRQLKALGHTVRLMPPAYVKPYVKRQKNDATDAEAICEAVTRANMRFVETKTPEQQSCLMLHRTRQLFIRQQTSVINAIRAHLAEFGIVAPVGRKGVEQLLAVVADASDQRVPELARACVAALGAQLRRLKEQILEFDRRILAWHRSNETSRRLDEIPGIGPALATALVASVADPKAFRSGRHFSAWLGLVPKQHSSGGKDRLGSISKQGDRYLRSLFTAGALAVIRYAKIHGTKHRPWLAALLARRPTKVAAIALANKIARIAWAMMVRGEPYKEPVALAA

SEQ ID NO: 478857 - protein, 428 aa, unidentified
MQYALIQVLPDVPAGGVCAGIDWATADHVACVVDMAGRVRDRFSAAHDKAGLGAMITRLRRAGAREVAIERGDGVLVDALLAAGLTVVVITSRQVKNLRSRYGSSGAKDDRFDSFVLADTLRTDRARLRPLIPDTAATIALRAAVRARRNLVAHRVAACNRLRAHLAMAFPAAAGLFFELDSPISLAFLARFGCHDAVAGVGEQQMAAWLQTIPARGNAAPASVLCARLRAAAPGATGEEGAAQAAVTAALAATLTALAAQVKVLEARIAAQLAAHPDAHIFTALPRAGTLRAARLLAEIGDCRSKFPDPESLAGLAGIAPVTRQSGKHTSIEFRWAVNRQLRDAFCDFADGSRHASQWAAGIYAEARARGKDHPHAVRILARAWSCIIWRCWQEGTAYDPAKHTALQRIRGQQAGEPADGPGPGQDR

SEQ ID NO: 478858 - protein, 346 aa, unidentified
MEHYVGLDVSLKLTAICVVDQTGKIQCEGVVHSDPEAIATFIKSNAPHVARIGLETGATSTWLWTELNKLGLPVICIDARHAKAALKMQINKSDRNDAVGIARIMQCGWYREVRVKDLDSHAVKALLVSRALLVKIKRDLENQIRGLLKNLGLVIGPAKMNLFALRAAELTKDRPELAVAVTPLLTARVAIEQQVADLDRKVMKLARNNAHARQFMTAPGIGPVTALCFLATIDDPRRFRRSRNVGAYVGLTTRRYASGEIDWTGRISKCGDKMLRSYLYEAANVLLTRVAKWSALKAWGIRLAKRSGLRKAKVAVARKLAVILHRMWIDGTEFNWSSKETAKQTA

SEQ ID NO: 478859 - protein, 414 aa, unidentified
MKRQENKACGADIHKRFLMACILSRDGSKVLNRFDMTVEGVLGFASWLKDNNCKKVAVESTGNYWHLVYQVLDDEFEFILGNAFKTRRHSGAKTDKRDAEWLAELCLNNQIEPSMILPKEDRELRALTRARKGYVDFRSKLKARTIQELEACTIKLASELSDVFGKSGRHVLQGLVDGRSADVIVESIPSKKVKKNKEKIKQAIIAGLSPISIFLIKSHIQMIDEVDKKLVQLDAQISRLLKARKRDVEIAMSIPGIGFVSAAAILSEIGDYRNFASGKKLAAFSGLDPSVYESAGKRYNGKITKMGSKYLRRMIIECAHALSRTKAKTQLKRFFLRIMARRGKNIATVALARKMLMVLHHLLINQEMYKDDGLDRPKNVKVSFSEESNYPSLDEMIEVLVGAGYFVKKDSQGG

SEQ ID NO: 478860 - protein, 345 aa, unidentified
MKIVAMDMGKSKTVVCYFDSVKGSHRYETIPTLPQKVHDAVVGGEAGRVVVEIGPGAGWVCDLCKALGIEVQVANTNHEAWRWKNVKKKGDRDDALKLARLSIAGDLPLVYVPRKDVRQKRSMIAYRQNLLKRRIAITNNIRSIFDREGLVMYSGDKAWNKTGMKYLASEAKEPLTCGVEELWRAELYIELAQLALVKDALEQIEAKLDALGKKDRSTKILMSVPGIGPRLSEAMSAAIDDASRFENGKQVGSYFGLTPRRYQSGSTNRQGKISGCGNKLVRSMLIQVSWLGLRYSAWMRGIYERARRGSKSRKKIAIVAVARKLAVLCWVLLKEDRFWQERKAA

SEQ ID NO: 478861 - protein, 420 aa, unidentified
MITLATEENRIIVGVDTHSDTHHVAIISDYGRPIADQEFLAVGSGYRGILEFIGGHGTVIAAGVEGTGSYGAELTKVLRGAGVQVLEVTRPNRQARRLKGKSDPLDAYQAAQSVLAERGLATPKVKDGPVECLRILRMSRSSAMKARTITINQIRGLLVSSPDELRSRYRGLNTSALIASLSRSRPHGHIADTSYVTSLTLKTLAVRYQSLSSEIDTVDASLKEILDSYAPLLCDLVGVGTEVASQLLVTVGDNPERVNNEAQFAALTGVAPIPASSGKTSRHRLSRGGDRDANSALHHIVLVRMVSDQRTKEYVAKRTIEGKGKREIMRCLKRYVAREIYRQISNPVPAPIITDLRPLRKQLGLTLQSVSEHLNQWPSIISRIERGQSRNDILAADYRRWLKNQLELGVDFSGPCFKEV

SEQ ID NO: 478862 - protein, 338 aa, unidentified
MNHYAGIDVSLKESHVCVVDASGKIIREGKVASEPEDLIGWFGALGLAVTRIGLEAGPLSQWLYAALRDAGLAIELLETRHVRNALKIMPVKTDRKDAQGIAELMRLGWFRPVHCKSMEAQEVRAMLTARKLVQKMLHEAEMSLRGILRGFGLKVGKTTPVTFEARIRELVAGHPSLEGIAQSLLAARAVLRREFNGFEKRLRAMARSDTRARLLMSVPAVGTIVALTYASAIDDPTRFKSSKIVGAHFGLTPKKYQSGETDRSGRISKIGDASVRAALYESAHIMLTKPIKGCTALKAWAMRIAKRAGMNKAKVALARKLAVIMHRMLADGTTFTPA

SEQ ID NO: 478863 - protein, 313 aa, unidentified
MSAPNYAGIDISKDKLDVYVTGQKEVRTYRMTPQGLDGLAEYLSGHGVCLAALEATGALERPVVRHLMESGIPTSVVNPRRIRHHALGAGIIAKTDALDAKVIEDYARHRNPRVRPLLSSQQEHLKDMASRRRQLMKMRTAELSRRSRSTDEVVRESIAVMVKALDEQIARLEEKADEIIAASRECREKDRLLRSVPSVGQKTARVLLAEMPELGRIGNRQAASLVGLAPYNHQSGNHDGRGRPQGGRGMVRSALYMAALSATRFNPDIKAFYTRLRQAGKPAMVAITACMRKLLVILNAVLARGTAWTPQKP

SEQ ID NO: 478864 - protein, 430 aa, unidentified
MTEVNREGTGKMVSYPQYCTPVGIASDAILQAKLPQGVKRWIALDLSKQSCWICVLDAQGMVLMHESHSLAAAKRSSLLRKFCPGDLVIMEASTGTFALARALNARDDVMAVVINTNRTELNKSKKKTDREDSLWLARVLLRTPLAELPLVSIPTDEEMDERNLVSLYHTLTNEHAMQANRLHALFHTSGNPQVSKEYAIGTKDGRRQAIGKYLSNVDLYAAKTIDMIMRVQEERIEQLQKKLAGICKKHDAMAMILFSLPGVSTICAATIIAYANDIMRFHSGKQFAAYCGLVPKVNQSGQRDAKRKISKEGQSSLRKVLVEAVYAILRVKANTPFHQKYRALRKRGLPGRKAAVAVARKLAQTIYALLRNGELYTLEDEQEQESMDAYYARKRIKHIGLYKNFGEKVKQHMNRLKTLESITSRELAVT

SEQ ID NO: 478865 - protein, 341 aa, unidentified
MELFVGLDVSVRTTSVCVLDASGKLIRESKVESEPAAIAGLLQAIGGPYKRVGLEAGPLSQWLYSGLASAGFPVICVETRHMKAALSAQINKTDRNDARGIAQMMRVGLYKPVHVKTVRSQEIRMLLTARKFVQAKILDAENNLRGLLRNFGLKVGAVTRLQFERRIVELLEHSPHLRLVIEPLLAVRRVLREQFQHLHKAMGRLAESDETCKLLMTAPGVGPMVALSFRAGVDEPARFGRSRSVPAHFGLTPSRYQSGEIDRGRGISKCGDAGIRWVLVEAAGILLRISKRNSPLKTWGLAVARRRGMAKATVAVARRLAVILHRMWVDNTPYRWEAEAV

SEQ ID NO: 478866 - protein, 455 aa, unidentified
MPKTTSSDRPELNPVNVGAAAIDIGSKMHVAAVNPACTDMPVRAFGTFTQDLHYLADWFKACGVTSVAMESTGVYWIPAYEILEQRGFEVLLVNARYAKNVPGRKTDVSDAAWLRQLHSYGLLRGSFRPGAEIATLRAYLRQRERLVEYAAAHIQHMQKALMEMNLQLHHVVSDITGATGMRIIRAIVAGERDPDVLATYRDVRCHSSLETIRAALVGNDRDEHVFALTQSLELYDTYQAKILDCDRKLEFLMGALTGKGAKPIGKLSRPRVKTKQVNAPSFDVRTALYGLLGVDLTEIHGLGPSLALKLIGECGTDLRAWPTAKHFTSWLCLAPGNKISGGKVLSSRTRRSSSRAAALLRLAATTIGRSNTALGAFYRRLSSRAGKAKAVTATARKIAVLFYNTLRHRITYRDPGAEQYEEQYRSRVVANLKRRAKSLGFVLQAVPCDAEMVVS

SEQ ID NO: 478867 - protein, 413 aa, unidentified
MEATPTYAGIDWSWQHHTLCIVDDEGGRVEEATVPHTKAGLAKITTVLRRHGVHRIGIERGDGPVVDHLIRDEFEVVMISARQVKSLRARYGSAGNKDDRFDAFVLADALRTDAGRWAVVQPDTDETLALRMLVRTRHDLIDHRIAVHNQLLAVLQHNFPGAIGLFSQLDIAISLAFLRRFPSEAKSAWLTSGRGELRMAHWLKANAYSGRHTPRRLVDHLTAAATGRVAGPAADAGELIVLTLVDLLTRIREQQTALETRIKEALLAHPDGPIFQSLPRAGTIRAATLLAEIGDCRARFPDPQSLAAAAGVAPSTRQSGKHRTVAYRRGCNKQLRATPRRPGRLGTRHPTRQHLGPRHLRPSTKPRLPPPTCSPNPGPELDQDSLALLARPHALQPRPPRPTQPPHSGGCLT

SEQ ID NO: 478868 - protein, 334 aa, unidentified
MALELLAIDLGKRAFHIYGIDTDGVILSRKVSRAKLAEVVGDLEPTAIAMEACASAHYWARCWLAAGREVRLINPRFVKPFVKGSKNDAVDAEAIFEAAMRPTMRFVPVKSTDQQDLQSLHRARDRLICQRTALINHTRGLLAEYGVVLPQGPRRFMTQAPTAIAGADLSDLARAIFGELMDQLDDLDRRIQKLDAMIVTLCRTNETCRRLAKLPGVGPIVATAIIGAVNDGRQFRSGREMAAWIGLVPRQYTTGGKPRLGGIGRRANHYLRRQLIHGARAVVSRSAKHDDRQSTWLKALVARRGFNRTTVAFANKTARIAWVLLSRKQEYAAP

SEQ ID NO: 478869 - protein, 376 aa, unidentified
MNECSAYVGLDVHKDTIAVAVAVPGREDPVYRGEIKNQRKSLLRLIRSLSPHGEVLSFCYEAGPCGYGVYREIIDTGHHCEVVAPSLIPRRAGERVKTDRRDAVKLARLHRSGELVAVWVPDEEQEAMRDLTRAREDMKAIELKARQRLGAFLLRHARVYREGKSRWTKMHFRWLEEQKFEHPVQQVVFQEYVDTVVEARARVASLEGQMREALPRWSLRPVVEALMALRGVDVVTAMTVLAELGDLTRFDSPRELMSFLGLVPSEHSSGKRRRQGGITKTGNGHVRRVLVEAAWNYRFPARKTAHLRRKASAAPASVQAIAWAAQKRLCARYWHLYHAGKMKCVVTTAVARELVGFLWAIACEVMGRPHATRAVS

SEQ ID NO: 478870 - protein, 338 aa, unidentified
MTVVTVGIDLAKNVFAVHGVNAAGKAVLVKPLVRRAKLLELIATLPACLIGIEACTGAHFWAREFQKMGHTVRIMAPQLVSPYRMGGRHGKNDAADAAAICEAVTRPNMRFVPIKSVEQQGQLFVHRAHQGYVSERTALINRIRGLLSELGIVLPQAFKAFLSGVAQVLEDLPGFCNQVIGDLLNELYHIEEKIKNSEKLIQQLARDNSAAQLLMQFRGIGPMTATAIVASIGNGHDFKNGRQFSAWLGLTPRQQSSGGKARLGRITKAGDSYLRTLLVLGARSVLLGAAKNDDPVSRWALQLKERRGYGRALVAIAAKNARMCWAMLHLRDEFRFPA

SEQ ID NO: 478871 - protein, 320 aa, unidentified
MHTYHLGIDVAKAKLDCALLRPDGKYRNKVVENNLKGFNALTAWLKKQAATQPHVCMEATGIYWEAVAGHLAVQGMTVSVINPAQLKAFGQSRLVRTKTDKLDARLIAAFCQERSPAPWQAPSASEQALRAMVLRMDALTMRTQESNRLEVARDAIKAGIAHHIDWLDAEINTLSKMIHTHIDNDPMLKNKERLLESIPGIGERTIAALLAYYANPACFGNARQAVAYAGLDPRQHQSGSSVNGKPRLSKIGHAFLRKSLYMPAMVTLYKTDWGKRFRNRLSATGKAPKLIIGAMMRKLIHVVFGVLKSGKMFSPELHMG

SEQ ID NO: 478872 - protein, 442 aa, unidentified
MDEYDGRQYVGIDLHRRRSVIVRMTPDGQRLGPTVRIDNDPFELAEQVALWGESPEVVLEATYGWYWAADVLADAGARVHLAHSLGVKGFAYRRVKNDELDAADLADLLRMGRLPEAWIAPPETRGRREVVRHRCKLVALRSGLKAEVHSVLAKQGVRVAASDLFGVGGQKLLDELRLDAPFNARVGSLRRLIDAFTFEIDILAKRTGAQLKAHPGFTAIQAIPGVGPVLAAVFVAEIGDVTRFTRPQQLCSWAGMTPRHRESDTTVRRGRITKQGSHLVRWAAVEAVQTLHSGPIGATRAAAAPTAAPTSARSPRPVSCSRSSSTAYATGTSVAWPGPREHDPGAARTRGRSVCDPPPGRGRPCLIDPAWLRPYHSMHTAPAGSEGMTGDRNTGPATRPFRTDGEHGHHKLQSSFPARRFCAARSRRQGQARCAGRPPVEP

SEQ ID NO: 478873 - protein, 447 aa, unidentified
MKRKQIPKPQEILDAEHELVIERVCAIDVAKAFGKVCMRTPRERRRVSKVWDVEATTGAVTELAVQLTELGIEKITIESTSDYWRIWYYLLEAAGLDVQLVNARDVKNVPGRPKTDKLDAVWLAKLTEKGLLRPSFVPPAPIRQLRDYTRLRVDLTRERSRYWQRLEKLLEDALIKLSSVASTLDTLSARDMIEALIAGERNPHRLADLARAWMKTKRTALIKALDGRFDDHHAELARILLDQIDTLTAQIDTLTTRIDELLVAAEPGKDDSGGNPTGDTVSGSGLSAVERLTEIPGIGSTGAQAILAEIGLDMTQFPTPAHLVSWAKLCPRTIQSGPITRGGKTGKGNPYLKGALGEAAAAAAKTDTFLGERYRRIVKRRGKLKALVAVARSILVIVWQLLSDPSARFRDLGSDYHTSRVNSQPRMRNHIAQHRAMGYRGTLEHAA

SEQ ID NO: 478874 - protein, 488 aa, unidentified
MKSQPASQGPQGKKRKKTSGKTTPTKWDEMNRKQRREMMRQMQSEDLSLEVVHPHAAGIDIGNASHYVAVPPSRDPQPVRCFGCTTAELKTMAEWLKQCGIRTVAMQSTGVYWIAVYEILEEAGMEVYLVNARETKNLPGRKTDVQESQWLMKLHTYGLLRNSFRPSQEIRTLRTYWRQRQDLVRSSGRHIQRMQKALTQMNIQLANVISDISGVTGQAIVKAILDGERDPRQLAAYRNCRVEASKEEIAQALEGHWQEDQLFLLRQEQAGYEFCQKQIAECDQQLAQYLPQLEDRTQGATLPEETRRGRRKKKKGNPQFNLREELFRMTGTDLTQIDGINVVTAMTVISEVGWDMTKWKTENHFVSWLKLCPDNKISGGKVIGKGRAPTNNRATTALRMAATSLRESDSYLGAQFRRFRTRLGSPVATKAMAAKLARLVYRMLRYGMKYVDQGSEFYETQHRKRQIIHLKRKAAQLGLQITEVAAAA

SEQ ID NO: 478875 - protein, 427 aa, unidentified
MNESVSEQPISQVVAAYVGIDWADQKHDVVLRSAGGPAKSEHQVIKSEVNALNDWIAQMHERFGATGKVLVCLEQSRGALIYQLMAYELFELYPINPSQLANYRKAFFSSGAKDDKPDADLLSELVMCHRDRLKAWKPDDQLTRELATLNEGRRNAVDRRTKLANEIKSELKLYFPLALQVLDNDITTALAADLLVQWPTLTELQKVSPGKLRKFFYGHNCRQEKKILERLALIDQAKPLTTDAAIIRPTALRVKMLAQQLKSLLPFIAQYEKQIAELFGSHPDSFLFDNLPGAGPALAPRLLTAFGTHRDRYEHASDVSTLNGIAPVRVASGKRCSVLFRWACPKFQRQSFHEFASHSIRYCPWAQAYYQTQIARGKDHHVAVRALAFKWIRILFACWKNRVPYDPDRYLKALQSRGSEYAPKLPA

SEQ ID NO: 478876 - protein, 349 aa, unidentified
MRCFQPPADVRFYAGVDLHARSLFLVVLDRDGHERLARNLPAAPAPFLQAVQPFRDGLVFGCECMHCWYWLADACRDAGIAFALGHAWAMRAVHGSKTKCDRHDAQAIARLLRGGNFPLAYAYPKERRGLRDLLRARLRLVRQRAELYGHVHTARRQANLPPVSNDVKYKSKRGGVTADIADPFVRRRVETHLALLDPLDAAIRRLEAEIEDAAKEHYPTELAVLQTTPGVGAVLSLTILLEIDTIGRFDTRQQFCPYARLCGAVQESAGKRIGVGNRRAGNAWLKWAFSEAAVLGAQKDERIGALLERLASRLGKPKAYSALAHKLGRAFYHMLHTKEVFDVNRFVRR

SEQ ID NO: 478877 - protein, 353 aa, unidentified
MNVNHYIGFDVHKKSISYCVKTADGTIVEEGTLQAKHLALREWAEKRREPWHGAMEATLFSGWIYDTLKPYAAELQMGHPAMMKAIGASKKKNDKLDARKTADLVRCNLLPVCYVAPREIRELRRMLRYRNLVVAQAARMKNKMSGLLMEVGAEYNKQRLHGKEYFHELLDTIEEVPESVKDLLRLSRGALEMFQTTQWQLLDRLQKQPLLAKRVTVLMSIRGVGEVTALTWALEVGDPRRFPSVGDAVSYCGLTSALDSSADKQKRGPISKQRNAHLQTVLVEAAKLAPRWNPQLAAIHAREVQRGHRNRATLEVARKLVAYLLAVDKSGKPFEIRTTLTIADQHVQEVAAA

SEQ ID NO: 478878 - protein, 344 aa, unidentified
MDTIGIDLHKRESQLCIVAPDGTVTERRIATSRERFTAVLADRPPARILLEASTESEWVAQHLEALGHMVIIADPNYAPMYATRARRVKTDKRDARALAEALRLGAYRVAHRLSPERRHVRAELAVREALVRTRTRYIALAKALVRRDGLRVASSEAHLVAKRIATLELSDTLAAELLPLVEILAPINDQIAAADRRITALTDTDAAVALLQSAPSIGPITAAAIVATIDDVTRFTSAHQFEAFLGLVPGERSSGEKRHIGRITKAGNTRARYLLVEAGWRILRSKDAETAALRAWALGIADRRGKRIAVVALARRLAGVLYAMWRDQRAFDARYLRMPRPRAA

SEQ ID NO: 478879 - protein, 343 aa, unidentified
MKIYALGIDLGKTVFHLVGLDSSGQVVVRKRCSRTQLLAFTANLQVQLIGMEACSGAHFLGKALRAQGHDVRLMPAQYVKPYVKTNKSDYIDAEAIAEAVQRPRMRFVPIKTEEQLDLQALHRVRERWVMRRTAVVNQIRSLLLERGLTLPKGRSHLGQMLPRILEDAELKLSGAFRVLLAQLKLELEQLAARIEQMDMVIQQEARENESCQRLTTIPGVGPVTATALIAAVGNGSAFGKGRDLSAWMGIVPGEYSTGGKQKLLGISKRGNKYLRRLFVQGARSVLQHRDKQAPGLSCWLAQLLARTHQNVVVVALANKLVRIAWAVLSKNENYRAPVLAATT

SEQ ID NO: 478880 - protein, 379 aa, unidentified
MTTETRGSESIAIGETLFIGLEMGSTTWKVAFATTRGMRPRVRTITAGALEQLRAEIADAKARFRLGAEAPVRSCYEAGRDGFWVHRALQAEGLHNVVVDPASIAVDRRARRTKTDRLDAIALVTQLMNAAAGDRRGWHELHVPSVQAEADRQLQREWDAVRADYTRLRNRIQGLLATQGVRVPLTGHFLAQLQLARLWDGTALAADLVGRLERDWIQLQHVDARLAQLKTLRQARVAPEQTDRVAMQTRQLAALKGIGVNSALTLTTELFAWRAFANSREVGAIVGLTPSPYRSDQRVVEQGISRAGNRRVRALSIELAWSWVRWQPTSALTRWFHEQFGRHGRSRRIGIVAVARKLVIAAWRYLETGTPPAGAVLKG

SEQ ID NO: 478881 - protein, 316 aa, unidentified
MNHPEHNEVNVGIDTGKTQLDIFVHPVGEYFTVTNDSKGVREAIKRITRHDPDRIVIEATGRLEHTFVFACAEQGLPIVVANPINVRKFAGAIGQLAKTDKIDAKLIALFGAKIQPELSLVQPENERLISDLLSRRRQLMDMQTMEKNRLSIMPKELHKSINVILKMFKAQILLIDQALDEMIAITEEWRTKNDLLQSVPGVGKVVAYTLLSNLPELGNLNSKEIAALVGVAPINRESGRYQGVRRIRGGRHQIRTVMFMSMMSTIQCNAKFKAHYERLKAAGKRPKVALIACMRKMIVILNTMVRNNTPWEENMT

SEQ ID NO: 478882 - protein, 426 aa, unidentified
MSERDYSKQVARRQRIGSRTLVVGVDIGCASNAVGFMSKEGNVLGSYSYMPNSREGFEQFVKMTEGLKAKHGLTDVLIGLEPTGHYWRKFAYFAKGKGYEVRFVRTTALKHHRELDESSSAKSDKRDALTLTNITREGKYIDTVIEDGRMRHLRILVKVREKVQTRNVSAKNSLHAALDDYFPELKGIFWSMHSRGLWVLLERCPFPEDVVTLKVSELKEMIGRASRRRAEASQKAMAVYQAAKESIGIQQIGSADRYRLKMCLEEVKRTGLIIKNIEGEIKRMLKEIPQAEYLLSIPGIGPLSAAVFLGELGNPSYFQSARQIIKYTGYDPQESDSGYRVSRKFISKKGRWLLRKHLFLMSMRVVVLSRYFQEYYQRKLQTKNRFGQLPRKKEILCAVAIKLIKVIFALLRDKRNFEDTVACSVE

SEQ ID NO: 478883 - protein, 321 aa, unidentified
MNLSNIITGIDISKNKLDIHIHPLGHHKVFENNVQAIDQIIDFLRLHNVTKVGLEATGGYEKLCAYTLLSHGFEVYVIQPRWVRDYAKSLGIATKTDKIDCSIISRYVSNTDMRVTPLKVSSIDCLKQKLSRRNQLVEIAKIQKTQAHQVTDLSIIKQMEELLAVLQNQIQVLEDEVMELVDKNQELKKKYMSITSIPGIGAITAITFICYLPELGTLQHKEISSLSGVAPFNRDSGFSKGKRCIQGGRSQIRKVLHMCILSAQRYNSYIKIFFDRLYNQYKKPYKVASTAAMRKLLILANSLVRDGRLFTEEYSPKTVSI

SEQ ID NO: 478884 - protein, 386 aa, unidentified
MTDKTLQTNDTQPVRLLVALELSLKTWRLAMAVAGAPKKRFKTIAGGDYVALGQAIEECKTKWGLDVAAPVVFCYEAGRDGFYPYRQLTAAGHTVWVIDSASIEVSRRKRRAKSDGIDAEKLLGLLQRYVGGEQSALRVVRVPAVAVEDLRILPRERETLLKERQRLRNRIESALFGQGYRELPKTAKRLAAWLQERTDVGDYLKERLDREVARLALVEAQLREVDARQAEVIQTESGTAAAGEVLRIAQALQGLVGIGLVGAWVLACELFGWRDFHNRREVGGALGLTPTPYSSGEDQREQGISKAGNRRARSMLIELAWLWLRYQPDSALSQWYRTRFASGGKRPRRVGIVALARRLAVALWRYVKTGAVPEGAKLKPVPLAAG

SEQ ID NO: 478885 - protein, 332 aa, unidentified
MYFNHYLGIDISKATLDAALIIKEGEVVGQTKVANNLHGFNDLASWIRKLKVKLSDVLVCAEHTGIYGYDLQIWLDDMQVSFAFVPALEIKRSLGIRRGKNDAVDALRIAEYAYIRRESISLSNKPSDVIFQLRALLGERKQYVRMRAALLARKDALHQYESKESIDRREEIIDKYAEYIASIDKQMRGLMEHDDEIKRNYELISSVKGIGLVNAINTLVYTNNFTSFQTPRQYACYCGIAPFEHTSGTSIKGRTAVSKMGNHQLKCELTMVARSAIIHDPWMKQYYKRKMMSKGNAPGAHGIVLNAIKFKLIVRMFSVVKSGIPYKVMAYC

SEQ ID NO: 478886 - protein, 341 aa, unidentified
MIHIGVDMHKNFSNFAALDEATDSLGEQRLENDPQAIGSFLVQLPGHKQVAVEANRNWYWFIDLLQDMDVPVKLSNPLQTKAIAWARVKTDTVDARMLASLLKANLLPTCWIPERHNRHLREFVRFRAKLVRLRTQVKNSIRTLLSKHNLHPPVQSLWGPTGREYLKSLPLEHPHDRILSQSLAIIELLDQQINSWNETIRQLIKESPELKRLCSVPGIGPVLAITILLETGPITRFPAAKKYAAYAGLVPRVRSSAGQTHYGGHLSRQANLTLRWAFVEAATDATKGSTQWSHLYRRMAARKGKSIAKVALARKMSKMVYQMLKRNIDYHTYLSGGYLGR

SEQ ID NO: 478887 - protein, 343 aa, unidentified
METIYYIGLDIHKKVIAYCIKTLDGHLVEQGKIDADRTSLIEWVNGLPGPWVGAMEATIFTGWIYDFLTPFAVDLKVAHPEMLKAITAAKKKNDRADAEMIADLLRVNLLPQCHMLPEDIRELRRILRYRNHVVRTAVKMQNKMSGLLMEVGASYSKRRLHGKKYFHELLERVEEIPPSVKDLLKLSRASFEMFRDVQKRLIAGLRDNDLIRERVRRLMTIQGVGEVTALTWALEIGDPLRFASIRQAISYCGLCSAQKESAGKEQRGPISKKRNKHLQTMLIEAAKIAPIWNPQLAVVHERELMKGNRNRATLAVARRLVAYMMAVDKAQTDFILHEEKKAA

SEQ ID NO: 478888 - protein, 370 aa, unidentified
MKDTIKYVGLDVSKEKIAVAIAEEGREAPRYWGMIPHTPEAIKKLVKKLGDPKALRFCYEAGPTGYALYRLFLTLDVHCEVIAPSLIPQRPGERIKTDRRDSIRLAQLYRAGELTSIYVPTPEDEALRDLVRAREDAKEDELRAKHRLTKFLLRNNIQAPPGVNRWTRKYRDWLDALKFERSSLQVVFQEYYHQIQELEQRILRLEEEIRVQATEGVHAPTIQALQSLRGVALITAASLVAEIGSFKRFPSPRQFMSYLGLIPSESSSGESRRQGDITKTGNRHARRLLVEAAWSYRYRPAVKGELKKRQHGQAPNIQSISWKAQNRLHKKYYRLLSRGKESGKAITAVARELAGFVWAITQELEDVSNI

SEQ ID NO: 478889 - protein, 388 aa, unidentified
MDVLYQSCAGIDVHQANIVVCILHGPLTSTRPKREMATFDTTTKGLRACHDFLSQFHVEAVGMESTGVYWRPVWHALCDDFELILAQPAHMKAIPGQKTDKKDAHWIAKLTRIGLLPRSFVPDETIQELRELTRQRKHYVESRNRETNRIHKFLQSGGIKLTTYIEDIMGLSGRNLLQLLVDGTPITPRIVHQSVYTSLKKKVPQLLEALDDYFSDHHRFMLKQSLEIYDFYQKQIELLEERMNVYLSQYEKHVEILDSIPGIDVITASVIISEVGVDMSQFPTFGHLASWAGLCPGNNESAGKKRSTKIRHGNSYLKKCLCQAAFAVKRQKGSPLAERYYQIQSRRGSQKATIALAHQLLKIAYILLKEQMTYPEFLAQKKRLLGTS

SEQ ID NO: 478890 - protein, 378 aa, unidentified
MNNCTRYLGLDVHAETITAAIAEGRGQIRSLGKFPNRPEAVRKLIEKLGGGKNLKVCYEADPTGYALYWQLTKLGVDCEVIAPSLIPKKAGDKVKTDRRDAEKLAPSYQSGDLTPVWVPTPEHEALRDLVRQRAAAKADESRAKHRLVKHLLRRGLREPEESGAWTHPWWRWVQSLKLEHEAQQVAFADCIAEVLHMGERLARLDKAIDRLVESAPAHMRAVVEALQALRGVAKLTAVTIVTEVGTFKRFRRPTEMMGYTGFVPSEYSSGGRESKGRLTRAGNAHLRHVLGEAAWHARHRPWLNLRMKKIPPTLPAGVAEIAWKAQERLHRKFIRMTYCRKPAGKVAAAVARELVGFIWAIGTLVESRLDTNTKARAA

SEQ ID NO: 478891 - protein, 510 aa, unidentified
MINGASFGSPFLSMVPDSVLKTVVTAAPHWGTSIPFKRVLCSAQSGPSRMAECFKRRAMSRKRKNSKKIGAPMLHCLNPNAAGVDVGATEIYIAVPVDRDPQPVRHFSTFTEDLHAAADWLKACNIETVAMESTGVYWIPFFQILEARGFTVLLVNARHVKNVPGRKSDVSDCQWLQYLHSVGLLRGSFRPEQAVCTVRSILRHRDSLVQMASSHVQHMQKALDQMNLQLHHVISDITGVTGIRIIEAILAGERNPHTLAALRDGRVKASADTIAKSLVGDYRREHLFTLGQSLAAFRHYQELIGACDKEIEQYLEAFGSKVDPPEGSASQSQDGQKPSNGEPRFDLQSHLYRIFGVDLTLIPGINVLTTQTLLSEIGPDLSRFASAPAFTSWLGLCPDNRVSGGKVLSVKTRKVKNRAATALRMAAQALHRSQSYLGHFYRRMRAKLGAPKAITATAHKLARIIYHMVTTRHAYDETICVQNEVRNRECLEARLRKQARQLGFQLVAAS

SEQ ID NO: 478892 - protein, 340 aa, unidentified
MKITTIGIDLAKNVFQIHGLDAHGKTLLKKQLKRDQMAVFFANLPPCLIGMEACGSAHYWARKLQGFGHTVKLMAPQFVKPYVKTNKHDAADAEAICEAVTRPTMRFVPIKNVGQQAVLALHRVRQGLVKARTAQANQIRGLLSEFGLILPQGIAHLYQRVPVLLDEAKEELPGVFRNLVQRLLEHLKELDRQVGEMEVQMQGWHRSNALSRKLEKIPGIGPITASALVASIGDAKNFTNGRQLAAWLGLVPKQHSSGGKTNLLGNSKRGDTYLRTLLIHGARAVIRHAERKPDAQGWLHQLIDRRNKNVAAVALANKNARIVWALLAREREFRSDYAAA

SEQ ID NO: 478893 - protein, 459 aa, unidentified
MSKKDNAKQNSKPVNALLMPIVNANAAGIDVSATMHAVAVPLDRDNEPVKEFGAFTEDLHAIAQWLLKCRITTVAMESTGVYWKQLFVVLLQYGFNVSLVNARHVKNVTGRKTDMDDAQWIQKLHSCGLLNSSFLLDDATESLRALVRHRKSLIDDSSKYILRMQKSLELMNIKIHSVIADIGGKTGTAIIKAIISGQRDPASFMQYINPRIKADKDTLLKSLTGNWREEQLFLLEQNYELHLSMQKSIAISDAKIESFLQMQAAVNTEGVIEQEPGPEAAKNKKNKKKTNKNTPDFDVQAYLLKIHRIDVTQIYGISNGAALSILAETGTDLSKWESENHFVSWLNLCPNNKITGGKVISSMVMSRKAGNATQAFRAAANSLQRSDHWLGDYFRRMKSKGGNKYAIVATARKLAIIYYKMVRYKKDFSPMDTDEYREKYKSAKIAYLEKQLTKLKAAV

SEQ ID NO: 478894 - protein, 348 aa, unidentified
MLPNLTVGLDLGDKLSQTCGVNAAGEEVFTDAVVTTPKGMREYFGRIESCRVVMEAGTHSPWVSRAIEQLGHETVVANPTLMYGPRRRKKRNDRMDAAFLARQGRADVQLLHPIRHRGEAAQEHLAILRARDQLVRVRTKLINHVRGAVKSLGLRLPRCSAEAFARRVAGDIPESVRPSLEPLLEVIADLTRRIRSFDQQIERLLEEVYPEAVRLQQPKGVGPITALAFVLLIEDPNRFQRSRDVGAYFGLVPRLDESSGSSPQLRITKAGDEFGRRLLVSSAQYILGPHGPECDLRRHGEGIARRGGKNAKKRAVVAVARKLSVLLHRLWVTGATYDPDWVLKRRAA

SEQ ID NO: 478895 - protein, 352 aa, unidentified
MEQFIGCDAHKRYSVFVAVGEDGRCGPEWKVSHTDGAFEAFLEALPAGSEIALEACSSYYWMVAAMERNRHRPHLAHPLEAKRRMGKSHKTDKLDAKGLAILLRNGTLPEVWIPPAELRDQRELLRLRMQLAQQRTRWKNRIHGAWIRYNLHVEASDAFGVRGREQMPQQLGTLPPHTRRSVEQQLAVLDFVESQIADCERRLAGLLEPSEEVRLLRTLPCVGPILSAVLWLEIGDVNRFPDAPHLASYAGLVPRVRASGGHTRLGPVCRDVNHHLKWAFVEAANLVAVNQRRLGPCHVLELYQRLKKRKNHQKAVVAVGRHLAEAAYWILKKREAYREPKAPRQAVSSTCG

SEQ ID NO: 478896 - protein, 414 aa, unidentified
MEGEINKSCGLDIHKRFFIATILSRSGEKQQQRFERDDDGILALKNWVTSEQCDVVACESTSDFWVPIYESLIQHLPVIVGNARDMKAFTHKKTDKIDSEVIAQLALNKMIQPSRVFPKRHREFRSYVRLRLTLVRKRTDIKNEAHAILSSEMLHLGDVLTDIFGKNGRAILSGISSGKNVDQIIESLSPNVRTKAVQIREVLDREISQSAAIRLQICLNLIKHLDEEIEILEREIFNYAYRNHKHEMEILMSVPGIGELSAATLIAEIGNFNDFSSGDKLASWLGIVPNVYQSADKYHNGRITKRGSKVARWILTQIAQAAARKKNSKLKEFFNRKKKSIGHAKAIIALARKIATIIWHLITNDEMYEDETGYQKGEVQKRKIVETEIFSVDERITIISGIFAIMGKEDREST

SEQ ID NO: 478897 - protein, 401 aa, unidentified
MVAVGIDVAKGKSKVAVIGEGKKVLQKPFDVLHTKTEMLKFAENLRQYGDEAHVVMEHTGVYYKVVAETLHKAGIRVSVVNPVLINQFGNNTLRKVKTDKKDSMKIARYALENRDELYDYESGEDMRDALKSFVKQFNFESKTLSAHKNNLNALLERVFPGIDDFFSSPVKSNGHQKWVDFVIAFWHNDCVSCLNESKFIEKYRKFCKKNRYIFNEETAKAIHAKSRDNLTTMPKNDTTMLLVQGAANRVLRLSEDVELLRAKMIELAKQLPEYETVLSIYGVGETLAAQLIGEVGDVRRFQSKRSLVAFAGVDPDKNDSGKKVSISGSVSRRGDSLLRKTVFQVVECYLKNSPADEPVYQFLDKKRSEGKQFFVYMTAACNKFLRVYYARVMECMNAQSA

SEQ ID NO: 478898 - protein, 348 aa, unidentified
MDQFTRIFIDTSKSVFQLHGVNAAEQVVVRRRLQRRQMVEFFSKLAPTVVGLEACGASHHWARVLGDLGHEVKLVAPQLVKPYVKRNKNDARDAEAGCEAMSRPTMRFVPVKSAQLQAALMLAGVRERLVRDRTQLTNMIRGHAAEFGLVAAKGLDKIEPLLGRIATDESLPALARDLFEGLGRDYAQLRARLEEVDGKLMAWHRSNALSRALAEIPSVGPIGASLLVMKTPDPHLFKCGRHYAAWMGLTPKDHSTAGKVRLGVITRAGDETLRSILVVGATAVIQQARRGRVAWPWLTRLLARKEPKLVAVALANKVARIAWKMMAGGEAFERERMMPSLQTTAKAA

SEQ ID NO: 478899 - protein, 433 aa, unidentified
MKVLYERVAGIDVHKDMIKVAIRSPGEKPWTRKTEILEFRTFYGVLQAMARELRKRGVTHVVMEASGIYTDPVYYALCEQDFEQVAVINPAHAKALRGHKTDARDCARLAELFECGLLRGSYIPPAELREVRDLTRYRMKTVQARTSEIQRLAKALESAGIKLGSVASSITGVSATAMIESLIDGERRGGVLADLARGRMRTAGKLAGLSMALTGRFTGHHALLCRLHRDRIAVFDAAVADLDERIAGKAARWQREAGLLTSVPGFGDVVAQAWLGEIGPAPHRHFATCEKLASWVTLCPGNNISAKKRKHGRTGDAGTYIKPMLIQAAWAAIRVRGRLQARYNRLVRRFGGDKNPAAKKKAITAIAHTLLKIAYQVLKSGTPYQEPGADSCTRRESPQQKQAWLERQMQKLHPGCTITITISPPEAALAPGA

SEQ ID NO: 478900 - protein, 457 aa, unidentified
MQVTYTHCAGLDVHKKTVVACASVPGPGDQPHPVIRTFGTMTADLLALGDWLHSLNVKAVAMESTGEFWKPVYNLLEGHFELLVVNAQHIKNVPGRKTDVKDAEWIADLLRHGLLRGSFIPPRPQRDLRDLTRQRTNLVQDRATVVNRLQKALEWANLKLSAVVSDVTGVSARAMLEAIVAGETAPAALAELACGRLRAKRDLLEQALTGRVREHHRFIIAEHLIQLDNLDEQIGRFDAQISAYLEQLSALPPASDGANDAAPTSPPPTAAPTSPPPTVAPTSPAPAALTWNAALVFADAVPGIGLRLAQDILAETGIDMTRFPSAGHLVSWAKICPGHNESAGKRFSGATGHGNRWLRTKLVQAAWAAVKVRTSYFAACFHRLAGRRGVKRAIIAVAHRILIALYHVLSRQEPFRDLGATYYDARSQAQLIKRTERRFAQLGLKVTVEPLAPASAA

SEQ ID NO: 478901 - protein, 385 aa, unidentified
MNQTSRFAASTHALHCALELSKKSWLLAIQFPDREQPSVYSIKGGDTEKLMAKLTAARDCWAKVSGSLPVITLCYEVGYDAFWLARFLKARGIECLVIDPGSLQVNRRGRRVKTDRVDVKMLLRTLIAWCRGERHVWSPVRIPSVEEEDLRRSHRERSRLVRERTAHINRIKGLLFAQGIRDVNVKSQYKTLAVDKLLTADGHRLQPRLGSEIARELQRLAMVQEQIAEIERERDTAPTPCEATERKRQLLLQLKSIGPAISALLSREVYYRQFANRRQVGSFLGLTPSPYSSGEEERCQGISRAGSGQVRAIMIETAWLWIRHQPKSALTRWFVERTAGQSTRMRKIMIVAVARKLAIALWRYVEQGLVPQGAILNPPTTGRAR

SEQ ID NO: 478902 - protein, 480 aa, unidentified
MSQPKKHSPRTKEKPAAGQGKRGGKRTGMCLEDRPILEPNAAGIDIGAREIFVAVPPDRAEDPVQVFSTFTEDLEKMAQWLVSCGVTTVAMESTGVYWIPLYDVLETHGVKPCLVDAHGMKNVPGRRTDWHECQWLQFLHSVGLLRGAFRPDGDVCAVRSLMRHRSDLVQMTNQHIQHIHKALTQMNVQIHHVIDDITGVTGSAIVDAIVAGQRDPLELAKLRDPRIKASEEMIVKSLKGNWRPEHLFTLKQSRQMYRHYQEQIAACDEEIEKLLVAFQARVDPQEKPLPPDRKKRKRGRCKKNAKTKQGFDLRTESYKIFGVDLTQIPGLMAMVLTLFSEVGRDMSRWKTAGQFVSWLALCPDNDITGGRVAWRGMRRVHNRAGELFRMAAYSLHHDKSPLGDYLRRMKSKLGPAGATTATAHKIAIIFYTMVKRQVEYDATPWAERDTQREKRFEAKLKRQAQQLGYKLVPIEEEPAA

SEQ ID NO: 478903 - protein, 468 aa, unidentified
MTADKKLWRNRKERKEWARRLQSEDPGLEVVHPHAAGIDVGNSAHYVAVRPERDPRPVRRFECFTADLRRLADWLQSCGVKTVAMQSTGVYWIPLYEILEERGFEVYLVNARHTRNLPGRKSDVQESQWLLKLHTYGLLNNSFQPPAEIRALRTYWRQRGEHVAGAATCIQRIQKALTQMNLQLANVISDISGLTGQAIVRAIVAGERDPRKLAQFRDPRIQASEEEIAKSLEGNWRPELLFVLQQELEMYDTYQRRIAECDLQLQKHLASLANNVPPRPPEVEPDGEKRKRTKPAKNAPRFDLSCELERITGVDLTRIDGIDVMIAQTLLSEVGVDMSRWKTEAHFASWLGLCPDNRVSGDKVLRRGTRHVVNRAANALRQAANALIRSRSYLGAQYRRLRTKLGAPKAITAMAHRLARLVYRMLKYGQRYVDKGTEYYEQRYRNQQIQLLRKNATKLGFQITEARA

SEQ ID NO: 478904 - protein, 407 aa, unidentified
MEVLHPRCAGLDVHKDTVVACVRMQEGPAARHVVETFGTTTKDLLALSDWLGEHGCTHVAMEATGVYWKPVWHVLEESFELVLANAMHIKNVPGRKTDVNDATWIADLLAHGLIRASFVPPTAIQDMRTLMRTRKQLVRERAQHVQRLQKTLEDANIKVASVVSDITGTSGRAMLRALIEGETDPERLLAVTTGRLRADRKTLAEALRGRIRAPHRFLLRLHLEQIEALEKAVDSVDTEVGAVLEPFRAKVARLVTMPGISDVAAQVLVSEVGVDMSRFPTAGHLVSWAGLCPRNDESAGKRRSTRVRQGAPWLKATLVQAAWSAARAKTGYLRAQFLRLKSRRGPKKAILAVAASMLTAAYYMLRDDVDYRDLGTDYFDRIDKTNAADRLVRRLRNLGFQVELKAA

SEQ ID NO: 478905 - protein, 373 aa, unidentified
MNKNVIYVGLDVDDTQYHGAAFDKRSGETISFKCRPTMKGLIRQLEKLPSCFPDSVFILCYEASYVGFCLQRDLTEAGYHCDVIAPGSIPRKGGSKSVKTDRIDALDLAQFHANELLTIVEPPDAVMEQDRDLLRSRQHTVQQLGDVRRHLQSLLRRHGLNYRSENKTRTNWNKHHYCWLERTIERCTGSLKVNLQLLLSQIKSLNDILAIYTEEIEAMAERSEYQEPVSALTCYKGVKNLFALTMITEIGDIKRFSHPNQLTSWVGMDIREYSSGGKQHRFGITREGNRYLRTAFIEANQRAYRSPVISKDLKARRKDTDSQYIAIADRCLKRTNKKGNRLLHAGKHPNKVKVACAREMIGFVWESLNQVAA

SEQ ID NO: 478906 - protein, 355 aa, unidentified
MAAITYLPGSYDVFIGIDVDKKSYAFTVQDHDMMSRSKKIPSSPEQLYNYIRNNFSDRRVLCAYETGPTGYDLYDYLIQKEQPCVMVSPASIPKASNERVKNNRLDSERITRYLKSGELEPVRVPSEPYRELRQLIGLRQNYARQSTVAKQRIKSLLLFEHIDDGVTDTLQHWSNIYITYLKTVPCSAVIRCKLDMLLGDLDYTRTQQLKVLKELKVFCATHPEIDSYRHYLQSIPGIGFVTALTILARIGDPQYLTNVREIGAFTGLVPKEKSTGDSVRYGSITHLGNAYLRTLLIEASWVAIRHDTELSQFYYRIKSRHHPAAAAKKAIVAVARKLTQRIYKVLKERRMYEIR

SEQ ID NO: 478907 - protein, 413 aa, unidentified
MTYRICGIDVHKKMLAVVVAAITEDGEIRFERRKFDNHEAGLESLEEWLVECGVSEAVMESTAQYWRSVWLKLEGKYRLHLAQAMSNRAPRGRKSDFADAERLVRRLVAGELVLSYVPDREQRLWRMLAREKYLARRARVQQINALEALLEQVRIKLSSVVSDLSGVSSGRILRALTRGVQDPAELAAMADRGVKCTPEQMRIALAAAPQLRTEERAMLKQMLDRIDLLAQQIAETDHLLATCLSQHQDAVTRLSAIAGLGADSAQQMIAEIGPQAAAFSSAAQLASWIGVCPGREESAGVSKSDRSPKGNRSMRRLLAQCANAAVHAKGSAFELFYRRKVAHLGHYKALWAVAHKLCKVIWKVLHDGVSYQERGPRWNSPHAAKQIQRLKRSLRLLGYDPNSLRKLDQAASV

SEQ ID NO: 478908 - protein, 431 aa, unidentified
MLKINPLSTFYVGIDVSSKSNYVCALDFYKNKYINSSFANNQPGAEELALKILECLNQHPDLTMVVAALESTSVYSIHIANYLSSCEELMRFKPYVFVLNPKCTANYKKSYIGLGKSDPIDAFVIADYARAGNIETEPWRGSQFLALKRLTRHRLHLVECMTREKTYLVSNLYLKFSELQMLEGDDQPFCDIYGATSSSVLTEYLSPEEIIDSSEEDLISFLAQKSRNRIKDISKTAELLRKAARDSYRLDKALYEPLNVSIASSFNCIETFKKEIKLIDIAIEREIRGLNPNAFIILQSIDGIGPVFAGGIVAEIGDISAFHSSDALAKYAGLMWKSNQSGDFDGEDTPMSKAGNRYLRYYLGEAANSMRKHNVEYGAYYRKKYNEVPKHQHKRALALTSRKFVRLVYGLLARNQLYSGVSLDTSIKDSN

SEQ ID NO: 478909 - protein, 351 aa, unidentified
MVVVGTDVHKRTHTFVAVDEVGRKLGEKVVSATTAGHAKAMAWARTEFGPEVLWGIEDCRNLSARLERDLLSGGQQVVRVAPKLMAQSRASARTRGKSDPIDALAVAQAVLRHPDLPVAAHDEVSRELKLLVDRREDLVAQRTSTINRLRQRVHELEPAAEPKLASLHRERPRAALNAWLHTQDGVLAELARDELADITRLTEAIDALAARIGDRVRSAAPALLALRGCGELTAAKLVGETAGASRFKSEPAFARHSGVAPVPVWSGNTAGRVRLTRSGNRQLNTALHRIAITQIRLTDSPGHVYYRKRLAHGNSSTEALRCLKRRLARVVYQRLRTDDQTRHQTNKATAA

SEQ ID NO: 478910 - protein, 344 aa, unidentified
MQHYVGLDVSVKETSVCIVDKAGKVIREVKVATKPVPILAVLIGGALAIERIGLEAGPLSQWLYSALAEAGLPVICVETRHMKAALSAQINKSDRNDARGCRIRCLGKRDQRVHVKTLASQKRRMLLTSRQLLQAKALDIENDLRGTLRNFGLKVGMVGTVKFEARIRELVADHPDLAAIVEPLLIARRVLREQLGVLHRQLLEIVRQDEVCRRLMTTPGVGPVVALTFRATVDVPVHVKTLASQKRRMLLTPRRQQSGEIDRMGGISKSGDAMTREMLFEAALVLMTHSRKWSWLKAWGMKIARHRGMKRAIVAVARRLAVIMHRMWVDGTEFRWSRKEAAAA

SEQ ID NO: 478911 - protein, 344 aa, unidentified
MALADLRKLAPGESPACSWRTETIMAKQVEERTIGVDVAKCWLDIYVSEIGELERIENTEGAIEEWLRGLPGSARIAIEATNRYHELFIERAHAQGHCIYVIDAFRLSRYRDAVGHRAKTDRHDAELLARYLQQEHEHLRRWQPRDPRHARLWRLLKRRATLVQTNVRLRQSLADIGALDDAAKELIRHCQQLVRQVDRELLAQARRLGWQQDLQRSRGIPGLGPTTSLALVATFHRHNFRNADAFVAFIGLDVRVRDSGKFRGRRKLTKKGDPEIRRLLYNAAMSGCKDSHWQPYYQSLRDRGFSGTAALMALARKLVRVCYALLNNQLSFDPEKRKLPCNAT

SEQ ID NO: 478912 - protein, 320 aa, unidentified
MRNTVGLDISKLTFDATAIVGNAEYSAKFDNDSKGLDQFSDRLKSLGCQNLHICMEATGNYYEEVADYFAQYYSVYVVNPLKISKYAESRFKRTKTGKQDAKLIAQYCRSAKESELVKRQKPTDEQYRLLRMTAAYAQIKSECAAMKNRHHAAKDEEAAKAYAQIIKAMNEQLEVLKEKIKEQTEKPNCKEGVKRLETIPAIGRMTAAVLFHHLTSSKFETSNKFAAFAGLSPQQKESGTSVRGKGKLTKFGNRKLRAVLFMPAMVAYRIRAFPDFIKRLEEKKKPKKVIIAALMRKLAVIAYHVHKKGGDYDPSRYKSA

SEQ ID NO: 478913 - protein, 343 aa, unidentified
MEQISTIGLDIAKTVFQVHGLGETGEPVVRRQLKRRQVLPFFGRLSPCLVGMEACATSHHWARELEKLGHDVRLMPPRYVKPYVKRNKNDAADAEAICEAVTRPTMRFVPIKTPEQQSVLMVHRTRHLFVRQRTTLINAIRAHMAEFGIVAGVGRNGVETLLELITRGEDERLPSAARECLMALAAQLELVKRQILEADRRVRAWHRTSKTSKRLEAIPGVGPLVATALVASIPDPHVFRSGRDLSAWIGLVPKQNSTGGKERLGSISKAGNRYLRQLLVVGALSVIRRAKQLGYTRHPWLIRLMARRSTKVAAIALANKIARIAWAMMARNESYRTPLPTPA

SEQ ID NO: 478914 - protein, 355 aa, unidentified
MNDVKYIGLDVHQATISAAVRDATGELVMEAILETKAETILQFFRGLRGSLQVIFEEGTWSAWLHDLLQPHVARVVVSDPRKNALLKDGNKNDRIDARKLSELLYLNKFNPVYHGEHGLRTLKELARSYLTITKDITRVMARIKAIYRSWGIPCAGQQVYAPGHRREWVAKLSEAGVRARAEFYYQQFDGLAPLRQQARRELLSESRKHAAVKLLRQIPSIGPIRAALLVALLQTPNRFRTKRQLWAYVGLALRTYTSGEYRFEHGQLKRSKKVLAIRGLNRNHNHDLKNIFKGAAIWAAGNTGPFQNFYEACLARGLKPHLARLTLARKIAAITLLVWKKGVCFDAKHLTQQAA

SEQ ID NO: 478915 - protein, 457 aa, unidentified
MNYYLGIDVSKGYADLILLDSQKNIIEKNFQLDDTFQGHNQLSDLISNFFSKHSKDILYAAVESTGGYENNWLNTLQKLQTQFNLFAVRLNPKGVHHNSIAGMKRVITDKVSAQNIAEYMINHPEKINLQANDPFASLRSQWNYIRMLSKQKVQLVNQLEKLLYRASPELMVYWKKKLPNWMIQLIIRYPTSKKLSKAKADKVAQLSYITVDKARKIVEKAKNSVASANDPYTETLITSLGQEILHKQQLIDRQTELMISRCHLQEVKLLETIPGVGTYSAIGLVLEIGTVSRFASAKKLSSFFGLHPKYKQSGDGTWGIRMSKEGRSQPREILFMVTLVAIQHNPIIQEIFAKNLSKGKCKLDAIGVCMHKMLRIIYGMLRTNTPFNPEIDRQNQKKSHQKRKGSMDKKLRRYQKQDPDAPISYRQTKTRKEQHQSQGDQVTKHEIRVSALSSIDT

SEQ ID NO: 478916 - protein, 313 aa, unidentified
MKRYIGIDVSKDRLDVAVHDSAQCFSCDNTEAAVEGMVKQMKALDPELIVMEATGGYERLCAAMLAAAGLALSVVNARQVRDFARSKGILAKTDRLDARVLAHFGAAIKPEPRALPDAQQQLLDELMLRRRQIVAGLVAEKNRLGMAHTAAVKKSLRAAIAFYERLLADVDRQVGEHIERSPLWRAREDLLRSFKGVGPVSSRTLIGDLPELGTLDRKRIAALVGVAPVARDSGKRKGTRAIFGGRGQVRAALYMVAITAIRTNAPIRQFYQRLRAAGKPAKVAIVACMRKILITLNAMVKTHTRWNEHLTVS

SEQ ID NO: 478917 - protein, 469 aa, unidentified
MARSSCKSSSRQKASTRPKFCKRYSRIEDMPVINRHAAGIDLSGDVSHFVAVEIGDELEVREFGGMTPELHDLVEYLIANGVTTVAMEATGVYWMPLYDMLEVAGMDPYLVNPSHVKNVPGREKNDKLDARWLHKLHRYGLLSASFRPSEEIRPLRSLYRQRKTLVELSADEVRRMQKALDVMNVRVHKAISDLCGVTGQHIVRAIVAGERDPVVLAAMRDTRCKCSEEELIQALTGHYQAHQVIALKQALGRYDFLVAQITELDKEIQTYLTGLIPLADDDIAEKIESAPHDLPRGKHAPCYNVAAYVEIFTGHDPTCLPGIGPQISFGLLAELGKDMSKWPTDKHFGSFLSLAPQQKISGGKIHSSRTRPGSHPGAGLFRQAAVAVIQTDSALGAFYRRLAVRIGKAKALTATAYKIARMYYHLMRDGMAYVELGEKAYEERYRKRQIASLQKNAERLGFTVTPLAA

SEQ ID NO: 478918 - protein, 380 aa, unidentified
MAARTRRGLGPSHLLITPDRAGNVVGIDPHKRTLSAAVVDARGGLLAGEHFRVSGEGHRALVAWACSFGPVARWGVENASGWGRHTAIFLTGRGQDVRDVCPNRTARADRARQRGKSDTLDAERVARELLAHPLLPKAFKRAADQPAGPDPQRELLVLWQRRRRSLLTSRQHLVNEAESLLAELPLELREQLPPSTAVRPRLRALAGRRLRPRDPALALRLRLLADYRQQIAHLDADERAVCQELATLVKHSGSTLDTLCGLSTRSVAELLVEVGDPRRFTTPGFARFNASAPLPASTAEGPGEPVRHRFNPGGNRRVNAVLHRMAVTQLRCEPRAQALYNRARARGHTKKEARRILKRHLSDVIHRHMLRDLATTTPLT

SEQ ID NO: 478919 - protein, 429 aa, unidentified
MTYSEIKSTEFAAYVGIDWADQKHDICLQEAGSNQVESLQLDHKPDSISNWVSHLQERFQGQPIALALEQKRGGLLYSLMHYEFIVLYPVNPKALSSYREAFATSGAKDDPVDADLLREMVHLHRDKLRPWTPDDPLTRELRLLVEYRRRLVDDKTYLTNRLQALLKQYFPQALAWAGELDSLLAIDFLTLWPQLEAIQKASPEAVLNFYRSHGCRLGEKLPQRLTEIRAARPLTSDQAVTIASMTMVQALLEPLRGLIAGIKSLDQQIEACYQQHPDKEVFSSLPGAGRVLAPRLLAVFGADRERYQSAEEIQCLSGVAPVTERSGKTKFVRRRLACPKFVRQSLHEFANSSIKWSRWARAYYDQQRHRGNKHHEAIRALAYKWTRIIYRCWQDHEPYDESVYIAKLELRGSPLAKLIPTAAEQAVSS

SEQ ID NO: 478920 - protein, 430 aa, unidentified
MKYNTQNAKIASITEETLVLGIDVGSATHYVRAFDWRNYEFSDKPLAFSNDEAGFLTFMAWVEDIKEKAGKTAVIPGMEPTGHYWFNLGKFLQDSGMRPVHVNPHHVKKSKEMDDNNPDKNDRKDPKTIAALVNEGRFSYPYIPTGVYAEIRSLSNLRFQTQEEITRIRNRIARWISIYFPEYKDVYGKLDAVSGMMVLKEAPLPVQIKELGAEGINQIWRDAKLRGAGMKRAKTLLSAAEHSVGSQEAPEAASMEIWNLLEDYEKYSSRMDDLMARIEEKIKEVPYVDKLLEIKGIGLKTVCGFIAEVGDLSRFDDPKQLQKLSGYAIVKNSSGKHAGESHISYRGRKRLRYVLYEAAISVIGKNGEFREIHRYYQTREKNPLKKMQSVVAIACKVLRVFYAILTKGVDYDGEKMLGDIRRPAMSVQAA

SEQ ID NO: 478921 - protein, 409 aa, unidentified
MSADENTRISRRYVALDIHKHYCVIAGVDREGRVLLQPVRVEHADLEEWLKKKLLSNDQVVIESTTNAWHVHDLLGPLVERVVVANPIKVKQIAQARVKTDIRDTLILARLLAASLVPDVWVPPMHVRQMRQLLSQRRQLVETHTQILNRMHSVAHRHHLKHERGKRFNEKTIGWQKDKSLSGMEQFQLSLEMENKVYIEKQIERISKEVRKLCHQKPWADNMTYLMQLPGFGVITAMTVLAAIGEIGRFETSKHLTSYSGLTPGLEQSGTKHRGKGITKEGRRELRWALVEAAQMAVKSDPLLKMKFQALQKRMHRNQAIVAIARHLLELVWYVLTRRQPYRHFSHERIAYKYLTWAWQMDETARDGLTRQQFARYYLMRLGIGKDLTRIAINPKYPRRLASEAEVLA

SEQ ID NO: 478922 - protein, 352 aa, unidentified
MEEISVIGIDLAKRVFQLCATTRSGAIAWEKRLRRAAFIKFLEDEAPRCLVGMEACGSAHHWARWLVARGFTVKLMAPRAVRAYRAGVHKSDQRDARAVAEATSRSQVAAVRVKSEAAQATQALMRMRERRIRQRVQTTNQLRGLLAEFGIVLPKGPAVLLARLGEVMAGSPFAALPAGVQELVERLREEIIEQADKVKAAEAMLIQAVKADANCRLLMSIPNIGPINAAALSVALEAPGAFARGRAFAAYLRLVPRQQASAESSALLGIGQMRACEMRRYLVLAAQTLLIRVDRIKEPPQDRLLAWAGLMLHRKMRNVAVVAVAAKLARIAWAVMAHSQPYRPRSVGAQPV

SEQ ID NO: 478923 - protein, 326 aa, unidentified
MNLPAIVLGVDIAKLKFDVCLIKENQRVKHKVFVNARHGFEQLVAWLASHGVGSLHVCLEATGSYGEALAAHLHEVGYRVSIVNPAAVKAFAASRLTRTKTDKVDAELIARFSLAHEPQAWQPPLPEVRHLQALVRRLESLVEMRVAEENRLSSGVAVDAVRHSLAEHIAYLVEEIKQTEQMIREHINNHPDLKEQSDLLDSIPGIGQTTAVLLLAEIVNIKQYKSARQVAAYAGLVPRERRSGSSVRGRVQLSKIGNARLRKALYFPAMTALRCSSFFKAWADGLRERGKCKMAVIGAAMRKLIHLAFGVLKTGKPFDPNWAKTA

SEQ ID NO: 478924 - protein, 364 aa, unidentified
MKRKVYVGMDVHKETISFAYLTSKSKDVVKEQQIKHNEIQIKKFVNKLKSEWNEIHCCYETGVTGYPLYRYLNSSGVNCTLVAPGKIPRQNSDKIKTDKRDAIKLTRLLRSGDLESIHVPNEEDESVRDYLRSRDSLRLDLGRNRQKLMKFLLRKGNVYSATKYWTTSHYKWLNNLHFENEILQETFNDYYSRVRVQEENLKAMDQKIQEIAKSEAFKERVGILRCFRGVDYLTAMFLLCEVCDFKRFKTAGSFMSFLGLVPGEYSSGSKRKQTGITKTGSPRLRRILTEAACQHRFPGTGSKIVAARRTGQPALVVALAEKASLRLHKKFRNLQLREKNPQAMITAVSRELSGFIWAAMNLAA

SEQ ID NO: 478925 - protein, 497 aa, unidentified
MKKRVYSATDIMHVDWQRILTSRGAAGQEAVVGVDVGKLEMRAVLRWADGTFERPWSVANPDQIGALVDRVGELARRGGHRVRVAMESTGTYGDALRQALADAKVEAHLVSGKRAHDYAEVFDGVPSQHDGKDAAVVAELCALGKSLAWPWPAAPDEQVGQLMFLVDQLEVATRAKTQWVLRLEAMLARHWPEASRVLKPGGGTMLRALVHYGGPAALAADPQAAATLQRWGTRWLDGDKVTRIVASAGATAGVRQGATDVARVQWCAQRGLEAHREAGRCQAKLKRLGAAHAAIAAQGAVIGIPTACVLWRHLGDPRRYHCAAAYRKAMGLNLKERSSGKYQGKVKITKRGPGACRRWLHLAALRQIRDDHDVRAWYARQCGRLGKGKGKGQGQGKGKGKGKGDDNAGSSSSSSSSSSGRLRVVTALVRKLALAMWVVGAGRGTFEVERLLGLPPRHRGKQRAGQAAAAAAAAAAAAAAAAACGKGGIAAIAVATR

SEQ ID NO: 478926 - protein, 388 aa, unidentified
MIYVGVDIAKLNHFASALSSDGEVLMEPFKFTNDNDGFQLLVSRLEKFDKNSIIIGLESTAHYGDNLVRYLVAGNYKVCVLNPIKTSVMRKNNIRKTKTDKVDTAIICKTLMMQESLRFVTFYDLDLMNLKTLGRFRQKTIKQRSRLKIQLTSYVDEVFPELQYAFKSGLHQKSVYALLKEAPTPDRIASMHMTHLAHLLKANSHGHFDKEKAQELRILAQKSVGASDSALSIQITHTIAQIELLDSQLDSIETEMTDIMKYNDSVIMTIPGIGYINGGMILGEIGNISRFSCPKKLLAYAGLDPSIYQSGNFQAKKTRMSKRGSKTLRYALINAAHNVVKNNSTFKAYYDAKIAGGRSHYNALGHCAGKLVRIIFKMMTDKLAFNLD

SEQ ID NO: 478927 - protein, 367 aa, unidentified
MKKLTTTMMQETLNKHDGHLTVGLDLGDRSSFYCVLDGTGDVLLEQKVSTTPKAINEIFVAMPRSRIALETGTHSPWVSRLLSELGHETIVAHARSVRLIGESRRKDDRLDAMTLARLVRIDPRLLCPVKHRSAEAQADLTVIRARAALVRTRTMLVNAARGLTKSYGERLRGCNARGMKLKAAQDLSPELKYALEPMMHEIESASERICQYDQMLESMAWNRYPEAERLKQIKGVGTLIALTYMLTLEDPHRFHKSRNAACYVGLQPGRRNSGQSEPQMHISKEGDPYLRALLVQAAHHVLGPWGVDSDLRRWGMKLAEHGGKRGKKRAVIAVARKLAVLLHRLWVSGDMYVPLRPDGPTTMAAVA

SEQ ID NO: 478928 - protein, 412 aa, unidentified
MDVMYPRCCGLDVHKKTVVACCILSTEGPEPVKEIRTFRTMTTDLLALADWLQEKGCTHVAMESTGVYWRPVYNVLEGQCELLVVNAQHIKAVPGRKTDVKDAAWIAELLRHGLLRGSFIPSKPQRQLRELTRYRSTLVQEHARTLNRLQAVLEDANLKLASVVSDISGVSARAMLEAILAGERDVEALADLARGRLRAKRDQLKDALEGRVTAHHSFLLTEHLSALEYLDEAVARVSAEIDQRLTADQEAIALLDTIPGVGLRAAEILIAEIGTDMSRFPSAKHLASWAGMCPGNHESGGKRLSGKTRKGSRWLRQILVEIAHVASKTKNTYLAAQYRRIAARRGTKRALIAVGHTVLTIVYTMLTRKQPYQDLGAAYFDQREQHRVERRLVQRLERLGYEVALHPRALAS

SEQ ID NO: 478929 - protein, 430 aa, unidentified
MKSNTQNAKIEAITEKTLVLGIDVGSKTHYARAFDYRGIEYSKKPFKFSNTEAGFATFKEWILDLKERHEKDKVVPGMEPTGHYWFNLGKFLQDNEMKPVLVNPHHVKKSKELDDNNPTKNDRKDPKVIAGLVREGRYMIPYLPEGVYADLRTASNIRFQLQAELTRIQNRISRWFNIYFPEYKTVYGKPDAKSGMLILKAAPLPEDILTLGIDGVNQIWRDAKLRAVGKARAKTLIEAAEHSVGSKEGAVSARMEIRMLLEDYESRNIRLQEVMTLIEGLVKQIPMAEKLLEIKGVGIRTVSGFLAEVGDISRFNNPKELQKLAGLALVENSSGKHKGETTISRRGRKRLRYLLFEVAMSLVAKNPEFRELHNYYTTRRLNPLKKMQSLMAIAAKLIRVFYAMLTKGVDYDPKKMVSDIKRPAVYLQAA

SEQ ID NO: 478930 - protein, 336 aa, unidentified
MKKNYEFIIGLDVSKDKLDYCIINQSTLHQDFGQLTNTAKGIAAFLTSVVKKLKGKREGILFCLENTGVYSMPLCYWLQASQFDYWVVSALEIKRSKGIVRGKTDKADSRDIALYAMSHLHQLKLSSLPEKDFVELRLLLTEREKVIKAINLFNMTNESKNFLPNSVLKTTLQHNKRMMTFLKKQLKQIEQSIENLVEANPIFKQQDELLQSIPGVGKQTSVLLIAYTQAFTLFQNHRQFACYAGVAPFEYSSGSSIKGRTKVSNLANKKLKTALNMAALSAKKYDTQLKFYYEKKIAEGKNKMLVLNAVRCKIISRAFAVINRNSKYVDTMKAVA

SEQ ID NO: 478931 - protein, 426 aa, unidentified
MKVMHDRVAAIDVHKDMVKVAVRVPGERRGTRKTDVLEFRTFYGVLEEMGRELRRRGVTHVVMEASGVYTEPVYYALAGLDITEVMVINPAHAKALKGHKTDARDAIRLLDLYECGLLSGSYIPAPDLKEVRDLARYRMKTVQARASEIQRLQKTLETAGIKLSSVVSDVTGVSATAMIEALIDGERRGAVLAGLAQGRLRTAGKMADLSMALAGRFTDHHALMCRLHLDRMQALGEAVAGLDATIAPLAARHAREAGLLKSLPGFGDVVVAGWLGEIGPAPHQHFATAQRLASWATVCPGNYMSAKKSKGGRTGDGGNYIKPLLVQAAWAAVRVPGRLQARFHRLVRRFGGARNKGAIKRAIMAIAHTLLKIAYQVLKTGTPYTDLGADFYASRETPQARQDYLIRQLQKLNPGCVITVTPAEAA

SEQ ID NO: 478932 - protein, 310 aa, unidentified
MEDIIVGIDVAKDRLDVAVRPGGEAFVVERNAVGLEALVARLRELCPYLVALEATGGYETIVAAALAGAALPVVVVNPAQVRAFAKALGQRAKTDPIDAAVIAHFAQATSPEPRPLPDEATQLLADLVARRRQIVEMIGAERQREKRVMIAHLRKSIVRLIKTLEKELASLDTDIDGAVRGSPAWREKEDLLASVPGVGPTIARTLIAELPELGQLGRKQIAALAGLAPFTRQSGQWQGRSFIGGGRTTVRAALFMGAMVAKRHNPVLKAFFDRLVAAGKPKMVALIAVARKLLTVLNAILRDNRPWQNA

SEQ ID NO: 478933 - protein, 343 aa, unidentified
MAIVGALDIHRQQITFDWIDAESGESGRGRISPADRVGFRKWLGQFGGKPVVLVVEGCTGWRFIAEECQAAGVEVHVADPAEAAGARSRKQRAKTDRIDARQLREQLAKGEIHDSWIPPRHVLEIREKVRLYLDLSEAKQAWTKRIHATFFHQGVPKPDGRLLRGDRVQLGLADPDLSAAGEQAVDVAMRIIAAIDADLVPLRAELTAFGRRHPGPRELTREYGLGALLATAVWEELGDTRRFSSSRQAVRHAGLDISVYDSDGKTRGRPRLTRQGPPVLRWALYEAALHAHKKTSPDHGYYVRQVPRIGRGRTRLAIARKLARRCHHRLQALGDQAWVDLTV

SEQ ID NO: 478934 - protein, 368 aa, unidentified
MNRKSSKLYVGMDVHKESIDLSLAEEGGEVRHHGRIGGDMNALWRALRKLESSGRELVFVYEAGPCGFGIYRGLKGRGHTCWVVAPSNTPRRVRDRIKTDRRDSVKLAGLARAGELTPIYVPDVADEAMRDLVRSREDALVMQRQARQRLTALLLRNDVRYSGKTAWTTAHRCWLARVTLPQPAQRLAFEEYVQAVEEASARVHRLTQCIEQELAQWRWRSVVTALQACRGIQMIHAVRIVAELGDLSRFAHARQLMGYLGLIPTEDSSGEHRHQGAITKAGNSSARRALVEAAWAYRYPAKVSHFIARRQTQVPKAARDIGWKAQVRLCARFRRLSARGINRNKIVVAIARELVGFVWAIARPIKPV

SEQ ID NO: 478935 - protein, 337 aa, unidentified
MELYSGIDLHGNNNHTLLLGEDGQVVWERRLPNVLGKILSQLEPYRENIRGVVVESTFNWYWLVDGLMANGYRVYLAATSAIRQYQGLKHADDRSDARWLAQMLRLGILPEAYIYPKEQRPVRDLLRKRMQLVRQRTANILAVENLCARNDGQMPNVNEVRKLSLQHWEAEQALAVRSNLKVIECLDQQIRQIERHVLQHCRCRQDYRLLLTVPGVGKILAMTIALEVGDVERFAGAGQFASYCRCVGSEWLSNGKKKAEGNRKSGNKYLAWALVEAAAFAIRYDPSARRYYQRKAARTNKVVARKAVANKLARACYHVMRKAVPFESELAFGPGGE

SEQ ID NO: 478936 - protein, 410 aa, unidentified
METLIKRCCGLDVHQATVVACLRIARPGKKVSREIRSFATTTAGLLELRDWLTAAGCTHVGMESTGVYWRPVHAILEDAFTVIVGNAQRIKNVPGRKTDVKDAEWLAELLALGLIPPSFVPDRGLRALRDLVRFRRSLVEARTDCRNRILGVLEGAGIKLASVATDVFGVSGTAMLQAIVAGHLTPAEIADLAKGRLRKKRAALELALHGSVTDDHRLMLDLLLGSLNDTEGRIAAIETHINVRLEPYRQDHLNLTTIPGVDWAGAASIVAELGTDMAVFGTAGRAAAWSGVAPGNNESGGRRRRAGARKGNVHLKTTLHTAAVAAGRTKHTYLADKYHRIRARGGPGIAGGAVAHKILIAAFHILARKVTYRELGADYLDRRAKQRVQRTIVRRLERLGYDVTLRPKAA

SEQ ID NO: 478937 - protein, 380 aa, unidentified
METETTHSRQYITTGPDLYLAFELGLKTWKLGFTIGLGQRPRLRTIVAGDLEALQMEIQQAKKRFHLPETTAVQSCYEAGRDGFWLHRYLVTAQVANVVVHSASIEVPRAQRRAKTDRLDAEKLLTMLIRYYSGEAKVWKVVRPPSAQEEDHRQLHRELQTLKRDRTRHSNRLQAFLISQGIRLKPGPDFLAQLAAVRLWDGQPLPAGLRSRLEREYEQLCLGEEQIRQLEAERRGAIRNTQSREMAQVRQLLRLRGVGENAAWLYVQEFFGWRELRNRRQVGALAGLVPTPNKSGESDREQGISKAGNRYMRAMAVELAWLWLRYQPESSLSRWFEQRFSQAGKRARKVGIVALARRLLIELWRYLETGALPEGALLKA

SEQ ID NO: 478938 - protein, 322 aa, unidentified
MRYIGIDVSKATFVVAYSSDKGGEIRTFNNTTAGIKQFIGTLPKDGSIHCVMEATGNYSALLLYMLNVAGITVSMENPLKVKNFARAMLSTVKTDKIDARLIALYGEKMNPQPFKVQGEAILRLRQKRTVIRQLTKQITAMSNLRGSLACLPVPDKGATHTVDETIKFLEKRRDRLQSELTDLVEVEFSRQLALLTTIKGIGITLATALIITTGGFTYFQNAKQVSRYLGICPTYEQSGTSVNIKGHINRNGDAYTRGLLYIAAWPASRFNAQCKETYTRLRQNGKSGKLAMIAVANKLVRQAFAVVAHDKEYVDGFVSNRP

SEQ ID NO: 478939 - protein, 341 aa, unidentified
MYSIGLDVSKASISIHVPLNSLDLEIENNLKALKSFYAKLKKLYKKELDKLVFVYEPTGSYSAILTKFCSTKNIKAFIINPKQSSNFAKALGHRSKSDKIDALMLSRAIAVARKDEIKVPIVNATAETIKELMSYYMFTLKQRVAINNHHEALKAKDGNAYALKDLLKRHKEMKEKEAEILNKIKNIINEDADISQAYANIKTIPGIGEIAGIVLIHLFIRYPKANQKQITSLTGLDPVIKDSGTSVKSKPKISKSGSRLYRGVLFMATMVSIKYNDEMREFYDRLKENGKHSTVAQIAVMRKLIVIAHSLYKNNTTYNAEIYQKACGTKLEKDTNIELVA

SEQ ID NO: 478940 - protein, 319 aa, unidentified
MSKTVLGIDVAKKKLDVCLMLDGKVLKKKFDNISAGFKLLQGWLMSLHIERVHACLESTGVYGEAVAEFLHERGHRVSVVNPFRIKGFANSDLQRNKTDTADARTIAEFCLAKDPEDWHPLPPEIKQLQALSRRIEALERMLVVETNRLESASETVRPSLKRMIDNLKDEVKNVNRLIKDHIDDHPDLKQQSDLLKTIPGIGEKTAHMLLGEIEFRQFASARALAAYVGVTPRKFQSGTSLNWTRLSKLGNGRIRKALYFPAITAVKYNEVVKQFARRLSQNGKTPMQVIGAAMRKLLHIAFGVIKNNRPFDPNPGSYI

SEQ ID NO: 478941 - protein, 370 aa, unidentified
MNEPTPLFVGLDVHKDSISVAHALGGQSEPPHFVGVIGTRQCDIDKLLRRLRSKAHGLVFAYEAGPCGYVLHRYLSAKGLDCRVVAPSLIPKKPGDKVKNDRRDAVELARLLRSGDLTSIYVPRIEDEALRDLCRARDAARLTLKAAKQRLKSFLLRQGLHYTGRASWNDAHRRYLAKVVCPTAAQQIVFQESLLAVDEQVDRLARLEQELLDAAPTWRLFPVVEALQALRGVQQVVAITVVAELGDLTRFDNPRQLAAFVGLIPSEHSSGDKRRQGGITKTGNGRARRALTEAAWAYRYNAKISPIIQKRIEALPQDIRAIGWKAQVRLCKRYRRLQARGKHTNVVITAIARELIAFMWAIAKEVPLQA

SEQ ID NO: 478942 - protein, 340 aa, unidentified
MKKVSTIGLDLAKNVFQAHGADASGAVIFRKKLRRAHVLEFFATQPACTVAMEACGGSHFWGREIGNYGHRVRLIPPAYVKPFVKRQKNDAADAEAICEAAQRPTMRFVAVKSEAAQGAAVVFRTRDMLVRQRTQIINALRGHLAEFGLIVAQGPAHVAKLIMAVQDPKQPLSEAARPILCVLVDMLGLLDQRIKLLDIAIARRAKEDEVARRLMSVPGVGPMIATAMAALAPPAETFKRGRDFAAWLGLTPLQHSTGGKQRLGATSKMGERTLRRLLIIGASSVVRWAARKGAPAGSWLASMIARKPAMLVRVALANKMARVIWALMAKGGTYRAPVVA

SEQ ID NO: 478943 - protein, 355 aa, unidentified
MSQEKYIGMDLHQATVSAAVRDRNGNLLMECILETKADTLLEFVQGLHGTLSLAFEEGTLAAWLHDLLKPHVNRVVVCDSRKAALLRDGSKSDRIDARNLSELLRTNQLKPVYHGEHGLRTLKELGRSYLTVSKEMTRTMNRIKSLYRSWAIPCAGTTVYAPRHRREWLAKIAEPGARVRAEHLYEQLDHLQPIRVRARRELLQESNKHDAVKRLRQIPSIGQIRAALLVALLQTPHRFRSKRQIWAYSGFAIETHDSGEYRYVRGKLQRNRERITVRGLNRNHNPDLKNIFKGAAISASSRPGPLQDFYETRVAMGMRPTMARLTLARKIAAITLTLWKKGANFDPQQLSRQAA

SEQ ID NO: 478944 - protein, 350 aa, unidentified
MDKELYIGVDVSKQTLDLAYYDGESIDWKKAHIKVSNNNAGFKKIGSWVAKVSKGFDIVLFCMEYTGLYTQNFRLWLEEKHYIYRMVEPRKMHRFEPDLDDGLRSLDRIKTDELDSFRIAIYCEQNHRKILRNPSKLPSPVYFKLKRLLAERKQTIKQSVLYKQQLHDICAYDTDLSVERKNGQLKTLNDALKGIDNEIDMYIKEDADISKNFSLLTSIPGIGRVVALETIVLTENFMAIDNPRKYACYIGVAPFKKESGTSVRKGSSVSKKGFKQAKADLSIACLVCMQHIPNIRDYWERKRKEKCSGIVFNAIKFKMILRMFAVIKRGTPYVETDNYRNGKNKQPGVN

SEQ ID NO: 478945 - protein, 402 aa, unidentified
MIFINCLGIDIGKSESVVAHYKDEVLVKERVIQNNQNGYRYLKNYIKHLDSLFILFESTGIYSRGMKRFCEIHKIDYLEMNPLEAKFKTSSLRSWKTDKSDAHKLALLAFRMKDSKVQRQSEEIYFELRERARFHLEMEINQNCLKVELVETLHQTFPGLEKLFTNRYSKIALSIAKAFPHPDFVSTLTHDELVEKVLHSTDKGISVNKAHKYVQKLIEIQINSFPNVDKSSFLLQKVQYLCDKLLIGIEEMKEFDQEMIDLAKNTTEFENIISIPGIGELTAALLIGELGNIREFKTNKQLNAFVGIDIKRYQSGTSKSRDTINKRGNKKARRLLYLIIMNIIRGRNHYQSHIVDYYYKLREQPHGKTHKTAVIASINRLLKTIHYLIVNNKLYDYQKAPH

SEQ ID NO: 478946 - protein, 461 aa, unidentified
MLVVAMPTSPSYWVEEERENAMAKVIIGVDPHKLSATIEVVDRRERLLGSGRFSTDQAGYTAMRTFAKAWPERVWAVEGSNGAGRPLAQRLLEAGEHVVDVPAKLAARVRLFDTGHNRKTDARDAHSIAVVAVRTRTLRVLAADGELEGLRMLCDRREELTRLRVQTVNRLQRLLAELIPGQGQKDLTALQAKAILATVRPRDIAGKTRGRIAVEELADLVAVEAKMKKATAELKTIVLARGSRLMDIHGVGPVVAARILADVGDITRFADRNRFASWTGTAPLDASSGEQNRHRLSRAGNRRMNHMLHIAAVTQIRLDTEGRAYYSRKRAAGKKPLEAMRCLKRRLSDVVYRQLVADAERAAMTASSGEAGTGPGGHCGATQESSAVDLPPHIDTSDQPLPGPAHPTLPATKPHANPCAASAPRRSRRRAGAVKVERPTGRTTLTAPSAGAHSAAPKPTS

SEQ ID NO: 478947 - protein, 317 aa, unidentified
MAKQVEERIYGVDVAKGWLDIYAAKDGQVQRIDNCAAAISAWINGLDGPVRMAIEATNDFHERLVARAYAAGHKVYLIDAFRLSRYREAVGHRAKTDRHDAALLSRYLQQEGAELRCWQPRDPRHEALWRLLKRRAKVVQAKTRLRQSLVDLGPLDAEVQALINSHQQLIRRFECELLRRARELGWQAEITRSRSIPGIGPLTALGLVAAFHRGEFSSADAFVAFLGLDVRVRDSGRMRGRRKLTKKGEPELRRLLHNAAMAACRDACWQPYYQSLRARGLSGTAALVALARKLVRVCFALLKHQASFDPPHHPGLA

SEQ ID NO: 478948 - protein, 358 aa, unidentified
MSTQTTATPKLYIGLDIHKKSWSVHFRTDISDHRGFTMPPQPEKLVEYVCNHFSDHQVSITYESGCCGFSAARYFTQTGWKVTVVNAADIPRIQKQQFQKTDRIDCRMLCKNLQQDQLKAIHIPTEEQDQLRSLVRHRNSVVKQIRQVKLHIKSMLLYQGIAIPEAFDNANWSKAFLQWLSEIPWQHYPATYSMQSKLRILNSLHIEYLNCANELRSYCRRHHQKDYYLLKTIPGIGGYLASALLAELGNMRRFSNEDQFSAYIGMIPAMRNSGNTESTLGITPRSKSLIRSYLIEAAWVAIRRDPEMQAYYRKHFGKNIKNVIVKVAHKLVKRILSVIKNERPYEVSYQHHSALKLN

SEQ ID NO: 478949 - protein, 350 aa, unidentified
MNKFYKSKTDGSVFKNMFVGMDVHKNYLQVAVLDEKGKVVSNSRVDNNLIKVNEFFDTLHPGNNTKVVMESSGMWYNIYESLKKKNLDVRLSNPTKTRAIASAKIKTDKLDAVKLADLLRGGYIAECYIPTRGTMKLRELVRHKAALVRMRTKLKNKIHSIIAMNGTSISYAGTTFTKGHIEKLKELNDYRINGYLRIIESLNDEINAVSKKILLLAQEDEMAKLLMTVPGIGYYSALLIVSEVGDINRFPDSYHLCSYAGLIPSTYSSGEITHHGSITKTGSKYLRWIMLECLHAHIRNDKNSNVTQFYHRISKKKGNSKAAVAAASKLLKVVYWVMKEKRTYYNDKSK

SEQ ID NO: 478950 - protein, 389 aa, unidentified
MNGQVDLTVKAQPSDFENTLFVAMELSRATWLVATFAPRLGDKISVHAVPGGDTKGLLDLIGRLQEKLRGKIAGRLQTVCCYEAGYDGFWLHRVLVNHGVQNHVLDGASLPIDRRAKHVKTDNIDAKRLLKAIVGFVQGDPQSCRVVRVPTREEEDARRVHRERQRLVRERTGHLNRIKALLIAHGIRTVRITDAKWCERLDRMQTGDGRPLPARLKSEIEREWKRLKLVAAQVREVEAERDRLVRGNEPSPNVCIEKMRRLAKLYGIGAEFATVLTREVFYRPFQNRRQVASYVGLTPAPYDSGESKHDQGINKAGNTRARVTAVQMAWLWLRYQSKSELSLWYYRRVGDLKGRVRRIMIIALARKLVIALWRYVETGKVPTGAIVTA

SEQ ID NO: 478951 - protein, 493 aa, unidentified
MNIGEALVALPQARIRVSANLGGGVQKGGYHRAEQRGEEGGAERARAIEGLPVVRAQVGGIDLGSQRHWVCAPGLEGRGREIADFGATTPELQRLLEWLKVRKVESVAMESTGVYWIAPQEVLEAGGLEVLLVDTRQLARVPGRNKKTDPTDCEWIQRLHSCGLLRGAFRPPEQVSMLRTLVRDKANLVAEAGDGVRRMQKSLDQMNVRVHRAVSDLDGVTGLAIVRAIVAGERDARKLAQLRDRRCRQSEAEIAEQLSGHWREDHLFSLRQSLKMYEATQERITAYEQEIVRKRAEMTPAERAGQTAPAVKNPHKANAIRKRGEEPRRQAWYRMSGVDLAQIDAIGVGTIDVVLSEYGPDLSRFPTEKQFISHATLAPHVPRSGGKALKKKKRYSASTRVAAALRMAALALRHSPTALGAYYRSLARRIGGDVAVFATARKLATLIYRLLRWGQPYVDEGAQTFEERHRQQRIRSLTARAKELGYHLLPTTT

SEQ ID NO: 478952 - protein, 315 aa, unidentified
MTASVFVGIDISKARLDVALRPTGGTFKVPHDETGITTVVHRLSSLAPAGIVLEATGGLEVVLTGALATAGLPVTVVNPRQVRDFARATGRLAKTDVLDAQILAQFAEVMRPVCRPLPDASTQQLAALITRRRQLVEMLTAEKNRRSSAPRGMRAQIQQHIEWLQHHVAQLDQDLTTAVQASPIWREHDELLQSVPGIGPVVTRTLLAELPELGTLTHKQIAALVGVAPLNRDSGAFRGKRTVWGGRATVRAALYMGALVAARHNRVLKAFYHRLRQGGKAPKVALTACMRKLLTMLNAMLKHRTPWRERAVAIS

SEQ ID NO: 478953 - protein, 271 aa, unidentified
MTFRPHALHLKAELFVKSSRVHVRDDGFTRCNFHLKFFIMVYRGIDISKSSFVAAYPSTNGNPTKTFPNTTAGMRELIGTLAVAEHHCVMEATSNYGCCCTCYIRTVLPSVLPPPPKKKQIKHFSRMMMPVTKTDEKDAYMIAMYGEKMNPPIYKMPSQATIRILTTEGFTYFDNAKQLSRFIGICPTYQQSRTSVNIREHINRNDDERLRSLLYIAFWTALRYNSRECYIRLKANEKPFKVALIAVTNKLVRPVLTITTINSIYRSICPG

SEQ ID NO: 478954 - protein, 462 aa, unidentified
MKLYLGGDVSKGYTDWVILSDKKQTVLENFQLDDTYEGHCSLYSRVEAYFDKHPGLEMYAAVESTGGYENNWFNALKSYQKVFNLKVARINPAGVNFNRRASMKRNVTDAISALSIAEYMINHPENILYDQDEKWKTLCRHWNFVEMQKHQRVQTINQLETILYTANPTLLRFKKNKLSNWLLELIIKCPTADKLARVKPEKLAKISFLTLKKAKALVAEANKNIASATDRNSEILVRQIARQIKAFDENIKSQMKLIEQELICPEIELLKSFKGIDTTSAIGLLLEIGTIERFPTVKGFSCFFGLHPKFKQSGDKIIGVRMSKQGSKNMRKILFNIAKGAITFNPLIRDVYEKKLSEGMSKMAAIGVCMHKILRIIYGMLKHNQVFDPLIDKHNNEQSKSKQQEKKLQENANIDKSRRYQEFDATAPISRKQIKKRKEHDLSQCELTSQSTGSACSSSTKL

SEQ ID NO: 478955 - protein, 582 aa, unidentified
MSAATTLDRIGVGIDTARFGHRVSFMRPDRQPAAKPLTVLENQAGYHALRERLEQLHRQHPHAQLNVRIDAAGQYATNLECFLRGLDLPLSISIGEPKRNKDYQKAHFPKRTSDDTESQAMARFAVVEQPAATPAPAPQFVLLREVAGRLQAQVKQTTQATNRLHNLLARVFPELATLADDLSAGWVLALLDKYPSAERIGQARLASLQKIPYLPADKAQTLQQAAQQSVGSLRGPIAETLVGDLVTQLRQREQTEHKMRQLLIAAHADLPAGGHRQLVTIPGIGDATAAVLTAKIIDMDRFGTPENLVGFFGCFPDENSSGVDKFGKPLPAGTLRMSQKGNDLVRHYLWNAARSAICCNPAIRALYRRLRAKGKRGDVAIGHCMRKLLHLVFAVWKTNRPFDEKHFAWEQPSDTPVPTSAPNPSTTTTLPNEAAAGHNREIPAKQVVTTATPSVAPPPAPVNPPTSRPAAAARPRVDYAFLRRQITLEQVLTHLGLLAQLRGRGQQRRGPCPVHGHATDREHTFSVHLGKNVFQCFQKDCAVHGNVLDFWATFHRLPLYDAALSLAATFHLPRNREEEPVK

SEQ ID NO: 478956 - protein, 339 aa, unidentified
MKVYTGLDLHSSNSYLGIIDETGKRVYKQKLPNDRERILSALNPYKNDMAGIVVESTYNWYWLVDLLMDKNYHVHLANPAAIKKYTGLKFADDQHDAFWLAEMLRLGILPEGYIYPKEDRPIRDLLRKRMHLVRLRTSLIVSLQNILSRNNGSRLKTSDVKFLTEDRVAPYLAGSEDLALAGSVSKESIDFLTRQIKKIEMVIEGRMELKPPYEKLQSVFGIGKILALTIMLETGPITRFAKVGNYVSYCRKVSSKWLSNDKVKGKGNKKSGNKYLAWAYSEAAEHARRSYTQARAYYNRKMQKTNFMAAHNALAHKLARAAYYVMRDEVLFMPEKTFV

SEQ ID NO: 478957 - protein, 353 aa, unidentified
MRIVCALDVHRRQITYAIVDVRSGEMSRGRITPATRESVREWLARFEGVDDVHFALEGTTGWRFVVEEIERAGHRAHLADPAETAAKRGRKRRAKTDRADCDLLLRLLSARELPESWIPPAQILELRTRVRLRKSLVDERTAWQQRLQAQLFHQGVPRGLRPRTRAGREALAKVELSPAGLELVALALRMIETIDDELAPLDRALSLYARHQPGCRALIARLYGVGPVTATAIVAELGDARRFGCSDDAVRHCGLDVTVHQSDTKRAPGHLSHEGPELLRWALFEAAQQACRSASPDYDYYRQVARRIDHNRACLSVARKLCRRAYHILRELGDEALAPIETPDREEVIAAAA

SEQ ID NO: 478958 - protein, 350 aa, unidentified
MRHFIGCDAHKKYSRFVAVDEAGETKPAVRVNHDRESYRTFLRGLPSSSPIAVETVGNWYWIVDEMQQAGHQPRLAHARKAKLMMGQLDKTDKLDARGLATLLRNGTLPEVWIPSRETRDQRELLRLRMTLVGIETRLKNRVHAILAKYALRLDVTDVFSQKGRRLVLEHLKDLPEETRQVVRQHLELLESTEKQKKITEQRLQTIIQQRNDVDLLRTLPGVGWILATVMALEIGDIQRFNRAPELASYAGTVPRVHSSGGKTRYGPVHPDVNRYLKWALIEAGNLIVMQQQRLGDIHVVRLYKRLRTGKGHAKAVTAVARHLAEAAFWVLKRQQPYKEPQGCRVSSTHR

SEQ ID NO: 478959 - protein, 291 aa, unidentified
MLRTNVIGIDLAKNVLQVCHISRQGELLSNKAVSRQKLKELLAKSKPSLVALEGCASCHYWGRYAESFGHEVRIINPKKVKAYVDGHKTDANDALAIANAALQIGIKYSKPKSMEQQTLMSLEANRQFLSKTIVSLGLHIRGIINEYGIVKAKGTKGLAELVTSTLYESDVLPASLVTTLSMLWQQYLNLKDELSKLQKSMNSTTRQIEPCKRLMALEGVGETTASMLYATLGNGTQFTNGRQASAFVGLTPKQYSSGGKATMLGIDKFGGVKDLRSMLYLGAMAYIYRLP

SEQ ID NO: 478960 - protein, 376 aa, unidentified
MREKLRFLGMDVHAETIAVAIAEPDGEVRSLGTIAKREDSIRKFIRKLGTPEQLRACYEAGPTGFVLYWQLTQLGVDCAVIAPTLVPKKPGDRVKTDRRDALKLARSHRSGDLTAVWVPDEDSEALRDLVRQREAAKQDPLRARHGLTKFLLRTGQRPPLGLKAWTERYMRWLAQVGYTQPAQEVTRLDCMNEVEHMSARVKRLEEAILEVVKLAPQPMQDVIRGLQALRGVAHISAVTIASELGNISSRFQSARKLMGYCGVFPSEDSSGNRVRRGGITKAGNAHLRRIVVESAWCYRHLPRVGEKLRKRHEGVPPAIIEIACKAQNRLHKRYMKLSMAGKDQRKIMTAVARELLGFIWAIAIKAEASCRQPIAA

SEQ ID NO: 478961 - protein, 351 aa, unidentified
MEQIEKKKLFIGIDVHKRQWSVSIFTSSIHHKTFSQPPHPSALHTYVSKYFGNYQVVCAYEACKFGFWIHKELTSFGYSCLVVNPADIPTTHKEASEKTDPVDSRKIAKALQAGLLQGIYVPQDSTLGERQLFRYRKKLWADLVRVKNRIKDKLLFNGIEIPLEFDNPYWSKGFLKWLETVEFTSAKTRLTLDFLLDQYEMIYRHFLKVSIEVRKLHKLAKYKEDAARLRQIPGIGPLTSVQLLIEIEDIKRFKNFNHFNGYLGLKPMVHSSGDKDRKGYMTYRSNHGLRSSLVECAWTSVQRDPVMLERYEELIKKHTKKRAIVKIARKLASRIYRVLKEKEDYEIGVIK

SEQ ID NO: 478962 - protein, 337 aa, unidentified
MHYIGLDVHSKHFTAAVVDEQGRLLFRSTHPTSEHNLIEVVTSLQGRKRVAFEETTVAGWVYRTLRSVTEDVIVTDPRLNQWISRDADMDDDKAALRLANLARGNFVQRVHHTDDQTQAVFKELVLGHKKVSKELARAKNQLKAKFRQHGIVCDGDGVYSPAHAEDWLAKLKDEDSRFQARRYMRRIGHLTEEKQAYARRIAKRARAFPQIAAFEALPGIGIIRAATFFAIIDTPHRFANKRKLWTYCGLGLARFSSDQMRGPVKLNPNGNRMLKELAKNAAQDAVRQGNNPFARHYQRLLANGVKSSCAMLTVARAIVATMWAMWRKDETYIPRAD

SEQ ID NO: 478963 - protein, 336 aa, unidentified
MFQLGIDVSKKTLDLCLLREGVKGKVKTRKLKNDFNAADAVIGWLSKQHCEPANVHIIMEATGVYHESLAYGLYKAGAKVSLANPHRSREFARGMDILTKNDQVDAYMLACYGALKVPEPWVPPPENVRHLSALLRRRDAPVTDSTREKNRLEKCRATDTPLAVTESIENVLRNLSAEPEHLDALILTHLDQHPELKKDFDLLTSIKSVGYQLGLNMLVILRGHHFDTAEQVAAFLGVVRVEKYSGTSVRGKPKLSKIGPPEIRAKLYLASLCGLRFNPVMKAMYERLCLRGKAKMCAIGALMRKLVHWCYGVLKTQKPFDAEYLSSDARSACKAA

SEQ ID NO: 478964 - protein, 393 aa, unidentified
MKVTRIGLDIAKQIFELHGVDRHGRVAIRKTLRRERVLEYFSQLPACEVALEACGGAHYWHREISKLGHTVRLLPAHKVKPYLDGNKNNAHDAAAICEASSRPSMRWVEPKTVAQQDLQSLHRVRQVTVRQCTLLANHIRGLLLEYGIAVARGTAALQRALAQLLEPDEQRLSPLLKQLIAGQWRMLKLHEQQVKVHDRRIANIARHDASCQALLKVEGIGPLTATALVATAGNGRQFKNGRHLSAYLGLVPGHSNTGNKTVMLPITKRGNRYLRTLLVHGARSTLYHARRKTDPRSLWLQRLQAKRGHNVAAVALANKNARIAWALLRFGQAYRPNLAHAPVAERGATPAASAPGRRAGLTLKLHRVSAASAESPIVPSRPQRVKGGTEKCS

SEQ ID NO: 478965 - protein, 426 aa, unidentified
MQNCLFIGVDVALKGNQFCVMNFDQHIYFNLKFPNNPEGNDMVINKIKDIENKFFFEKIIIVMESTGMYSFHPACYLSSNEYLNKFHTEVFQINACDFDKYKKSFHDLDKEDGIDAYILADYARVGRTKALHPFRGSQYIALQRLTRQRYHICKELIREKTYVLTNLYLSFSGLMSLDKNELPFSDLFGATSSAFLEEFVSPDQIAESSVEELISFITEKSKHHSSNLNDKVTALNKAMRASYRLNQTAYEPINIAIACSLNTIKFYQQQLKNIDKAILNAALGLDSNTYHILLSIRGIGKVYAAGIMAEIGNIDRFSHNSKLAKYSGLYWKRNQSGEFDSQDKKSSKKSNKYLRYYLVEATVSCVRQNFPFIKDYYNLKYKEVTKHQHKRALVLSARKLERLIFGLLRKNQYYKPIDSVQISKIN

SEQ ID NO: 478966 - protein, 405 aa, unidentified
MPYILALDVSMGHSYSVLYKDDTCLFEDEIEHTQRGFHALLEEIQHLPERPLIVFEATGIYSRPVEKFFQDHHFSYCLLNPLEAKKQMEESTLRSWKTDKSDAHRLAQTHLKNQRQPKEVQSNFYLEMRDLARFYQEIEKKITRLRMDLHNCLQLTFPDLEQFFSNRLTPYALTLIRLFPHPDFVLASTRTKIKNKLINETRKKISANRAEQKADQIIHYAQCAYPAVEKDSIHCQKTIYYAELLQDLLEQKKALATQMIKKAEGSPCFLLYQTFPGIGALTAALLLGELGDITRFKTHKQLNAFVGIDIRRYHSGKYTGQDRINKRGNPKARKIIFFTIRNMIRQQRAAPNHIVDYYYKLKKQPIPKKEKVATVACMNKLLKCMHAMVRAHTEYDYAYAVSVDH

SEQ ID NO: 478967 - protein, 413 aa, unidentified
MELLHARCAGIDISKKDAKVCVRVQGRGKSPTAAVVTTWGAMTNQILALREHLLAEKVTCVVMEATGAYWKPFYYLLDDGLDVMLVNARDARNVPGRKSDVSDAAWLADLGAHGLGRASFVPPPPIRELRDLTRTRTVITRERSREAQRLEKLLEDAGIKLSSVATDITGASSRRMLEALIDGQRDPTAIADLVHWRMRPKIPALIEALTGRFSEHHRFMTRLFLDRIDAHSADIARLDTRIEAAMEPFAAARELLMRVPGISRITAEVFIAETGADMSVFPTAGHLASWCGLSPGSNESAGRVKSTKTRPGNPYLKGALGIAALSVIRRKETYFWAKYRRITVRRGPMRALVAVEHAMVIAAWHMLTNGEFYREPGPDYFTRRVPAKAQARAIAQLESLGYKVTLEPLADTA

SEQ ID NO: 478968 - protein, 410 aa, unidentified
MTDASIAQTEPVLVAIDIAKSRHEVLLSITGRKRRRRLTVLNQLDDFNRLIALLRDYGRPVRVAFEATGNYHRALAYRLGSAGFEVKLVSSVSLARTREALNRSWDKNDPKDAQVILHMMQIGNEQFYHDPVLCGTNDLQELSKTHDIVSRSKTELWHRVLTHYLPLYFPEAERFHRSSRSDWFFAFLERYPSPHFISAMSQEAFIADAWEVVGRKVSKERLLADIYETAKTSVGLRIAPDSDAAKMFRMVLAEGRSLIAQRNQIEGRAEALLKENADYTLLTSIPGIGAINALTILAEAGDLRRFQHHRQFLKFCGMDLATIQSGTFRGQTKLSKYGNARLRRTLWMAGQVAINQRTNSFRDKFERYIAKDRQNTHLRRKAYTAIAAKMARTVHGIIKRGEPYRPFFEG

SEQ ID NO: 478969 - protein, 420 aa, unidentified
MEVTMDAIVERCAGLDVHLDTVVACVLYGKLDIKPKKEVKTFSTTTKGLLELLDFINQKECTHVAMESTGIYWKPVWNILESGAFDLIVANAKKIKNVPGRKTDVKDAEWIASLLRCGLIEKSFVPPERIRDLRDLTRLRKELLGEVNRNKNRIHKVLQDANIKISSVLSDVFGETGKSILNQIIDNQCITEEFIYSLYEGRGKSKLKSTPMEMYEALNGKIRGHHVILLGMHNSNIVFLEKQINELEKEIDILLQKERDSLELLETIPGISKISASSIIAEIGTSMDVFKTEKHISSWAGLCPKNNESAGKKKRSGIKSGNNWLRSMLCECAWSATKKKDSRFKNKYWSMVPRMGRKKALIAIANMMLRLIYHLLKTKSTYKELEIQYFIDKDKRREDRIIKELKSKGYLVEKDSLQMA

SEQ ID NO: 478970 - protein, 309 aa, unidentified
MNEELVYLGVDIAKAYLDAAIANEKRRFSNDAVGHRRLIQWLKQIKGPVQVICEPSGGYERALVRALVAAQIKVSLVPANRVRQFARAGGILAKTDRIDAKLLCAFGEAMKPGIISASQLEQEQLRELESQRRHLTHLLVMEQNRAARVSEVCVRKMNRRLITQIKKQIEQLDLLIKEHIEASPELSAKAQKLTAINGVGARTAALLLAQMPELGQLNRREVAALVGVAPFNRDSGKMRGKRAIYGGRRPVRHGLYMAALVAARHNPTLRSFYLRLRAAGKPAKVALTATMRKLVIVLNSALKPELNYA

SEQ ID NO: 478971 - protein, 354 aa, unidentified
MKMVAQTEERSYGAKRIFVGIDVHKESWHVTVRSSGEEIFNGRIPGQYQSLKRILERYHDARIKVAYEAGPFGFWLLDRLVQDGIETIVVPPSLIPIESGNKVKTDKRDSRKLATLLESNMLKHVYVLTSEEREHRDLLRTRRQIVEHRNNVARQIKSKLMFYGIRSPFTSATRWSLQYVAWLKTITFETSYLKEAFELLIQMYEYLTRQIARINRTVVLLCRDKRYRGRIKLLCTAPGIGRLTAIELLVELQDMTRFKSAEELASYIGLTPSEYSTGERTRQGRITRCGNKRVRTYLVESTWVLITKDPYLRAKYLRLKSLRGGKRAVIAIARKFLIRLRRMLLDNVPYRMAA

SEQ ID NO: 478972 - protein, 371 aa, unidentified
MEKSIMYVGLDVHKNSIEIAFAEAGRDGEVRRYGSVDGSLAALDKVIRKLVSKNYDLHFVYEAGPCGYDIYRHLAAQGFDCVIVAPSKIPKQSGNRIKNDRRDAQMLARLHRAGELTSVYIPSVEDEAMRDLTRSREDVKASERKAKQRILAFLLRHGHRYSGKSSWSRAHFRWISDIKMPHPAQQIVLQESLEALAECTCRVERLTEQIQLLSPQWRMFPVAQALQALRGVSLIVATTTVAEIGDLTRFDGPTELMSYLGLVPSEYSSGQTTKRGSITKTGNGHVRRVLVEAAWAYRLPARVSRKLLIRQEGLSQEICAISWKAQLRLCARYTRFLIKGKSKQLIVTAIARELCAFMWAIANEVQNPSKA

SEQ ID NO: 478973 - protein, 360 aa, unidentified
MQRNNTKLDFTGQDIYVGLDVGKKSWKVCILTKELEHKTFSQPPRPEALVGYLHKHFPRAKYLCVYEAGYFGFWIHDALRQQGVDCVVTHPADVPTKDKERRNRNDQVDARKLARNLRNQELTPLYVPVRSALEDRSLVRTRTQMVKKRTRCKNQIKAFLSFYGYSIPDELMTSHWSRHFINWLESLEFQQESGKQSLQTLLGELKYLRQSIVHVTKQIRALAKQEPYATQVKLLTSIPGISTLSAMILLTEIVDINRFKGLDELASYVGLTPGEDSSGEQERTTGISRRRNAYLRGVLIECSWVAVRKDPALLMAFGKLSKRMPKNRAIVRIVRIARKLLNRIRYVLKHQESYEPCVVM

SEQ ID NO: 478974 - protein, 355 aa, unidentified
MPVYIGVDFHTRTQTVCWCDTDTGECGEQELENEDREGVRRFYQQFQQAVVGVEALGYAGWFHRLIEELGQALLVGDAQEIRRRARRRHKNDHRDAMLILDLLLHEDFPEIYHLSPASQQVLGLLRYRHRLVKMQTMLKNGVQAVALNEGLRLKSKLWTEAGRQRLAALELEGAGAWQRETSLAMLGEVGKQIERTEGELQKRAQGDECVLRLQTHPGVGLLTSLAVVHLLGPTKRFARTRQVAAYCGFDPREQSSGDHQRFGHISKQGSRLVRFLLGQAALSALEGDDELRSFYYRLLQHRHKHPGVAITATARKLLIRLFVMLRDQIDYAEFRRRGRDAWCARRAHRPALCSA

SEQ ID NO: 478975 - protein, 343 aa, unidentified
MLTKNVIAIDLAKNVLQACHINVHGELLSNKPLSRQKMKEFLVKAKPSIVAMEGCCGSHYWGRLAESFGHEVRIINPKKVKGYLEGHKTDHNDALAIANAALQIGIKYSQPKSLEQQSMQSLESSRRFLSRSVVSLGQHIRGTILSYGIANPKGEKGLKASVQTVLDGDTSIPENVVSVLSILWEQYKELKAKVIAFEKEKNALTRQIEPCQRLMDIEGVGETTAAMLYTTLGDGKQFKNGRQASAFVGLTPKQHSSGGKVFMIGIDKCGGVKELRSLLYLGAMSYVGRLPEKPKTQKDAWLKSIIERIGFKKACIALANKVVRTAWAMLRYETEYKPVLLND

SEQ ID NO: 478976 - protein, 404 aa, unidentified
MSVVGWDWASQAHDVTVLDDAGAVLDRWAFPHTEAGWVMALARLRRRGEPGDLPVIIEKTSGLIVDRLLAAGHPVVPVHPNSFHAARPRWGASGAKSDPGDSYKLADYLRTDGHRLRRLEPADPGLRELQALVRLREDQVRARTAATNQLWAMLGNHWPGPRDLFCSLASGIALAFLTAYPTPQSAARLGEARMAAFLRRNSYRGGKSPALLLARLRAAPQAPVALPAATLAAMVGAHVQQLRSLQATITGIEHLIAERVAAYPRTRLLARLPGAGTINLAQLLAEVGPILDRATSAEQAASETGTAPVTRASGKTTGVYFRWAASTRARKAITAFAHNARMQSPWAAKLYADARARGKRNPHATRIVARAWIRVIWACWHTGTPYDPATHHATRQPSPAEDLT

SEQ ID NO: 478977 - protein, 315 aa, unidentified
MQSISMIHGVDVAKDELFIQCADQTALVRLGNNAGEIRCWLRQLPKGSVVAMESTGKYHQLLARLAHAAGMQVYVLNARRLYFYARGLEVRAKTDRVDAGVIARYVAEHRHKLHPWQPASEQHRRLDELIRRRAVAVVKRESIRQSLGDCKDLKAEFRKLDRALQAFVHSVDRKIDELLRADDQLRSARALIDSVIGFGPVGSAALAVLLERLPFASSDALVAYSGCDPRPDDSGRKRGKRKLTKAGPGYLRKQWFMVGFSAARAKALKPMYQALLARGLATTEATIILGRKLLRAAYGVWKTKSPFDLQLFLHH

SEQ ID NO: 478978 - protein, 358 aa, unidentified
MEKLYLGVDLHKRSCWVTVLDADGQLLESRRMGTEKQELLEFFGKVRKPAALAVEATLNWYYFLNVIEPLGLELHLVHPWKTRAIASARIKHDRLDSRVLAELLRTGFVAEAWIAPRPVREQRQLLRYRVRTVQWATRAKNSIHGVLNRNGIRSALHSPFGPKGRQFLEEVELPKTDRWEVDGQLERLDLLGEQLAALDQEIRKRAKASPVAQALEEIPGIGPFIASLVIAEVGDVWRFPTAKHLVSYTGLAPSLYASGEHRWGGPITKQGSSVLRWALVQAAHRAALNPRFYGFYQRQRERHGTSRAAVALARKLVVIAFYRWRHALHQAGRLPHVERVRECTSGGAWSEHRPSLCD

SEQ ID NO: 478979 - protein, 343 aa, unidentified
MEAYAGKQFVGIDLHRRRTVIVRTTEAGEVLESVRIVNDVQRLASVMARAGGCPEVVLEATYGWYWAVDALQAGGANVHLAHPLGVKAFEYRRVKNDFRDAQDLADLLRMGRLPEAWIAPPPTRELRELVRHRAKLVGLRSHCKAEVHAVLAKCGVQVLMSDLFGLAGTELLDRLDLPAPYAARIASLRRLLDDVDFEITVFAGIIRGRMAQEPGYTAVQKIPGIGPTLGAVLVAEIGDITRFASASKLTCWAGLTPKHHESDTHVRRGRITKQGSRLVRWAAIESVKTISKASEVGVLRERVADRRGRNIGSVAAARRQLELVFYALRDGHVRALEHLPRVA

SEQ ID NO: 478980 - protein, 406 aa, unidentified
MKRRQEDWFGPHELYLGVDVGKSFHWAVGLDQEGEIRISRRVENRLDDVDALLEEAGDAALVVVDQKNNIGSLVVRRCRAKGIDVGYLPGKSMKSAREMLPGTAKNDRIDAEVIAQAGMSLRCAVLPIADTDDLGASMSLLSSQLAYATRRATMARNRLHAVLLESDPAFEAAADLSAAWTLDVLAAFGGAAGIAAAGRRSYGAACARGGATKEARDAFWNAACASAGSCSHPASEDLVVRELADEIATADAERAELSAGLEGMLSEDETYQCLLTIPGIGPKTAAALVASIDISLFKGDSKLAAYCGLAPKDRDSGTSLSSVTSTRAGNKALKNLLIFSCNSLVGTKNRFGRYYDRCVARGMRHNKALKAVARKRLRVIYAVMRDRVPYIEPSADGDVEKSSPAA

SEQ ID NO: 478981 - protein, 416 aa, unidentified
MDMEREVVCGADIHKQFLLATVLSNDGQKFQDRFDANFEGLLNFRQWLLDLGCQKLAVESTASYWLPIYLVVGKDVEFILANAYQIKHIPGRKTDVLDSEWIAELCLKDLIAPSRIFSEDERDLRAMTRTRESYVKMRTQTKNRIHQELESACIKLSSVLSDIFGKSGIHIIRGILKGSGIEDILDSIPSKRLMAKRKEIQDAIRMNMSPPQVDLISLLLDSVDIFNSEIASIDKQIQDLISKRQDDLKIAMSIPGMGFTSASAILAEIGNFRDFRTGDKLAAYCGLVPSVYQSAGKLITGHITKHGSPHVRRMLIEVAHAISRTKADSKLKRFYFRIKSRHGAKVAIVALARKVICILHHLIVNHEMFEDEATNKSKRNKPGRSFSSPEPTIADAIQILVRAGYAVQKRSEREGG

SEQ ID NO: 478982 - protein, 405 aa, unidentified
MSDGRFAGVDWASEEHAVCVVDERGRIVEGRRFRHDERGIRALCSRLVRLGVALVALERPDGVLIERLLDAGLAVIAVHPNQVKAMRPRYSVAAGKSDGFDSFVLAELARTDSHRFRVLVPDSDRTKALRSMTRAREDLVRTRVALANQLRDELACFWPGASKVFCAVDSPIALAFLRRYPSPADARGLGEQRLAGFLKRQGYPGRKPARELIGRLRNGAEGRAGELEMLARRQIVLGLVNALEPIVAAISELTAQIRQAVEDHPDGRTFRSLFIAPDSVLCAATMIAEIGDCRERYPSYRALAADAGQAPVAVESGKAKRAQFRWACDHRLREAFCVLADSSRRHNPWAADIYDRARARGASHQHAARILGRAWCQVIWRLWHDHDTYDPTRHTARQRLTAAAA

SEQ ID NO: 478983 - protein, 397 aa, unidentified
MIAVGIDVSKSKSTVAILNGDGSIRAKPFDVHHVADELQALVDYIKRTSEPPTILMEPTSHYHYPLLKAFTEAELPVCLINPYQMKKYGDTELRKAKTDKRDSLRIAQYALEKSYSLIPYTPQDQKYEDLRFLSRQYSQRISTLTVAKVQLLSLLDETMPGITTILPLKSRDPDNCVLLRFIKRFKSFDVIRKMGKTRFLDSYQVLVKKTKDRFAGSKGLAIYELVLNSVTTRGENPLSAMTQDQCVDLVSTTQKSTNEINLQMRIIAETMPEYKVLRSMAGVGNRLGPIILGEIGDIRRFHSGKALNAYAGNDAPPYQSGQFESRNRHISKRGNPALRKACFEVMQALKLTKPQDDPVYLFLLKKEQEGKPYNVAKMAAVNKFLRIYYARAMELYK

SEQ ID NO: 478984 - protein, 357 aa, unidentified
MKKSIKANGLVITAVGLDLADMWSDWAGLDQHGTVVHRDRVKTTESELRRVFGAVPPTTIAMEVGTHSAWVSHVLSSLGHTVIVANARRVALIHRNKRKNNRIDAEFLGRLVRVDKNLLFPIRHRDENGRADLAVLRSRDVLVGCRTKLINHVRGVCKTFGAKLPKCSAEAFAIRCRSSLPALLHPALNDIVVQIAEMTTKIRAYDAKITAMVKRHPAAMIVKQIHGVGELTALGYVLTIEDPHRILRSRSAGAYFGLVPGSDDSGEKHEQRRITKEGDCFCRRLLVNAAQYILGPFGIDSDLRRHGLAIASRGGKNAKKRAVIAVARKLAVVMHRLWIHNEQYNPLFNASQTAVAA

SEQ ID NO: 478985 - protein, 407 aa, unidentified
MEVVYRCCCGIDVHKKIIAACLVNGGEQELREFGTTTSEVKSLANWLAESGCEMIAMESTGVFWKPLYNLFELMDLNAIIVNAAHMKALPGRKTDVKDAEWIADLLRYGLLKASYIPNREQRELREITRYRKSLTEERSREVNRLQKILEGANIKLDSVVKDITGKSARKLLQRIIDDDIPDSEEVSKLIHGRMRPKLDQIVASIEGITTPLQRKLLAQIIDHIDDLNRRIGELDKLVQEYMSEYETAIEAIDEIPGIARRSAEVILAEIGTDMSRFPSAAHLCSWAGVCPGNYQSAGRRKHGKTTKGNKTLKTILTQCAKSAKTVKSSYFSAQYQRIAARRGKNRATLAVAHSMLIAIYYILKNKTAFHDLGSDYYDTFNRDRKINSYLKRLKSLGWEPDAIPSSA

SEQ ID NO: 478986 - protein, 402 aa, unidentified
MNAVGIDVSKGKSMVAIMRPFGEIVSAPFEIKHTASDIHSLVELINSVEGESRIVMEHTGRYYEVLAHQLSKANLFVSAINPKLIKDFDNDSLRKVKSDKADAVKIARYALDKWQNLKQYNVMDELRNQLKTMNRQFGFYIKHKTAMKNNLIGILDQTYPGVNTYFDSPARSDGSQKWVDFASTYWHVDCVRKMSLNAFIDHYQNWCKRKKYNFSQSKAEEIYGKAKELVPVLPKDAITKLIIKQAVDQLNSASTTVESLRTLMNETASKLPEYPVVMAMKGVGTSLGPQLMAEIGDVSRFTHKSAITAFAGVDPGVNESGSYEQKSVPTSKRGSSDLRKTLFQVMDVLIKTHPQDDPVYQFLDKKRAQGKPYYVYMTAGANKFLRIYYGRVKEYLSSLPES

SEQ ID NO: 478987 - protein, 350 aa, unidentified
MDTTISPLASIGIDIGKEVFHIVGFSTDGRIAFRRKIKRLALVETFKKLPPSIVGMEACLSAHFVSRALRQLGHEPRIIPAIYVKPFVKGQKNDYNDAEAIAEASLRPNLRTVREKTQDQLDLQACHRVRSRLVSRRTATINQIRAFLIEQGIAVRTGSRALPNSLMAILRNRQDEISPRMSGLIAGLYEDWISLDERIDTIASEIEKISEKEANCQRLMSVPGIGPLISTAVVAAIGTGEAFERGRDFGAWLGLVPRQYSTGGRSILGRISKRGSKYLRTLFIQAANVILMRPHNWERFSFGAWLLNAAPRLHRNKLATALANKLARIAWSILRKEKAFDTPRHEVAAI

SEQ ID NO: 478988 - protein, 368 aa, unidentified
MAHDNTVFVGLDVHKDSIVAACSVGFGEITTLGNIGTLQRDVQRLCQRMQSKAPEVRFVSAAGPCGYVLQRQLQRAGFTCHVCAPSLIPRKPGDRVKTDRRDAEKLVRSLRAGDLSFVHVPDERDEAFRDLVRAWNGARLDLRQAKQRLKSFLLVHGVHYSGNADWKEPHRRWLARFSFAEPWSQMAFEEHRRSIEDRLAQCQRLELLLRQEAPQWRLFPVVQALQALRGVQFIVAVGVTAEIGDLTRFDNPRKLMDWIGLVPSESSTGQRIRKGGITKAGNGLVRKLLVEAAWSYRYTAKVSPIIQRRHEGLPAEIIERAWQAQLRLCRRFRRLQAKGKHRNTVVTAIARELVGFVWDIARRTQLAA

SEQ ID NO: 478989 - protein, 298 aa, unidentified
MHARESTLAVFDQATGEVLTRRVVGRPHELLPTLRQIPRPARMVYEAGPTGYGLARRARAEGIEVAVCAPGKTDRPPSDRVKTDKRDAIRLARLLAAGELVLVTVPSVEREQLRDLVRCREDIRADLMRARHRIGKFLLRREIYYDGPAVAWTLKYRSWLTSIRFADQASRATLADYLHAHDVLIARRDQVEAELAKLALSAPCADTVARLRCLHGIDTLTALGLCTEIGEWERFGHPDQLSAYLGIVPSEHTTGAQRRLGSITKAGTRPRLPSATGGLIRAMSCVPTRTAISSSADA

SEQ ID NO: 478990 - protein, 346 aa, unidentified
MDEVKRFVGIDVTKTALDVFIGSAGAAFSVANDEVGIRELLRQLAPADFVILEATGGLEMPVASALAAAGIAVAIVNPRQVRDFARATGRLAKTDRLDAELLARFGDAVRPAARPLANEQAQALEALVTRRRQLVEMLTAEKNRRASAPKVLHRSIDEHIRWLERRLSGFDDQLADLIRDTPLWRERDELLRSVPGVGKVLSSTLLAHLPELGALNRKQIAALAGLAPFNRDSGSLHGSRCIWGGRAQVRRVLYMAVVAAVRSNPVIKNFYTQLRARGKYPKSALTACMRKLLVILNAMLHNKTHWQTPALTSSTSSLSPFLGAVSEHGCCYKWIATLVTLRTTLA

SEQ ID NO: 478991 - protein, 391 aa, unidentified
MIFVGIDVAKDKHDCFILNSEGTVLADVFTIANNRIGFETLLSRIQSCSQGESKIKVGLEATGHYSYNLLGFLLDSGLATYVINPLHTNLYRKSLSLRRTKTDRIDARTIAMMLMSDVDLKSYSNTAYHNEELKSLTRYRFDKVKERAKLKSSVARLVNILFPELEKLVSSLHIAVVYALLSNYPGASYIANANTEELAETLCTASKGRYTKSKTAKIQVAAGVSIGSKMPAKSMELKHTIALIRELDKEISEVESAIDKITSQMDSPIFTIPGIGRHMGAMILAEVGDFSNFASADKLLAYAGLSPSTYQSGQLQNCYAHMEKRGSRYLRYALFNAAKYVCHWCPTFSAYLEKKRSEGKHYNVAISHAAKKLVRLIFAMQRSGKAFLADY

SEQ ID NO: 478992 - protein, 353 aa, unidentified
MKQDKYIGMDVHQATTVVAVLDANGKTIWERIIATQAGEMIQLLGSLSGPLHVTFEETTQADWLYEVVRRHVAEVIVCDPRRNKLLSEGSKADRIDARKLAELLRVGMLRSVYHNPEGARRLKQLAAGYQTLCGDVQRTMARIKAIYRGRGIPTPGRGVYQRKQRQQWLELLSDEGVWQRAAWLYEQLDHLQPLRRQARQAMLDESRKHRAVSLLRTIPQLGPIRSALLVAILDTPYRFRTRQQLWSYSGLAVVTHMSSEYEIKKGQVVRSRKPIATRGLNRNCNRIVKDIFIGAATGGGRREPYCGYLQGLEARGVRKEMARLTLARKIASIALTIWKKGEAFDPKKLNVTT

SEQ ID NO: 478993 - protein, 386 aa, unidentified
MGTQTFIPRDYDVFAGLDVDKKSISVTFTDHQGFLKSLTMPYSVEYLVNHVRKHYGDKKVAFGYEAGPTGYGLYDGLEAQAYTCVIASPSMIPKAPGQRVKTNRLDSRGISENLRGGQLKGIHVPTSLYRELRHLTQLRDTLVSEMVGMKQRIKSLLLLEGLEFPPAPAGSQWSFLVKKKLRKLPCSSTVRFKLDRLLDSLEFDEKQVLKTTQEIRRFCQTDPELSQCINYLKSLPGIGWIVSSQMMARVGDWRQIKNIRQLPAFLGLVPTERSTGERIERGSITHTGDGRLRSKLIQASWSAIRQDGELREFFRTVAKKHPRHCAARVAIVAVAHKLCVRASVVLMQQRPYEVRQKVKSAPLTQEETVPQGTTRRRAEAGESRTP

SEQ ID NO: 478994 - protein, 407 aa, unidentified
MSGQDDWPAFAGIDWGGEHHQLCIVDPTGKRRTQLRVTHDVAGLADLDGELNRCGQRLPIAIERSEGLLVEHLQAAGHVLFPVSPRIAARARERYKVAAVKDDRFDAFVLADTLRHEHRHWRPLSIPSPLLAEIRALTRDRDRLLETQQAVEHQLRMILEAYHPAPVRLFSSVDRQITLSFVLDYPTPAIASRVKTTRMGGFLTRHHYTGRVSAQVLAQRMRANLLSGSPGTVAGKSFSAQSYTKLLQLLNSQLAEYDDAIAAALAEHSDTPIFASFPGVGPVTTAVLLSEIGEDRCRYPRPEVLLAEAGLAPVTRSSGRSRSVRFRYAANTRLRESAMWWAYNSMKDSPWAAAGFRHARDQRGQRYHRALRGLAARWMRILWRCWNDSVPYDPTKHTSAAQLTTAS

SEQ ID NO: 478995 - protein, 374 aa, unidentified
MYVCIMSQDGEMLVHRNRQAAPEPFLKAIAPYRDGLVVAVACIFTWYWLADLCAQEGIPCVLGHALSRKAMHGGKAQNDKIDSHKIATLLRGGRLPKAYVYPAEMRATRDWLRRRTHLMRKRAELLAHVQNTKAPYNLPEIGKQIAYKANRAGVAERFDDPAVQKTIEVDRALLTYDDQMRSNLELFMLKTAKHHDAQTLYLLQTGPGIGKILRLVLLYEMHQIDRFPRVQDFASYCRLVKCAKASGGKRLGTSGNKMGNAHLTWAFSEAATLFLRGNEPGQKYLARLEKKHDKGKALSILAHKLARAVYGMLKRKTAFDLEQFLRTSGSRAGEPGASLDTEGMRLHRTDVKPLMAASLHAAVRLGPISLSPAL

SEQ ID NO: 478996 - protein, 336 aa, unidentified
METAYDGRQVVGMDLHRRRSVLVRMTEDGRRLGTARITNSPAELRREIAKAGKSPRVVLEATCGWYWAADTLAAAGAEVHLAHPLGVKAFTYRRVKNDERDAADLADLLRMGRLPEAWIAPPATRELRGWVRHRAKLVGLRTCLKNQIHAVLAGAGVQVPMSDLFGPGGRQLLAATALTVESRSRVDSLLRVITALDFEIDLYAKLVGGRLRADPGYQAIQQIPGVGPLLGAVFVAEIGDITRFQRPEQLASWAGLTPKHHESDTTVHRGRITKMGCGGRVGGLRLRGSSRARGGRRGDRGWYRHSQGAVDVRLRRSGFRGGGARPDRPGGSGTPA

SEQ ID NO: 478997 - protein, 343 aa, unidentified
MRHYAGLDVSIKETSVCIIDESGKVCRETKVPSHPEDLARALHDRAWCLERVGLEAGPLSQWLFSGLAATGLPVVCIETRHTKAFLQAQVNKSDRNDARGIAQMMRVNLFRPVHVKTLTSQKRRALLTARKLLQEKALAVDNDIRGLLRNFGLKVGPIGASRFETRTRELVDGMPELAEIIDPLLEARRKLRELFAVLHRKLLVIVRDDTVCRRLMTVPGVGPVVSMAFTATIDVPARFKSSKAVGAALGLTPILNQSGESKRLGRVSLCGDEMTRTLLYEAAQVMLTRTTKWSWLKAWAMKVAARRGIKKAIVALARRLAVILHRIWVSGTDFRWTREVQSP

SEQ ID NO: 478998 - protein, 347 aa, unidentified
MKRIAIDLAKSVYQVAESIHVGRVDRRRRLDPEAFWRYVQEQPAPVEWLMEACGTAHHWGRLMQAAGHRVVLLHPRYVRAYRRRNKTDRNDCDAILEAARCEGIRPVPVKSVQQQQVQQLHKMREAWKKTRVQRINLLRGILREMGVAAPNGTQAFLRQACELIERPEVCALRGALQVLLAEISLYEQSMRECEEQLARWHAEDEIVHRLDEVSGIGLLTASALKTAVGTPERFVSGRHLSAWLGMTPNEYSSGERRRLGRISCKGNVYVRTLLIHGARAALLAAKRCQARTPQRLTQLQRWALQTAERIGHNKAAVALANKLVRICWAVWCHERRFSGDWQSARPA

SEQ ID NO: 478999 - protein, 468 aa, unidentified
MSEVRLGIDVACRADHRASLADERGEFIWSSWKFRTTTTDLERLWAKIPDGASVTVILEPTRNAWVPLSAWLQSRGATVILVPPEQSADLRDYYNKHTKTDRLDSKVLARLPLLHPEGLRGIDNLGPAESLRRAVRHRFSLVKRRSAASLRLDALVELLGPGWADSLGSATASKTALVILEKYADPRALKRLGRARLAALLIRSSSGLWRQDKADELLAMANETLALWSGGGIDFTELAHDIASEVRVLRRLDDEIAAADKRIAVLYGEADPKGIVASTPGLGPVLSAAILGNAGDFNRFANLAGVRSFTGFVPKIDQSGLVAAHKGITKAGDAGLRQALYLAADHARHVDPTLAQRYHRLVMVEGKHHNSALCSVSAVLITRIAACWRKGELYQLRDEDGEAITEAEGKAACADRFKIDPKVRAARRRNTPAKVFKNRVAGRGRKESTQEVAPATDPPREEASENVA

SEQ ID NO: 479000 - protein, 340 aa, unidentified
MKTIKFNNIIGIDISKNTFDVALLINNKLNESNSFSNDDNGFKMLLLWLKSKNLNLNKSLFCMEKTGIYSIKISNFLLKNNYKVWLEDPIKIAKSEGFKRGKSDKIDAIRIAKYAFRFQDKIKLFEANDQVYEKLNHLFSLRERLILILGILNKPLFESKGIFDKSFHKVLETICSLPIMYIKMSIKTVDEKMDDLIKEKTEIKEKYKIATSVKGIGKQTAIYLLIITRGFTKIKTARKCSCFGGIAPFEFSSGTSIKGRTKLSNLGNKKLKKLVHMGAISILNSKNGEEYEYYCRKVEEGKHKMKVINALRNKILTRVFACIRDNRMYQEEYDKYKQAG

SEQ ID NO: 479001 - protein, 341 aa, unidentified
MKPEMSILGIDIAKRVFHAVGMDERGKIVLRKRLSRHDLMPFLAKLPAVRIGVEACGGAHYWARRFREHGHEVKLMAPQFVKPYVKSNKNDSRDAEAIAEAVTRPTMRFVPIKDVDQQDIQALHRVRERLIGERTALINEVHGLMHEYGIVMPKGVSKFRQAVVEKLESEKDKLTALSQEMFWKLVEEFAALEKQLAYYQEKLDTLATTHPECQRLMTIPGIGPLTATALVAAVSDASAFKNGRQFAAWLGLVPRQHSTGGKERLLGISKRGDSYLRKLLVHGARTTIRWVGRKTDRRSQWIRQLVERRGKNRAAVAVANKNARIVWALLTSHQDYQLTTG

SEQ ID NO: 479002 - protein, 389 aa, unidentified
MLSSCVVNHSPIYKAGVGEASAASRANTSRRREFDDAQVFKAVSEREPRRLDGNSPNSRLSRRQIASSHLQVRDKTMSESIYVGIDVSKDSFHLATSPNILKTSLPNTSEGHRQLCKILKDQAVALIVLEATGGYERPIAAELLSESFPVVVVNPKQVRDFAKGMGQLAKTDPIDAAILAQFAQIVKPVSKTHSTPQTAELTELVRRRRQLNDLRTQESNRLGTICNREVKKSIHKMIQTLDSQIAKIDKLIRKHIDADDNFKSKDQIIQSAPGVGPQTSAMLIANLPELGSLNRQQIAALAGLAPWDCSSGKYNGKAYIWGGRKDVRNVLYMAAFNACRYNPVIRQLYYRLSKKGKPYKVVLTACMRKLLVVLNTMIRNQVLWTPKIS

SEQ ID NO: 479003 - protein, 338 aa, unidentified
MPLYGGIDLHANNSVVVLLNEQDQVIYQRRLTNHLPEILEPLAPYQADITGVVVESTYHWYWLVDGLMEAGYRVHLANPAAMQPYSGLKYTNDHSDARWLAHLLRLGVLPEGYIYPKAERAVRDVLRKRAHLVRQHTANVLSVQNLMVRNTGARFGAKRIDEFTPAELAGILPEAEQVLAVTSSLAVMHCLGQQIKTLEKTVQKHLKHTPAYVQLQTVDGIGTILAQTIVLETGDIGRFPSVGHYASYCRCVGSTKISHGKRKGQGNVKNGNPYLEWAYMEAVQFAIRFSPTVQRFYPRKQAKGHLMIARKAVAHKLARACYDIMRDLVPFEVHKAFG

SEQ ID NO: 479004 - protein, 318 aa, unidentified
MNTNTLQNINVGVDTGKSQLDIYIRPLDIYFTVPNTDKGITDAINTIKKHKPQRVVIEATGRLEMPFILACDKAKLPYVVANPLRIKRFAEAIGQRAKNDRLDAALIAHYAERVQPELTKLKSENIRLMSDLVTRRNQLLTMQTMERNRLQILPKNISSTITPILTALKNQLEKVEAKIARLIERSPEYQAKSTILQSMPGVGKVLAASLISNVPELGFITNKQASSLVGVAPVTRESGRFKGKRMIKGGRPQVRTVMYMAMMSAIQCNPVFKATYERLLAVGKPKKVAIVACMRKMVVILNSMVRDGVMWDNNSAKN

SEQ ID NO: 479005 - protein, 386 aa, unidentified
MGEDGKLHQEVRHWATMTRDLMAMAEGLATAGVTHVAMESTGVYWKPIFNILEEGFEILLVNARHLKNVPGRKTDIKDCQWIAQLLQHGLLKGSFIPPRGQRERRDLTRQRAQMMEERSRICNRLQKVLEDANLKLASVASDVVGVSGRLMLQAMVAGEDDPEKLADLAKCQLRGKIPQLEQALYGKLTEHHRWMLRLLWDQLTSTEALVARLDERIAQCTRPQQPVLERLDEIPGIDVRVAQVLLAEIGTDMKPFPSDAHLASWAGMCPGNNESAGKKRSGKTTKGSRWLRQALVQAAWAASHKKDSYFQVHARNLMHRRGRKRGLVAVAHSLLIVVYHMLKEETHYRDLGPQFLDRLRAKHLVRFHVRRLQQLGLQVALTPVAA

SEQ ID NO: 479006 - protein, 342 aa, unidentified
MEHYAGIDVSLECSSVCVVEANGKILREARVASEPEVLIAWFRLSGFDLERIGLEAGPLSQWLFAAMREAGLAVELLETRHVRKAFEAMPVKSDRNDARGIAQLMRLGWFRPVHCKSMSAQETRTLLTARKLVQSKLRDVENSLRGILRGFGLKVGKTTELRFAGRIEELVVGHPHLQAIAKALLAVRAVLRKEFAAFEKQARKMARSDARARLLMSTPAVGPIVSLTYVSAIDDPGRFKSSKQAGAHFGLTPKKHQSGETDYTGRISKIGDSSVRTALYEAAHVMLTKPLKGCSQLKSWAMRIARRAGMSKAKVALARRLAVIMHRMLADGTPFNTAASAA

SEQ ID NO: 479007 - protein, 355 aa, unidentified
MESIKYIGLDVHQSTISVAVLNAEGKLMMQSVIATKASAVLDLLQGLRGVLHLTFEEGTYSAWLYDVVVRQVARVVVCNPRKNALLKSGNKSDQIDARKLAELLRAGMLSPVYHGEQSTRTLQQLVAGYTALTEDTGRAMRRIKALYRSQAIACAGKKSLGKRHREEWLARLTDSGQRRRAEWLYQELDAVQILRREARQAVMEECQKNPAAQLLRSMPFFGPLRAAVLIARVQTPHRFRTKRQFWTYCGLGLETRSSADYVEKDGQILRRRKPVYIRGLNWNYSHELKNVFKSAATTASAMDGPFRVFYEMRVANGMLPAMARLTLARKMAAIALILWKRGETFAAEHLNLQAA

SEQ ID NO: 479008 - protein, 420 aa, unidentified
MTRIQTKKTQAVNQKSLIVTVDIGKKTNMGYYRFSNNRGAKPFPFGNHAHGFGLFWDRIAQVQRQNQMEEIVVGFESTGAYGEPLMHFLKRKGVKLVQVNPMHTKRLKELTGNSPNKTDRKDPKVIADIMELGHALTVIVPEGSAAELRRLTQARERNVVRRTGLLNQLQDLVFLVFPEFLTIMKGVKSKTARYLLNRYSTPGDFVACGDLDLLCSRVKKISRGRIGRERIEPLYRAACSSVGIQEGRDSLVLEIRQILSWIELVDGFIARLEDAMIPHLRQISYSDSILSIKGVGPVTTAGLIGEVGDFGSFRTIPEMEKLAGLDLFEISSGLHKGRRKISKRGRPLLRKLLYFGAINVVRRGGILHGWYHRALDRGMPKTKALVAVARKLLRIVFAVVRDHREFTYDYMNQPKLRMTA

SEQ ID NO: 479009 - protein, 377 aa, unidentified
MATTRTVLRDQLTAKPGDLYMSLELGDKHWHISIGGERRSVSHYIVEAGHTEEVADCIAKAAARLHTARVHSCYEAGRDGWWLHRWLTELGVDNIVVDPASIEVNRRARRAKTDRLDADKLLAMLVRHHRGERVWSVLREPSPSDEDARRAHRELQRLTHERIAHTNRISSLLVLHNLRPRIVIGGRDWPVWWNAHREQVPPTLRAELEREAVRLKVVKEQVRAIEAARARELAEGKQPLVAQLVRLRAVGAKGAWVLVKEVFGWRHFANRRELAGSLGLVPTPYASGDSEIEQGISKAGNRRVRALLVELAWSWSRLQPGSALTQWFNRRFAGAGKRMRRVGIVALARRLAIALWRYLQTGEIPIGARLKPAGSGI

SEQ ID NO: 479010 - protein, 342 aa, unidentified
MNLPIRIGMDTSKSVFQLHGVDENEAVVVRRQFRRAEMIRYFERLPPVLVAIESCGSSHHWARLLQSFGHEVKLIPPQYVKAYVKRGKNDAADAEALCEAVTRPSMRFVPVKSKERQAACMLMTVRERLVNVKSQLSNAFRSYAAEFGIVGPAGRQNVTALIKRVLEDDNLPEMARDLFRLQAEEYAAVEARLAKIEAKLMKWHREDDVSRRIATIPGVGPIGSSMLSMKAPPPETFKSGRDFAAWLGLTPKDHSTGGRQRHGGITKAGDSILRSTLIVGATALLRHIRKGRHKPTPWLASLLERKPPKLVAVALANKFARIAWRLMISGGVYNRPVVATPI

SEQ ID NO: 479011 - protein, 339 aa, unidentified
MHVTTIGLDLAKNVFQVHGITNDGEVAFNRPLRRAQVLTFFEKLEPCLVGIEACGTSHHWARELIKLGHNVKLIPPVYVKPYVKRGKTDAADAEAICEAVTRPTMRFVEVKTPEQQAILAVHRTRNLIVRQRTQTINMLRAQLAEFGVILPKGVRFAIHFAKQVLNGEPPVLPEVAGDVVFELCEQLLFLHEKVARCFRKMNRIARLEKRVALLQTIPGVGPITASAIVATVGSGKQFNNGREFAAWLGLTPLNKSSGGKEKLGRISKMGDQYIRGLLFLGMTSRIRAIRTEPEKFDPWFADILARKPSRLAAVAMANKTARMIWAVLTRNEPYKMRTV

SEQ ID NO: 479012 - protein, 377 aa, unidentified
MLKYSVGLDVSSKKIDVCFSVIDTMQKVIIKSTIVIANNRNGFKMLEEWIKKHHKESTIPLVICMEATGVYYESCALYLFEKKHKVSVVLPNKAKKYLQAIGLKSKNDSIDAKGLAQMGAEQALKLWQPLGKYFYELRQYTRQYQNIQEQKTIIKNQLHSLENGMYNNKIVAKQLKNIIKLFEKQLNELDKKIENHINSNPEIQQKVMNICKIKGIATLSLATILAETNGFELFENTKQLVSYAGFDVIENQSGNRVGRTKISKKGNSRIRRILFMPAFTAVSCKQKPFFNLYNRTFEKHGIKMKSYVAVQKKLLVIIYSLWKNNQEYKPEIYNIQEKEQELSSLLAFEKGIKNSPNQVEAIQGKHPVKNHSLLPLC

SEQ ID NO: 479013 - protein, 340 aa, unidentified
MSEITTIGLDLAKHVFQVHGVDAQGTTVLRRQLRRGQVLAFFSRLPRCVIGLEACATAHYWARELGALGHEVRLMPAQYVKAYIKRNKHDAADAEAICEAVQRPTMRFVPVKTAEQQATALLHRGREQLVRQRTMLVNALRAHLAEFGIVAAQGLRNVGELIAIVRDDGDTRLPDLARQVLQVLANQIEQIETAVAGLEKQLLAWHKTNPVSQRLASIPGIGPIIATAIATTVADPKVFRSGREFAAWLGLVPRQNSTGGKTRLGGITKRGNRYLRRLLINGASANLLRSKATKADPWVIGLRRRRPPLVVAVALANKTARIAWAVMLREKEYQPRAVAA

SEQ ID NO: 479014 - protein, 389 aa, unidentified
MPSVSERSEAQTAIQTHLAASFVSLELSRSIWLITSLSPGSGEKMSKHSVRAGDVAALLARFSELKRKASERTGKSFPIVVIQEAGLDGFWLHRVLQSEGVESHVVDPSSIATSRRRRRAKTDRIDGEALLRALLAYKRGEPRVCAMVKAPTPEEEDRRRLCRERKVLIAERVKHVNRVKGLLFSQGVSGYEPLRRDRRQRLDELTTGDGRPLPVHLKTQIRRELDRLELLLDQIKQAEAERDALLAAPQPAAPSPAGRMLLEFKGIGAELATTLWLEALFRHFDNRRQLASYAGLAPTPWQSGSVDHEQGVSKAGNPRLRTALIQLAWLWLRHQPQSALALWFKERVNRNGGHFKKSTIVALARKLLVALWKYVTAGVVIEGAVMKVV

SEQ ID NO: 479015 - protein, 371 aa, unidentified
MEHTRFVGLDIHKERISIAVAESGRSGAVEYLGEIANEPGAISKLCGRLRRPGKPLAFCYEAGPCGYGVHRQLISLGHRCDVVAPSLIPTKAGDRVKTNRRDATMLARLHRAGELTPVWVPDADHEAMRDLIRLRSVVRQIATRARQHLQGFLLRHGRKHGRGTAWRMAYRRWLSTLAFDHPAQQIAFQDYVDAVTDAERRLKRIEEQIFGLLPEWTLRPVVDGLQAMRGIALINAVVLVAEVGDFTRFSNPRQLMAYFGMVPGERSSGETTRRGSITKTGNRHVRRALVEGAWAYRMKARIGPHKVDRIEALPKVIRDIGWRAQVRLCTRYRRLRARGKTANVVNVAIAREMVGFIWSIACTIQSALKTA

SEQ ID NO: 479016 - protein, 424 aa, unidentified
MNTNWNQHTHFAALDWASDHHDIAVVDRLGTLVAEFRFAHSAVGWAEFQEKMKPYPGCPLALETSSGPAVDQLLQRGWTLYPVNPKAAERYRERKAPSGDKADRHDAWSLADALRTDGHGWRQLIAQDEATATLRALCRDEIGLIEQRTLLVNQLIAALREYYPAALDIFDDWTKPYAWALISKFPTPSVLQNAGKRNWEKFLHSHRLWHPGTAPERLKVFAVANALPASAPVVAAKSLLAISLVKVLQALENQLEEYRKRINTTFHQHPDFDIFGSLPGAGEKIAPRLLAELGSTRELFPDADSLCCFSGASPVRYQSGQINRAHIRWACNTVLRHTVHLWADCSRKSSAWAQAYYARKREQGMSHAAALRCLGKRWLKVLWRLWQDRQPYKESIHEQSLKDHGSWVLALMASTDTAAPNPCE

SEQ ID NO: 479017 - protein, 313 aa, unidentified
MSPNSQNILYVGLDVAKLSLQLHLAGRFHVLANDAKGHAQLLKRLRGQPPAHVVCEATGGYEQAVVRVLQAAVVPVSIVEAGRVRYFARAQGRRAKTDPIDAAVLSEYGATFRPRPTPPASPQQQQLAELTQRRRQLLQLLASERNHAEHYADAFRRRQTRQLGKTLEKQIEQCDQAIATLITQDTELAHKARRLKAIPGVGPVVAATLLAEMPELGKLTPQTAAALAGVAPYNRDSGGQNGSRQINGGRGAVRGALYMATLSAVRYDRILKEFYLRLRAAGKKPLVAMTACMRKLIIRMNRLLKNDDFQLAN

SEQ ID NO: 479018 - protein, 327 aa, unidentified
MSQKTHAVITRTIGIDTGKNTLHLVGLDDRGTIVLREKLGRGRIRTRLANIPPCLIGIEAGMATHYVARELLALGHDVRQVPPAYAQPFRQGHKNDFRDAYAIAEAVQRPSTRFVPVKTDDQLDLQALHRVRSHLISERTAVINQIRSFLLERGIPVRQGLRFLRRQLPEILAKRVDVLSPRMIRIVEDLGGDWRRLDERIDCVTEEIEQLAHGTESCRQLMTVPGIGPIIASAMVAAIGNGASFAKGRDFAAWLGLVPKQMSTGDRTILGRISKRGNRYLRTLFMQGARVILLRPVNWAKHSFGPWLTAAAKRLHHNVLATALPTS

SEQ ID NO: 479019 - protein, 350 aa, unidentified
MIVLGADTHKRSHTVGAVAAATGELLGEQTVPVGLRGFGALLRWARSLDGERAWALEDCRHVSGSLERFLIERGERVLRIPTHLTANARRSARQRGKSDPIDALNVARAALREGLESFPAAHLDGPELDLRLLVDHRERLVRHRVELNSTLLWHLHDLWPELQLPGGALFSKKWSTRISRRLARAEQTMRVRIARDELRRLRELTQAVTGLEREITELVGQLAPQLLSEPGFGPRSPPSSSARSPAPSAFATPARLARAAGVAPIPASSGNTQRQRLDRGGNRQINAALHRVIVTRARCHPPTRDYIQRRRSEGKSTREAIRCLKRYLARRVWRLLQPTTPPRTSTRSIS

SEQ ID NO: 479020 - protein, 325 aa, unidentified
MSTQTITRTHAAGIGIDVSKEKLDLAIRLSDQKYVESNFGNNAKGINSLCTFLKRQEAACAAPLVIESTGDYHLQSAIIIKQKDYNVKVINPITTKRYQKSSIRNAKTDKIDAKRLADIAVMEENLPDFNGNIEPIRNRKLVSLLSHLEKTRQQMTMGLNRFKETAKVIDLKHSTTHLEKALAELNNQIEATKQVLAEAMPEEVKRQADQTNGLSREKLAVIHALVAGKHFKTSDQLVAFFGLDIAVRKSGKWSGQAKLSKRGNSYARKILYQIAWGLKTHNEIFKPCYAKYRKEKKHYNAILMILARKFLRYYFSNNFKGTAII

SEQ ID NO: 479021 - protein, 360 aa, unidentified
MFCERTSVGLDVHARSVSGAAIDSHSGELIKARLSPAYEDVLGWVAKLPGPCAVVYEAGPTGFGLARALSAAGIRCEVAASSKLHRPPGDRVKTDARDALLLARLLRLDEIVSVRVPSAGQEAARDLVRAREASRSDLMRARHRLSKLLLRQGIVYTDGKAWTQTHERWLGRQRFELGGTQAAFDDAYETVVLADARRDRLDEKITAMAGDCEFTPLARRLACLRGISTLTSFALAVEIGDWDRFTGSSIGAYLGLVPSEHSSGQSRSQGAITKTGNTHVRRLLVEAAWHHRTPYRPSPVLQRRWDLAPAAARARAHAGNQRLHQRWVTYNLRKKRPVIANVAIARELAGWCWSLAVITD

SEQ ID NO: 479022 - protein, 314 aa, unidentified
MKALKSHVAGIDVHKEMLAITVLIGELDGEPKEYQFESSTFTDDLMALGLKLKEMGVTDVAMESSGIYWKPVFNVFNPLGLKVVVANAAHIKNVPGRKTDMNDSRWIAELHRFGLIRASFIPDGEFQRMRLLSRHRTNLTEDLARVKNRIQKVLEDGNIKLSIVVSDIFGVSGLKVLKQIAGGYTHPNILITEVTTKIKRMEEMKKALTNCLTTEHCFVINVLMKQYEELKNRIEEVENELCKKVEPYAHLVEELDKIPGIDAILAMGIIAEASANMSSFKDEQAFAAWSGVASGNNESAGKKKRAKCRKGNLH

SEQ ID NO: 479023 - protein, 334 aa, unidentified
MQQIAWWDNQSGESGEQRLEHSTGAAEKFYRELKQRGVQVRVGIEASGHTRWYERLLAELEMELWIGNPAKIAAQRVRKQKTDRGDAQLLLQLLQEDRFPRVWVPSPENRDLRQLLWHRHRLVQMRTRVKNQLHAIALNEGLQRRSRLWSKQGRAQLESFALDRWTARRRHDLLHLFDQLTPQIAELSQAVEREAERRPEVRRLMTHPGVGPITALAFVLVLGTPHRFRCGKQVGSYLGLIPCEDSSAGKQRLGHLSKQGNTLLRYLLVEAAQAAVRCDPQWRRRFVHLAMRRQRNLAIAAMARKLAVSLYWLWRKAEDPPAASQSGSHVGQLD

SEQ ID NO: 479024 - protein, 336 aa, unidentified
MMLYSAIDLHSDNNFIVIIDSNDSILFQRRLPNDLGTVLSVLEPYKGGLQGVAVEATFNWYWLVDGLIEAGYTTRLVNTAKVKQYSGLKHTEDRYDAYWLAHLMRLGILPTGYIYPREQRAVRDLLRKRRQLVNHRTIHVLSIQNQYWRNTGIKLKGDYIKRSNDYLGEFEDSNIHLALVSNYEIMQALDEQIGRIETSVKQQIKLRPEYELLLGVDGIGFILAVTIMLETGEISRFEEVGNYASYCRCVESKHTSNTKKKGEGNAKNGNRYLAWAYIEAANFAKRFSAKARRFHQRKKAKTSNVVATKALAHKLARACYYIIRDQVPFDENKTFG

SEQ ID NO: 479025 - protein, 477 aa, unidentified
MVATGLHGLNRKQRKELARRMRAQDPGLDIVHPHAAGIDIGNSSHYVAVRPDQDPDSVRRFECFTGDLHRLADWLQQCGVTTVAMQSTGVYWIPLYEILDARGLEVYLVNARHTKNLPGRKTDVQESQWLLKLHTYGLLRNSFHPSADIRIVRTYWRQRGGHVQAVSTCIQRMQKVLTQMNVQLANVISDLSGWTGQRIVRAILAGERDPQTLAALSHPGIHATRDQIARSLEGTWQSDLLFVLQQEVTMYDAYLQRIAECDQALEHHLKTFADKAIPDAPSDAEPSSPVAPRQTRVKHRRKAGSHTPQFNLGHELHRISGVDLTRIDGIDVGVAQTVISEVGVDMTRWKTEAHFASWLGLCPDNRITGGKVIRKGTRHVINRAATALRLAATTLLRSQSYLGAQYRRLRARLGAPKAITAMAHKLARLVYRMLKWGHEYVDKGLQYYEERHRDQQVQLLKKRAAKLGLQIVEPDAA

SEQ ID NO: 479026 - protein, 320 aa, unidentified
MLSFCGIDVSKDRLDVMVLPDEYSSSVPNDPAGWAILVEQLRGFSITAIGIEASGGYERGAVRSLQAAGMPVRQVNPFKLRQFAKASGVLAKNDPLDARMIASFVGIMPTRPALRTTPAAEQLVEMLAVRRQLSAEKTAAENASRLLEDLMLQRLSRRRIARLAADIELLDKRLVESVATDATLAHRYRLLTSMPGVGPVLACTLIALLPELGGMSRKQVAALVGVAPYAFESGTLKGRRCIWGGRANVRQVLYMAAMSASNWNPVVKLFHDRLKGAGKLPKVVIVAVMRKMITTLNAMVRDDLAWADRLSGRHSVTTAR

SEQ ID NO: 479027 - protein, 405 aa, unidentified
MYYVGVDIAKEKHYVCILDDTKELACKPFWIYSDILGLRELLKRLAELSLDMNDFIIGIESTGAFSENFYSYITDADYKVILLNSYQTSKYRDFSTLKKIKNDSIDAYVIAELLASGKYKASYISNEDYHNLKVLNRLKKSLDDKIKTIKREISTVVATVNPEIEKVFPNIFTKTAIAIIKSYPTAMDISKATPEKLTKIFRHIKGNSFNLEKAKYLIELAKSSIYTGRANESRALMIKTNIKILELYIQERDEVEEQIQILIDNQLDDDSSNIENLKSIPGVSNKTVTAILGECGDLRRFESAKAFIGFLGLYPTLYQSGKSLSTGTLAKRGIPIAKHALYMAAVSSVRHNTELNKIFRDKLSAGKSKKEALIIIAKKLASIIYSLFKYDQPYNPNRVLIQHKR

SEQ ID NO: 479028 - protein, 323 aa, unidentified
MQGKVSFQEDAMPVVYAGVDVSKEWLDIHLHPLGESRRFSNDKTGIRQLKRLLARHRPKSIVMEATGKFHRPAHRSLWLDGFAVAVVDPLRARMFARACGYLAKTDRLDARFLALLAESLRPPADTPPSPHVEALQELVNARSAAKCDITALQNRSKTATTALLRGELNRLVRRLEQHVERLDKEIERCVGEDPQLCRKAEILTSIPGIGRVTALALMAGMDELGSCSGKQAAMLAGLAPIANDSGARTGRRSIRAGRPAPRRALYMAALSARRYNPALARFADTLKAAGKPAKVILVAVMRKLLVLANCLLSHDRLWTPNPP

SEQ ID NO: 479029 - protein, 357 aa, unidentified
MESTTVGIDLAKQLFSICVVDGKGRVVQRKDLNRASLAEWLVQLPAGTPVAMEACSSAHHWARVCRQHGLVPRLMAAQFVKPFRKSGAVKNDRNDAEAIATAARQGNMRFVSMKTEDQQARLSWHRAREGYKKDALAAMNRIRGLLAEFGIAINKSGVALRRTLAQLDAYTLPATLVELIRLQQRHWEAIEQGLAACDAHIKVQVEQDERCVRIRALTGVGPITADAVVATLGNAADFRNGRQCAAWMGLTPSQFGSGGKVVLGSISCRGDTYLRTLLIQGARSSLQRAKVTPAEKMTAEQIWIVQLAARLPFGKVIVAIANKHARQIWAMLARGEAYDPEAWLKHPMVQRGGTCTA

SEQ ID NO: 479030 - protein, 426 aa, unidentified
MADKLIVGIDVSKDWLDLCASNAAGVERIANTREAVAAWLERVAPGLIACEPTGGYQRTLIAAARERGIPFVRVHPNDVVAFRKSRGIKAKTDAIDARLILAFVCDKLARAELPTSLIGDERLRALAARRRQLVDALQAEGCRLGVAALPAVHASLEAVIAVLRHSLEALEAELADAIAAHPQTAELARLLQTIFGIGPVAAITLIADLPELGLLSAKQIAALVGLAPHTKRSGKTRYRETTGHGRPGVRRVLFNAARAAVRHPSLFKDFYDRLVTDNRRPGKVALTAVMRKILITANAVARDRQPWRGRPAAGTPCRPHAEQTAHRAGRVKAAAAPRAVARSASLCVGHVRQFWGCKSPVQPDGGEALAKRKGRTARDCLKEAWSKVATRRTETGYEAALVGRAGRMSQSPYPSRARTVNPAGVR

SEQ ID NO: 479031 - protein, 449 aa, unidentified
MMEPQEIEDEGHERILERVAAIDVAKASGMVCVRVPHESRPGRRVSRVWEVAATTGAVTGLGDHLACQGIEKVTVESTSDYWRIWFYLLEAAGLDVQLVNAREARNMPGRPKTDKLDSAWLAKCTERGMLRPSFVPPAPIRQLRDYTRLRADLARDRTRHWSRLEKLLEDALIKVSAVASTMNTKSVRDMIEALIAGERSPRALADLARGRMKARRAALIEALNGRFDAHHAELARMLLDQIDALSVQIDKLSRRIEELIGAMPAARGVNADGTTGPAAGTGQDAAVLPALARLDEIPGISQAGAQGILAEIGLDMSRFPTAGHLVSWARLSPRTIQSGAKNSSGKTGKGNPYLKGVLGEAAAAAARTDTFLGERYRRLVKRIGKLKALVAVARSILVIIWHLLSDPAARFCELGSAYHASRTDTQRKARGHIRQLEALGYTVTLTQAA

SEQ ID NO: 479032 - protein, 350 aa, unidentified
MTRYIGLDVHQHSCTAVVLNAAGKRLRTDVLETRADVLRDFARAMGRPRHVCFEEGTQSEWLYELLEPLSDEVAVVQPNKRDGVKNDAHDAHRLAEGLRCGTLEHVVFKPSGQFTALRQAVRAYDKVTSDVVRTKNRLKAVYRARGLSTGEDIYSPERREAFLHTLPTHHRTLAHLLSVELDGLRVVQQSAEGWLKQEAGRVPIVRRLTTAPGIGPVRAAQIVSVVVTPWRFRTKRQFWSYCGLGIVTRSSADWIKNEHGQWTRQYLPQTRGLNRNRHPLLKAVFKGAAHSVLRMAGHPLHQSYLRSLEHTKPTLARLTLARRIAAVVLAMWKKQEDYDPSKCPVPDSSR

SEQ ID NO: 479033 - protein, 351 aa, unidentified
MERYIGLDAHASSCTLGVVGPSGKRLASHVVETNARALIEVLRGIPRNRHVCVEEGTLSGWLWEVLEPHVEELVVAGVRESRGPKSDKRDAFVLAEQLRIGSLETVVYKDRGRFRRLGQLARAHGFVVRDAARVKNRLKSVYRSRGVGYGAGRSVYGKREREGWLAKLPEASRTLAEVLYAEHDALVALNAKAEKALLTEARKHREWHVVKTCPGLGPIRTAGLVPVVVTPHRFQSRSGFWAYCGLGIVMRSSSDWVRTPTGAWIKAPVQRTRGLNRNFNHRLKGVFKGAATTVIGRAEDEPLYHHYERLLEGGTKPNLAKLTLARQIASIALALWRTGEAYDPTRLEVTK

SEQ ID NO: 479034 - protein, 358 aa, unidentified
MPRMADARPGVAGGVDTHADVHVAAVVDQVGRVLGTGQFPASAEGYRAVLAWMRGHGILVRVGVEGTGSYGAGLARYLAGEGVEVAEVSRPDRQRRRRRGKSDVVDAVSAAIAALNGQETGTPRTHDGAAESIRALKVARRGAVKARTQAASQLRDLIVTAPEDVRAQLAGLSTAMRAVTAAGFTPGDLTDPAQGTMAALAAVARRYQELTGEITRLDAALAPLVQQAAPPQFLARQGVATQTAAALIATAGDNPGRLRSEASFAALLGSSPVDASSGKQERHRLNRGGDREANSALYTIVLTRMAHDPRTQAYVARRTAEGKTKKEIIRCLKRYVAREVYKTLIRPARQPAHFTEAA

SEQ ID NO: 479035 - protein, 416 aa, unidentified
MKTCGLDVHKDNVFCAIYDGKCYSQVTEYDTTTPKIRQMGEYLRSEGVTKVAMESTSTYWVPVWDVLLEMGFELMLVNPYLVKQMPGRKSDIKDAQWIACLLHKGMLRGSMIPSPVIQQLRTYSRKYTKLQEQKTRSLQKMDRIMVMSGFRIGSCMSNLGAKSVMNIVTALIKGETRPEELCKLVYGNTANKKSGKLREALTGNLKEHYRQQLEWEKEEYLYCVRSTRYDLFEKHTEQCLAQMLKICKEHFAKEMELLKSIPGVSDTSAMIIIAETGGDTCTVYEVRGMKVFENSGKITGWAGLRPRNDESAGKYKSTAITKGNKYLRTILVQVSWAASRIKNGWFKEKFNRLAMRKSRKKALIAIARKLLTVTWNVLHYKSPYNQKLAHIYDPVKVEAKIGYHKREMERMQKLIK

SEQ ID NO: 479036 - protein, 344 aa, unidentified
MDHYAGIDVSLEYSSVCVVDASGKVVREAKVVSEPEALIGWFGSLGLELARIGLEAGPLSQWLYAAMKQAGLAVELLETRHVSDAFKAMPVKSDRNDARKIAQLMRLGWFRPVHCKSITAQEIRAMLTARKLVQSKLLDLENSLRGILRGFGLKVGKTTRTNFAGRIEELVKGHPNLQTIGQALLRARAVLLAEFNGFEKRVRAMSRLHDKARLLMSAPAVGPIVSLTFACAIDDPSRFTSSKQAGPHFGLTPKKYQSGETDYTGRISKHGDASVREALYEAAHIMLTKPIKGCSDLKSWAMRIARRAGTNKAKVALARKLAVIMLRMLKDNVPFNPAAKAATA

SEQ ID NO: 479037 - protein, 342 aa, unidentified
MGQITTIGLDIAKSIFQVHGIDATGDIVVRRRLSRARVAPFFEKLAPCLVGIEACATSHHWARELRKLGHDVRLMPPSYVKAYVKRQKNDTADAEAICEAVTRPTMRFVEVKTREQQSVMVVHGTRTMLMRQRIQLSNVIRGHMAEFGVVAPVGREGLLTLIDTLHEETDDRVPAEARHCLQMLAAQLRLVNAQILENDRWIRASARATDVGRRLMGIPGVGPVLASAFVATVPDPHAFRSGRSLAAWIGLVPRQNSSGGKERLGGITKQGNRYLRQLLFVGAMAVIRYAERHGTRRPWLVQLLARRTTKVAAAALANKTARMVWAIMTSGQPYREPKLRAA

SEQ ID NO: 479038 - protein, 350 aa, unidentified
MFIIGCDLHTRYQQIGMLDTDTGEVVTRRLEHENGEARAFYASLAKPALVGIEATGCTQWFERMLAELGHELWVGDPAEIRARAVRRQKTDTRDAEHMLDLLASNRFPRIWIPSLQERDARQLLKHRDKLVRMRTSVKNQLHYLAMSQGLCRKQKLWTERGRRELEGLPLGTWASRRRQELLELLDRLQPRIEELDEAVKVEAQARPEVLRLMRQKGVGPVVGLAFVLTLGPVERFPRSKQVVSYLGLNPREASSGGHQRLGSISKQGNEMLRWLLVEAGQSASQADPELRRKYQRLKLRRGTKVAKVALARILAVRLYWALREASPQRSPVRMPGSPAQTLVDASPSRL

SEQ ID NO: 479039 - protein, 404 aa, unidentified
MRCAGLDVHQKNVVACARIVDNGKVTEEVRTFETTTRGLLELASWLEAAGCTHVAMEATGVYWKPVWHVLESKFELVLANAAHIKNVPGRKTDVADAVWIADLLAHGLIRGSFVPPTPIQDLRALMRTRKQLVREAARNIQRIQKALEDANIKLTSVVSDILGKSGRAVLNALVEGEVDPEKLVELTSRRLKAPREVLVEALRGSVREQHCFLIKLHLGQVDALNKAISELDERVEAHLDPFRKNVELLTTMPGISNIAANVIVSEVGHDMVRFPTAAHLVSWAGFCPRADQSAGKRRSSRIRHGAPWLKATLVQCAWAAIRTKDSYLRSQFYRLKARVGAMKAIVAVAASMLTAAYHMLKTGSPYKELTGAYLDRRDHAKLTKRLVKRLQGLGLRVTVEQQAA

SEQ ID NO: 479040 - protein, 432 aa, unidentified
MNPFSVSPEPSPVAAWVGLDWADQQHVICLYEVATGQSTVSRLEQKPEVLQDWLSQLRQRFGGAPVAIVLEQARGAVIYALLSADFVRLYPVNPQSLASYRKAYAPSGAKSDPADAVLLMEMVRNSPERFRPWKPDDADTRSLQLLTENRRQLVNQKTAFTNQLTSLLKTYYPQALELAGVLDSLQACDFLTQWPTLEALQQARAGQIRQLYREHGHPRLEQLDRRLEQICQARPLTTDPAALLSGSMMVQALVQQLRPLLGAIERFDRQIAVLFRKHPDRPLFDSLPGAGAVLAPRLVAAFGTDRDRFQSAQQAQQLFGIAPVTEQSGKQRWVHWRWACPKFLRQTFHEFAGHSRHWCSWAKALYQRLRRCGKGHHAALRVLAFKWIRILFHCWKTRTGYDEQIYLKSLQKRNPTLWAEIQLLPPRKKRVA

SEQ ID NO: 479041 - protein, 310 aa, unidentified
MEPVFVGIDVSKDRLDVHVRPGGEVFVVSRDGSGLEELVGRLQALDPTLVAVEATGGFETIVAAAVAGAALPLAVVNPAQVRHFAQAVGKRAKTDPIDAGVIAHFAEAVRPVPRTLPDEAARLLAELVGRRRQIIDMIVAERQRENRATNVRVRKSLARHLAMLEKELGAIDQDINTLVRGSPVWRVKEDLLASVPGIGKTLARTLLAELPELGSLDRRHIASLAGLAPYTRQSGRWRGRSMIGGGRSAVRSASFMAALVASRHNPPLKDFYLRLIGAGKPKMVALIAVARKLLTILNAILRDNQPWQSA

SEQ ID NO: 479042 - protein, 395 aa, unidentified
MNTTVHYLGLDVHKESIAVSIAPQGTTEVRRYGIINGSLEAVDKLLKKLARPGLELRVVYEAGPCGFVLCRHLRAQGIACEVVAPSLIPKKASDKVKTDRRDADQLARLFRAGELTPIHVPDPEDEAVRDLIRARHSAMDDLRKARHRLKGFLLRLGFRYTGKSSWTDAHKRYLAGLVMPQPPQQIAFQEYIHAIDDAGQRLERLTRAVLDALPGWKWEPVVRALMCLRGAQELTAMTLVAEVGDFSRFDDPRSLMHFLGLTPSEHSSGGSRTQGGITKCGNAHCRRALIEAAWQYRLVPKVSEAMQRRQQGQRKEVRMIAWQAQQRLHKRFQQLGAKKKRVVAATAVARELAGFVWAIARQVKPASNAAAPQILRTCRGKVYRLDASKKMPKTQ

SEQ ID NO: 479043 - protein, 490 aa, unidentified
MPRKKDRYKQNGAVNKRATNKLPLGEQGKTLPPRSGLPVDNAPSPIKDMEKVNLHAAGIDIASGVHYVAVPEGRDDTGHVKSFGAFTADLEAIADWLTACKIETVAMESTGVYWIPLFELLEQRGFHVILVEPSQVKKFRRKTDVLDCQWIQTLHTFGLLTGSFRPEDRIVVLRSYMRQRETLTKDCARYVQRMQKAMEQMNLKLTGVISDICGVTGMLIIGAILDGERDPHKLAALRNEKCKNDEATIALALQGNYRQEHLFSLRQSVDMYRVFHQKMVEVDREIESYLSQFEDKSDGQPLPKLPRSKQRSKRVNEPKFDTRKLLYEMLGVDLTEIDGVKGHSALEIVSEIGTNVDAFPTEKHFVSWLSLCPEVFKSGGKAPKKGRSPTHRSGNRVAQSLRVCAQTLLRSKCALGAFGRRIKSRDGAASAVTAIARKLAIIIYNMIKTGRAYKDIGAEAYDARYQDRLIRNLQRRAEALGCELIPSEAL

SEQ ID NO: 479044 - protein, 360 aa, unidentified
MTGTMTWAAMDVHARSTYVASLDVVTGELSRRRFDTGAVEPVVGWLAGLPGPVRCCYEAGPTGFGLYRAAVAAGINCQVIAPSKTPRPSGDRNKSDRRDTDLLLRQLMAGGLTAVAVPSATCEAARDLARAREQVRVDLMRCRHRLSKLLLRHGRVWGRSAWTKVHREWLSAQTFEQVNTELAFIDNLAACDGLTARKDALDERLSHIATDPEFWPLVRRLRAFRGIDTLSALIIVLEVCDFARYSRAVQLGSWLGLVPSREQSGESDHHGSITKTGSKYARRILVEAAWHYARPPRIAKTLYERQEGLPDHVLQIARRAQSRLYRIHQRMRERNKPGNVITVACARELACFLWAAATAP

SEQ ID NO: 479045 - protein, 394 aa, unidentified
MKLVGIDVGKNSHHFCVMDKETGEFNVAPSSFSNNKEGFDFLINSLKPYSKKSILIGMEDTGHYHVALLKFLLSNGYTVALINPKTTDLTRKMEGGITKNDKLDTITICDVLDTPERKKQYRITKVDRFDLYEQRQLTRHHHNLKEELNVYCNRLQKSIDLVFPEFNTLFSSKYSIVYMNLLKTFGSAEAIASTDIRTIRKCFEVKGRGGRISLTPEKLKECAKNSIGISSEVETIQIKHLVSQITLIKEQIAEIDKKIEEFSIKNNSPILTIPGISHFSGTSILAELGDIGNYSKPSQIIKFAGVAPYHYESSQYNAQHTGITKKGSKYLRKTLYQIILTVINNNPVFKKYYLLKISQGKGHRCAQGHCIRKLLRIIYHLLETGQSFDPALLR

SEQ ID NO: 479046 - protein, 387 aa, unidentified
MNFIGVDLHKKSITICVMDEKRKILARKTLPCTQTNEIVEFFRQFRPFKVVVEATASYVWFVELVEPLAEKIVLANPKKLRVIAESTKKTDNLDAQVLTEFLVLDMIPESYQATPRLRQHRALVRHRQYLQSRITSVRSKIRHILSNYNADRKDLFSSNCGLAYLKEVRLNDVDRFVMKQLWAEWQDHLAQRLAVSKKLKAFVAKAPQREAEAREILKTAPQVGSVTAEVILSELGDISRFRNAKTVCAYAGLVPVVRQSGERKSKDMKITKEGSGLLRWALVEAAWRLVGKSPKWAALFSRLRHRSGKKRAIVAVARKLLCVLYAMLRTSTPYKIVTTQTTAARTTGKESVRTSTPDQTTPTETTAPRTTGKKLVRTSTPDQTITT

SEQ ID NO: 479047 - protein, 344 aa, unidentified
MAETIMIGLDLAKNVFQAHGVERAGTVVIRRQLRRAQMEKFFASLKPAVIGMEACAGAHHWARVAQRHGHEVRLMPPSYVKPYVKRNKTDGRDAEATCEAMQRPTMRFVAVKSEQQQAVLTLHRTRTLLVRQRTMLANALRGHLAEFGIVAAQGVRGLRGLIERMKTPCAAGIPELARDALLVLAGQWEALDAQVRALELKILHSARESAAARRLLAVPCVGPIIASAMVASVGDAQAFRSARGFAAWLGLTPRQMGTGGKHRSGSISKQGDRALRTLLIVGASAKLRQEIARGVSDPWLRGLLARRPRKVATVALAAKTARIIWAVLAKGEEYRDRTSMPAAA

SEQ ID NO: 479048 - protein, 347 aa, unidentified
MDHIGIDLHKRESQICLLAEGGELIERRIRTEPQRFAEALGGRATAQVLVESSTESEWVARCLEALGHHVVVADPNFAPMYATRRRKVKTDRRDARALAEACLLGAYRPAHRLSDAQRHVRARLSVRDALVRTRTRYISLIRALLRQHGWRVPSGSAEGFPRRVLALPLPGRLRSEVAPLLAVMCHLQPPLAYSDERIAALTATDERVRRLQSVPNIGPVTAAAFVAALDEASRFRRGHEVEAYLGLVPRELSSGETQRRGRITKAGSSRVRWLLIQAAVSMLRLRDPRTAALREWAGRVAARRGKGIAVVALARRLAGILFALLRDGTVYEPRRHHACHATQAVPA

SEQ ID NO: 479049 - protein, 380 aa, unidentified
MKTNSDTTVKLYIGLDVHKEQTSIALAEPGSMGEIRSHGNVATSQIMLERVVRRIAKAHKIGLAELHVCYEAGGCGMWIARMFVRLKVPCTVVAPSLIPTKAGDQVKTDKKDAIKLARLLRAGELVSVHIPDETDEAIRDLCRARVDACDDLRRAKTRLLAMLRRLGFGYTGKSHWTEAHKRYLRDLKLPFKAHCIIMEELISQIDQLGERIARIETHMELMCADWGRKPVVDAMMALRGFRLIASMMVVSEIGDFVRFTHPKQLMSYLGLTPGEYTTGGKQKQGGITKCGNSHLRWLLVECATHYRPEPRISSALSIRQEGQPRWLKEISWKAQNRLHARFTKLRQRLMHHNKIKVSIARELTGVLWEIGVKMQAGSKP

SEQ ID NO: 479050 - protein, 373 aa, unidentified
MDQTINQSVGIDISKATFTACVCKRDQTGEEDLSEVVQFKNLTTGFNQFVKWSRKITDPSVEVNFVMEATGVYYENLAHHLHKLKQPVSVLLPNKVKHFGKSLNVKTKTDQVDARIIARLGAERRLSPWYPPPEVFKQLRDLTRGYTELMKERTVFKNRLDAMSSGYKPLAVIMKSHKAIIKKLEEQLDKTKGEIERLIYSEEWLASKVDKVLTIKGVGLMTVATILAETQGFELVQNIRQLCSYAGYDVVQRESGTSVMGKTRISKKGNSWIRGALHFPALVASRHNPVLKKTYLRINKSKASKMVGVTAIQRKILILIYTLWKKDEIFDENYKNQSTKMLAENGGNKAGRGISSLPAQDELQPDRPKLSLV

SEQ ID NO: 479051 - protein, 338 aa, unidentified
MPLYSGIDLHANNSVVVLLNEQDQVIYQQRLANHLPEILEALTPYQADITGVVVESTYNWYWLVDGLMEAGYRVHLANPAAMQQYSGLKYTNDRSDARWLAHLLRLGVLPEGYIYPKAERAVRDLLRKRAHLVRQHTAQVLSVQNLMVRNTGVRFGAKRIEEFTPSELARLLPNAEQVLAVTSSLAVLHCLGQQIKTLEKAVQKRLKHTPAYAQLQTVDGIGMILAQTIVLETGDMSRFPTVGNYASYCRCVGSTKISNGKRKGQGNVKNGNPYLEWAYMEAAQFAIRFSPTVQRFYQRKQAKSHLMIARKAVAHKLARACYYIMRDLVPFDVHKAFG

SEQ ID NO: 479052 - protein, 392 aa, unidentified
MVTILRPFGEIVSRPHEVRHSSAQINALIREIQSLDGDTRIVMEYTGRYHEPMARWLSDAGLFVSAVNPKLIKDFDNASLRKVKTDKADSVKIARYTLDKWHDLKQYGLMDELRNQLKTMNRQFGYFTKVKTAMKNNLISLLDQTFPGANTFFDSPARSDGSQKWVDFVDTYWHVDRIRCMSLSAFTEHYQKWCRRKGYAFQPDKPEEIYEAVRDIIAVLPKDEVTKFLVRQAVTQVNTVSAAVEELRARMNETASQLPEYPVVLAMKGVGTSLGPQLIAEIGDVTRFAHKGALTAFAGVDPGKNESGSYAQKSVRTSKRGSASLRKTLFQVMDVLIKTMPQDDPVYAFMDKKRSQGKPYYVYMTAGANKFLRVYYGRVKEYLLEHTESSEN

SEQ ID NO: 479053 - protein, 309 aa, unidentified
MDAIVIGIDVSKDKLDVHVLPAAQAFAVARNGAGIEELAARLAALAPAVVAIEATGGFETIVAAGLAGAGLPVVVVNPAQIRAYAKAIKQRAKTDPIDAAVIAKFARATRPEVRPLPDEATRQLADLVASRQIVEMMAAEGQRGRRVDHKRVARSIARVKKTLEAELAELDQEIGDQVRGSPLWREKEDLLVSVPGVGPVVARTLLAELPELGRLERREIAALAGLAPFTRQSGRWRGRSFIGGGRATVRTVLFLAAMTAARHNPTLKAFRDRLVAAGKPKMVALIETARKLLTILNAIIRDNRPWQNA

SEQ ID NO: 479054 - protein, 391 aa, unidentified
MIFMFFLGIDIGKNTHVASLLDEKAKIIFKAYSFANTLDAAEALLVKLEPYKDSLEIGMEATGHYWLSLYSFLAEHKFIVHVLNPIQTDGWRKGIEIRKRKTDVIDSVLIADLIRYGNFLETSLADEDILSLRNLSRFRVYLVNSVSDLKRKAIAVLDQIFPEYASVFSNVFGQTSKELLKSLSLPSDYENLSATKIEEVLSNITQKKKASKTISTLSDKASRSFGISFCKDSFAFQLKLIIEQICFIEEQIASVELEIDQLMSKLGTNIKTIPGVGSVIGAVILGEIGDIERFDNPSKLVAYAGLDASVSQSGEYEASSGKLSKRGSPYLRKALYMAAQRAEFCDPVFHAYYEKKRNEGKHHLVATNAVARKLCHTIYAILKKDVPYEVQ

SEQ ID NO: 479055 - protein, 343 aa, unidentified
MQTITTIGLDIAKSFFQVHGIDAEGNVTLRRQLKRRYVLNFFQRLPPCLVGIEACASAHHWSRELQTLGHTVRLMPPAYVKPYVKRHKNDATDAEAICEAVTRANMRFVATKTPQQQSCLTLHRTRHLFIRQQTSVINAIRAHLAEFGIVAPIGRNGVEQLLSVAADAKDKRLPEVARACVAALGAQLQTLKAQILEFDRMIMAWHRSSEASRRLDDIPGVGPVLATALVASIADPSVFRSGRDFSAWIGLVPRQNSSGGKDRLGNISKRGDRYLRSLFTTGALAVIRYAKIHGTRRRPWLTALLTRRPTKVAAIALANKIARMAWAILAKDERYKEPAALAA

SEQ ID NO: 479056 - protein, 290 aa, unidentified
MSSASFVGMDVSQDTVDVAVQPGTAFHIANDESGIAEAVTRLQAVQPTLIVLEATDGLEVPLAGALVAAGLPVVVINPRQVRDFARATGQLAKTDRLDAPILARFAEAIRPPVRSIPNEQTQALAALMARQRQLIEMVTAEKNRLRLAARPIQKQVQAHITWLENEVAGINTHLTTTMQQSPVWREKEDVLRSVPGVGPVLTTTLLANLPELGTLTRKEVAALAGVAPFPRDSGTLKGRRAIWGGWAHVRAALYMAALVACIRKLLTILNAMVKSRTPWRHEAEPICAEV

SEQ ID NO: 479057 - protein, 398 aa, unidentified
MLARRRPRGPQASVSERHRFLYAGIDTHKDTLAVAVIDHAGRALASLELPNTNTGFAELTALLADHQVQRVGIEGSGAYGRAVAVHLALEHPDQDLAVVEVPTLMTSRERRGKPGQGKTDPVDALAIARITAREPGLPPVRLTVGPAADMRALLDYRDELIAERTALANRVHAELAGLLPGYQHQIGSLTTKVRIHQAIDLLAHITGAGAVRADLSRRRLERILAIDTEAQELRKTIAGLVEDTGTTLTEEYGIGPLIAARFIAEVVDVRRYPTRDTFAAANGTAPIPASSGRTVRHRFNPGGNRQLNRALYTIAITQIRADTEGRRYYEAKRAQGKTRREALRCLKRRLSDVVYRRMRVEARAFNVTDLPELTSTNEHRRETLAVDAGAANEARLTA

SEQ ID NO: 479058 - protein, 427 aa, unidentified
MSAANETRQQPIAAFVGIDWADQKHDIALRAAGLEAKVERSKIAHQPEALSDWVLALRERFADQGKILICLEQSRGALIHFLMGYDCFELYPINPKQLDSYRKAFRPSGAKDDPTDGELLCKYVRLHHQELRPWRPDDEQTRKLALLCEKRRQAVDARSALSNQLKSELKQYYPLALAVLDNDLTTVLAADFLLKWPDFASLKKASAHKVRSFFYGHQCRSEKKIQTRSQLMESAQPLTRDSAIIEAGALTAQMLARQLQALAPYIRQYDEQIAQLFSQHPDRVLFDNLPGAGDALAPRLLSAFGSNRDRFDNVLEPLSFFGLAPVTERSGKTTFIHFRWACPKFLRQTFHEFAGCSVRFCDWAAAFYDQQRARGKDHHVAVRALAYKWIRILFRCWKTRQPYDPQRYRAALAHRASPLATDVKNSP

SEQ ID NO: 479059 - protein, 418 aa, unidentified
MKDIKTEKGKKINRKTLIVAFDIAQEKHVVYIRCPDGREEKPFVVFNRREEYDQMWERISRTKEAYGVEEVVVGFESTGPYAEPLVHYLMKKEVKLVQVNPMHTKRVKELRGNSPNKTDEKDPQVIADIIELGNYLTVVIPEGAPAELRRLTQARERAGERRTMLVNQVHSLVSVVFPEFLMVMKDIKTKTAQYLLKQYPRPQDIVGLGSEGLEATLKKISRGRLGKERAEALYEAAVNTVGVREGQGSIVFEIKQLVAGIEEIERSREDTEERMREYLKEVPYSRYMLSIEGIGEVTVAGLIGEAGDFTKYKTAAEITKLAGLDLFEVSSGKHKGERHISKRGRPLMRKLLFYAAINVVRKGRIMHERYERYLQRGLPRMKALIAIARKLLGVLFALVRDQREYVRNYEEKPLKQVA

SEQ ID NO: 479060 - protein, 348 aa, unidentified
MKNVSTIGLDLAKNVFQVHGAESDGSPVFNRKLRRGDVLKFFEKQPTCLVGMEACGSSHYWAREVAKFGHIVRLIPPAYVKPFLKRGKTDAADAEAISEAVIRKTMRFVPIKTADQQAAAMVLKTRALVVRQRTQAINALRAHLAEFGIIAAGGVAKVETLIAIIRDDTDDRLPSPARFALAMLAEQIEALTKQIDKLERAIVTEVKHDDDARRLTSIPGVGPITAATVKALVPDPGGFKSARHFAAWLGLAPRVHSSGGKDRLGRISKMGNPEIRSLLVVGATSVLRIARNSAKASPWLKALLARRPFRVAAVALANKMARIIWALLNKGESYRQPETPQTIPAAVA

SEQ ID NO: 479061 - protein, 349 aa, unidentified
MGEVITIGVDIAKSVFQIHGVDADGTVVIRKRFGRARVLEFFADLPPCRVGMEACATAHQWARELTKLGHDTRLMPPTYVKAYVKRGKNDAADAAAICEAVTRPSMRFVPIKSVEQQSMLMLHRARDLLIRQRTQLTNALRAHLAELGLVAAKGREGLHQLATVVTECGVERLPSNARFACQAIVTQLHAVQIEISGLDKRITQTHRASADSKRLETIPGFGVILSTAVVATMTDPKAFRTGREFAAWIGLVPRQNSTGGKERLGSITKQGDRYLRRLLVIGATSVINSARARPYKYPWVIELLGRRPTKVVAVALANKMARIAWAVLAKGETYRTPTRPWNAAVPVAA

SEQ ID NO: 479062 - protein, 350 aa, unidentified
MLIIGCDFHTRYQQIAMMDEATGELIERRLDHESGEAHTFYRGLCKPVRLGVEATGPLQWFERLLGELGHELWIGDSAKIRASEVRQQKTDQRDAALILDLLLTNRFPKIWVPSAEERDLRQLLWHRHKLVRLRTMLGNQLHALAMSQGLCRKKKLWNKKGRAELEGLALGPWSSRRRTELLRLLDQLDPSIAELDRAVLEQAQRREDASRLMTHPGIGPVNALAFVLTIGPVTRFRRSKQVVSYLGLNPSEHSSGGRQRLGAISKQGNTLVRWLLIEAAQHTVRLDPELRQDYQRLKFRRGNAVAKVAIARKLAVRMFWMLRSGAEYAQLVRMQGSPGATLVNASSSLG

SEQ ID NO: 479063 - protein, 339 aa, unidentified
MELYSGMDLHSSNTMIGIVDEKRKHLMDRKLPNDPELIRSFLKPYKPVLKGIVMESTYNWYWLADLLQEEGYRVHLSHPVANEQYKGLKHSDDKHEAFWLAELLSLGILKEGYIYPRQIRSLRDVLRKRAHLVRLRSALLVSLGHMVQRNCGMKVKTGDMKRLTQDLVSPLLNRDEALLLAGKTSKEVIDCLTRQIDKIERWALNRLRQEGVFLGLVTLPGVGDILGMTILLETGPVSRFRAVGNYASYCRKVSSQWTSNDKVKGRGNIKNGNKYLAWAFSEAAEYARRTNEACRRFYDRKLRQTNTKVAHNALAHKLARAAYYIMKDHVSYEEEKMFS

SEQ ID NO: 479064 - protein, 361 aa, unidentified
MEYYIGLDVSQRQTAICIINGKGERIKEGKALTVPSDIYAWIIKHVDAGDIVRVGHEAGAMSFWLQTELTKLGLPIVCMEAFQAAAMLETQRNKTDKNDARGLAQIVRMGGKFIRPVIVRSQNNQEARMLLTIRQHLVEQKVALENNITGSLKPFGLVTPRGHACAKKFRENVLATLVRADERGVMVREMVMPSLDLYEDLCKQLDLLTKRVESLAKANPVCQRLMTVPGVGPIVSLSFVTAVDNPKRFRHLCDVGAYFGLTPKQEQSGEINKMGSVSRRGDTMTRTHLVQAATVLLTSCKKWCSLKAWGIKILKKHGLRNARVAVARKLAILLCSLWLQEKDFCWTTAAVNQKLAEVKPA

SEQ ID NO: 479065 - protein, 416 aa, unidentified
MKSTMITAVGIDVSKNKSTIAVRRPGGEIVMRPFEIRHTNSDLKELITTLKQLGGDIRIVMEHTSSYWRPVALTLKKAGFFVSVVNAMLIHDFSDNSIRKLKTDRADSLKIANYALTFWDELPPFNDEEEIRLLLKTQSRMCERITTTTTALRNGLIALSDQTFAGINMMFDRAAKSAEGHEKWVDFFLHYWHRDCVCKYTLEAFTESYRRWCRRKNYKFRTDTAHKVYELARECVATLPKCESTKILITQACKSLNAVCEAKQASQCEMQRLASLLPEYDMVMKMEGAGPITGPALMAEIGDVRRFKNKKALVAFAGVDAPPFQSGTFESKSRHVSKRGSPHLRRTLFIISGVILQLSHESNPIFCFMDKKRSEGKHFYVYMVAGAAKFLRIYYATITGYFRTLEQTKPLLQTEG

SEQ ID NO: 479066 - protein, 338 aa, unidentified
MKLYGGIDLHSNNTVVALLDDEDHMVYHKRLANEVAGVLEALAPYREAIVGLVVESTYNWYWLVDALMEAGYRVHLANTAATVQYSGLKYSDDDSDARWLAKLLRLGLLPEGYIYPKAERAVRDLLRRRLRLVQQHTANLVAVQNLLARNRGRALSANAVRRLTPEAVERLLPDANLALAVQSTLLAMRGQEAAIELLERQASAQVHLRPAYRHLLTVSGIGQILGLTILLETGPVERFAAVGHYASYCRCVGSERLSNGKRKGRGNAKNGNKYLAWAFVEAANFAVRWNPAIKRYYQRKRAKTNGIVAIKTVAHKLARACYFILRDGSDFEVSRAFA

SEQ ID NO: 479067 - protein, 388 aa, unidentified
MQTVADRPEAPTAIRTDLGAIFVSLELSRSTWLITSLSPGGGEKMSKQVVRGGDVAGLLERFARLREKARARTGKVFPFVVIQEAGLDGFWIDRALQNEGIESHVVDPASIATSRRRRRAKTDGIDGEALVRALLAYKRGEPRVCAMVKAPTPEEEDRRRLCRERKVLIGERVQHVNRVKGLLFSQGISGYEPLRRDRRERLATLQTGDGRLLPDHLKAQVCRELDRLELLLEQIKAVEAERDVLLAAQQVAAPAPAAMLLDIKGIGPEFAAILWSEGLFRHFDNRRQVASYAGLAPTPWQSGSVDREQGVSKTGNPRLRTTLIQLAWLWLRHQPQSALTLWFEERVRRNGGRLKKTTIVALARKLLVALWKYVTAGVVIEGAVMKRT

SEQ ID NO: 479068 - protein, 378 aa, unidentified
MEKQWNIVCGADIHKKFLIATILSRDGTKTTGRFGMTLDDLLNFKNWVIENGCEQVAVESTGTYWVPIHSVLEGSVGLIVGNAYKIKHTPGNKNDLDDADWIAELCLNGMIEPSRIFPKADRDLRRLTRIREGYVNDMTREKNRIHHALDSCGIKLSLVLSDIFGKTGQSILNGLLEGRTIDDILKGIKLKRIKATAEEIKEAIKGSLDFTQILLTRGSLEQMEAIQKRIDELQEEIKGRIAYRKEDLKIAMSIPGVGFTSASTLLAEIGDINDFKKPEQLAAWAGLVPSVYQSAGKLVTGSITKHGSRHIRWILVQVARVIARGRNSKLKRFFLRVKSKNGSNVAAVALARKVLCILHHLLTCSARMCHPHQRFRKQ

SEQ ID NO: 479069 - protein, 320 aa, unidentified
MSKKKSKSFIGIDVCKQQLEVAVHESDYQFRCPNKASAFGELIAELIALRPALIVLEATGGLEIPVVNALHAVGLPVVVVNPRQVRDFAKALGQLAKTDRLDARVLAHFAAAIKPPLRPIKSKEEQELDALTGRRGQLIEMLTDEKNRRGSAASDSVRDEIKEHINWLEERIAELDDQLKALLQSSPSWQAKDEILQSVPGIGPVVSFSMIADLPELGTLNRQKISKLVGVAPLNRDSGKQRGTRHIYGGRARLRSVLYMAALTASRHNPAIKEFYERLCAKEKPFKVAITACMRKLLTIINVMVRDSTCWKSKEETVSA

SEQ ID NO: 479070 - protein, 386 aa, unidentified
MQKLNDLSRSLTALEPNGTLIAVIEMSLSSWLVAGIVPGVERQPLKKLAVDESALLKLLHRWREEAEKAGRRIERIAVAFEAGRDGFWLARWLKARGIEAYVIHASSVAVSREHRRAKTDRLDTELLKRSFLGWLRGERDHCKMVEIPTMQDEDAKRPNREHDSLIGERSRIVNRMKAALVRLGIRGFNPKLKRATTRLDGLHTPEGEPIPPNALAELRRDMERRRLVNNQIRQIEEERLERIEQAPCDGAHVMVRLLARVMGVGIETADMLVHEVLSRNMRDRRAVARYAGLTGSPDESGRKRREKGLARSGNARVRRGMIQLAWRFLLHQKNSALTKWFRSRTESARGTRKPMIVALARKLLIALWRLMREGIVPDGVVLRPAQ

SEQ ID NO: 479071 - protein, 322 aa, unidentified
MKLYLGIDMGKSGFTAALCSEDQVFQIVHPEVRNQIDGWQTIRDWVLKQSKENPVGVHLGVESTGGYEKPLIDWFRSNTEFVVTVLNPVRVKKFAQSELSRTKNDLNDARLIARYLAIRKPEPTLVIVPEIEELKLMARHLEHLIRKQADEKTYLDSVTEAAIRSQTQDIIQTYQKQIEKVQVQIRKHIDSHPNLRNQSGLLQSIPGIGEKTSAILLCECIPALTPKQQVAHAGLAPRHNQSGKMNGKTQLCKTGNKRLRTALYLPTLCAIRCNPVISEFYQRLIARGKPKMVAVGACMRKLVHIIVGVLKNQISFNPNYAL

SEQ ID NO: 479072 - protein, 382 aa, unidentified
MRNVCGLDVHKDNVFVCIDKRNGEKIQFKCGILTRDLDVLRDKLVENDVGEIAMESTSVYWMPIWRVLESDFKLYLVNPYAIKQLPGRKSDVKDAEWIATCLRKDLIRGSYVPDATIQQLRQYNRRIFDINKHMVYIQNKMDAALQRCNIRISNYVSNVDTKSYREVVTKITEGEARAEELVKVIHGRTIKRCGRDTIVASLDGVVRQADIDLLKQYKEELDMLRRHKAECLLKMREICKEHYQRQLELLQTIPGVKDQSAMQIIAEAGVDMKTFITAAMLIGWAGLKPRNDESNGKFKSRKITHGNKYLRKVLIECAWAASRTQGCFYNKFSYRLCVVRKKSGLKVRVAIARKMLVAIWNMFTKNETYKDYQLENEEEKPS

SEQ ID NO: 479073 - protein, 320 aa, unidentified
MSALSVTVGIDVAKAHVDVCVLGTHSDVQRFANDVDGHCALAAALQSLDVGLVVMEATGGYEAALACALQAMGLHVAVVNPRHARDFARSMGRLAKTDAVDARMLAELAAVLMRRDDLARFLRPVADERQQWLAALVTRRRQLLTMLNSERQRLQITPSKLHPSIEAIVAAIKAQLDDLQRQMVGHVREHFGELDGLLQSTNGIGPVASATLIAQLPELGRLNRREIAALAGVAPVANDSGNRKGRRRVQGGRFEIRRVLYMATLTAARYNPVIRAFYERLRAAGKLPKVALVACMRKLLTTLNAMVRTGKPWDPSLHRA

SEQ ID NO: 479074 - protein, 362 aa, unidentified
MPNATRWVGLDVHALQTACAIFDSETGEVITRRVLGRPHEVMGVLLELERPVRAVYEAGPTGYGLARRARAAGIDMQVCAPGMIARSPTERIKTDKRDAMKLARLHAAGQLVCVHVPSVEHEQLRDLARCREDARQDLMRAKHRIGKFLLRRELYYPGRGRAWTKGHRAWLASLRFADAASEATFCDYLHAHDTLAARRDELGRTIDTLARECSWAETIARLRCLHGIDTLGAFGLCGEICDFQRFTRPTALSAYLGLVPSENSSGDKRRQGSITKAGSTLARRLLVEAGYHYRRPPRIGGALLARQDGAEAWVVDLSWRAQRRLHGRWQRLRSERRKHNGIAAIAVARELAHFCWELATTD

SEQ ID NO: 479075 - protein, 356 aa, unidentified
MLYSGVDLHRRLIVVCTVDENGTVVARSKMKTDPALVSEYFQRWPDQHRAVVECTTGWYWFSDLLRSLGVDVVLAHAKYLKAISYAKVKTDAVDALTLAQLLRMGYIPEAHQLPPEYRAMRDLLRQRMVMEHKRTNIIQRVTSILAQFNITDLPLSPYQSGFADFLNQCSIPDEYRMTLMLYHQQCLQVTEHRKQLEKHFKAHLRPTPAVQLLMSLPGIGDITGSIIAMETGDIHRFADAKHYCSYCRLVPGAKDSGGKHSHRSGSKDGNQYLKYAFTESAIKAMRFYPQIKHFATRLERRATKAIARTVVAKELAKISYYVLSRQQEFKTFKGIEINKLRNWPRARKPVRITGGL

SEQ ID NO: 479076 - protein, 343 aa, unidentified
MHYVGLDVHAKRSSLCILNGDGKVVKREMVHGPWPAAVERLREVGASAGGPLSVCYEAGCGYGPLHDALSPLAAHVAVAHPGALRLIFKAKKKHDRVDSDKLATLLYLGQVPAVHVPSADVRQWRKLIELRQSLLAGRVREKNRVRAVLRNHAVAVPKRPGLWTKKGAAWLASVRLPQGERLAVDLASEAIASANARLARVEAELAKYAAAHPGVALLMTIPGVGVRTAEAFVAYVDDPSRFARVRQVGSYFGLVPTLDSSAGRDRRGHITREGPGTVRKLLTEAAWQSVWRDPASRALFERVTRGKADRRKIAAVAVAHRLCRVMAAMLRTGEAYRAARASE

SEQ ID NO: 479077 - protein, 348 aa, unidentified
MKHYAGLDVSVKETSVCIVDENGKLCRERKVVSHPDDLVAILSDPAFSLERVGVEAGPLSQWLFEGLAKAGLPVSCIETRHTKAFLDALQQNKSDRNDARGIAHMMRVGLFKDVHVKTLTSQKRRALLTARSLLQEKAIDLENEMRGLLRNFGLKVGHASGSAFERRIHELVENDADLKEIMETLLAGRRKLREGLARLERRVLAEAKQDEVCRRLMTVPGVGPIVSLAYVATIDIPSRFRHSRSVGAVLGLTPVLKQSGEMSRVGHVSLRGDAMMRRLLYEAAQSMMTRVVKWCWLKAWAMNIAKRHGSKKAKVALARRLAVVMHRMWVDGSEFRWTREDTVSTVAA

SEQ ID NO: 479078 - protein, 347 aa, unidentified
MSNTNLVTIGIDLGKNTFHVVGLDATGAITLRKKRSRNQLDQSLGNIPRCLIGMEACAGAHHLGRRLEKLGHQVRLLPAQYVKPYLKGHKNDFRDAEAIAEAAQRPTMRFVPVKSAEQLDLQALHRVRSRLVTQRTAVINQIRGFLLERGLPVRQGAAALRLALPQILSAPNDNLSPRVIQLIQDLAEDWRYLDRRVASMTKEIDELADQDPHCRRLMSAPGVGPIISSAMVAAIGTGDAFHKGRDFAAWLGLVPKQISTGDRTILGRISRRGNRYLRTLFIQGARAVLLQRQSWPRHGFAAWLEAASKRLHSNVLVVALAAKLARMAWSMLAKGRDYDANLLGRTA

SEQ ID NO: 479079 - protein, 406 aa, unidentified
MIFVGDDWAEDHHDLHVMDPNGNRLTARRLPEGMAGISRLHELLAEHAGEPSEVVVGIETDRGLWVQALIAAGYRVYAINPLAAARYRDRHQVSGAKSDPGDAKVLADLVRTDRHNHRPIAGDSPQVEAIKVLARGHQNLIWARTRQTNMLRSALREYYPAALEAFADLHDRDALAVLGRAPSPEQGARLSRSTIRTVLARGGRQRNLDARAEQIQAMLRRPELAASTPVAAAYAATTMAPAGIIGELNRQIADLEAQLATHFEQHPDADIYRSLPGLGVVLGARVLGEFGDDPNRYADTKSRKNYAGTSPLTVASGRKRAVLARHVRNRRLYDAIDAWAFAAISTSPGCRAFYDQHRAAGDLHHQALRALGNRLVGILHGCLTHHTRYDEHTAWAHRNQDQQAAA

SEQ ID NO: 479080 - protein, 358 aa, unidentified
MLFLGCDVHRDYTTVSCVNEAGDVLSTSNVSNTPSEVSQFLERYPTADFSVVLEAGLNWGVVYDLFESLARVKRVALAHPPKVKAIASAKIKTDKIDARILAQLLRVGMIPEVWIPSKEVRVLKDMVRFRAFVVKVKTMVKNRVHDLLRKAHAMPPDVKDLFGSYGRQWLDEMTLPDARLDRLLRLHLSLLDTFKTAERETRQWITRELQGNDDLQLVKTIPGIGEVMGAVVVLEINDIQRFPDAPHLHAYCGLTPSTHASGQIQYHGRLIRGNKWLRWAFVEAGHTSVRVSPYFRSHYNRVRMHAGTQAASISCARKLATVTYMILKEKRPYREISICENKSRLPSVKSSLLGSGRE

SEQ ID NO: 479081 - protein, 454 aa, unidentified
MREQGSIDLKCRLCHLHHPAKPTGMVPKDFLCGSVSRRGNWMKLPRNHYGVTPMKVQEEIRVCMDIGCKQHHVGIGLSNGQLLESFDMMHTTTGIDDFFKKIDTYKQSYKLPVVIAMEAYNGYARPIDQYALDKGYRVYNVNNNKLAQFKKVFAGPAKSDAIDTKKMFELFCLDDHLYLSKNVLQEVHKEPEVNNKLKRLTRRRSALVKEKVVTINRMQADIESVSPGLLKITGSADNLWFLNFLTARDALSKLARIKDKGLLEISKVGKRYLEPIKEWQKVASFSPETQWVGDMIIQDAKRLLVLKKEIARLEKMIDELNEDSEIARRIKTIVGFGTVTSAVLAGEIGTLARFNSESGLALYTGMAVLDNSSGGYTGSKKYIHVNRACKAALMVAVARHINHCPESKKYYDKKRAEGKKHNQAVRSLGRHMIRVIWSMLKNNRDYEIRTAEED

SEQ ID NO: 479082 - protein, 400 aa, unidentified
MLSIGIDVSKGKSTVCGMKPGGEIVYAPFEVQHTREGMSELVSLLRSSGEEVRAVLESTGSYHCPVVAALLENGIFVSVVNSLRMKRFCSQSIRKVKTDRIDAMQIALYGLAYWQELQPARLPEDTYRELQLLARQYYQMTSLLIKAKVDFNAICDQVLPGMQELMNDHAGRHKLSDFVLRYHHTTHILEMGETRFRKDYCKWAEKKGYRNRERMAALIFATAQNGIPVLPNAPSTQIVITEAIRVLHTVEASRDAILTQMQALAKTLPEYSLVREMPCIGDTLAPRLIAEIGDVRRFHSKRALIAYAGIDAPPYQSGKFCANNRHISKRGNRYLRKTGYEVMQSYVMHKPANDPIFTFIEKKRGEGKSGKLAMVAGLNKFLRVYYGKVTELYRSLPAIE

SEQ ID NO: 479083 - protein, 419 aa, unidentified
MTRRDDSRIIRIVHPICCGLDVHKESVSACVIFPDDKGEEQYDVKVFGTFTDDLMRLRDWLAEHNCPVVAMESTGVYWRPVHNVLEDSVDVVLANARDMHNVSGRKTDIGDSKWIAGLLRHGLLKSSFIPPQDVRQWRDLTRLRKKYVHTVGDYRKRTHKLFESANIKIDSVVSDLFGVTGRNLMQLLVADREQLTLSDIQTCVRGKLKGKEAELFRSIQGFFTDHHRFVLKMILETIATLEAQIAELDLQLRCAMKAHDALLDRMKQAPGIADVASREILAEIGPTLDSFPKDTSLVAWCGLCPGNNESAGKRKSGRSPVRKNHLKTIMTEVAWAAIKKKDSYFKDKYYRLKARRGAKRAIVAIAHRILLGIYHVIKDGADFRDLGGDYLTLRNKSQKVFHLRKQALSLGFDLVPQAV

SEQ ID NO: 479084 - protein, 448 aa, unidentified
MTATSVLAVLDPLAAFVDVGSEHMHVSIAGGPPEVFGTVTGELHRLRDWLQERGVKSVAMEATGVYWLPLYGVLEAAGFQVSMVNGKQTRNLPGRKTDMKDCQWGATLQAHGLLQAGFVPPAQIRRLQDYLRLRADHLSSAAACVQHQQKALERMNVKLHDVISSLVGESGIRVIQAILAGERSPERLLALCDVRIQNKKAQRVKESLRGTWAEEHLFALRQAVENWQHYQGQIAACDRQIEAVLREMSALDQPHDKEVKTSPLKRTGANAPQIEGLHKILAKLCGGKDLTVLPAHTDYSLLQLIGEVGTDLGKWPTEQHFTAWLGLAPGSHQSGKRNGSVRRKRNRAGRLFCLMARSLARSKNIALGGFYRRLAARRGGLVANLALARKLAALFWRVMVKGLDYAESGLKAYEEQVLETKRRALCHLAKQLGRVVLPSLAELQTVKN

SEQ ID NO: 479085 - protein, 300 aa, unidentified
MKDIKILGVDIAKDVFQLCGIDEWGKVIYTRRVKRAQYVSTVASLKVGCVVMEACGGANHWYRTFMGMGIPTQLISPQHVKPYVKSNKNDRNDAQAIAEAASRASMRFVQGKTVEQQDVQALLKIRDRLVKSRTALINEIRGLLQEYGLTMARGAKRFYEELPLILASEAVGLTPRMKRVLNCLYTELLNRDEAIGDYEEELKAVAKANEDCQRVQSIPGVGYLTALSVYASVGDIHQFHRSRQLSAFIGLVPRQHSSGNKEVLLGISKRGNVMLRTLLIHGARALLRHVKIKRIKRVCG

SEQ ID NO: 479086 - protein, 359 aa, unidentified
MQSNKKNFKGQKIFVGIDVHKKTWEVAILTESGVLKRHPQEASAKVLFDFLRKHYPDGEYHAVYESGFSGFSTYYALKEYGINCIVIHAADVPVTQYESIMKTDRVDAERLVRALKKGEILRPVYIRERDNIDDRGVIRIRRTIQKQLSGYKARVKHMLHCNGVELPKRFSTPTNYWSRAFITWLMQDVKLLSSTRTSLNLLIRQVETIRGTLLEATREIRKLSQTERYKHRLELLMTIPGIGQNVAMCILTEVWDVKRFSNEKKFAHYLGLIPTCHDTGEHKSDGMKTFRGNKHLGPMIIEACWVAIYKDMGLGACYADYKKVMKPQKAIVKVARKMSNIIYSVLKHDKPYEPYQWDK

SEQ ID NO: 479087 - protein, 399 aa, unidentified
MSKNDCKYFIGIDISKESFDASCIDGDGEKIFHISTSMNRAGFQELSRKLTSLFCPRESILVGMESTACYHINLYSFLIASGYAVMVINPVLIANFVKLQLRKTKTDKKDAFVIAQFLLMNKASLCQNDVSAEITDLKDLVRQRESIVDQITALKAEIKRVLTITFPELEHTACIFSKSMLRLLQEYPSAYAIRNTKRSKIEKILIPGSMGKQTTESVERIKKAAETSIGTSSPARELILKQKASLLVHMEENLQELTDILVEICQSKMQEDMNILTSLPGIGNKTAMNFLIEMGGGIAPYQSHKKLIAMAGIDPAIYQSGKVDRSGRISKRGNRHLRRVIWLMTVKVIQFTERFKQYHEKRRQDGLPYKKAVLATAHKLIRVLFTMLKNRTLFNASMS

SEQ ID NO: 479088 - protein, 339 aa, unidentified
MKYIPVGVDIAKHLIQVHFVNEHSGEVVDKQLRSKDFLTFFSNREPCLIGMEACGGSQHWARELEKLGHKVRLMQGRFVKAFVMGNKNDVMDARAIWMAVQQPGKAVAVKTEEQQSILVLHRSRRQLVKFRTAQINALHGTLLEFGETIHKGRAAMDRELPAALERLKTKLPPYLITVLEDQYHRLNELDMLIDGLEKQLSSVARQNESCKRLMEIPGVGPLIATAAVATMGEASAFKSGREFAAYVGLVPKQAGSGGKVRLLGISKRGDTYLRTLFIHGARAAALLTKEPGLWITELKKRRPTGVVIVAMANKLARTVWAIAAHDRKYDKNYVSIRPY

SEQ ID NO: 479089 - protein, 460 aa, unidentified
MKRKQKRLPQPADLEALEQINLDAAGIDVGAEEIYVAVPKGRDEQSVRAFRTFTADLERLAEWLAHCRVTTVAMESTGVYWIPLFELLERRGFEVYLVNARHLKNVAGRKSDVLDCQWIQRLHTAGLLQASFRPSEALCALRALVRQREMLVRYRAAHIQHMQKALQLMNVQLTRVLSDITGVTGMKIIRAMVAGERDGQALAAYRDERCKHSEADIVAALQGHYRREHLFALQQALSLYDIYDCKIRECDAELEALYRDLQAPEGGDGPLTRPPAPRSAKARKNQAHFDLAASLYAVAGVDLTQIDGLDALTAQVILSEIGTDMSKWPTVKHFASWLGLCPQHQITGGKIKQRGTAKNQNRASTALRVAAQALWHSQSANGAYYRRIRAKHGPAIATTATAHRLARTIYHMLKNRVDYVDPGAEAYERRHRDRILQSLKKRAAHLGFTLTPMPNAAAVS

SEQ ID NO: 479090 - protein, 397 aa, unidentified
MIAVGIDISKGKSMVAILNHDGSVRAQPYEMHHSKPELDALIKYIKTVDDHPVVLMEATGHYHYPVLNAFLSADIAPSLINPYLMKKYGDNELRKAKTDKKDALRIAHYALEKWYSLIPYSPMDQKYEDLRFLSSQYRQRIAMVTKSKNQLINLLDEAMPGITNILALKSRTPEKCMLLQFIKRFHSFDYINEIGKTRFMNSYATLARKVGERNAAAKGLAIYELSRSSITTRSNNDYMAAALDQCVDILSGAQCAADDIILQMQNIAETIPEYKVLRSMHGVGDRLGPVILAEIGDVRRFHSGKALNAYAGNDAPPYQSGQFESRNRHISKRGNSALRKACFEVMQALKLTKPQDDPVYLFLLKKEQEGKPYNVAKMAAVNKFLRIYYARAMELYK

SEQ ID NO: 479091 - protein, 364 aa, unidentified
MLIIGCDYHPGFQQIACVDTDGGAWSERRLAHREQAEQFYRELKQQDLCVRVGMESSGHSRWFERFLQELGFELWIGDPAEIQTRRVRKQKTDRQDAQLLLRLMLENRFPRIWVPDAENRDLRQLLWHRHRLVQMRTRVMNQLHVIPLNEGLRRKKALWRPAGRKELESIALAPWASRRRQDLLELLDQLTPQIEELTRALEEEVEKRPVTRLLMTHPGVGPLTALAYELVIGTPERFHCGKQLASYVGLVPEEKSSGDRRRLGHISKQGNVLLRFLLVEAAQVTVRSQQEWRNKFFHLAMRRGRKIAKVAMARKLAVHLYWMWRQGCDYGQTQKLGSHAGEPGNLDGVQSITDVMIGHPAPTK

SEQ ID NO: 479092 - protein, 401 aa, unidentified
MSKKNTRNALDTSLSYAVIGLDLAKADCAVAAVPCSDDELGLIDRMDYESLFEQAEKLGPTLFAMEPCCGYSQISLRLQNMGHEVKVISGHAVKNWIATHKSNQKTDLNDATALAKLALYDHDLQPIRVKNVEECRIASVQAIRIQLRTQATKSLVCFKSLCQCWGIVIRRGSLNTKKMAEAVAAVEKLLGAEVVSSLMILRDAYKFTMKQINALDKLLDALVEANEQARTMKTVLGIGTQTAARLAVTTGDIKRFPMPRSYVAYFGLALRNIITGHSGTPSPSKRGALKPVSSRGQGKVSRRGDRVARSFIIQGAATIYMLYCKDMLPECQLRRWLHEQIMRGKPYGKIIVSLAAKLLRIVWTLLTYGEKFDSHKAGVPRSVLAAMEKPLKHDAAAESAA

SEQ ID NO: 479093 - protein, 343 aa, unidentified
MQAITTIGLDIAKSVFQVHGVDPDGHVVVRRQLKRRYVLAFFEKLAPCLIGIEACASSHHWSRQLQALGHDVRLMPPSYVKPYVKRQKNDGTDAEAICEAVSRANMRFVPTKTPEQQSGLVLHRTRHLCIRQQTSVINAIRAHCAEFGIVAPVGRRGIEELLNVIANANDEQVPEIARACLSALGDQLHRIKAQILAFDRMIGAWHRSCAASKRLDEIPGVGPALATALVASIADPRTFRSGRDFAAWIGLVPKQSSSGGKPRLGSISKQGDRYLRGLFTAGALAVIRYAKIHRIGHRPWLTALLARRPTKVAAIALANKIARMAWAMMARGERYREPAALAA

SEQ ID NO: 479094 - protein, 668 aa, unidentified
MKNLSFRYYNFVKCFRACLLIAMTGLVFSCAADISEEKETRHRITYELNGGYWSEGYSAPQTFTENASVVLPSVSDISKEYYSFGGWYTDESLKNWVSGTQLADLTQDVKLYAKWVDTIETYWATVPDVIKSMKENAKITILMDANADSVEVFSEVAQALRDLSRCVPDVEVELVFHRLEDVNEVWNIPQNCFWDVSNLTGIAISVEEIGEGAFQGCSKLRKARIGYPKKIGKNAFDCCTSLSEMDFVLSDVYCDVGDFAFRQYVVSPDFAKTWILLQNGDKAITQKEALPKCKRRHNMESIIYVGMDVHKDTYSICCYDPKTDRYLYEHKMKSTTANVLKYLDNVRKQLVDVSFICGYEAGPTGFGLCRDLLKKDIACVVMAPTSLRRSSCHKVKNDKVDARLLAKDLFTHDYSPVHISSQKEESIKEFCRMRRSLMTEVKTAKQILTAFLLRQGKHYEGKTHWTEAHRKWLKELAFDQPYLQEAFEEYIIGLNSLETRLKRVEKRLDEIADDEEVGAKVKKLICFCGIDTLTAVSIVSEVGDFMRFGRAWDFSNFVGLTVGEDSSGQREKKLGITKSGNCYLRRLFIESAKSIKRTNVKFSKSKRLLARQEGNDPKVIAYADKCRYRLKHKMLNLENRGKAANVASTAAARELACFVWGMMTDNIA

SEQ ID NO: 479095 - protein, 388 aa, unidentified
MRAEPDARPHPTCFGVGCPAILNNSGAWYPSQLMYCPPIGPVTQHPQGRQAQPHRRRRRRTRSQAGRTQCHALSSAHLALLERAERRGCTRLWAVEDCRHLSRRLERDLLGAREPVVRVPAKLMAHSRDSARTFGKSDSIDALAVARTALREPHLPTAHLDGPDREIRLLLAHREALVAERTRVVNRLRWHLHEIDPSWEPPARGLRHVKHLDAVDGWLDAVPGLVARLARELVARCRAITARVNDLETEIQLLIAPLSPALLAVHGCGVLSAAKIIGETAGLQRFHSKDAFARHKGTAPLPVWSANCVRHRLSRMGNRQLNAALHRIALTQARHSPRAREYLARRRAAGSSTKEAMRCLKRTLSDIVYRALVADHDSRESAPLSLVA

SEQ ID NO: 479096 - protein, 462 aa, unidentified
MKNSTAKKRKQVPAGYLVVGVDPHKKKHAAVFVTQDFMTHSKLKFHNSREGFEAVLERARTEMLKTECRGVIFAIETGAHHWRNLAYFLDEKGIPLRLINQFTLKRRREGKDLNHRKNDYRDSEVAAQLLCTGEFNAARLSQGVYAELRAAYGSYRRLVKEKTRIVNLVKSLLDGLFPEFTQVFKNPCGQTAASVLCTCAVPQAIADMTESEFVDAIKAACQGRRIMKGKIKALHHVAMTSIGIGAGAQSVSSEIAFLIEKLRLIEQQLRQINEALTRLVHETVEGKYLLSIIGLSYVSVAGIIAELGSFSSYQSAKQLIKMAGSNPTESESGGKRRSHTPISKQGRPVLRHCAWTAVIPMLRFNTDFRDWAKKLRERPAGANPLSGREVMVAAVNKLLRLAFALVKKQEFYLIPESQPVEITIEEVSNTSGGQGNTERSFGSSYEPTRQKTWCPALLAKPV

SEQ ID NO: 479097 - protein, 354 aa, unidentified
MSSRQSGQIAVIGIDIGKNFFHVVGLDKRGTIILRQKWSRTQVEARFANMPPCLIGMEACIGAHYLSRKLKCFGHDARLMPAKYVRPYSKGQKNDFRDAEAIAEAVQRPTMKFVATKTSEQLDLQALHRVRERLVSQRTGIINQIRAFLLERGFAVRQGQRFLRAELPRILGTSSADLSPNMAQIIEDLAGDWRRLDERIDRLSADIEALARQDAGCERLMSVPGVGPIISSAMVAAIGAGEVFTKGRDFAAWLGLVPKQISTGDRTILGKISKRGNRYLRVLFVQAAWVVVVKPKIWERHGLKPWIEAATKRLHHNVLAIALANKLARIAWSVLARGRNFEARTITAANAYST

SEQ ID NO: 479098 - protein, 410 aa, unidentified
MEVIHKKCAGLDVHKKVVVAAILVEGRPKEIRSFGTMTADLLELSDWLIDCGVTHLAMESTGEYWKPIFNILENNFEVMLVNAQHISKVPGRKTDVSDAEWIADLLRHGLLTASFIPPVGQRELRELTRFRSTFVKERATHVNRVQKVLESANIKLASVASNVMGVSGRAILEPIVAGTATPEQMAELSKGRLRNKREELSRALEGRVKPHHRFVLTELLSQIDSLEETIARFNQEIEEYCRPFEEVVVLLDTIPGVARETAENIVAEIGTDMSRFPTANHLASWAGVCPGNNESAGKKHAGKAKKGNKPLGVTLTQAAHAATHTKNTYLSAQYHRLAGRRGKKRALKAVAHSILVISYYMIQRHIPYFELGSDYFDKRRPETTAKRLISRLEHLGYQVSLQQTAIPVSL

SEQ ID NO: 479099 - protein, 420 aa, unidentified
MYKDTMPQELSAFRKEWRMWYAGIDWADTHHDALVIDESGQQVSSLRVSHTPEGVSHLISFLSSMVPTKEQMACIIETNHGLLIAALLEAGFAVYPVNPKTVDRRRGASGAKTDAIDAYLLAKTGRADLADLRQLKPDSPVVAELKALTRDQDALIQSQTRLVNQLTACLKAYYPVALQLFTKLHQASTLKFLQTYPTPQAAQAASVEQLTTVLKATRHPTPAKTAQHIWHMLQQPQLQADAITTHTKSRLMLALIAQLSPLIEQIAAYDKEISTVFLLHAEQEVFRSLPGAGKRVAPRLLVEWGDDRERYSDANSVQALAGTSPVAYESGNYSKPHKRYACIKPLRNALQQFAWQSTKQEAWALAYYQRKRNEGKSHSMALRALANVWVRILYAMWLNHTCYDGATFEAAQRAHAKLAA

SEQ ID NO: 479100 - protein, 391 aa, unidentified
MVCVGIDVAKDKHDCCILDSDGTIRADCITIPNNMDGFKQLLQTIRDCTKKSDKIKVGLEATGHYSYNILGFLLDNDLAVYVMNPLHTNLYRKSLSLRKTKTDRVDARTIATMLLSDVDLKSYTDIAYHNEELKSLTRYRFDKVQECAKLKQSVSRLATILFPELEGLVSSIHGTSIYALLSEYPGAKQISEVHLTKLTNLLTTASKGRYGKEKAIQIREAARASIGSVIPAKSLELKHTIKLIQELASEIDEIEDSIQKIIDELNPPILSIPGMGVNSAAVILAEIGDFSNFSSPDKILAYAGCSPSTYQSGKLTNCYAHMEKRGSRYLRHALYNATKYVCYWNPVFAEYLAKKRAEGKHYNVALSHAMKKLVRLIYALQKSGKTYLTAA

SEQ ID NO: 479101 - protein, 424 aa, unidentified
MNPSILCVGADVHLKEIVLRAVDKLTSDEVIAPFRVTNNLPGAEAAAVQLVEVATSLNYNCIQIGYEATGMLWIPFHRFLKTSQLLDPFELQQVCFNPKLVADFKDALVLRGPKDDDRDAFDVAARVQFGHWPTSYVPDDFWQGLRRLTRYRFQLSRTLSREKMRFQSYAFLKCSDWKRIKPFADLFGATSAALLTQFTAAQLREMSHTQLADLIAQRGHGRFYDPGTTARTVQRALDTSYPIEPQMDDMITATLATGWEHIRAVKRLIKRLDQQIARCIDPIPNPIITVKGLGPVITAGLLAEIVDIDRFPEHKHLAQYFGISWAKRSSGGFVSQNTRMTKVGNPYGRYYFVLGADRLRQFNLEYKAFYWRKYHEVAKYQHKRALVLSARKLVRLVHALLTKNVPYVRPQMATDPVEDDHLLQ

SEQ ID NO: 479102 - protein, 326 aa, unidentified
MKHSEQKHYIGVDICKAKLDLASPGHGLVKSLKNTPKGIGELFKLLEPLSGTVHLVCEPTGGYEKLLLAAAFERGVAISMVNALRVRSFAVAQGRLAKTDEIDAGVIAEFGRIFQPHPAKRPCKRRLALSAVVRHREGLVRQLAREKTILQKTTESFVKQELRASMGFLTRHIAKCEGRLDSLIRADDKLQAKRERIEQVKGVGSTTSTLMIAELPELGSLTNAQIASLVGVAPMNNDSGSRRGQRTIRAGRARVRRGLFMPALCAIRHNPILREFYQGLIARHKPAHVALTAVMRKLVCLLNRLLADPEFKLHPDGCSHQVAEQS

SEQ ID NO: 479103 - protein, 346 aa, unidentified
MMIIGCDYHPSWQQICWVDTVTGETQEKKLEHASGEAERFYRQLASPALIGMESTGNCQWFVEMATTLGHNVWIGDAAKIRASEVRQQKHDRRDAALILKLLREGRFPRIWTPSGPEKDLRQLLIHRYKLVRIRAQVKNELQHLAMNQGVTKKQRLWSKAGEKTLRELPLKPWAGRRREDLYKVREMLNGQIDLLYRAVVEVAEKNEKARLLMTQPGVGSITSMAFVLTMGDVNRFQRGKQVASYLGLIPREYSSGGHQRFGSISKQGNRFMRMLLVEAAQTAVRCDPGFRDEYRHRCHRKAKGVAKVAAARKLAVRLYWMLRTNRGYPEVVRVESSPRVPVVSAS

SEQ ID NO: 479104 - protein, 425 aa, unidentified
MQAMKTHVAGVDVHKEILAITVLIGSADEEPREEQFECSTFTSDLKACGLKLKDLGVTDVAMESTGIYWKPVFNVWNALGLKVIVGNASHIKNVPGRKTDMNDSRWIAELHRYGLIRPSFIPDGEFQRIRLLSRHRTNLTEDLSRVKNRVQKVLEDGNIKLGSVVSDVFGVSGRQVLEQIAKGYTHPDVLMTAVTTKIKRMEDIKKALTHCLTDEHCFVIAQLMRQVEDLESRIKDVDEELLKRVEPYAHLVKKLDEIPGIDKILAIGIIAEASADMSSFPSDRHFAAWAGVASGNNESAGKKKRTRRRHGNPHLQKLLIQATQGAIHSKKSFYRAKYNKLAFRLGSKNKAKVAIANKLARVVYMVLKGADYKDLGYMRGDPREEKIKKHFAALRALGVEIQGHTHQFIQAKRKVKVDDTGIHLQ

SEQ ID NO: 479105 - protein, 375 aa, unidentified
MTMMHHRQIRYIGLDVHKATISAAIAEESGAPTSYGRIPNDPAAIRTLMTRLGSPQVELRVAYEAGPTGYALHRQLAKMAIDCMVVAPSLIPKQAGNKVKTDRRDALKLARLLRSGDLTPVWVPDEAHEALRGLVRARADAKADQLRAKHRLSKFLLRQGCWPPSGVRNWSKRYFTWLHQLEFEHLPDRVVFADYLAEVTAEGERIKRLEAALHQCAQSSSQVALIRALQAFRGIAFLSAVTLVAEAGDLRRFRTAPQFMAYAGLVPSESSSGGKQQRGSITKTGNSLLRHVLGEAAHHARHAPRVTTKVKQRQTDLPAEIVELAWRAQVRLHTRYRHLSGRIGALKALTAIARELAGFVWAAGQIFQKEVPTAA

SEQ ID NO: 479106 - protein, 354 aa, unidentified
MMIIGCDYHPGFQQIAWLDTETGELRERRLGHREEAEKFYRELGAQGVSVRVGMEASGHARWFERLLGELQFELWIGDAAEIRTKRVRKQKTDRQDAQLILKLMLKDDFPQIWVPSGENRDLRQLLWHRHRMVQARTRIMNQLQAVALNEGLRCKKKLWRDAGREQLESFRLAPWASRRRRDLLELLDRLTPTIAELTQAVEQEAEKCPEAQRLRTHPGVGALTALAFVLIIGRAERFQCGKQIASYLGLVPLEESSGERRRLGHITKQGNSLLRFLLVEAAQVTVRSDPAWRSKYFHLAMRRGRKIAKVAMARRLAVRLYWMWRKGWDYEQMTKFSSHAGQPGHRDGVQQNTE

SEQ ID NO: 479107 - protein, 391 aa, unidentified
MTILVGIDVAKDKHDCFIMNSEGEVLAKSFTILNNKEGFDFLYKKIQSVSSSDKIKVGLEATGHYSYNIIGFLLNKDLATFILNPLHTNLYRKSLSLRKTKTDKIDSKTIAMMLLSEVSLKSYSDISYHNEDLKSLTRYRFSKVEERAKLKTSLSRLAQILFPELEKLVPTLHMTSIYQLLEEFPSASAIASVHLTRLTNLLSKASKGHYDRETAIKIRDAAKNSIGSNMPAKSLELKHTIKLICALTIDIDEIEAEISKMMDKIASPITTIPGIGRNMGAMIISEIGDFSRFSSPDKILAYAGFSPSIYQSGKLDNCYAHMEKRGSHYLRYALFQATQRVCHLDSTFSAYLAKKRAEGKHYYVAISHAVKKLVRVIFHLEKTKQAFLKAS

SEQ ID NO: 479108 - protein, 391 aa, unidentified
MIFVGIDVAKDKHDCFILNSEGTVLADVFTIANNRIGFETLLSRIQSCSQGESKIKVGLEATGHYSYNLLGFLLDSGLATYVINPLHTNLYRKSLSLRRTKTDRIDARTIAMMLMSDVDLKSYSNTAYHNEELKSLTRYRFDKVKERAKLKSSVARLVNILFPELEKLVSSLHIAVVYALLSNYPGASYIANANTEELAETLCTASKGRYTKSKTAEIQVAAGVSIGSKMPAKSMELKHTIALIRELDKEISEVESAIDKITSQMDSPIFTIPGIGRHMGAMILAEVGDFSNFANADKLLAYAGLSPSTYQSGQLQNCYAHMEKRGSRYLRYALFNAAKYVCLWCPTFSAYLEKKRSEGKHYNVAISHAAKKLVRLIFAMQRSGKAFLADY

SEQ ID NO: 479109 - protein, 345 aa, unidentified
METMYYIGLDVHKKTISYCVKDGSGRIYAEGSLPATRLHLDIWMKTLPKPWTVAMEATIFTAWIYDHLKPHAAAVKVAHPLMLRAIAVAKKKNDRIDAKKIADCLRCDFLPECYMASTEIRERRRTLRYRNLLVRQTVQMKNKIAVLLMEAGVSYNKQKLHKVGYFRELLATNQDIDEGLKPLLRLCREMVVRLGKTESALVRSLQRDSLLVERVERLMTIPAVGPITALTWALEVGDVQRFSSIKKAISYCGLCGAEKSSANITMRTPLSKQRNKHLQTVLIEAAKMAPRNSPELAMVYEQEKQKGNANRATLAVARKMVAYLVAVDRRQKGFLVVEKQNRTAA

SEQ ID NO: 479110 - protein, 331 aa, unidentified
MNTLMMPAAAARFNHVIAFDVAKATLSLHILPSGETLCLQNDGAAVRRLLKREQKRNRKHGLGSMLVICEATGGYEHAVLKAASELGLDCHLAHGSSVRAYAKFRGRHAKSDPIDAVLIAEYGRDKPDLKLYQPPRPEEAALRALMGRRAELKDMIQAETSRLEHAFLKAVRLSLESHLAALKGQLALVEKEIRALTRRDEAFNHKSRLMQTLAGIGAVASQTILAFFPEIGHIPSPAAVALAGLAPYDRDSGKERGKRRIFAGRSQIRTCLYMAALAAIRSHPVFRDFAERLTRRGKPFKVAITAVMRKLVVILSAMLRNNQPWKHADAA

SEQ ID NO: 479111 - protein, 416 aa, unidentified
MSPRSEQPFTAYVGIDWADTKHDICVQAAGDTRREFGCIAHQVAAIDEWANALHRRFGGPVAVAVELAKGPIVAALQKYDFLVLFPINPATLAKYREAFQPSGAKDDPADAELALDLLLHHPERFSALRPQSAAMRSLVSLVERRRQLVGDQNRLTNRLCDTLKQYYPQVLEWFDDRGTVLFCDFLERWPTLRSVRQARTATLEVFFHAHHCRSSRRISARIESIRGATALTDDLAVIGPCRLHMLALVTQLRAVLAAIVQFDREIAAVARTLPDYALFESLPGAGAQLAPRLLAAFGEQRERFRSAEEVQRYAGIAPVTERSGKKRWVHWRLKCPKFLRQTFVEWAAQTVNRSFWAGAYYRQQRAKGSSHQAAVRALAFKWIRILYRCWQTRTPYSSAFCMRCTQLACSASSTSR

SEQ ID NO: 479112 - protein, 355 aa, unidentified
MSQEKYIGMDVHQATISVAVMDAQGKLIMECLLETKAATIVEFIQGVQGTLSLTFEEGTSAAWLHDLLKPHVSRLVVCDPRKAALLKDGNKSDRIDARKLAELLRTNQLKPVYHGEHGVRTLKELGRSYLTLTKDVTRVMNRIKALYRSWAIPCSGTTVYAPRHRAEWLAKIGEPGVRVRAERLYQQLDGLQPVRQAARHDLLSESHKHPAVKLLRQIPSIGPIRAALLVALLQTPHRFRTKRQLWAYSGFAVETHDSGEYRCVRGKLQRNRERITVRGLSDNYNKDLKNLFKGAAISASTRPGPLHDFYAARIAQGMRPTMARLTLARKMAAITLTMWKKGVGFDPQQLHRQAA

SEQ ID NO: 479113 - protein, 388 aa, unidentified
MPAAETPVAYLGIDVGKSSHSACALDAGGGVAFRAELANRPDDIDRLLERAGSGALVVVDQKRNIGALVLARAHAHGNPCAYLPGYAEKQARGMFPGTAKTDAIDAEVIARTALGVPRALRPAPEEPEGAASLRILSSQREFASSARTRAKNRLRATLLEADPALEGAVDPSSRWQVSMLAEFGGAAGCSAAGWRRFSNAARRAGAPAAGARRLWEALLASSRSGRRLPAGEDVAVRMLAREIASLDADIEELDSLVADSLAGDEVYECLLTVPGIGPKTAAALVTSIDISAFRGHDELASYCGVAPSDRRSGSSIRSTSSQRGGNRQLKNLLIFSCNSLIGTDNRFGRYYGECRARGMRHSKALKAVARKRLKVIYAIMRDAVPYAA

SEQ ID NO: 479114 - protein, 400 aa, unidentified
MENIYVGIDVSKYKFDTCIKNEINELLMKARTYDQSKDGMERFTKDLKEITNQNNILIGLEASGKYHRNLMHYLLKQNLRVREFNPLEISALRKGRIRKTKTDKIDAEVIADAVRWDVKTNTERYLADEEYLKMKEMSSIYNRVVSKITDLKIELHLALSSLCPGYDSLFSNILSSTSVEILKRSMKQTRLFQISEKEIIKILDRNYSNGTDIGKLARDIRDTFNNSTCPDYAKEALVTDVKFILMQYDTLKKQKQQIEKKIKRSVQKINPESLSIPGVGETTCSIILGSLGNVKRFRDGKAITGYAGLDPIVTQSGKSVNRTGHISKRGNKYLRTALINAALVGIRCNPVLKARYHHLRNKGKSHLEALVACARKLLLIIYSVEKNGKRFYVPSYIQNQ

SEQ ID NO: 479115 - protein, 341 aa, unidentified
MNDVTLVGIDLGKHSFHLHGQDAKGNAVFRKKMSRKQLVEFFATFHACTVVMEACAGSHYMARKLAEFGHTVRLISPQFVRPFVKSNKNDFVDAEAICEASSRPAMRFVSPKTESQQTLSVLHRVRESMVRERTKAVNQMHGFLLEFGISLPVGKATVTRLPAVLAMQELPPRLIAILERLHQHFKYLAEQISEIDQELARQLAEDEVGQRLMSIPGVGPVTASALAAKMGDAKQYGCSRDFAASVGLVPRQYSTGGKNNLLGISRRGDKNVRRLLVLCARAYMRGLEKRTGRLADWVRAMLAQRHSNVVACALANKLARTAWAIVARQTTFDAGFSSHPL

SEQ ID NO: 479116 - protein, 343 aa, unidentified
MDHFAGLDVSVKETSVCIVDDTGKIVREVKVPSEPKALLKVLTNPAYRFKRIGLEAGPLSQWLLSALAEAGSPVICVETRHMRAVLQAQINKTDRNDARGIAQMMRVGLYRPVHVKTLRSQKLRMLLTHRKLLQSKAIAVDNDLRGTLRNFGLKVGIAGKAKFEARIKELVENYPDLAVLVEPLLIVRRVLREQVVILHRRLLAIVRDDEVCRRLMTVPGVGPVVALTYRATIDVPARFRKSKAVGAVFGLTCSKYQSGEINRTGAISRCGDDMMRMMLYEAAQSMLVRSTRWSWLKAWAMQIARRRGMKKAIVALARRLAVIMHRLWIDGTEFRWTREVAAA

SEQ ID NO: 479117 - protein, 347 aa, unidentified
MDDHNKTGSITVVGIDLAKNVFHLHGIDASGNVVVRKKLSRTKLATFMAKLPACRVGMEACGGSHFWARKFVAMGHDVRMMGPQFVKPYVKSNKNDLVDAEAICEAVQRRTMRFVPGKGVEQQDIQSLHRARSMAVSHRTAQVNQIRGLLMEYGIVVPQKIANLRKALPWILEDGENELSPMFRDLLTGLRDEFVRLDERIAGYDAKIRGLSEQSQLCKRLMGIPGVGPMSATALVAAVADASVFKSGREMAAWLGLVPRQYSTGGKPKLLGISKRGDVYLRKLLVHGARAALRVADKKQDRRSRWALEVADRRGHNIAAVALANKNVRTAWALLSRGEEYKTIAIL

SEQ ID NO: 479118 - protein, 419 aa, unidentified
MTRKDDSRIIRIVHPICCGLDVHKESVSACVIFPDSNGEEQHEIKVFGTFTDDLKQLRQWLLDHECPVVAMESTGVYWRPVHNVLEQTVQVVLANARNMKNVSGRKTDIGDSRWIAGLLRHGLLKASFIPPMTVRQWRELTRLRKKYVQSVGDYRKRTHKLFESANIKIDSVVSDLFGVTGRNLMKLLIVDRELTLTDIEACIRGKLKGKEVELFRSIQGFFMGHHRFILKTLLGTIANLEGQIEALEQRIRSLMKDQSDLLDRMKKAPGISDVSACDILAEIGPTLDSFPTDTALVSWSGLCPGNNESAGKRKSGRSPVRKHHLKTIMIEVAWAAIKKKGSYFKDKYYRLKARRGAKKAIVAIAHRILLGVYHVIKDGAEFRDLGEDYLTLRNKEKKVLYLQKQALALGFNLIPQTIQ

SEQ ID NO: 479119 - protein, 340 aa, unidentified
MKTKTFVGVDYHKAFSYGTIMTQAGQILKQGRFANHPRAVAGFLGEYAGEDCSAVLEATRNWCVMHDWLEDLTGQVTLAHPLKVRAIAEAKIKTDKIDATTLAHLLRSDLVPAAHVASPQARILKRLLRHRMFLVRVQTMVKNRIHTLLDRYPLIRAERKASELFTKMGIAWMRRVQVDKHDRFILDGELTFLEHLQEQIRQSDRYLAKVGRRDRRVRLLETIPGIGRAFALLLVSEIDDIRRFRKPKALHAYAGLVPSTYSSGGRTFHGRITRQGNKYIRWAMVEAVWPAIQKDVALNELYYRLSARKGANCAKVATAKRLLTIVYRVLSENREYRDGQ

SEQ ID NO: 479120 - protein, 369 aa, unidentified
MKKIIKYIGLDVHKNSIAIAIAEDGQKRDVTFYGEINNDMDQLHKFLRKQISQGVEPRCVYEAWPCGYNIYRSLKDKGIDCVVIAPSLIPKKSGDRIKTDRRDAESLAKLHRAEELTAVYVPSMEDEALRDLVRAREDSVNTLKRAKQQLGAFLLRHNVCYSGKSKWSKAYFNWLADISMPHPAQQITLQEYIDMVQDDKKRVERISEQIKQLAEQTQLIELNKSLQSLRGVSQIVSAVVLSELGDLTRFESPGKLMAYLGLVPTQHNSGDKKRPGKITKTGNGHVRRALIEAAQAYRLPARKSRAIAKRNEGLPQEICKIAWQAQVRLCGRYKRMIFRGKNSNLVKTAIARELAGFMWAIAHAIPKTA

SEQ ID NO: 479121 - protein, 375 aa, unidentified
MNQFIKYVGLDTHKDTIAVAIADAAGGKPRYYGEIANTPTALTKLMKDVSPNGEVVSYCYEAGPCGYGIYRQISDSGHDCAVVAPSLIPTKPGDRVKTDRRDSENLARLHRAGELTPVWVPDQEQEAMRDLTRAREDMKHLERQARQRLCAFLLRHGQRYDSGKSKWTLTYWRWLERIKFGHRVQQTVFQEYIDSVKQQQQRVADLEQAMHEALADWALAPVVEGLMALRGCRLITAMTVVAEIGDITRFDSPRQLMSYLGLVPSESSSGPKTRRGGITKTGNGHVRRVLVEAAWCYRFPARKTAPLQRRAEQTSEEVQAIAWKAQKRLCGRYQTLSKRGLLPQKISIAIARELTGFIWAIACEVMPMNATEANG

SEQ ID NO: 479122 - protein, 351 aa, unidentified
MDHIGIDVHKRESQIYILAEGGEVIERRIRTEPERFDAMLGTRSRARIVIEASTDSEWVARCLEGLGHEVIVADPNFAPMYATRTRKVKTDRRDARALAEACLLGNYRPAHRLSDPQRHVRGRLLVRDALVRTRTRYISVIRALLRQHGYRVPSGGAEHFVHRVQGLPLPGRLRSVVAPLLALMRPLNAQLTYSDSTIEHLAVQDPRVPRLRSVPSIGPVTAAAFLAAIDDAQRFRRAHQLEAYLGLVPGEHSSGETQRRGAITKAGHSRTRWLLIQAAVSILRRRPPQAEELRTWAVRIAARRGKQVAVVALARRLAGILYALLRDGSVFEPQRVRHPHRPAAEAAAPRM

SEQ ID NO: 479123 - protein, 475 aa, unidentified
MAARKNDNAKVSGAAGQHGGDGAEVTEERVEVVTYAAAVDVAKGFGMVCTRVPGSRADRKRQKVWRAEAPYGSVVALMDHLRCEGIQRLVLESTSDYWRIWYYLAEAAGLQVWLVNARDVKHLPGRGKSDREDSVWLCKLNERGMLRRSFVPPEGIRDLRSLTRTRSRLAQDQARHRSRVEKILEDALLKISVVISDLFGTSGRRFPGALVAGQRSPKALAALGDYRLKASTAGLEAALTGRFREVHAFEIATHLRLIDAINAEIARLDARIEQQLASIPGVAPACGDCGLIGGGHSPGCASDGTPVLGLVERLDEVTGVGVRNAQVTIAELGTDMSVFPTPGHAAAWARLTSRTLQSGTTTKNGRTGKGNPYLRGALGQSVMAAAKTDTRLGEQYRRIARRRGKQKAIVAVSRVICEISAILIADPGARFTDPGADYYSRVNPARQTRSKIRDLERLNPGMKVTLTPVETATTA

SEQ ID NO: 479124 - protein, 387 aa, unidentified
MIYVGIDIAKQKHFAAAMTADGEVLISPFGFTNDAEGFNLFLSKIKSFEKSDTLIGLESTSHYAENLICHLFDLGYRISVINPIQTSTLRKTNIRKTKTDKVDCLLIIKSMIVNKPRPYSKTDIDSLRLKSLCRFREKIKKSKTRLKIQLVTYVDVIFPELQYFFKSGIHANTCYQLLKKRSSPDDIAALHLTYLANLLQKASHGRFGKEEAIALKGLAKSSVGTGNTAVSIQITQSIAQIELLEQQLAELDETIESIMLEMDSIILTIPGIGFLNGAMILGEIGDIARFSSPSKLLAYAGLDPTVNQSGKFNAKSTKMSKRGSKLLRYALINAAWNVSLNNKTFDDYFKLKRSQGNNHYAALGHVAHKLVRIIFKILKDNVAFNLD

SEQ ID NO: 479125 - protein, 344 aa, unidentified
MDHFAGLDVSVKETSVCIVDDTGRIVREVKVASEPEALLTALKNPSYHFKRIGLEAGPLSQWLFSALAEAELPVVCVETRHMQAVLKAQINKTDRNDARGIAQMMRVGLYRPVHVKTLRSQKLRMMLTHRKLLQSKAIAIENDLRGPLRNFGLKVGIAGKTKFEARIKELVENLPDLAELVEPMLVVRRTLREQIVILHRRLLAIVRDDEVCRRLMTTPGVGPVVALTYRATVDVPARFRKSKSVGAVFGLTCSKYQSGEIDWSGRISRCGDEMMRTMLYEAAQVMLTRTNKWSWLKAWAMQIAKRRGMKKAIVALARRLAVILHRIWVDGTEFRWTREQAVAA

SEQ ID NO: 479126 - protein, 398 aa, unidentified
MYIMAFDVSKGKSYMVLYKDQELIYEGEIKHNQTSFNELLPFLKRNKVELVFEATGVYSKPLKHLFETNGFNYYCLNPLEASFQTATLRQMKTDQTDAHRLDLSHLKFDRQVTVPPSLRYKELKAMSFSYHQVHDELLVNRNYLHSELQHTFPRIEEIYKDNLSQYVLKILQKYPHPDYVKVLSRTKIKNFIKKQTKKRISDQQAIEKAEWIQKCAMNSYPIVKKDSFRVRQVKRRIQKIDRLLNEKREIRKELVSQATELIDFSILESIPGIGELTSALLLAELDDIRRFKTNKQLNAFIGIDIRRYQSGTIYKRDRIQKRGNKRARMILYYTVQNMIKRQKYIDNHIIDYYYKLKKEPYTKKHKVAMVACMNGLLKTIHSLIHTQQAYDYTKSPRS

SEQ ID NO: 479127 - protein, 378 aa, unidentified
MIEYLSEAGYGRSIDLGSNKTVGQRGRHTRISNKARTVVRVNQTRMMQGRAKREKKPMTEEAVYVGVDVAKSALDVAVTDSGETWQFVNDDEGISQAVHYIASVKPAGIILEATGNLEMPLAAALQASRLPVAVINPRQVRDFARATGVLAKTDRIDARILALFGMQIKPEVRLLPNQKAREMSSLLARRRQLIEMLTAENNRLLQADISIRPGIEIHIKWLKEAISAINDDLDQQIQSSSSWLEKDNLLKSVPGVGKVVSTTLLIELPELGTLNRRKIAALVGVAPLNRDSGTLRGKRTVWGGRAKLRAVLYMAALVGVRRNPVMATFYERLLKAGKVKKVALVACMRKLLTILNAMMRTMTVWNPEPIKQYVATEV

SEQ ID NO: 479128 - protein, 358 aa, unidentified
MNRNTGMNAGQIIGTMGGKQVIGLDIAKHVFQLHTVDMATGEISNVQIKRAKVLEHFANRQACLIAIEACGGAHHWARELQALGHTIRLLHAKIVRPFVSGNKTDATDARAIWLAVQQPGVKFVGIKTTEQQATLTLHRQRDLMMKMRTMQTNALRGLLYEFGATFAQGRNALFKDVEAALDSLRHSLPQMVADSLREQVLRIKALSTDMVAIEKRLGLQLKADAAMQRIAQIPGVGLLTATAAIATMGEASAFKSGREFCAWLGLVPKQTGSGGKVRLGGISKRGDTYLRTLLIHGARSVLSHAKEPGAWLECLKARRPANVVIVAQAAKMARTIWAVTAKEQAYQRGFKSVRPQAA

SEQ ID NO: 479129 - protein, 427 aa, unidentified
MAEEKIGLEPEFVAFVGIDWADRKHVWCLEAAGSRKRETGELEHKVEAVEAWVAELGRRFGHRPIAVAVEQVKGALVFLLNKYECLHIFPVPSTMTAKMREALYPSGAKDDPRDADLLLDILGQHRDKLHRLSPDDEVTRRVQNLVEERRKLTAEKTAQSNRLTSYLKIYFPQMVEWFEKLDMPLVCDLLERWPTLEELQTVSTEELRTFFRQHHCHRGLRERRILAIGGAIPAGGDRAVIEAKSTVVKVMVQLIRSLLQGIAELDRKIEESAAEHPDFFIFESLPGAGAVMAPRLLAAFGSQRDRYSCADELQTYSGIAPVTERSGKRKWVHFRWACPKFLRQSFHEWAGHSIAQSAWARAYYQQQRDRGSDHHAAVRSLAFKWIRIVFRCWKDRVAYDENKYLAALAKRGSQLGKLVVVGMGTSL

SEQ ID NO: 479130 - protein, 368 aa, unidentified
MDKIITSFVGLDVHKDCIAMGVAPTGRDAPRFVGTVVPQWAPLCKALRRLGRVRELQIVYEAGPCGYTLARQLRSHGYACEVIAPAKVARRPGDRIKTDRRDALLLARAARAGELVSVTIPDERDEALRDLSRAREDAVRARLKARQQLKALLLRHGHRYAGKSSWTAAHERYLAEVSFAQPAQDIGFAEYRSAVREAQERVERLTEALRAQLEHWRMRPVVEALMTLRGIDLIAAVTLVAEIGDFNRFARPCELMGFLGLVPSEYSSGSKRRQGAITKTGNSHARRVLVEAAWNYRFPARVSRVLQVRQEGQPKAVRDIAWRAQLRLARRYRHLSARKLALNKICVAIARELSAFVWDIARQVKPIA

SEQ ID NO: 479131 - protein, 347 aa, unidentified
MLIIGCDFHPGFQQVAIFDNLTGEIQEKRLQHRAEAEQFYRGLAGQEVRVGMEACGHYPWFEQLLAELGFELWFGDAAKVRASVVRKQKTDRRDAEHLLDLLRENRFPRIWVPSLEVRDVRQLLVHRHKQVQARTRTKNQLQAMALSQGVQKKYKLWTKAGREEMEQLPLLPYAAQRRKQLLQSLDGLEAEISELDRRVADEARQRPEAVRLMTHPGVGPVTALALVLTLGPADRFESAKQVGSYFGLIPSEDSSGGKQRLGRISKQGSSFLRFLLVEAGQTAARLDPQLKRFYRRLAARKNRSVAKVAVARKLATRLYLMLREDWTYTQLCQAVMQVSPSHSVAGQ

SEQ ID NO: 479132 - protein, 371 aa, unidentified
MHDTIFVGMDVHKATISVAVADGGRGGELRQLGNFLNRADHVDKLVQRLSKTDGRRLRFCYEAGPCGYGLHRQITDLGHECAVVAPSLIPMKAGDRIKTDRRDAMMLAKLHRAGELTAVWVPDAAHEAMRDLIRARATAVRVLGKARQHLQGFLLRHGRVYPGKKGWTLPYRRWLTTVRFDHSAQQVVLQDYIHSVHDAEERVARLTKQIEDLVPTWSMAPIVEAFQAMRGVAFVAAVTVVAEVGDFIRFDNPRQVMAYLGLTPSEHSSGTAIRRGGITKAGNALARRVLIEGAWTYRMQARVSRKLHDRLEGLPQIVRDIAWKAQVRLCARYRRLAATGKPKVVVTTAIAREMAGFLWAIARQTQIGSPA

SEQ ID NO: 479133 - protein, 327 aa, unidentified
MYSIGLDISKSSIAIHIPLGNLDIEIENSIKALKSLYSKLKKVYKKEHDKLVFIFEPTGNYSSVLYRFCADKKIKVFIINPKQSHNFAKAISQRNKSDKVDAQMLSKSIMIAREEEIIIPTIDSSVEEIKEMMGYHRIKLKQRVQLSNHLEALSVKDNNNSSLVKRLQKEIKVLKKVEVEIIDDIYKMIAKNETLIKKYEAIISIDGIGKIAAIVFIHLFIRYPNANQRQITSLVGLDPVIRESGTSIKGKNRISKAGGKMYRGSLFMAAMVATKYNKSLKLFYNRLKENGKHTTVAQIAVMRKLVIIAHSLFKSGELYDKNKYLGY

SEQ ID NO: 479134 - protein, 388 aa, unidentified
MTKLSQGRTTFVPRDYDIFGGLDVDKKRMSVTFSDHGTMQRSLSLPYSATQLLNYTRKHFPGQRIAFVYEAGPTGFGLHDELTAAQHPCLVVSPSMVPSAPRNRVKTNRLDAKKLSEGLRGGQLRGIHVPPQAYRELRHLVQLRDTQVGQLKATKCRIKSLLLYEGIPFPAANEKWSGWALRKLETIPCNPTVRFKLDQLIDTLQFHFLAAAKVQKEIRRFCKNEPGLQQSIDFLTTLPGVGTITATHAVARLGDWRQIEKVGQIAGFLGLVSKEHSTGDKENRGAITRIGDPRLRNKLVQCAWTAIRKDPELRAFYRQVYERQPKKVAARKAIVAVARKLTTRMYAVLKEQRPYVVRADNSIAPLTAEETAGLRERLDTAQNDELAS

SEQ ID NO: 479135 - protein, 362 aa, unidentified
MKKVMAGIDLHSNNVMVGIVDADGHRVQHRKLECDLRQIDAFLTPYKAQLVRVAVESTFNWYWLVDGLQAAGYPVVLANPAKMDQYSGIKHADDKNDAYFLAELLRLNILPTGHIYEANLRPVRDLLRRRMNLVRQRTALMLSFKSLHQRTTGQSLELRKLKAMTPKEAAQIYTHPANQLIAQVQKQHIEALDQSIHQIEKAVLSVADKLPNYQRLQTLPGVGVILGLTITMEVGPIERFASPGELASYGRAVDSQRLSNGKKKGDNNQKCGNKYLAWALVEAAHGARRHDSHCRQWYDRKAAKTSTVIATKALACKLAKAAWHVMAQQTDYQASRMFPELAGKHLGEQASASNGVGENSKI

SEQ ID NO: 479136 - protein, 448 aa, unidentified
MSKEKLKMDIINPNAAGIDIGSRSHFVAINQEHADVKEFGVYAQDMKALVDWLLENNVKTVAMESTGSYWQNLYAELQNSSIEVMLTNGKFTKNIKGKKTDVLDCMWIQRLHTLGLLSGSFLPDLQTEYLRTLVRHRGNLIQTTSKASKRMSQNMRLMNLRLDVVVKDIVGLTGLNIINEICNGETSGEELAKLRHGNCKKSEEEIAKALQSNNRQDYLFVLKQELKKYQDAQQLILECDAEIKKLLDEFIDQDHVKKSLYIDKKAHKRINKNTPKNIDLNLMAYQYFDGIDLYAIEGFSHGTVLTLMSELGEKGILKFQNAQHFTSWLRLAPNNKISGGRVLSSRTPKGSNRLKIALRQAANAIGNLKDTHLSNFFNRVAYRKGRSVAVSATARKLATILWNMLFKNEQYSPPTIYEYLDQKRKRKVLELQKQIANLDARMSKVRIA

SEQ ID NO: 479137 - protein, 264 aa, unidentified
MRLIGCDLHASQQSIAMLDRDTGAVIEKTLRHEGETVRTFYASIPLPVVVGIEATGSMGWFLRLVEELAIECRVGHPTAIRKAETRRQKHDRRDAALLLQLLVEDRFPAIWMPSIEYRDLRSLLLHRHQWVRMRTRVQNALHAIVLAHGVRRGHTLWNRDGQALLASLPLPPHTADRRSELQALYQHLAEHIDRLDDRVRQVATERARAALLMTHPGVGPVTALATDVFVGDPARFLDGKALASYVGMIPREYSSGTRQAGGTQ

SEQ ID NO: 479138 - protein, 440 aa, unidentified
MARVFIGVDPHKLSATIEVVDEHEQVLGSGRFGTDQAGYAAMRNYTRAWPGRVWAVEGSNGAGRPLAQRLLAAGEHVVDVPAKLAARVRLFDTGHNRKTDAHDAHAVAVVAVRTQGLRVLAHDAELEALRMLADRREELTRQRVQTVARLQRLLSELTPGRAKKDITALQAKAILATVRPRDLVGKTRRRLAAEQLAELVAVEKKIKPLTAELKVMVQARGSRLMDLPGVGPVVAARVLADVGDVARFADRNRFASWTGTAPLDASSGEQIRHRLSRAGNRRMNHMLHIAAATQIRLDTEGRAYYRRKRADGKTRKEAMRCLKRRISDAVYRQLIADADRARRDTSADRAEAGPGGHCGATQESSAVDLPPHIDTSDQPLPGPAHPTLLGSPAVAKPSEASAPRPSRRRAGAVNVERPTGRTTLTATSFGAHSKAPKPRP

SEQ ID NO: 479139 - protein, 343 aa, unidentified
MEEITTVGVDIAKSVFQVHGIDAHGNVVLRRQLKRRQVVPFFKKLAPCLIGIEACATSHHWSRELQGLGHTVGLMPARYVKAYVKRSKNDAADAEAICEAVTRPNMRFVATKTKDQQAGLMLHRTRQMFVRQQTALINAIRAHMAEFGIVAPVGRKGVETLLKVIADAKEEHVPEMARDCLAALGAQLHRIKEEVLKFDRMILAWHRSHETSRRLDAIPGVGPQLATALVASVSDPKDFRSARDFAAWIGLVPKQNSSGGKERLGGVTKQGDRYLRSLLTAGALAVIRYAKIHGTTHRPWLTALLARRPTKVAAIALANKIARMAWAMMARNERYKEPAALVA

SEQ ID NO: 479140 - protein, 388 aa, unidentified
MKKNSKNETMKSKRETKKVAELEAGWTRLDEREANTLVIGIDLGDRTSAYCVRTLGQQIVKEATVATTATALLEAFQGVRRQRVVIETGTHSRWVAQLLELMGHEVIVANARKLKLISENNQKSDKVDARLLSELGCMNVEWLHPVYQRSQAAHSDLLLARARQALVDARTALINHVRGSVKSYGSRVEKCASERFVEVARGALPEALKPALSGVLATLEELNEQIYGYDCQIEHLCNTKYREAAKCLLQVNGVGPVTTLTFVLTIENKDRFEHSRDVGPYLGLIPKKRQSGQRDPQLGISKEGDEMLRKLLVNCAHHILGAKGQDSDLRRWGLELVRAVERKGKKGARKLAAAAVARKLAVLLHRLWVTGAAYEPLRNRGAQQAPAA

SEQ ID NO: 479141 - protein, 415 aa, unidentified
MKFEKNTRGIKRYIGFDIHKEYALVGGQNAQQEWVMAPRRIGMEKLREWAKANLRAGDAVVIETTTNVWDVYDIVVPLVSYVVVAHAGGVRQIAEARVKTDKKDIERLIRLLIADIVPEVWVPPMEVRELRGMISYRNRLVKTSTMIRNRLQSLIHRHNLILPKGKLRDKAWWEMQKLSALEKIQIRQELAMLDELEKHKGEVDGELGRQSLGEVWGKQAMRLLQLPGFGVIVSMTVLSAIGDVTRFESAKKLVGYSGLGAGVHDSGKEHIEKRITKSGRKELRWALVEAAWRAIRISPYWKEQYEKYLRRMRKPNQAIVVIARKLLVVVWHVLTKQETDEHVSEEDLAYKMLVLSWDLNEEVRMGLTYKQFAKYALMKLGVENDITRFVRKKVPRRLAPRAEVLERMAELGIAQ

SEQ ID NO: 479142 - protein, 345 aa, unidentified
MKRITIGLDIAKSVFQVHGEDPSGKTILQKRLRRSQVLGFFAGLEPVLIGIEACGSAHYWGRELRALGHDVRLIPAAYVKPFVRRNKNDARDAAAICTAVSRPDMRFVAIKSVQSQASRGLERSRELLVRQHTQLMNSVRSQLAELGIIAAQGRRGFAELAQLVAADDERIPALLLSALSLMLQQIDRLADASAAIEAKIMAVAKADPTMRRLATIPGVGGLTAHAIVTAIGDGKQFASSRDFAAWCGLTPRGASSGLKRREGGISRQGDIRLRKLLALGASTIIRNARSRADRATEWQRGILARRPVKVAVLAQAAKTARIAWAMLTAGTTYRQPAGAAPAQPV

SEQ ID NO: 479143 - protein, 369 aa, unidentified
MSKTITSFIGLDVHKDSTAIAEAEAGRESPRFIGTVSSDLGQLLKALKSLGKPETMLVVYEAGPCGYGLARQLRSRGYSCEVVAAGKIARRPGERIKTDRRDALTLARLARSGDLVKVMVPDERDEAMRDLSRAREDAVKARLKARQQLKALLLRHGHRYGGKSSWTLAHERYLAGVSFAHPAQHIAFTEYRQAVGEGHERVERLTQALRTQSEQWRLKPLVAALSSLRGIDFVAAVTLAAEIGDFSRFAHPSELMGFLGLVPSEYSTGDTRRQGDITKTGNSHARRVLVEAAWNYRFPARISRVLQIRQEGQPKAVREIAWRAQLRLAHRYRRLSSRKLHPNKICVAIARELAGFLWDIARQVKVAEA

SEQ ID NO: 479144 - protein, 386 aa, unidentified
MQKLNDLSRSLTALEPDGTLIAVIEMSLSSWLVAGIVPGVERQPLKKLAIDESALLKLLHRWREEAEKAGRRIERIAVAFEAGRDGFWLARWLKARGIEAYVIHASSVAVSREHRRAKTDRLDTELLKRSFLGWLRGERDHCKMVEIPTMKDEDAKRPNREHDSLIGERSRIVNRMKAALVRLGIRGFNPKLKRATTRLDGLRTPEGEPIPPNALAELRRDMERRRLVNNQIRQIEEERLKRIEQAPCDGPHVMVRLLARVLGVGIETADMLVHEVLSRNMRDRRAVARYAGLTGSPDESGRKRREKGLARSGNTRVRRGMIQLAWRFLLHQKNSALTKWFRSRTENARGTRKPMIVALARKLLIALWRLVREGIVPDGVVLRPAQ

SEQ ID NO: 479145 - protein, 355 aa, unidentified
MLADKVDHVIGVDTHKDSHTIALVSPAGAAIAHRTVPATPIGYLCGYRFAVEQAPGRRVWAIEGTGSYGAGLTAYLLEQGEWVVEIDRPARPARRNGAKTDDLDAVRAAREALGRDHLAQPRRRGEREAIRVLLTTRHSAMGARTCAINHLKALVVNAPQRLREQLRALPTDQLLARCARLRSHPTQPIEHRATIVGLRRTAQRALALQAEADELHDELDTLVGRLAPRLLTEPGVGVICAAQLLTAWSHAGRLRSEAAFAMLGGAAPVEASSGKVVRHRLNRSGDRQLNRALHTIVLSRMTCDAETRAYVTRRTAEGKTPREIKRCLKRYLARRLFKLLETSPAPIPNTQIATT

SEQ ID NO: 479146 - protein, 554 aa, unidentified
MAITSRRPARRHRRPLSVAKPSGSIHPRVQKVGPEHFGIVAVDCAKARSKWMLTDFYGTILITPTPVEHTRQGLDDFAVAIRRAIIDHHLGDLVVAIERTGNYHLPVKRAAVAAGFDARVVHPLASKQFRLPADPGNKTDDTDLLAICRAAVNGFGLVEPVLDEVHVPLRLLARLRRDLVRKNADTRNQIHAELDARLPGLAAAVGDLFDHEPALVIARHLSSPAEILARGLGGLAALLHAERIRHHRRSLAKILAWAERAPEPSECPEIHRRIFTCLDDERRARLRTIRELGADLAGSLVKTPYVLLLSFPGINVVSAAEFAAEMGPIAHSPGDGAITGRAGLYPSRYQSDAVDQTGPLVRRGNRAPRYVILLIAENLLRCNDHFRRLGEAWRAAGANRRAAVVRAAKRFCRIAYRMVAGRQVYRHPSCRERHYILAKLSMFYIEHETSLDRVSRDLRAAADWIPRSEYAAEARPLASGSSTAAPAAAPPARAARPTNSNGRRTGPRPLSAILPEVLLRLGARMVESSASGETDPTGPHRPVARTTPLVPVAL

SEQ ID NO: 479147 - protein, 309 aa, unidentified
MKYYIGIDVSKLKLDICILKSLDSKDFKQIKNDKKDIKDFFISFENLNDLIVVFETTSTYSYNIAKVLTDLKIKYSELNPLKVSHFLKYISNKKNDKIDSYNLAYYSLKFENEIVFDSFNDKSKLLRSYQTLIELLNKINVQIQNYDDSQIHIYDENIKSVIDEFLDISNYNKRMLEDKAFDLVCDLLPQTKTILANEKGIGKNLAIYLFPVFYFNQDKNYKQIISYLGLSPKVFESGSSVKKKSIIDKKGNSNIRKALFLSSLSCVRYNPKFKRYYEHLLTQNKNKKVALVAVCNKIIRHLKNRYFRY

SEQ ID NO: 479148 - protein, 393 aa, unidentified
MQRDTKEVLAELVGKLKEKLDRKKVAARSTGEEHPGGELRPNLDRLTVGVDLGDQGSHYCILGLEGETLAEGQLRTTQEDLATFFQGLNAARVVVEVGTHSAWVQEVISGCGHEVLVANPRLMDGSKRRKRKNDRIDANKLARLGRVDPESLYPIQHRSREVRQDLVMLRARDALVAARTEIINTTRGLVKSMGTRLPKCSSRSFAQKGEEAVAVEMREALLPLVRLAATLSADIKEYDKKIETLGREKYGHTALLRQVKGVGPITALAYVLTLENPQRFAKSRDVGPYLGLVPKQEDSGESQPQLGISKAGDTMVRKLLVGSAHYILGPFGPDTDLRRYGLRLCERGGKNAKKRAAVAVARKLAVLLHRLWVSGEVYEPLHNAMSAPIAAAA

SEQ ID NO: 479149 - protein, 482 aa, unidentified
MKKRNIFQNRSQQLLRLFEKAGNRLRMMCVPIDYAKKDHIVMFCNGYGDILRKPFSVKNTLEGVKYLIDQVMRSCRQRRIKKEHVFFGGEDVNSYAENFANALRAKGWLVANVNAHDAKKQRETLQASTDRIDLMGIATMLLNLRAKCSPAQDGIYRNLRTLVRHRKKLVVMKTEVKNRVHTLVDRLFPGFLNEKNTGINPFSKSSLVLMEDRFSAQQIRRRQVTTLIKILKRCATPDAQSVAAKLHSYAAQVITTPEEYTATLQLSLQHHIKHFRCLQENIDQLLSEIALLLAQTQAAFLTSIKGVGIVLAAGVSSEIGNPFEQKPLNNLTSYSGIIPRVKQSGGVEGHTHTGRVSKRSNHLLKDYVVQSAHHIGLRGPQPLLQDYKRREAAGQHADFGIGRRFLRMAMCLMRSSQVYLPPKLRSPRAQMHERAAYYLTTWPLLRDKGKKAHAHQAAFAKDQPLGQWRQMLQEFYDIKLKL

SEQ ID NO: 479150 - protein, 338 aa, unidentified
MEQVITIGLDLAKNVFQVHGIDAAGKVLVRRQLRRGDVLRFFGGLPRCLVGMEACATAHYWARELTKLGHTVRLMPPAYVKPYVKRGKTDVADAEAIAEAVTRPTMRFVAVKTADQQAALMLHKVRDLLVRQRTMLINALRGHLAEFGIIAARGPGGVTAAIISLHEAQDSLPELARVALHGLIDQLRIVRGEIARVEKRIVAWHRASNPSRRLATIPGIGPITASAIAAAVPDATLFQSGRQFAAWLGLTPRAHSSGGKERRVGISKQGDGYIRRLLVTGATAVIRLARQGNASKTWAAKLLERKSARLVSVALANKTARIAWAVLARNQSYVAPAM

SEQ ID NO: 479151 - protein, 390 aa, unidentified
MQKSNDLSRSLTALEQHGTLIAVIEMSLSSWLVGGIVPGVERHPVKKLAVDESSLLKLLHRWREEAEKAGHRITRIAVAFEAGRDGFWLARWLKASGIEAHVIHAASVAVSREHRRAKTDRLDTELLKRAFLGWLRGERDHCKMVAIPTIKDEDAKRPNREHESLVGEQSRIVNRMKAALIRLGIRGFNPKLKKAAARLEELRTPENEPIPPNTLAELRRDMERRRLVRDQIRQIEEARVERLDHAPCDGPHAMVRLLARVIGVGLETADMLVHEVLSRNMRDRRGIARYAGLTGSPDESGRKRREKGLARSGNGRVRRGMVQLAWRFLMYQKERLSAVVSSPHREGSWHSQAHDRGLGAQASDRPVAARAAGRCTRRRRFASGTVNGGH

SEQ ID NO: 479152 - protein, 356 aa, unidentified
MRYSTIVGIDTHSKKNAVCAIVPATGEMREAVLSEDPGQLLSWISGQGFPEPVGCVYESGPTGFGLARALEAGGVACTVAATSKLSYRVDRQKNDRADAKWLARQMLAGGVRAVRVPTPEEESLCHLSRLRGEVAADLRKAKQRVSSFLLLTGTEYTLTKKKWSKTFRKWAESHEFDQPADTFTFRCKMSAVLRLEERLAEVEAEILRTIASSPKLSERMSRFTCIHGIGKVSAFSLVCEVHDFDRFNNGASFASYLGLVPSESSSGKKVSRGAIAKQGNSHLRRILVEAASCYSKQFKAVRSEDAAVPEAVRAKAEKCAARLRKRRAALKMRGVSANKAKVASPASSQNGFTTSR

SEQ ID NO: 479153 - protein, 351 aa, unidentified
MLIIGVDYHPSDQYIAFADTETGECGERRLNHSEGEAEKFYRDLQSRAASVRVGMEATGYSRWFERLLTELGIELWIGDAAEIKTRRVRKQKTDSNDARLLLRLLLEDNFPRIWVPSPENRDLRQLLWHRHRMVQMRTRMMNQLQALAMNEGQRRKKKLWNEQGRAQLEGLPLAAWASRRRKDLLELLDRMNPTIEDLTRAIEREARRRSEAARLMTHPGVGPITALAFTLIIGTPQRFGCGKQIGSYVGLIPAEDSSAGHQRLGRITKQGSRLLRFLLVEAAQAAARGDTDWKRRYMHLAMRRERNIAKVAMARRLGVRLYWMWRNGWEYAEWVKFGSNAGQLGTGHGAK

SEQ ID NO: 479154 - protein, 253 aa, unidentified
MVLLERAVTTDEAGLRGVLGGRRRMHCVLEAGPLAEWLAGVVEGLGHQATAIDPRKAYGVIRTKKKTDRLDARDLAKMSRTGWYTAVHRKSAEARAMRTFLQARQGLVQTALAQGSRVRGLLRAHGIKLGQVKESQFAWEVRRLALEKGKNLWLMLEPLVEVRRQALRGAEQMRRQVVRQAAAEPVSQRLMTVPGIGPLTATAYVATIDDPHRFRLSDQVSAYIGLVPSVEQSGELELHGHITKEGDGLLRVA

SEQ ID NO: 479155 - protein, 335 aa, unidentified
MNQARMHIGVDVGKECLDICYPDGSKEHIGNTKRSRAKLIRKARAMSAIVSFEATGPYEENLADECLAAGVPAVRLDAWKTRKYAESQGMLEKTDAIDCEMIRDFAASLKPEQLRFVRPMSDGYRRLKRATSVRRNLIKAKTLVVNQLENILDKDVRASVSRVIDALERQIEKMDALCTEAIRSDDKMNALAVRFEQVVGVGPVLISTMLSSCPDIGSFTSKGIAKMAGVAPIENKSCTIRKKSKPRRGRRELRSALYMAAVSACHSNHLLEPVYKRFTDRGMPRRVALIALARHIAILMNYIAKYPDFNPAVDPKKAALLALPKRKPGRPRKNP

SEQ ID NO: 479156 - protein, 434 aa, unidentified
MNSNTPIRLITHESFAAFVGLDWADEKHAVVLLAAGSQIQERATLAHTPEALSDWVAQLHQRFAGGKIAVILEQSRGSLLYALLPHAHLVLYPINPQMAAKFRKAFYPSGAKTDPLDADLLLQILLQHRDRLKAWQPDEPLTRQLQLLVGARRRFVADRVRLSNRLENALKTYFPQALQLVGESLTTPMACAFLQKWPTLEAVQKAGPQRLRKFYYGQRSRAEELIQRRLQLLAQAQPLTTDAAVVKAQSLLVKSVARELAALPAILAEYDQQIAALFAAHADQGIWDSFPGAGAALAPRLAAAWGTQRDRFESSDAMAAYSGIAPVKQASGRSVWIHMRWACPKFLRQTFHELARTSLSFCVWAQCYYQMQLQRGKGRQAAFRALAFKWQRIMWRCWQDRVPYDDAKYVESLKRDNNELYARVIASKSAPNGA

SEQ ID NO: 479157 - protein, 401 aa, unidentified
MAAVRDNAWVGIDVGKTHHWVCAVDADGKTLLSVKVANDEAGIVSLIAAVTALTQQLTWAVDIIGAPSALLLALLAQAGQPVRYASGRVVAAMSAAYVGEGKTDAKDARVIAETARLRRDLAIIDTDTDLVRNLAVLTGHRADLIADRVRMINRLRDLMTSVFPSLERAFDYSSHKGALVLLTGYARPDRIRRSGQTRLAAWLRTRHVRGFADVAARAIAAAKAQSVVLPGQDLTASIIAELAGNVLRLDERLKSLDDQIEELFQQHPQAAIIQSMPGFGPFLGASLLVGAGDLRAFPNPGHLAAAAGLVPVPNDSGRRTGNLHRPLRYSRPLRHVCYLSAQTSMMRAGPNRDYYLKKRANGRTHSQAVIALARRRIDVLWALLRENRTWTATPPQLAQAA

SEQ ID NO: 479158 - protein, 327 aa, unidentified
MTASVASHNQIFIGIDVGGLSFEAAWHRGGSTQYQNRPDAIAAFVARLSVEKQIIRIAVEPTGGHEKALVKALRGAGLPVEMVHTSRFAAYRKLIGAKAKSDTSDARLLAAYAAAPEEVRGRKAGHVVLPQDDVREQLAELAARRDQLKHMIHAETCRLSTVRSPSIRDEITAHLQAMRQADRKTHDAMMQLVRQRDELRNAKRLLQTIKGIGDKTALTSIAAVPELGLISNKAAAALVGVAPFARQSGTMKAPARIHGGRALVRNAFYMAAVTASRHNPVLAPFYARLIAAGKPVKVALVAVMRRRVVYANAVLRSGQPWKGAEIG

SEQ ID NO: 479159 - protein, 455 aa, unidentified
MRTEQRGFRLSLECIEPNAAGIDVGSRSIYVAVGGEREAEPVRCFATFTEDLRAMAAWLKQCGITTIAMESTGVYWIPVYEVLEDAGFKVCLVNSHHVKNVPGRKSDVSDCQWLQYLHSVGLLQASFRPERDICALRALSRHRAGLVEVAAIHVQHMQKALTQMNLQIHHVLSDITGVSGLAVVDAILAGQRDPRYLAGLVQSRVHADRETVIKSLVGNYRAEHLFTLGQSLAAYRQYQKMLADCDREMEQYMRRLPDNGQGGSGLAQSGKEGKAKRRKNQFHFDMGKELHRVLGTDLTLVPGLNALTVHTLVAEVGSDLSRFENAAAFTSWLALCPGSKKSGGKVLSSKTRKTSSRLNRALRLGAQTLHRSHSYLGAFYRRMRSRLGAPQAITATAHKLARIIYHLVTTRTAYDESVFRNEEQKQTLRLQHRLQRNARALGFQLVPISPQEVVH

SEQ ID NO: 479160 - protein, 346 aa, unidentified
MLYAGLDLSRKRLDFHLLDREGTTVEIGASPPDLDGLRGLTQRLARHGAPIRAAIESMNGARFVHDRLELAGWQVEIADAQKVKGLAPLACKTDRIDAWVLAELTRRDLVPAIWLPDPRVRAERERARWRLHLVRHRSSLKQRVHAVLLTHGKPCPVSDLFGVRGRQLLATLGLPQPWQGTIDASLRLIDGLDREIAGCERELRRLGADHRYVPLLCTVPGISWVLAYTIAAELGDINRFPSPRKLAGYSGLCPRVYQSGERDLRGPLSTQGPRYLRWALVEAATHACTHPTYRERYHQTKARIGKQRGAKVAQVDLARRLAEAIWHMLTRNEPFAPKGATDPLAA

SEQ ID NO: 479161 - protein, 433 aa, unidentified
MLPNRLQVGIDFSLKRADLCLLQADGQPLLSHQAFANSWLGYQQARQVLLEYLHAHTCDGLDVSGEATSYYWFPYFWQMAHDPELRSRDVSLYLLNPRQVYWFKKSLPPDDKADDIDPFYIAERTRTRRPKATWEPQEAWMPLRFYTRLRFHLAQDLTREKNYYLVHLFLLHNTYLRHHPFSDPFGAASQKVLGSEKSLAELVQAPLEELAEQLDTWSAGKLEDPTETAQLLQQVARESFPLEEPLLTPVQHLLDATLAHINFIEAQMDQVEGWIQTEAQLHLPDVAHLATVPGVGLVLAAGIVAEIGDLARFFRTPKWDKRHKRYRHKTQREVEDAVAKLAGLWWPKADSGEFIAEDRHLAKSGNRYLRYYFVQAANGMRRCIPAYTQFYTRKFREAVHHKHKRALVLTARKSVGLFVGLLHHHEAFESKEV

SEQ ID NO: 479162 - protein, 340 aa, unidentified
MRIIGGLDIHRRQITYNYVDLETGEASRGMIKPVCRSEFRQWLERLELRPAAFALEATTGWRFVVEELRRADIEPHLAEPAETRSLRGNKRRAKTDRADARHLRDLLIQGILPESWIPTDFIADLRTKARLRKALVDQRSGWIRRIKAQLFQHGLPTPPDLQTLEGRAWLARAELPTTARRVTELALSMIDFLTEQIDRLDGELKAIADAQKGCLALRAANYGVGPLIATAMLAELGDISRLSSSRKAVRLAGIDVTVSESDGKQRGRRHLSRQGPPLLRWALYEAGGNAWRRASPDHDYYLQAKERLGAKRAKLATGRRVLRRSFHVLASLGPDAIAPV

SEQ ID NO: 479163 - protein, 401 aa, unidentified
MKILALDLGKYKTVACDYEAETGRHSFVTVATTPKGLHDLIVDREPDRVVIEICSMAGWVSDLVRGLEIELQVANPNDERWQWRKVKTKNDRGDALKLAQLSAVNQLRLVPVPQSEMRQWRALIAYRQHLVQRRTKIKNHIRDLLLREGQLLPRYRSAWTQEGVANLEAMARPLGDVSPTELWRGELGVELAQFRAVQEQLAEVVGKLDELGTANRDVRLLRTIGGVGPRLAEAVVTMFDDPHRFRTAGQVSAYIGMVPKQFDSGETERSGRITRHGNRLVRSLLVEVAWCALRHNPWARETFQRISGGKKSRKKIAVVAVGRKLLVKCWGMLRHQTEWHWEHEFSEASGKSINPMNRKSERARSRTGRNHARAHRLDEFPVGYSLASCSPAALASASPTK

SEQ ID NO: 479164 - protein, 417 aa, unidentified
MMSTTPSVSSAEEATIKYICGIDIGSQSCAGCICRPDKSVVVKPIIFANAREGWQIWEEKLNQLDAPPSQILIGMEATSRSGENLYHELEQRGYVLRLLHPRQTHQFHERRGLRAKTDRLDAMTIARVLLSGEARAGYVPSEGVATYRELVRLHTQLSDEAAAYQNEIQALIVVLFPEFTQLFADPCLPTALAVLTAFPSAQALAEAGVEPLLQVLRAQKSAQYGRPTAQKLGALAKQSVSSGRAMAGRSVSLRILCDQLGHTRANLARLDAEIEQLLTTDPGVRGLQQVPEFGPKTVAVLRAELGDVQRFTRTDEVIAYGGMDIEIKESGLWKGKAKLSKRGSGLLRRMLYLAALRSIHLEGSPFGAYYHHLVGRGLSKGSALMAVMRKMLAVAAHLLMHEEEGYDPSKVCGSSMG

SEQ ID NO: 479165 - protein, 385 aa, unidentified
MQAPNDLNQSRIVLKQDSTLIAVIEMSLSSWLVAGLVPGVERQPLKKLAVDESVLLKLLHRWREEAEKTGRRIERIAVAFEAGRDGFWLARWLRARGIEAHVIHASSAAVSREHRRAKTDRLDTELLKRVFLGWLRGERDHCKMVTIPTIQDEDAKRPNRERESLVGEQTRIVNRMKAALSRLGIRGFNPKLKKAAARLEDLRTPEDEPIPPNTLAELRRDMERRRLISDQIRQIEDARLERLERMPNDGSHAMVRLLARVIGVGIETADMLVQEVLSRTMRDRRAVARYAGLTGAPDESGAKRREKGLARSGNARVRRGMIQLAWRFLMYQKDSTLARWFRARTENARGTRKTMIVALARKLLIALWRLVTTGEVPAGVVLRAG

SEQ ID NO: 479166 - protein, 343 aa, unidentified
MKLIRVGVDLAKNVFQVHGVDRSEKAVWRRKLTRENWLSVLRQSVEPGCEIGMEACGGAHHWARRLQEHGFKVRLVAPQFVKPYVKSNKNDANDAEAICEAMSRPHMRFVSVKTVEQQDIQAVHRIRAELIKQRTAKANQLRGLVAEYGLVAPKELGQLRRALPCWLEDAENGLSGRFRRLLNGLWGDLQTLDERLNELDREITMIARSDPVAKRLQQLRGVGPIVATALVAAVGNGEQFAKGRQMSAALGLTPRQQSSGGKERLLGISKRGDAYLRALLIHGARAVIQNAKDKDDRLSQWVGRLAARSHPNVAAVALANKTVRMAWAMLRNGTDYRPGMVSS

SEQ ID NO: 479167 - protein, 427 aa, unidentified
MHYTQNDKIRQATEGTIVVGVDIGSEKNYARAFKGNGIEITRKAICFPNTMEGFKFFEETVTKLTVPLAEKKIIVGVEPTGHYWFSFADYCQEKQMTVVTVAPQHVKHSKEMDDNTQRKDDRKDPRVIAKLVIEGRYCIPYRPKGIYAELRVAYNRRCEIVEAETRAKNRIRRWFDLYFPEYRTVYGSVAAITGIVILKQAPLPQDIVSLGVDGILQIWRANKLRAAGLKRAKTLFEAAQRSICPPDAGRAVRMQLWQLLEEYEYIRKQLQEADIMIGIVTADIPEVSELMKIPGIGMITAAGMISEIGDIRRFDDPREIQKLAGLAIVVNESGKHKGQSEISRRGRKRLRKILFQAALVLVRSNTEFKTIHDYFTTREKNPLKKKQSLMAVAAKLIRVCFGMVKNGTPYDPTKVLKDIRRTEPKAA

SEQ ID NO: 479168 - protein, 513 aa, unidentified
MRRVGIDLALKAPHRAAVFDGAQAIGKSFAVQRTKGGVDELVRRATAGTSDDVCEFIMEPTGLAWLPLAAELARRGHQTYVPKPQKTHALRVFLSQFAKTDGVDAKAQALVRHVDPTGVHALHVPSAAETTLRLCAKQRARLVVDAARAKGRIQSWLVLANPHVGEAIDLFTDVGVAFLRRHLDPFRVRAMGRAELKRFWQRQVRGQVDEDQLAAVWTACETTCEFYEAQRAAGTLPFDYAVVQAMVVQELERIELLESQVAALEDTLQRAYRLVDPERVLEREVPGVAATIGATIEGFVGDVERFESAKRFAGFFGLVPRTRQTGGKDGAPRQRLTKGGQALLKKYMYLAAETARRCDPELAVMYATCIARGKHHYASVIAVAHKLVRKIYAMLKLRAAARRAVLEGRPAPEVAYRYLRPDTGEIIGAKEARAYVNEHFPSKAAKERAKGEKKKRAAEAAPRKEGSSKDVTNVDLGTPPIAFVTNVDACGKSVDNAVINPLIQQAKFSVDGT

SEQ ID NO: 479169 - protein, 387 aa, unidentified
MIYVGIDIAKLNHYASAISSDGEVLLEPFKFSNDNDGFCTLVSKLNQFDKDKVIIGLESTAHYGYNLLAFLVPKGYKVCLINPIETSTMRKNNIRKTKTDKVDTLIICKTLLMQPHRFVTLYDIGILQLKNLGRFRLKIVKQRTRLKIQLTSYVDQVFPELQYFFKSGIHQKGCYALLKEAPSPEAIASMHLTHLTNVLKSSSHGHFKKETAVELRVLAQKSVGTSDNSLSIQITQSIEQIELLDRQLERIESEMEDIVRSLDSVIMTIPGIGFINGGMILGEIGDITRFSNPSKLLAFSGLDPSIYQSGNFEAKHTRMSKRGSRALRYALINAAHNVVKNNQTIAAYYAQKKSEGRPHYAALGHCAGKLVRIIFKMLTDNVTFNLE

SEQ ID NO: 479170 - protein, 346 aa, unidentified
MDFTFGDVHMSYLGVDLHTNSFTVCRRTKQDKETVQTFPMARLGHFRKTLRKRDLLAVEATGNTAWFVSQIRDRLRKVTVVNPFQFEVIRRSVSKNDENDAKALAFFLSKGMLPEARMKTKENAQLHSLATTRDKLVKQRTALINKIHNVLNSYGIKFKKESLGTEKGLKSIWAYEWDIIVKIELEVLVEQIRSLTKSIKTLDKEMSDHGQNLDGHESLRSIKGIAARSATVLLSVIGDVNDFADENKLAAYFGIVPRVSNSNETVRHGRITKRGSKLGRTTLVQCTLVAKRYSPYLRQYYERIKSHRGSGKAIIATARKFLGIIYNTLKNGWVFEDFPNFVIANT

SEQ ID NO: 479171 - protein, 377 aa, unidentified
MSKVRFVGLDVHAATIAVAVAEPGGEVRSLGIIPNRLESIRKLIGKLGSVKDLKVCYEAGPTGYVLYWQLTQLGVACEVIAPTLVPTKAGDRIKTDRRDAEKLARCYRAGDLTPVWVPDAAHEALRDVVRAREAAKKDQLRARHRLSKFLLRHGRRAPEGTKAWTKKHLEWIKTHVHFDQPALEAAFADYIQEVDHCADRILRLEKAIAEAVEQAPPSMRAVIEALQALRGVAQTTAATIVSELGALSRFESPRQLMGYSGLVSREHSSGTHIQRGSITKTGNAHLRRVVVEASWAYQHRPNVTGFLLRRQKNLALDEGTKQIAWKAQYRLHNRYKKLAGRGKNKNQIITALGRELLGFVWAIAVKIEQQQQFAQAA

SEQ ID NO: 479172 - protein, 501 aa, unidentified
MVVRDLVAVRCTTTHWTPLETLFKPTATGPSLADSMDEVRDMPKRSRKEIQKDKRVKNWEGLPPINKNAAGIDVGNAEHHVAVPPGRDAEPVQKFGSFTADLHRLARWLKACGVETVAMQATGVYWVALYQVLEDYELQVNVVNAHHTKTLPGRKTDVLECQWLQKLHTFGLLNNSFQPAEEIRVLRTYMRQREKLVAAASTCIQHMQKALTEMNIQLANVISDISGMTGIAILRAIVNGERNPHALAGLKNERIHASRQEIAQSLEGNWRPELLFVLEQSLTLYDTYHQKIAECDQKIEAHLKTMESNENAECQPTQVRIRRSHHKQTSWVDLHMHLHRIAGVDLTQIDGINVQTAQTVISEVGVDMTRWKSEKQFASWLGLCPDNRISGGKVLKRGTRRVVNRAATAFRMAAWSLFRSQSALGANFRRLRRKLGAPKAVTAMAHKLAKLVYRMLKFGQAYVDKGAEHYEDKYRQQTIKWLVKTASALNLQLTPSPRLLE

SEQ ID NO: 479173 - protein, 346 aa, unidentified
MEITTIGLDLAKTVFQVHAINSASEVVVKKTLRRVQLRRFFEQLNPCLVGIEACGTSHYWAREITKLGHEVRLMPPAYVKPYVKRGKSDAGDAEAICEAVRRPTMRYVAIKSPEQQAALALHRTRDLFVKQRTQLVNMIRGLLAEFGIEIRRGIEQALLLAKRIAAQEVPDIPPLAAKVIAGLAGQVLDLQARLGEIERELLAWHRSNDIAKRLATIPGIGTVCATALAASVTDPHQFGSGRQFAAWLGLTPLQHSSGGKERLGRISKMGDKYLRRLLVVGMTSLIRRAKYKPEAVDPWLAKLLSRKPARLVTVALANKAARVVWAIMVRGGVYRRPAGTSVTTSV

SEQ ID NO: 479174 - protein, 337 aa, unidentified
MNEAITIGVDLAKSVFQLHGVDHNGKSVFRRQLRRSQMLEFFQKQPGSLIGLEACASAHYWARELGKFGHDVRLMQPSYVKGYVKRGKTDAADAEAICEAVSRPSMRFVPVKSEETQGQLVTHKAREFLVRQQTQIVNAIRAHLGEFGIVIPKGIQNVGRVIEACDSAKLPTAARKALNLLADQLIDTQKKIAELTTDIRADVTSNEAAQRLQTIPGVGPITASAFVATLPDIADFKSARDLSAWLGLTPKPHSTGGKERLGRISKMGNKYLRRLLYLGAMAQVSARRRGEPGDDWLWKIIQRTKPKQAAIALANRMARRIYALLKHGTEYQANYAR

SEQ ID NO: 479175 - protein, 392 aa, unidentified
MVCVGIDVAKDKHDCFILSSEGEVLADVFTIANNLEGFETLLQRIRFCSRPADTIKVGLEATGHYSYNILGFLLDKGLPTYVINPLHTNLYRKSLSLRKTKTDRIDARTIASMLMSGMDLKSYTNTAYHNEELKSLTRYRFGKVQERARLKQSVSRLINILFPELETLVPTLHMASVYAMLSEFPGARQIADAHLTHLKTILSDASKGHYDRDKAAEIREAARRSIGSFMPAKSLELQHTIRLIRELDKEIDEIESAIKTIVDDMAPPILSIPGMGYRMGAMILAEIGDFSRFDSPDKILAYAGLSPSTYQSGKLNAAGAYAHMEKRGSRYLRYALYNAAKYVCHWEPTFAAYLTKKQAEGKHYNVAISHAVKKLVRVLFALQTSGRAFQTI

SEQ ID NO: 479176 - protein, 423 aa, unidentified
MCSMVEEQVRGQEVPEVGCGIVIGIDVSKGWIDWRACRPGQWEKRHHLPQDWEGFTSLEQHLVSRRAQGQQVWVGLEPTGPYGLCLQEWFLERGWRVVQVNPYHVHRTKEIPDNSPRKDDEKDPGVIAELVWRGSYQQVRRVFGPYAELRAGISEWYSLTKKQTAARNEAQALLEVWFPEVRTLFQDPLCKSVRTLIRHYESPEALVRGRLGSLEGRLREGTHGRGGRYGTALREAAAQSVALREGQRSRVRALRGLLTQLEGYEVRREQLREELAESLAQTREGKYLLSVPLVGVVLAGGLLGECGPLAEFRRSSQVEKFVGLHLYGLASGKRTGRLHVSKRGRRGARALLGQLAALHVKAGGLCQAWAAEAKGKGKRPLQIQVAVARKFLRVMHALSTREQYFDPKHWHAGAQTADGVPVL

SEQ ID NO: 479177 - protein, 399 aa, unidentified
MLAVVVAHPSQPRETEWKRRKFGATVPELQRLREWLGAEGVQEVVMESTAQYWKPVWIALEGEFELQLTQARSNKAPRGRKSDFADARRLVKRWRAEDLTVSYVPAAEQRRWRAMTRFRRQAIRQRVQLQNQIESLLEEGQIKLSCVGSDLLGMSGRRILRALADGETDPQKLAEMRDARVRASEEEVKAALGGQLHSLHCRLLRLSLDRVEQIDQQIGELDMDLGQAMQAHQEAIARLVALPGLGVDSAQQVIAQIGPEAAAFPTPEQLASWVGVCPGRQESAGVSMSQRSPKGNRPMRRLITQLAWAAVKAKESYFQILFRRWVPRLGAKKAIWAVAHRLLRLIWKVLHKGVSYEERGPLGLNKNALHRRKRRLLRDLRALGYKVILEPLPTQGSTV

SEQ ID NO: 479178 - protein, 332 aa, unidentified
MPRKPSARSRAKAEQRYGVQIKAIVIQEAGLDGFWIHRLLLANGIESHVVDAASIAVDRRHRRAKTDAIDGESLLRTLMAWARGERRVCSMVRAPSPEDEDRRRLTRERGTLLKERIQHTNRVRGLLSGQGVRDYNPFRRDRFERLEALRTGDGRELPPMLKAEIRRELDRIALVTTQLAAVERARDALIHTDAEERNNPAALLLKLKGLGPEFASLLWLESLFRSFGNRRQVAAYGGLAPSPWQSGNVERDQGISKSGNRRLRKTMIELAWFWLRHQPDSALSRWFQARVGAAKGRIRRIAIVALARKLLVALWRYATQGVVPEGAVFKAA

SEQ ID NO: 479179 - protein, 343 aa, unidentified
MEVYVGLDVSLKETSICVVDGSGKIVSEATVLSEPLALAEFLRAKAGRAKRIGLETGPTTTWLWHELRALGLPVICIDARHAKAALSLQINKSDRNDAVGLARIMQCGWYKEVQVKSLPCHEVRAVLNSRAQLVKTKCDLENQIRGLLKNHGLVIAKAGGHIFRLRAEELIGGHRLLQEAVRPLLAVHEVVRREIAGLTRKLLAMARNNDESRRLMTVPGIGPINALAFCAAIDQPSRFRRSRSVGAYFGLTPRRYASGEVDLTGRISKCGDAMVRTCLFEAAGVLLTRVQRWSKLKAWGHRLWKRVGFKKAKIAVARKLAVILHRMWRDRTDFIWSTKEAVA

SEQ ID NO: 479180 - protein, 337 aa, unidentified
MKYSGIDLHSNNSVVTVTDEEDRVIAEKRLPNDLAKIIGFLLPWRDELKAVVVESTYNWYWLVDGLQEAGFVVKLANTGAIKKYDGLKHSGDEADARQLAHLLRLGILPTGTILPPEQRALRDLARKRMQLVRSRTSHILAVENIVARQRAMKINSNQVKRLTADEVDQMGLPADVALAVKSNLAVIITLNEQIDVLEKRLQEKIGERKEFILLSSVPGIGRILATIILLEMGPIDRFAAVGNFASYARCVDSRHMSNNKKKGEGNTKNGNKYLAWAYVEAANFALRFNAEAKRFYERKKAKTNTAVATKALAHKLARACYHMLKENKPFDETRCFA

SEQ ID NO: 479181 - protein, 355 aa, unidentified
MENVVRIGVDLAKQVLQIHAVDAAGRVIAARAIARGRFLEWCVQLPAGCVVAMEASTSAHHWCRKLRTMGLNPKIIAAHLVAPYRMQGASGKNDPNDAAAICEAASRPHMHFVPVKTAAQQGVLSVHRLREGMKEERTACINRIRGLLAEFGIVIAQNPRRLREPLADILEDASNELDFMARQVLDRAFGHWRQLDEEVRWCDERIAAHNREDDAVKIAAQLDGIGPITASAVVATVGDFKQFRSGSQFGAWLGLTPRQRSSGGKASLGSITKRGDTYLRMLLIQAARSAVLSAHRRTDPISQWVTKLRDRSGWQKAAVALANKNARILWAVFAHGRKFDPHYVRPSPTKDLAPA

SEQ ID NO: 479182 - protein, 363 aa, unidentified
MLTIGLDVHQSSSSLCFLDAQGNTLKQIEVKGRWDCLLATLARVQEPFQIVFEASTGYGALHQRLSALPLAKKILVANPNRLRLIFQSTRKSNRADAARLASLLHLNQVPTVHVPPQSVRSWRGLIEHRRSFIDQRVAAKNQIRALLRTFHIQAPRGLWTKAGVAWLKTLSWPTDIEGPRMLQLLDLCATLSRHAAATAAQLDTLSASHPSVKLLQSIPGVGPRTAEAFVAYVDDPHRFKSGSIGAYFGLVPREDSTGNHRHLGHITHEGPGTVRKYLAEAAWRGIQDSPTLRAVYERFLRNDKHRRKIALVGLCHWLCRVMLAMLQSGETFKESVLPAPPQSPVQDFLNAAPPPPPAPPEAA

SEQ ID NO: 479183 - protein, 410 aa, unidentified
MDLYCGIDWAEGHHDIAIVDSAGDLLAKRRITDDAAGYRALMELLAEHGDTPEDPVPVAIETSHGLLVAALRAGTRKIYAVNPLSAARYRDRHGVSKKKSDPGDALVLANILRTDAHAHRPLPADTDQARAITVLARAQQDAVWARQQTANQLRSVLRQFYPALLQAGSVWQNGLARPEIRELLRIAPTPGAAARLSTARIEAALRRAGRSRGIAAQAQRIKLILRGDHARQPQAVEDALGQQVSGLLLLLDAGCQAVDQLSIAVEEAFLAHPDAQILLSFPGVGTQLGARLLAEIGDDRNRFSDARALKAYAGSAPITRASGKKKFVGRRFVKNDRLSTAGYMWALSALTGSPGARAHYQRRRAAGDWHAAAQRNLFNRFLGQLHHCLNTGTHFDEATAFTPRAADLAA

SEQ ID NO: 479184 - protein, 465 aa, unidentified
MAPRPGKKGRTPRRVEDLAVAHRHAAGIDVHAAVHFVAVPAAGVPAGFVNPDAKLPAGVRKFGTNTADLGALAAWLKECGVTAVAMESTGVYWIPLYELLASRGFDVILVDPRQTKHAPGRPKSDVLDCQWIRRLHSYGLLTASFRPADDIVAWRGFQRQRDLLVRYAAQHVQHLQKALEEMNVKLTEVVSDVVGQTGLKIIKDIVRGERDPLKLAKHRHERCRATEAETAAALHGTWRKEHLFALKQGLELYEFYRRQLRACDREIEACLRGFADRSGGAALPPRAKQPKPRRHEPRFGARALLFRMAGVDLTVVEGISETTALVLLSEIGTDLSRFPSAKHFVSWLGLCPQHRGSAGKIFGRRVRRGANRAARALRMAAQGCHHAKNALGAFYRRIQARCGGAKAVVATARKIAERVYRLLRYGQEYVRQAEQAYDEAYRLRTVKALARKAEGLGYQLVPATT

SEQ ID NO: 479185 - protein, 409 aa, unidentified
MGFRAGIDWGGSQHAVCVVNEASGGVAARFVVEHTSAGLDDLVRRLARFGSATALPVALERPSGMLVEALLAAGHPVVPIHPNAVKATRPRYRAAGGKSDPGDAYILADLLRTDGHRFRALQPCSDQIKALRTLVRGRDDLVAERVALSNRLTALLESFWHGAATLFADIDSPIALAFLRRYPTPVSAARLGEVRMAAFLRRQRYCGRRRPAELLERLRAAPQGHAGEAEVRAKGELVGVLVSLLEALGARLAEVTARIEQAIADLPDGRIIMSFPRAGRVCAAQILAELGDVRERFQTADELAAEAGVCPVTRQSGKSRAVSFRRACNHHLRQAVTCFAHNSRYASAWAAAIYDRARARGCDHPHAIRVLARAWIRVLWRAWMDRKMYDPERHPAAAAIACDAVPQQG

SEQ ID NO: 479186 - protein, 359 aa, unidentified
MREQRNKISFRGQKIYVGIDVHLKSWSVTVLSETSVLKKFSQHPSPEALYGFLTRSYPGAEYHSVYEAGFCGFWIHERLTALGIDNIVVNPADVPTKSSEKLRKTDTVDSGKLARSLRANELKGIYTPDSVSLEMRSLIRLKNSITKDTTRQKNRLKSQLRYLGIEIPQEFLTPFSNWSKRFFAWLKEIETLTPSGRQALDIHIRHLEELRRQKLEMTRALRTLAKTDRFREPLRLIMSVPGFGQATGMAFLSEICDITRFRNAEQLAAYIGMIPMCHSSGEKDGTGDITIRKHAVMRCNLIEAAWVAVRQDPAMNLFYTEQCKRMPKGKAIVKVARKLVNRLFFVLKHQTEYVNSIVS

SEQ ID NO: 479187 - protein, 401 aa, unidentified
MKEFNAEHHRVESASALAVVSNAGGAERYAAYVGLDVHKETIAVAVAEPGRAEPVYRGEVANRPKSVEKWLSKLSAAYEGGLLAFCYEAGPCGYGLYRQISASGHDCQVVAPSRIPRTPGERVKTDRRDALKLARLLRSGDLRAVWVPDQEQEMMRDLSRARDDMKVQERKARQQLNAFVLRHGHHWPRGKSRWTQAHYTWLESLRFEQPWQQVTLQEYIDAVKEASARVAQFDAHLMRALPEWSLAPVVESLIALRGVDKLTAIVLLAELGDISRFDSPKELMAFLGLVPSEHSSGGRRRQGGITRTGNGHARRVLVESAWSYRFPARQTMHLKRKAKNASASAKKIAWAAQKRLCGRYRTLLQCGKNTKVVCVAIARELAGFVWDIVRQEMPRLAPQGV

SEQ ID NO: 479188 - protein, 381 aa, unidentified
MHSMTQDQAPVVIGGVDAHADTHHAAALDARGGLVGSKEFPATTAGYEQLNAWLHGFGEVEAVAVESTSSYAAGLTRALTAHGVVVVEVNQPHAHSRRRRGKSDAVDAELAARRYLTGEGIAVPKDTSGVVESIRMLRVARHGAVKARTAALLQARDLITTAPQPLREQITVRKTLRARLAICKRFRPGQLSTPTHAAKLALKTLADRVGALDREIAVLDTQLQQLVTTTAPRTTSLLGIKTGHAGQFLVTAGENIDRLSKGESSFAALCAASPVKASSGKTNRHRLNPGGDRQANRALHMIAVYRLGACPRTQAYAARRTQQGKSKPDIIRCLKRAIAREVHHALTADLADLIAHNRPRPAHTTVILCGNPGHGTFRQRT

SEQ ID NO: 479189 - protein, 335 aa, unidentified
MKNYKMIVGIDVSKLTLDTWLMFEPKDSRNSHLRVSNNDKGIKEIIKTIKHLKIDIQDCLFCFENTGIYSMPLSYSLSKIDVDYWVVNALEINRSKGISRGKNDKNDAKEIAFYAFTHLHKLTLTKIPEREIAELKILFTEREKLIKAIKVMDTTKEVQGFIPKEIIKNVMKLNAKTLLLLKKQLNEVEKQMNEIVIKNENILTQQNLITSIPGVGKQTALYLIITTKCFDRFENWRQLACYAGVAPFEFSSGSSVRGRTKVNHLADKKMKSLLNMCALSIKKYDKEIAEYYKKKVSEGKNPMLVMNNIRCKILSRVFATINRGTPYVNTHKFAA

SEQ ID NO: 479190 - protein, 404 aa, unidentified
MSVHAAPVTSSTIVVAVDVGKASAMLSATDSARHRVLGPVEFAMTRSGLVTAVHRLSTVIPPGAQVKVGIEAAGHYHRPVLDYRWPAGWEVLEFNPAHVAEQRRVAGRRRVKTDAIDLEAITELVLAGRGQVIAEREVRIGELVAWATHRSRRVATRTATKNQLLGQLDRAFPGLTRALPDVLGTKIGRLVAAEFADPARLSALGVTRLIRFAAARDIQLRRAVAERLVAAAAEALPTRDGVVARRVLAADLRLLCDLDTQIENAECELAALLPASPYTTLTSVPGWGVVRVSNYAAALGDPDRWPGPRQIYRASGLSPMQYESAGKRRDGTISREGSVALRRAVIDLGVGLWMSDPAAKAYAAELKSRGKPGGIIGCALAHRATRIAYALVRDHATYNPSRWA

SEQ ID NO: 479191 - protein, 286 aa, unidentified
MKTYYVGMDVHRASIVLVVLNGAGKIVMQSVIETGAERVRGFLKQLRGKVSVTVEEGTQANWLHEVVRPLVTEVVVCDPRHNKLLQSGNKNDRVDAQKLAELLRNGALKAVYHGDNGVRALKELVRTSDCLVSDTTRVMNRLKAIFRGRAIACGGHDIYRQDRRKQWLEKLREPGAKQRAGFLYEQLAALKPLRHKAKLAMVKEVRRQTAYPWLLSVPKLGPVSVAQLIAVVGTPHRFRSKRQFWTYVGLAVVTCSSADHEVVNGVLRRSTRPVSTRGLNRNHNHL

SEQ ID NO: 479192 - protein, 428 aa, unidentified
MDFTQNERIAQINENTLIIGVDVAKKKHVARAIDDRGRDLAKRLVFINSHQGFFTLLNWARELANEHKRPEIIIGMEPTGHYWLNLAYNLKAEGIHTVAVNPMKVKRFKEMDDDSPTKNDTKDAKVIAQIIKDGRFHEPTLPEDVYAELREGMKLHDIIQEDLSSIKAQMHNALDRYFPEFLDVFKDWTGKAALHLLEKGYLPNDIRQASEEDLMAEVKTAAQRAVGMKRIQALKQAAQNSIGLTVGLRMAREEFRYLIDQYKALEERLVALEAQLEELVLLVPGAEQMIAIKGVSTMTVAGFFAEVGDLSNYRDPRQIIKLAGLNLMMNQSGKFKGQTTITKRGRKRLRKLLYQVARPLSFHNEAFRKLHDHYCHRSTNPLTGKQSFIALSRKLVKIFYVLGTRKCIFSEERMIRDIPGLSGLQEAA

SEQ ID NO: 479193 - protein, 400 aa, unidentified
MEKMRKEVKLTVGLDVHPDSITAAIVVGDKPLEAMVDKVSDAVGIDDMESWFDKNVPTGSIVVMEASGNSFDVYARLSAAGYRAIVLESSQVGKISKSYCNTDKISAVRIAKAYLTGLSDEVWVPDPVTRERREVFSAYQQATKDCTRHNNRIKSLLNSYTIRLKKNERNLNNAKVRSKIYAARDWSDAQKALLDEAFCDLDRATEKRKRMLGIMASEVIREPKMLQLMRIFGLNVIASYGLIAMIGEPGRFLNPKKLSAYFGLCPKIKQSGNVARMGGLSKKGRRQTRCILVQAAQTVLRHKSKSNPLYHWAWKMNFKKGRNIAVIAIARKIAVAVWYLLMGKPFNAKERSLTIRRKVTDIAKILGKKQVHKMGFKTYKLFVEHHLDLIELFACKGGHT

SEQ ID NO: 479194 - protein, 408 aa, unidentified
MELKPMHRRVIALDVHQAKITACAVVEHDDGRVEVTKRDFGAFRRDRRALAEWALQIGPEVVVMESTGVYWKSPFAALEAVGIIAWVVNARHVKAVPGRKTDMADAQWLATLARAGLLRASFIPPARMRELRLVARQRQKLVGMCSAEKNRLHKVLVDAGIRINVLVNDIHGQSARAMVKALLQDRPLHEVLDLKGRLRAGRAELFEALSTEQLSATHRFVANEILQHIEQIEQRIALMDQYLLQGLQPWQAQLKLLQTIPGIDEQGAAMLLVEIGADMDAFGSAERLASWVGICPGNNESAGKRKSGRIRRGNAWVRRLLCEFAQAAARTRCAFKDKFQALAIRKGHKKSIVALAHKILRTVYAMLANGAHYQDRAVDYEALNVQRNAPRWIKMLRKHGFIATPAAA

SEQ ID NO: 479195 - protein, 321 aa, unidentified
MAKQNQAVTFEEVVERGCGLDVHKKEIVATVSGTGIESETRTFHSTTRSLTELKEWLLALGVTHVAMESTGVYWKPVMNILEPGGFTIMVVNARHIKYVPGHKTDKKDSAWICKLLRAGLLKGSFVPGREQRDLRDLTRYRRKLVQQQASEHNRMIRIFEDANLKLSSVFSNIRGKTCTAVIDAVISGETDPVKLAEMCTHWRLKSTQEEISLAVEGCFTEHHKFMIRAIRTSIKSIESEIEHLDKEIERRMQPIDDEMKQLCEIPGMDTKAIRELLAEIGVDMEVFPTAEHLTSWAGLAPGNNESAGKKKVHTPTTAIRR

SEQ ID NO: 479196 - protein, 414 aa, unidentified
METFYRSVAGIDVHKKMLAVVVRRQTGAQVEYVKKMFGTTCAEIEHLAAWLQHERVEEVVMESTAQYWRPVWYGLEQHFRPHLTHPLKTQAPRGRKRDFRDAMRLADRWSSGELEESFVPDAEQRSWRSLTRTRVQMKRKMGVIRSHIEGLLEEGGIKLAAVVSDLFGVTGWAILEQIAKGQTDIEKLLSHTRGSLHKKRPQLEAALRGRLGPVYRLLLSQQLEQVKLLVNQIEEINQVLGTQMQEHNPVLVRLTSIPGVKLYAAQELVAEIGPRAAAFPSAEQFASWVGLCPGSNQSAGVNYSSRSAKGNRYLRRLLCQIAWSSIHNKDTFFAGLFARLKGKLQAKGAAWAVAHRIGKVIWLLLHEQVEYQEKGPAPMNPRSLMRKFKRIVSEFQRLGIDVKPLLDNPSPPHE

SEQ ID NO: 479197 - protein, 364 aa, unidentified
MYDSTTTVTVGLDVHARSVRLAAVRADELLEERTLPYDEDAVERVLRRWPGVRCCYEAGPTGFGLYRHLIGRGIDCSVVAPGLVPQRPGDRVKTDPRDARKLARLLAGGLLEPIHVPSRELEAARDLVRAREDARLDRMRDRHRLSKFCLRHGRVLPTSSWTVMRRKWLGEQRFEFAVQQITFDSYVHTVGLVDARIEQLERAIRETAEQEPWCGLVARLRCLRGIETLTALALVTEIGDFDRFKTAEEFMAFVGLVPSEHSSGEKRRQGSITKVGNSHVRRLLVESAWHARRRPKVGYELARRQRGQDAVVVERAWRCQQRLYQRWQRMAGRGKPQQKIVVACARELAGFVWAIATEQPLRNT

SEQ ID NO: 479198 - protein, 343 aa, unidentified
MTEVITIGVDLAKNVFQVHGVDAEGGVVFRRQLRRGQMLPFFKKQPPCLVGMEACATSHHWGREIEALGHQVRLMPPRYVKPYVKRNKNDMADAEAICEAVTRPTMRFVEIKTPEQQSVLMLHRTRHLFVRQRTTLINALRAHLAELGIVAGVGRNGLERLLKVIEDGDDDRVPSAARDCLLALRDQLEMVKHRILDADRRILAWHSSSEISRRLDDIPGVGPLIATALVASVPDPHAFKSGRDLAAWIGLVPRQNSTGGKERLGHISKAGNRYLRMLLVIGALSVIRRAKQVGYTRRPWLTKILERRSTKVAAIALANKNARTAWAMMAHGTFYQEPESQAV

SEQ ID NO: 479199 - protein, 459 aa, unidentified
MGNARKGKIPAQLVEDEDYQLRHERVAGIDIAKAKADVCTRLPPSREGGRRASRVEEVPARGREVMALAGRLLADGVELVVMESTSDYWRIWFYLLEAAGLRVQLVNSRQARQLAGRPKTDRLDAQWIARLAEMGLLRPSFVPPPEIRALRDLTRTRLQLVRDRTREWQRLEKLLEGALVKLSSVVHSLARTKTARVILEAIAGGGSDPGALAALAAGRVKGGRGAIAGALEGMQVRDHHRMLIRVHLDHIALLDRSVAAVEDEIEAALDAIPAAWGTDATGETGPDAGRGPGAAALPAAARLAEIPGVSLALARAIIAETGLDMSIFPTAAHLASWAGLAPVASQSGPRTRKPAKDTGDAYLKGYCTQAATGAAGTSTFLGERIGRLARRLGGNRARCAVARSILIIVWHLLPDPGARFADLGPGWHERKTDRDRKIRAHVRQLQALGLTVELSETAA

SEQ ID NO: 479200 - protein, 396 aa, unidentified
MAQIWAGVDIGKTGHHCVVINTDGKRLLSRRIANDEPELVKLIDEVRELGQDTVWAVDLPDGGAALLIGLLVERDQQLLYIPGRTLNRVAGGYRGEGKTDARDAAIIADQARMRRDLHPLRPGDEVTIELKLLTTRRADLVADRTRAINRLRGLLSGIFPALDRAFDNLTLVGPLTLLTGYQTPAALRRTGASRLETWLSTRKVRNPGKVAAAAIEAAARQHTRLPGEALTASMVAALAEEVMALNERIKEADKLIEGRFHRHELAEVIISLPGIGTLLGAEFLAATGGDMDYFGTPDRLAGFAGLAPAAWDSGRIRGNLHRPKRYHRGLNRVFYQSAMISISCSPESRTYDRKRGEGKKHTQAVLALVRRRVNVLWALIREKRPYQPLPPVAVAA

SEQ ID NO: 479201 - protein, 428 aa, unidentified
MTSPDSIPADAVLVAIDIAKVRNEVLIEAAGAKRRRRLSVLNTRVEHDHLIEALLSYQRPVVCAFEATGNYHRPLAWRLVEAGFEVRLVSSLALARTREALHNSWDKNDPKDAQVILHMLRIRATQIYHDPLRAGINDVQELSKTHEAIAKAKTEIQHRILTHYLPLYFPEIQRFKGNSRSDWFFAFLDAFPTPASIATLTKEEFVAAAWDVVGRKVSKSQILMDIYETARTSIGLPLPIDAPAIRMFRMVVAEARSLIRQRHVIETQADELLRHSRDYQLLRQIPGIGPINALTIIAEAGDLRRFHHHRQFLKFCGLDLSTQQSGQYRGQTRLSKFGNARLRRTLWIAGQVAIRQRENGFRHKFERYIAKNRDNPDLRRKAMTAITAKMARVVHAVVKSGSDYRPFIEGRYQVEEPLSARAVRASSR

SEQ ID NO: 479202 - protein, 310 aa, unidentified
MEAIYVGIDVSKDRLDVHVRPGEEAFAVARDGKGLEELVARLQAISPVLIAVEATGGFETIVAAALAGAQLPLVVVNPAQIRHFAQAVGQRAKTDPIDAAVIARFVEAVKPEPRAMPDQEARLLAELVSRRRQIIEMIVAERQREKRAENVRVRKSLARHIKVLEKELPEIDNDIDTLVRGSPVWRAKEELLVSFPGVSNTLARTFLAEVPELGTLNRRQIASLAGLAPFTRQSGRWKGKSMIGGGRAKLRAGLYMAALSASRYHPQLKVFYRRLVTAGKPKMVALIAVARKVLTTLNAMLRDQKPWQPA

SEQ ID NO: 479203 - protein, 351 aa, unidentified
MIIIGVDYHPSSQTIAFLNQETGECGERQLNHSDGEAEKFYRELKQRGVSVRVGMEATGHSRWFERLLAELGFELWIGDAAEIKTKRVRKQKTDREDARLMLKLLLENRFPRIWVPSPENRDLRQLLWHRHRLVQMRTRIMNQLQAVAMNEGYRWKKKLFSEKGRGLLEKLPLAPWASRRRKELLELLDQLDPKIAELTAAVEQEAKKRPEVLLLMTHPGVGPITGLVYVLVIGTPKRFPCGKQIGSYTGLIPCEDSSAGRQRLGHISKQGNTLLRFLLVEAAQAAARCNPDWRRKYLHLMIRREKRIAKVAMARKLAVRLYWMWRNHWQYSQLVEFGSNAGKLVLVHGVK

SEQ ID NO: 479204 - protein, 397 aa, unidentified
MYIVGIDIAKRKHEAAVIDGEGAVIIKPFSFTNNCSGYNRLLAMLAKAKLPLDEVSFAMEATGHYWLALFTRLQKEGFRVQVINPVQTNSIRSFYIRQAKTDPRDALLIAEVIRFGHFSESTLHPENIYELRELCRGRHAIVSMQADVKRKVVALLDQVFPEYETAFTNLFGDTSMAILQTCPTPKELSEMPLEELCHLIEVSSHKRFRMAKAQELQELARNSFGFAMAGDVFSTMIRLYAKHLDFLKQQVREMDRKIAEIMETLDTPITTITGIGPTLGAYILSEIGDISRFSSAAKLAAYAGIDPTMRQSGEYNGVRNRMSKRGSPYLRHAIWLAASSAVLHDPALKLYFQKKRDEGKPYMASVGHACRKMVSIIYAVMRDNKAYTPYIPNEISV

SEQ ID NO: 479205 - protein, 425 aa, unidentified
MNYKQNEKINQVKESTLVVGIDIGSTTQYARAFDWRGIELGKVFPFSNSREGFESFKAWMQHLQDKYKKLDAIVGIEPTGHYWFDLGAYLEDEGILLVMVNPYAVKQTKELDDNSQSKNDRKDPKVIAKLVTEGRYSAPYTPDGVYADLRIMVANRKRLIREMTQIKNRFARWFAIYFPEYTDVFGDYEAQSSMLLLKKVCTPEAIVELGAEKINQIWRDAKLRAVGMKRATTLCETAKRSIGLKKGSSAARYEMKLLLEDYEYKKAQLDAVMEEIEKLCRKIPESEQMLAIKGIGVITVAGFLAEVGDVRRFESPRQIQKLAGLSLRENSSGKHKGQTSISKRGRSKLRAVLFNAAIPLIAKNPEFKSLHEYYTTRANNPLKKKQSVIAISCKLIRVFYAILAKGVTYDAQKLISGIHRQPQVG

SEQ ID NO: 479206 - protein, 414 aa, unidentified
MGLPRWVGRAIGLDVHREFCEVAICEEGVTRSAGRVPATPDGIKTLAGSLLPSDRVALEVTGSCWEIARILEPHVNRVVVVSPDDTGITSARAKTDKLDARTLATLLWKGELEAVWMPDERCRILRRRLARREQLVRSRTRSKNEIHAALQRRLQAKPPCSDLFGVKGRQWLASLELPLEERESVNAAMRHVEFLDAEIAAAEKLIAQQALSWPEIRRLMTVPGVNLICAASFIAAVGNPNRFLTSRKLVAYLGLDPRVKQSGEGPARSGRISKRGSPAARWALVEAAWTAVLQPGPLHGFYERTKNRRGHGKAIVATARKLAVLFWCMLTRGQDYAHQQPSLTRKKLRRLEITAGARKNTRQAAGVWSTNAMMRQAERELAQQAEASYKRMVQDQLAGGPARKAGASVTPERA

SEQ ID NO: 479207 - protein, 419 aa, unidentified
MIYIGIDVAKDKHDCFITNSDGEVLFKSFTISNNREGFETLFQKVQSISDDLTKVKVGLEATGHYSYNLLGFLLDKGLPTYIINPLHTNLYRKSLSLRKTKTDKVDARTIASMIMSDVNLKSYSDTSYHNEELKSLTRYRFDKVKERAKLKSSISRLVCILFPELEKLVPTLHMASVYALLSEFPSANAIASSHLTRLTNLLSENSHGRYGKDTANLIRNTARNSIGSHMPAKSLELKHTIKLIKELTTEINEIETEIKSIMDKIDSPILTIPGIGYNTGAMIIAEIGDFNRFDSADKILAYAGMSPSTYQSGQLENCHSHMEKRGSRYLRYALYNATKYVCYWDESFGVYLGKKRSEGKHYNVALSHATKKLVRLIFAMEKSKQPYQPTNSLILFINILFLSTIYDALFVIQFFIIPI

SEQ ID NO: 479208 - protein, 321 aa, unidentified
MATADVVVGIDVAKEQLEVMVLGVAWTAQAFPNDPEGHTVLAAALAPLGVRLVVLEASGGYETAAACALQAAGLSVAVINARQARDFAKSLGRLAKTDRIDARTLADWAEVLLRQPDLARYIRPLPVEEQEHLAALVTRRRQLVAMLHSERLRLAQARRLPIRTSVEIMITTIKAQIDDVEAQMKRHIETHHAAAAKLLRSMMGIGFVSCANLIADLPELGRLTRRQISALVGVAPYAKDSGRMRGLRRIAGGRFELRRVLYMAALVAKRSNPVMKAYFERLVAAGKKPKVAIVACIRKMVTILNAMVRDQKLFTLEAAAA

SEQ ID NO: 479209 - protein, 346 aa, unidentified
MNKIVVGVDLAKNEIQVCVTKHNKVHSNEAMTPRDFKIWLANSDTMTIVFEACSTSNYWKQQAIACGHDSRLISAKLVAQIRQNQKTDKNDALAIVQASQLANVDFVNGKSKAQQALQSLVRLRELAIKQKVASYNQLTGLLLEFNIRVAGAKGGITEVVKSILEDADNDFSPEFRHALNIALHHYQSLLEDIAQYDMCIEKAANQHKTCKSLMAIEGVGPLNAINLYISLGCGEIGTFKKGRDAAACIGLTPIQHSSGGKVKLGSIGKYVKNKTVRSYLVSGAMSVVNQATRRVAKTKKELWIQQLVERKGKRCAAVALANKTVRTAFSMLTNKTEYKAELLSAK

SEQ ID NO: 479210 - protein, 348 aa, unidentified
MTLVGCDLHSRKQQVAALDTATGEVLEQELVHEGDAVERFYRALRPPVTIGIEATGYTQWFHALMHRLGHTVLVGEAAKIRAMVVRKTKTDRRDARHLLDLLRHDRFPTVWIPDPATRDLRALITHRVRLVRMRTMVKNGLQAIALNQRLTLRSGLWTQRGLAQLQALSLPTYATRRRDDSLELLAWLTTRIDDLDDRIAASADADPRARLLLTHPGVGPLTALTTVLVLGPIARFPDSKHVVSYIGLAPAINASADKHHLGKITKQGSALLRWVLSQAAPLAARADDDLRRRYFAILHRRGRPKAKVALARKLLVRLYVMLRDRVDYDEFCRRGRARHQSRRATTVM

SEQ ID NO: 479211 - protein, 401 aa, unidentified
MKTVLSVDVAKNKSMIMLMNSDGEILIDTKEIKHNLEDFEKAKEEIKEISPENLTVFMESTGTYHLPVERYFKENGFNTLVINSLTTKNNYDTIRKTKTDKKDCYRLAKLFFVNEVEYHELSKKDLYANLKAMTRQYFYLLQQNVSCKNRYKRLLNICFPELEKIFKSTRIYDDTALNFIKEFPHAEIVKEKRIDALYNNLYKTNGRNLNFYKRLSETIKIASANSYPGVDKEHKDVKNLSDMAKIVQNNNNVINELRDKMIETAKKSPYYEIINSFYGIGEILTAEILGELGDITRFDSPKQLIAFCGLDPTIKQSGKSINVKGAISKRGNKYARYILFNCSQMVVKLGASNYPEHPVYIYYQNKKAEGKHYYESLTACSTKILRMLYSCLLYTSPSPRD

SEQ ID NO: 479212 - protein, 377 aa, unidentified
MHSENIAAYVGLDVHKETLAVAIAAPERLGEVRYYGTINNEAQAVRRLFQKLQGLYGNILSCYEAGPCGFGLYHQLTAMNIKCQVIAPSRIPKSPTDRIKNDHRDAISLARLLRAGELTPVWIPDLTHEAMRDLIRARAAAKRDSIVARQRILSMLLRTDKHYAGKHWTGKHRTWLANQSFSQPSQQIAFQHYCQSLEQIEDRILQLDQEISRLLPEWFLCNLVCQLQALKGVGQLIAITLVAELGDFSRFSNPKQLMAFLGLVPGEYSSGNSIRPRGITKVGNSELRRLLYEAAWSYRTPAKVGAWLIYYRPDSVTQYSKDIAWKAQQRLCSRYRSLTAKGKKSQVAITAVARELTGFMWDIAFAAQSSFSQQKQN

SEQ ID NO: 479213 - protein, 317 aa, unidentified
MMEAVLERCAGLDVHQETVVACVLTGPLDRTPKKEIRTFNTMTDDLLALGEWLVDMNCTHVAMESTGVFWKPVWNVLEAFDVELILANAHHIKNLPGRKTDMKDAEWIAKLLRCGLIEGSFVPSEDIRELRDLTRYRKKLIHDATAEKNRIHRVLQDANIKLTTHMSDVFGVSGRLLLQKIINGEVITMEFLETKMKGALKHKSAKLLQSLNGRLRRHHRDMIRFSWDHLSYIERTLSDVEQEIRQRLANKQEALDLLVTIPGVNEQAASVILAEIGTDMNQFPSDAHLAAWAGLSPGNHESAGKKNESEQGQGTAS

SEQ ID NO: 479214 - protein, 372 aa, unidentified
MNYNTVYVGMDVHKESFSLCSYTIEAEKASHYQRKEADYKKVLNYLEFLRTIYGDDANFICGYEAGCLGYTLYHQLTANNVKCIILAPTTMLEQRSKKRIKTDKRDAEIIAKCLAQHNYSPVHIPTAKDEETKEFLRMRDDHKLALKKVKQQILAFCLRHNYRYDGNSHWTAAHLKWLKALTPEALYKEILDEYLLTYHTLSDKLERLDKRIEELSTQDEYKEAVKKLCCFIGVKTHTALSVLVEVGDFNRFASAQHFASYLGLVPGEDSSGNDQNRLGITKAGNRHVRLLLTEASQCYARGQVGFKSKKLKARQSGNTPAVIAYADKANERLRRRYYKMVLNKCKKHNVAKTAIARELACFMWGMMTDNIA

SEQ ID NO: 479215 - protein, 366 aa, unidentified
MRKVMAGMDLHGNNVMVGIVDDQGARLQHRRLACELPEIIEFLAPYKAELESIAVESTFNWYWLVDGLRAAGFPVVLANPAKIDQYSGIKHADDKNDAYFLAELQRLKILPTGYVYDPELRPVRDLLRRRMSLMRQRTTLFLSAKSLHQRTTGRGLELRRLKAMEPEEAAALYTHPANQLIAQIQKEHIESLDQSIRQIEKAVLKVALQQPYYQRLQTIPGIGIILGLTISMEVGNIDRFAGPGQFASYCRTVDAKRISNGKTKGDNNQKCGNKYLAWAFVEAAHGARRFDATCRRWYDRKAGKKCTTVATKALACKLAKAAWYVMAKGTEYQAGKIFPGLTEPKAEEISGEQASASKGVGPNPED

SEQ ID NO: 479216 - protein, 364 aa, unidentified
MKKSIKKPQAKETKPNRTMGIDIGDRWCHYCWLNEDGEVVETGKIRTREKDLREFFEGEKRMRIAMECGTHSPWISRLLEALGHEAIVANARKIEAITGSESKDDDHDAEQLAVFAHFDPRLLYPIQHRSAERQRDLSLIQARRTLVQARTMIINSARGLVKSMGGRLPQCSSESFGQKARPAVPANLVGLVTPLLEQVTLLNQQIKRMDQQIEELEKRYPEIIRLRSAPGVGPLVAAAYVLTLNGSDSVTHSRQAGAFLGLRPRRKQSGDSDPQCGITKTGNNYLRALLVQSAQHILGRFGPDSALRRWGLKLAASGGKRGKKRAVVAVARKLAVILHRMWASGQNYQPFPPAIAGTQTVTAK

SEQ ID NO: 479217 - protein, 427 aa, unidentified
MTLTNQRISRISETTLVIGTDIAKHNHVARAFNYRGIELSRRCLFQNDENGLLNLLAWVESIKQEHGLTDVLLGVEPTGHYWFPLFHFLKQRGVEVVLVNPHHVRRSKELDDNSPTKNDIKDAKVVAKLVLDGRYTQPQLPEGVYADLRVLMNQRDRLCGDLNRVRGRIHNWLDRFFPEYRQVFKDGEGKASLITLQHFPLPQDVVGAGETTVMATWKKNGVQRAVGPKRAELLYRKAQKSIGLTEGATAARYELAMYLEQYAMLCRQIERLMEQVAALVEQIPGASHMMSIPCIGLVTVAGFLAEVGDLSGYEHSQQIVRHAGLSLRENSSGLHKGETTISKRGRCRLRALLYRAALTMVAKNPEFRALHLYFTTRRDNPLKKKQSMIALCIKLIRVLFELGRKQKKYDSSKVLGPHREAQLQAAA

SEQ ID NO: 479218 - protein, 344 aa, unidentified
MDHFGGLDVSVKETSICIVDDTGRIVKEVKVASEPAALLKVLGNPTYRFKRIGLEAGPLSQWLFSALAEAELPVICVETRHMQAVLKAQINKTDRNDARGIAQMIRVGLYRPVHVKTLRSQKLRMLLTHRKLLQSKAIAIENDLRGTLRNFGLKVGMVGKVRFEARIQELVENFPDLSVLVEPLLIVRRALREQVVILHRRLLAIVREDEVCRRLMTTPGVGPVVALTYRATVDVPARFRKSKSVGAVFGLTCSRYQSGEIDWSGKISRCGDEMMRTMLYEAAQSMMHSKKWSWLKAWAMQIARRRGMKKAIVALARRLAVIMHRIWVDGTEFRWTREQAAAAA

SEQ ID NO: 479219 - protein, 307 aa, unidentified
MFIGIDVSKDRLDVHVRPSGEVFAVARDGDGLEELVTRLRTLAPQLVVVEATGGFETVVASAIGAAGLPLAVVNPRQIRAFASACGQWAKTDRLDAQIIARFAEAVQPEARAIPGESARALGELVTRRRQIIGMMVAERNRRRLLTQPRLLKTVDRILATLQEQLSAIDQEIDEAIRGTPAWREKEGLLTSAPSIGPKIARTLIADLPELGALTRRKIAALAGTAPFSRDSGQWRGRRSIAGGRSSVRAALYMAVLVSIRRNLPLAATYQRLRAAGKPAKVAIVATMRKLLVILNAMLRDNQPWHTA

SEQ ID NO: 479220 - protein, 363 aa, unidentified
MNATAALPIVGVDLAKSVFQLAVADGTWRVVEQQRLTRLQFERWFINRAVGLVVMEACGSAHHWARWLNGLGIDVRLLPAAYIRAYVKRNKTDAADACALLEAARCAEIVPVRIKSVEQQALQAMHRTRSLWMATRTSRINALRGFCREFGIVIAQGSRLGVEQIGRVLADPHSAVPLLIRRSMSLLVEEIRLLEVRIAQLERELTALARQSPACTTLLSIPGIGLLTATAMVAATSGEVSHYRDARHFASWFGLTPKEHSSGSTRHLGRISKRGDRYLRMLLTHGARSVLRAASVTVQAGKTVDGLRQWALGVQRRSNHNKATCALANKLARICYATLRDHEPYGAARLNKKVARTAFALPA

SEQ ID NO: 479221 - protein, 436 aa, unidentified
MDIVHPRVAGIDVHKKVIWVAVRLPGEAPGQRAVTVRRFKTFWRSLQEMAAWLAGLGVTDAAMESTGVYWWPVYHALAGAGIEVCVCNAAHMRNVPGRKTDLRDCQWIAELHEYGLLRASFIPAAEVAALRQRTRYRKKLIGQRSSELQRLSKVLEDGGVKIDSVASTLTTASARDMIEALIAGQRDPAVLAQLARGVMRKKIPELQMACDGRFTDSHAQMCRLHLDAYDHLAAKIAELDLLVAKAAEPFAAVITHLITIPGIGQRTAQVIVAETGADMARFASPARLAAWAGLAPGDNESAGKRKKAAARQGDRHLRAAMVEAAWTVSRTATRPGARFRRLARRFGRGNEKKAAVAVAHTLTCIAWAVMRYDRDYAEAGADYYDHRDARNRDHLVRHYQQALARLGYQVTLTPPGDGHSPSAATTTPATPPGQAA

SEQ ID NO: 479222 - protein, 346 aa, unidentified
MEVLIGVDPHKGSVAVAALDEATGELIARAGFAQDRAGLRSLERWAKRFPERRWAVENAGGLGRHLGGRLAGSGESVVDVPPKLSSRVRLLSSGDARKNDELDALATALAASRNERLASVDPEAASEVLRLLSERREDLVAERTRALNRLHALLRDLLPGGVARSLSADRAARILRGIRPKGTSARLRRRLASEVLRDVRTLDRKIAELNRRVEAEVEASGTTLTQIFGVGPILAARIIGTVGDVTRFPTKAHFASYSGTAPLEASSGEAVRHRLSLAGNRHLNYALHMVAVCQARSDARGGTYYRKKMAEGKSRKEALRCLKRRVSDAVFRSLLADSRTDSRGAA

SEQ ID NO: 479223 - protein, 395 aa, unidentified
MKHILSFDIAKGKSVYCFIDEKKNVIRDATMIEHKKDEFDALFNFASKYENLVVIMESTSIYHLPVENYFRSKAIDTIVMNPKLVKQYKDTLNKSKTDKLDCFKIARCYFGTIDNLYQKQDEYFMFNPLARQYWSLVEGQTRLKNRYKQLIEIVFPEFNLLFNDLYSDLALNFIHDFPHPVLFVNRRNDYLMNYLKTKNGTTQAFRFKNKVLKMKELAKNSLCYVSVDSLQVQNLIQVIEMIQYHKQEIKKIKNQLINNLKSTKLFKIINSIPGFGDFSTALFLAEVGDITRFNERKEFISFIGIDSVTSQSGVASYHGPISKSGSKFARTILFNVVTTLIQISAHIDKDNPIYLFFRKKQSEGKHHYKCIIACENKLCKTIYKMCTSDCTFMNK

SEQ ID NO: 479224 - protein, 370 aa, unidentified
MKGQDSKINFEGETVQVGLDVHKKDWKASFCTANRQPSVHPITVGQPVVENLSNYLDKNYPGATIEICYEAGFCGFWIYHELTALGYKVLVANPADIPTSDKERKHKEDKRDARKIARGMKEGSIEGIYVPNQEVLRDRSLVRERYSIAKSLRRIKTQIRSHLMLYNMELEDYKSKNHWSKRYINDLIDLAEKESDETLQFQLDRLNYLRNLMLKANRSLRALGKSEKYVDLFTVLMSVPGVGMLTTMQLITEIVDMKRFSNFDKLCSYVGFIPMTHSSSENERVGPITKRSNKRLRTALVESSWTAIGSDPELLLKYEQYRKRMKGQQAIVYIAKILLRRIRFVWINQVEYQKGVNLGKSTEKKNTASE

SEQ ID NO: 479225 - protein, 394 aa, unidentified
MILVGIDIGKNKHTFSIINKSSGEILLSPSDFSNNLEGFLFLIQKLNNYTKSELLIGMEDTGHYHFALLKYLLDRRYTVAMINPTTTDLTRKLQGGITKNDHLDSLTIWDVISSNHRNKPYRVTKLNRFDLYEQKQLTRHHHNLKEELNTYKNRLQKCIDIVFPEFNSLFHSKYGIVYMNILKIFSSAKAIANADIRSIRKCFEFKGKGKRISLSAEQLKLIAKSSIGIPSVAEEIQIRHLVSQIELLKKQISEIDKRIEEFSLKNNSPILTIPGISHFSGTSIISELGEICNYTKASQIIKFAGVAPYHYESSQFTAQHTAITKKGSKYLRKTLYQIILPVISNNEVFHAYYTKKLNEGKGHRCAQGHCIRKLLRVIYHILSTGQPFNPELLV

SEQ ID NO: 479226 - protein, 349 aa, unidentified
MMNFYNEAHEFYCGIDLHANSMHVCVVDQQGKKHLHRNFETKKPDRFVTALQPFEKRDLIIGCESTFNWYWLADLCHGLNVNFLLGHALYLKAIHGGKTKSDRIDSEKLAMLLRGGNFPTSYVYPKQMRGTRDLLRRRGTIVRRRSATLVHVQIVNHQQNLPAFEKKISYKANRKGVAERFDGENVQKMIDIDIRLINYYDQLIQHLDLYLEQHAKVDDADSFYRLKSIPGVGRILAMTMLYEIHDIRRFRKVGDFLSYARLVKGTNSSAGKQYKPTGAKIGNPHLKWAFSEAITLLKRECPAAKEFTERIEKQHNKARANSLLAIKLGRAVYWMLNRKTAFDPKVFIK

SEQ ID NO: 479227 - protein, 352 aa, unidentified
MKHFIGCDVHTRNQVVAWIEEETGEIKKRRLEHEGAEVKEFYAQFPRGTVVGIEATFPAHWFERLMGELGHELWVGDAARIRASEVRYQKTDSRDAEHILDLLRTDRFPRIWVPSLGERDLRQLLVHRMKQVRARTQVKNQLHALAISQGVCRKSKLWSAKGRKELESLALLPWAARRRKELLETLDRLDEQVRELDRAVEEAGRERQEVALLRTHPGVGMVVGLAFALTVGPVERFSNSRKLVSYWGLNPRENSSGGRQRLGSISKQGNPMMRWLLVEAAQTAARLDPQLGRIYQRLKKKKTSGVAKVAVARRLAVRLFWMLRTRNNYAQLVQMSGSPSSAVVPPTAEPKV

SEQ ID NO: 479228 - protein, 347 aa, unidentified
MDHFAGLDVSVKETSICIVDDAGKIVREVKVASEPEALLAVLKNLAYHFKRIGLEAGPLSQWLFSALAEAGLPVICVETRHMQAVLKAQINKTDRNDARGIAQMMRAGLYRPVHVKTIRSQKLRMLLTHRKLLQSKAIAIENDLRGTLRNFGLKVGMVGKVKFEARIRELVENLPDLAVLVEPMLIVRRTLREQIVILHRRLLAIVRDDEVCRRLMTTPGVGPVVALTYRVATVDVPARFRKSKAVGAVFGLTCAKYQSGEVDRNGRISRCGDEMMRVMLYEAAQSMLRSKKWSWLKAWAMQIARRRGMKKAIVALARRLAVIMHRIWVDGTEFRWTREQATAAAAA

SEQ ID NO: 479229 - protein, 445 aa, unidentified
MSDARLSTKIAEPEWAAFVAIDWADQKHFWRLALADSGQQERGELENTPEAVDTWAVGLGVRFGGRQIALCLEQSRGSLVYMLTKYSHLVLFPVHPKTAAQYRETFCPSGAKSDPSDTASLLDLLQRHRERLRQLQPDTSETRLLQLLVETRRRTVNEKTRQKNRLTDCLKRYFPQVLEWFDEVDSPLVAALLQRWGNLTELKRAHPGTLRKFFHKHNCRDEERIQERIAGIQAATPATVDAAILEGEAFNARGLVAVIATLWSHIDELDQRIAQLVAEHPEGSLFGSLPGAGVVLVPRLIVAFGTRRERYDSAYEMQCYSGIAPVTEASGKSQWVHFRRPCPKFLRQTFHEFASHSIRKSEWARAFYDSQIAKHKSHHAAVRALAHRWIRIIFRCWKDRKPYDEQTYQRSLQRRGSPLIGSFAPATGAGWKSIAGFQKLSQETS

SEQ ID NO: 479230 - protein, 368 aa, unidentified
MKKNNTCLKSPKRNKTRKRSLTIGMDLGDKTSRYCVLDSDGEIVREGTVRTTKKGMKQRFGSLAGCRIAIEVGTHSPWVSRLLSSLGHEVIVANARQVKLISASSRKDDRLDAQTLARLARMDPQLLRPIRHRSEKAQGDLMQVRVRAALVDTRTGLVNAARGLAKAMGERLPKCDADQMGVAKTQGMSAELSEALRPLLETVEALTKQIKASDQKLEQLAERDYPETELLRQVSGVGSLISLTFVLTVEDPHRFRRSRDVGCYVGLRPKRSESGESRPQLGISKEGDEYLRKLLVQGAHCILSHKSPDTDLKRWGLKLAGKGNKNAKKRALVAVARKLAILLHHLWVNGEVYEPLRNSRLLEQKAVA

SEQ ID NO: 479231 - protein, 368 aa, unidentified
MGKSSKLYVGMDVHKDSIDVATGDEGIGEVRHYGAIGGDLASVSRLSRKLESTGKVLVFVYEAGPCGFGIYRMLRDRGHECWVVSPGMTPRSNADRVKTDRRDCLKLARLARARELTPIHVPDEADEAMRDLVRAREDAVIMQRQARQRLGALLLRNNIRYNGNTLWSSAHRRFIAEIRLAHVAQHIAFEEYAQAVDETGKRIERLEAAIGDELTRWRWRPVVAALEAFRGIRTIHAVRLVAELGDLSRFASARHLMGFLGLVPSENSTGNRRRQGAITKTGNSSARRALVEAAWAYRYGARVSVGIARRQSGLPKTVTDLAWKAQLRLCSRYRRLSARGLNRNKIIVAVARELSGFVWALGQQVKPL

SEQ ID NO: 479232 - protein, 410 aa, unidentified
MELLHRRCCGLDVHKETVVACLRLVSDGKVTTEVRTFQTTTADLLRLSEWLAVNGCTHVAMEATGIYWKPVWHILDDGEFELVLANAAHVKNVPGRKTDVNDAMWLAELLAHGLIRASFVPNAQTQEMRNLLRTRKQLVREQASHVQRVQKTLEDANIKLDSVLTDVVGKSGRAMIEALIAGETNPAKLASLAHPRVKAPPEKLREALRGRVTKHHRFLLRLHLNQIDALEAAMATIDGQVEANLGPFRTAVELIMSIPGIKNLSAHVIVSEIGIDMSRFPSAAHLISWACICPRNDESAGKRRSNRLRKGANWLKTTLVQCALAAARKKGSYLQAQFHRLKARRGPKKAIMAVVAYILTAIYHMLKDGTMYHDLGCDHFKRHSTDQQKKRLLKGLADLGYAVELKPLAA

SEQ ID NO: 479233 - protein, 415 aa, unidentified
MKKHSNSPKKSESRSKRAKLRGPVQQDTKEVLAELVGKLREKLDPKVGAASAGEEHQQGRPRPNLDRLTVGVDLGDQWSQYCILGLEGETLAEGQLRTTKQDVSEFFEALNAARVVLEVGTHSAWVWEVIHSHGHEVLVANPRLMEGSKRRKRKNDRIDANKLARLGRVDPQSLHPMQHRSAEVRQDLVMLRARDALVAARTELINATRGLVKSMGTRLPKCSSPSFAQKVEEAVPAEIREALLPLVRMTAELSDCIKGDDEKIEKLASEKYGHTALLRQVKGVGPITALAYVLTLENPERFVKSRDVGPYLGLVPKQEDSGESQPQLGISKAGDTMVRRLLVGSAQYILGPFGPDTDLRRYGLRLCERGGKNAKKRAAIAVARKLAVLLHRLWASGEVYEPLRPALSTPITAAA

SEQ ID NO: 479234 - protein, 339 aa, unidentified
MNHTTVGVDIAKNVMQLHYIDAETGEIVNKPVKRAAFLEHFANRAPCLIGMEACGGSQHWARKLTAMGHQVKLMPGKFVKAFVMGNKNDSADARAIWMAAQQSGKSVAVKTETQQAVLGLHRMREQLVKFRTMQINSLRGLLTEYGEVMAKGRAALDKAIPDVLERLVDRLPTILIDTLREQWNGLAELDKQIAQIERRLQAWMKEDKACKAIAAIPGIGLLTATAAVATMGDAKAFRSGREFAAWIGLVPRQTGSGGKVRLHGISKRGDTYLRKLLIHGARSVLFHSKKPGSWLEQIRERRPMNVTVVAQANKMARTIWAIMAHDRPYESGYVSAKPV

SEQ ID NO: 479235 - protein, 423 aa, unidentified
MKSANTPTHEQTLCLPEEPPGDVTAGLDWARDDHAVSVVDHRGREIDRCMIEHTAEGLRALLTFLARNNATEVAIERPDGPVIDTLLDAGITVVVISPNQVKNIRRRYGSSGNKDDRFDAFVLADTLRTDRARLRPLVPDRDDTIALRRACRARKDLIAHRIATGNQLRAHLRNALPATIGLFKDIDSDIALSFLERFDTQDKLDWLTPTRLGTWLRKQGYSGRTSSTVLHTKILAAPRGPEGDFATALATITASHVAVLRTLQAQTRTLEKHIDQQLTTHPDAHIFTSLPRSGRVRAARLLAEIGDCRSRFPTPEALICLAGAAPSTRQSGRIRVVGFRWSCDKQLRDAVTDFAADSIKANPWAAHLYQQARTRGHDHPHAVRILARAWLTIIWHCWQDHVPYNPSKHRALQPYLTPENKAA

SEQ ID NO: 479236 - protein, 468 aa, unidentified
MALTLGIDVAVRAEHQATLARDGATVWRGRKFWTRPADLERLWADLDLPDPAELTVVVEPTRNAWIVLAEWFRRHGARVVMVPTTQSADLRKYYSKHTKNDRIDSELLARLPLLHPEGLREYSGQGPADSLRRLVKQRSTMVKRRVAVYARLDALVELLGPGWYAVLGSNYGIAALEFLARYADPHAVIRLGQARLTRFLIARSRGAWRDDHAAGLITAARETLALWGTSDGSDGMDFAELAEDIAHEAEQALFLTRQIKQIDERVANLYADADPAGIVASAPGVGAVISAVIAGRIGDPHRFTSLAAIRAYTGLVPKVSQSGVSKVESSITKAGDPLLREMLCTAADQARRVDPQFAAKYQRLMVGDRHHESAICHLATHLVTRIAACMRTGQPYALRDVDGTPITEAEGRAIVKARYKIDPRRRENVRYQRMRERRKHAAGQESQESRCAPTAQPATTKPTSRQVA

SEQ ID NO: 479237 - protein, 363 aa, unidentified
MELSNESWLVAGIIPGVERQPLKKLEPDENDLIKLLERWRGEAEKAGHKINRIAVAFEAGRDGFWLARWLRARGIEAHVIHPASVAVSREHRRAKTDRLDTEQLKRAFLGWLRSEPVHCKMCAIPTFAEEDAKRPHRERETLVGEHTTIINRIKATLARLGIRNLNPKLKKAAELLERARTPEGETIPPNTLAELRRDMARKQFVAEQIRQIEKARLEQLEQAPKAGPNLMVLLLVRVIGIGIETADMLVKEILSRNLRDRRAVARYAGLTGSPDESGSRRREKGLARSGNARVRRGMIQLAWRFLEFQKGSALAKWFEARTENARGLRKKMIVALARKLLIALWHFVRDGVIPDGVVLRPAR

SEQ ID NO: 479238 - protein, 370 aa, unidentified
MKTIAYLGMDVHKDTFNLCALDGTTGEILGETRCASDVKLVKKFIEKIASNHKGEIQVKAGYEAGYLGYSLHDLLEKQGIDCDILAPTTMYSSSKNKVVKNDRLDAKMIALNLANNTYKPVYVPDEEDICVKEYIRMMKDFKTSLKKIKQQVKAFLLRHGLVYDGKSSWTLAHLKWLKGLKLTGLLKETLEEYLLQYDVLTDKIERFSQRIEELSHERRYKKPVAQLRCLKGVDTTTAMMIHVEISDFTRFPNAKAFTAYLGLTPSEHSSGEKIYRNGITKQGNTTVRSTLVECANALVKGTIGIKSKRVKARQKGQASKVIAYADKATERLQRKYHRMMYQGKPRNVAITAIARELACFIWGIETKQID

SEQ ID NO: 479239 - protein, 348 aa, unidentified
MTVYIGVDFHARQQTISYLTTEDGEIHHLVLLHESPLQVRAFYEQFAGQHVIVGFEGSGYAAWFEELLEELGHEIWIGHATYIRQFAKRRQKNDRRDADLILELLVSGDFPRIHRYSAATRQILQQLRYRHRLVKMRTAATNMLLFMASSRGHTFRTQLQSKRGQARLAQLPLPEPLAQQRDELLQLLQQLDQKIAAVEQWLKQRTCQDAAVQRLQTHPGIGLLTSICIRYTLECVERFANTRKVSAFAGFDPMEDQSDKRWRMGAISKQGSRWLRFFLVEAGQVAIRKDAELAHVYKRVLLRGGHAKAKVAVGRRLLVRTFIMLRDEIDYAEFQRRGVAARSARGSA

SEQ ID NO: 479240 - protein, 310 aa, unidentified
MTDKPVVGVDVSKEWLDFARDGGVERIDNSEEAIERWLERVRPSLVALEPTGGYERILQRCLRVRGILFVRVHPNEVIAYRKSQGIKAKTDSIDARVIAEFAAERLSKRGLKPHLVGDETLRELAARRRQILDTIHAETCRLDIADIKAVRKSITTMIASLRRSLKTIETEISAHLKADENASELSRLLQTVTGIGPVVSMTFLADLPELGHLSGKQIAALIGLAPLTQQSGKIRHRDRIGHGRSAVRSVLFNAARAAIRHPSPFKDFYDRLTIEHQKPGKVALVAVMRKILVTANAIARDRQPWRFADA

SEQ ID NO: 479241 - protein, 355 aa, unidentified
MSQEKYIGMDVHQATISVAVMDSKGKLIMECILETKAATILEFIQGVRGTLAVTFEEGTCAAWLHDLLKPHVSRLVVCDPRKNALLKDGSKSDQIDARKLAELLRGNQLSSVYHGDHGLRTLKELGRSYLTITKDLTRVMSRIKALYRSWAIPCSGTTVYAARHRSEWLAKISEPGVRLRAERFYQQLDMLRALHQEARRDFVVESHRHPAVKLLRQIPSIGPIRAALLVALLQTPHRFRTKRQLWAYSGFAVETHDSGEYRVVRGKVRRNRERISVRGLSDNYNRDLKNLFKSTAISASIRPGPLRDFYLALLAKGMRPTMARLTLARKIAAITLTIWKKGVDFDAKQLDQQAA

SEQ ID NO: 479242 - protein, 323 aa, unidentified
MSTKATKKRRSFIGIDVSKKLLEVGVHQSDYHFRCPNDPKNFPALITELISLRPARILLEATGGLERALLQALHAAGLPVVVVNPRQVRDFAKALGLLAKTDRLDARVLAHFAAAIQPAIRPVKAQQETELDALMGRRTQLSDMLVQEKNRRGSAATKDTRDDIEEHIEWLEERIQELDEKLKEQLKCSAVWQQKDKILQSVKGIGFVTSLALLADCPELGQLNRHQIAKLVGVAPLNRDSGQQRGARHIWGGRAQVRGKLYMATMAAIRFNPVLKSFYERLIAKHKPKKVAMVACMRKLLTIINVMIRENKLWNVDTQQLSA

SEQ ID NO: 479243 - protein, 402 aa, unidentified
MNCVGIDVSKGKSMIAVMRPFGEVVVSPFEVRHTANELSELAGLLKSLDGETRVVMESTGNYHAPVAWLLHDAGLYVSVVNAMLVHDYGNNSLRRAKTDKKDAIKLANYGLDHWLTLPRYVPEEDTRLMLKACYRQYQQYSKVQTMLKNNLISLLDTTFPDANRLFTSPPRDDGHEKWVDFVATFWHCECVCDLSEKAFAAKYQKWCKKHGYNFSEGKALDIYAAARGSFGVMPKTDTAKLLVEQAISQLRTTSAALAALKQEMQSLAASLPEYPVVMEMFGVGPALGPQLMAEIGDVRRFHSKKALVAFAGIDASPYQSGQMDVRSRSISKRGSASLRRTLFLVMSVILQRAPMDEPVYQFMNKKRSEGKPYRVYMMASANKFLRIYYASVKAYLDPLEHD

SEQ ID NO: 479244 - protein, 414 aa, unidentified
MQVVYSRCCGLDVHKKSVTACVLVLDQQGRRSVRKKQYETHRPGLQRLMLWLYAWKVEQVAMESTGVYWKPVWNVLEKHFPLILANPYQVKSIPTEKTDPRDAEWIADLLAHGLIRPSLVPPREIRELRDLTRHRVKLVHDRNRVHNRIHKVLEDASIKLDTVASDILGTTGRKIIEAIIAGEDRPDWLADKAQGTLRTKRNQLRLVLRGQVREHHRWMLGRLLEELKFLENEIFCLEQRLAVTMQPYQPAIDRLCSIPGVNVITAWTLIAELGPDMSAFADAQHAASWAGLCPGNRESGGKQLSQRTRKGNRWLRRALCQSAWAITHKKDCYLTSYFYRKAGSGIRQAIVATAHKILIIAYHVLREGTVYQERGGGYFDQLHPERSRNRLLRRLERLGWEVSIKPRTPTAPDS

SEQ ID NO: 479245 - protein, 505 aa, unidentified
MATPTTRHPPATSSPPSGQQAQAQAQRQAYHRRKARAKVKSEARRQKEAARVEALPVQHPHAAGIDIGSRSHWVCVGFTTDAASCLIREFPAHTEGLQAIAAFLREHQVSTVALESTGIYWIPLYELLQAEGFEVFLVDPSYSHQLRGRPKTDRRDCQWIYRLHSVGLLAAAFRPDEKTCQLRAYLRQRANLIRAASKHVQHMQKALEQMNLKLTEILSDITGVTGRTILRAILRGTRAPEKLARHRDKGCKASEAEIAQALTGSYREEHLFELKLAYEAWQFTLGQVEKVDGQIALQLGRMKCDRALPPLKPKARPKRRVNAPGFDVRTALYYVVGLDLTEIEGVSELTALTVISEIGPGVSRFATVQQFCSWLGLCPNWQKTGGRVKSSRTRRGVNRAAQALRMAAQSLHHSRGALGGFLRRMKGRLGVQAALTATAHKLARIVYLALKHGLTYVRQSQEEYEAQMKEKQVKALRRKARQLGLEVIEKTPASGATAAAAPVQG

SEQ ID NO: 479246 - protein, 321 aa, unidentified
MSTGTSKAGFVGIDVSKDRLDVGLWPSGETFGVNNDSEGRAALAGRLAALQPRLVVLEATGRLETPMALELDGHGVPYRIVNPRQAREFARAMGKLAKTDRIDALMLARFAESAKLEPKALPDAARRELRALVMRRAQLIEARIAEKNRLGGETAPFVCKSLKTSIAWLKRQIAQLDRELDRTIQGNPEFAALSDVLDTVPGVGPNTVRVLAAAMPELGKLSRQCASALVGIAPLNKDSGKSHGQRFCWGGRAEVRSALYMAALVATRHNPVIRAQYLRLRAKGKPAKVALVACMRKLLTILNAMVRDNTPWRQTPAAAAA

SEQ ID NO: 479247 - protein, 414 aa, unidentified
MDVIVARQGALAVHKAQVTACVRVPGADGQRVGQVKQFKTTVPGLLVLADWLRAHGVTHVVMEATGDYWKPIWHLLEAEFELMLVNARDVKQVPGRKTDVKDSEWLCQLAEAGLLRASFVPPKPIRDLRLLTRYRRTQISERTREAQRLHKALEDTGIKLACVATDILGKSGRDMLNALVAGTTDPDVLAELARGKLRPKIPALKEALQGRFEPLHAMLIGAILAHLDFLDEQIEQLSKAIEEQMRPFARQAELLCTIPGVAQRTAEIIIAEIGTDMSVFPSAGHLASWAGQCPGNDQSAGKRRSGKTRKGSKNLNAALNDAAMAALRTNDSYLQALYRRKKAQIGHAKALGAVKHSILCACWHMLTNGELYRDLGGDYYTRRNPERQTNRLVAQLERLGHTVTLTQTAVRDAA

SEQ ID NO: 479248 - protein, 433 aa, unidentified
MNDPCPYKLVIGLDRSDSRADLYSVDTRTNKGRSSTLDVSPESLLEWAEQLRKACPDGQIAICLEQPASNLLVFLENYEFITLYAINPVTLQKFREAFVTSRAKDDKVDAKFLAELVLSHCDKLTLWQPEDPQTRLLGQLVVHRRAVVDERTLLSNRLRSLLKLYFPQALLLAGDDLWRPMGTAFLLRWSTLKAVKNARPETLRNFYYAQGSRSQTLIEKRMDLVSRAVPLCEQEGLLQTYSSRIKLIARELRLVDRAIKDYDKDIAGAFAQHPDREIFRNLPGAGPTFAPRLLISMGSRRERFPTSNSLQCFTGIAPVTKQSGKKCYVHRRYLCPKFIKQSFHEFAKESILHSRWAAAYYKQQRERGGGHNTAVRALAFKWQRIIWKCWQDRISYEEDIYEASLRRRNSPLAAALDGIVVGKYPIKTNAEKS

SEQ ID NO: 479249 - protein, 389 aa, unidentified
MIVIGTDTHKYKHALAAVDDGTGRVRGSREIDADDAGHLAAVKWARGLDDERVWAIEDCRHVSRRLEQALIAAGERVVRVAPHRMGASRKGEREPGKSDEIDSLAVARAVVKDGVEHFPAVYLDERAMEIRLLADHRNDLIAERTRIQNRLRWHLVALCPELEASLKKRSLSDTRQLDRIDRRLRRLTPESRVRVARAQVAQIRSLTRHANTLENELLGLIKTQRPQLLAETGCGPLTAAILIGRTAGAERFQTDASFALQAGIAPIKCSSGQHQQHRLNRGGDRQLNHALHIIAITRARHDPTTREYLARKQAEGKTKKGALRCLKRHLARRFWQLLAEPPLPADQAITRELAAEPAGPQALTTPERPAPRREVDRTITGPIPMVCIT

SEQ ID NO: 479250 - protein, 339 aa, unidentified
MKFKRIAIDTSKHVFTLHGVDEQEQPVLRRELKRGQVEAFFSKLPGTEVVLEACGGSHHWARVLGALGHHVRLIPPQYVKPFVKRAKNDRNDAEAISEAASRPTMRSVAVKTVEQQADAIILKHREMLVNQRTQAINALRGHAMEFGVVVAKGTAKIAPLLAVLAADTAIPVVARAMFEQMGEHIEALESQIATLDAELVALHKANPLSRALADIPGVGPMIAVTMALTVEPENFVSGRHFAAWLGLTPREKSTGGKQRLGKISKAGSQRLRTLLVVGAMSVIRFAKPGSKSASAWLLQLLEHKPRKLAAVALANKMARIIWAMMARGEAYRRQPVTAA

SEQ ID NO: 479251 - protein, 361 aa, unidentified
MNATTAAIDLAKNVFQVALADANARVLEQHRLTRSQFERFFDNRCVSRVIMEACGSAHHWARVFAARGIEVTLLPAHYVRAYVRRSKTDAADALALLEAARCPDIVAVKVKQVEQQSLQALHRTRSLWMGTRTSRINALRGFCRELGLHVPVGARTGLEAMGRAVADDQSPIPALLRPIMQQLIDEIRLLEVRVAQLERQLALVAREAPACKLLMSIPGVGLLTATGILAATSGSVAHFKSARHFASWFGLTPKESSSGGTRRLGRISKMGDRYLRMLLTHGARSVLHAAKVAKMRGQQLLGVRQWAIELQSRSNHNKTACALANKMARICYAVLRDQTPFGQPATRLGKKMQRQSFELAH

SEQ ID NO: 479252 - protein, 341 aa, unidentified
MDAGYDGRQVVGIDLHRRRSVIVRMAADTGERLGTARIDNDPMALGAEIAKAGEWPEVVLEATYGWYWAVDVLHAEGALVHLAHPLGVKGFAYRRVKNDERDAADLADLLRMGRLPQAWIAPPATRELREQVRHRAKLVALRSGLKAQIHAVLAKQGVRVPMSDLFGAAGQSLLDELRLDAAYAGRVASLRRLIEAFTFEIDTVGRRVAAQLAADPGYRAVQAIDGVGPVLAAVFVAEIGDVTRFACPQQLCSWAGVTPRHRESDTKAHRGRITKQGSRLVRWAAVEAVQRVRSGAIGAARARIGEHRGANIGKVAAARKLLTLVFYGLRDGHIRCLARPA

SEQ ID NO: 479253 - protein, 341 aa, unidentified
MEQYVGLDVSMRETSVAVRQNGKRVWRGKCPSDPKALADVIRQRAPDAVRVVLETGPLSTWLYHALKAEALPVVCIDARHAKAALDMAPNKTDANDADGLAQIAEVGFYREVRVKGYAPMLARTLVGARGQLLRISIQLSNQIRGVMKTFGLIVPKGAGRVFETHARALLGTNEAVARVVLPLLEAWRAVRARAAELDRQLIAAARTSPACRRLMTIPGVGAVTAASFVAAVEAPENFGTSRAVGAWLGLTPRRYQSGEADYDGHISRRGDGHLRALLYEAAAAVLTRTRTDSALRSWGLELKEKVGFKRAAVAVARKLAVIMHAMLKTGAAFDPAPNTTA

SEQ ID NO: 479254 - protein, 433 aa, unidentified
MAGKAALEVVHPDCAGIDVGKRKHYVAVDSSRFEQPVRHFGTFTRDLEAIADWLSSCGVRQVAMESTGVYWVPLFEVLERAGFDVHLVNPRATKQVSGRKSDVLDCQWIRQLMSYGLLRGAFRASDELCPMRSYARQREQLIRDRSRAVQHMQKALTQMNVQLDNVLSNIMGKTGQLIVRAIVAGERDGAALAGFRDRRCKADEATIAASLHGNWRDEHLFALAQALARHDMLQGQIEECEARIDAELARHAAEAPPPTSRSRERALRERLRRMLGVDLTAIPTVGVETALTLAAEVGADLSRFPTSAHFCSWLGLAPGTRISGDKRLGKAPARRVNRLGQALRMAASTARNSKTAIGAAHRRRLARMDSAKAVKATAHQLARLIYAMLTRGEQYVERDLAAMETERRDRQIKHLQRQARRFSLALVPAECAA

SEQ ID NO: 479255 - protein, 349 aa, unidentified
MNKHKIIGIDLAKRVFQVCVVDTRSSRVQVNKELKRHQVLDFMRRQPACQVFMEACGGSHYWARQLQALGHTVALISPQFVTPFRKGHKTDANDALAIVEAGCRPDMRFVPLKSVEQQDIQSLHRIRERYIHQRTQLINQVHGLLQEYGIISGRGQKALKQRVWRVLEDADNELSMLMRDLIAEQMAELDRLNERIQSLDKRVELMSRTTVPCRELLAIEGVGPVVATQLYSALGKGDAFKKGRQASAYLGLTPKQHSSGGTASIKGIGRTGQVSLKAALIRGAHSAINTVGDKQDAKSRWLRSLVARVGKNKAAVALANKTVRTAWAVLHSGQSYCREFNDGSALIVS

SEQ ID NO: 479256 - protein, 359 aa, unidentified
MPSLALARTDVIVGVDTHKHTHVAVALDGLGGRLDELTVAATNDGYAALIAWANALGPVHLYAVEGCGSYGIGLARFLRRHGHPPVEVSRPPRAGARRMSGKSDAIDAEHAARTALSGEGTATPKLADGQIESIRLVKIARDAAVKARTTAMVTLKAVLVTADDDLRARIEPLTDHKLVLACAALDGTGTIADPEVAMAHTLGCLARRWLDLHEEVKVHTGHLKNLTAQAAPAMLDAFGVGVDIAAQMLITAGDNTDRVRNEAAFAKLCGVCPIPTGSGRTDGTYRLNRGGNRQANAALYRAVIVRMRWHPPTIAYVERRTAEGKSKKAIIRCLKRYLLRELYQLLPDTSANTAGLAAA

SEQ ID NO: 479257 - protein, 340 aa, unidentified
MGEITTIGLDLAKNVFQVHGVNEMGAAIVVRRLRRSQVIGFSASLRPGLVGMEACATAHHWARELTKLGHVVRLMPPQYVKAYVRRNKNDAADAAAICEAVRRPSMRFVPVKTIEQQSALLMHRARDLLIRQRTMLVNALRGHMAEFGFVEAQGLHKVAGLIAIVMNDGDERLPDLARQALSLIAEQIAELQNRISALERQILAWHKNNAVSQRLATIPGIGPIIATAIAATVADASVFSSGREFAAWLGLVPRQSSTGGKVRLGGISKRGDSYLRRLLVNSAHTVLLCSKAAKVDPWVASLRSRRPRLVVAVALANKTARVAWAVMTRQDTYRHIAVAA

SEQ ID NO: 479258 - protein, 358 aa, unidentified
MEYGAIDLHKKESQIRILTEDGEIVDRRFVTTRERLTSVFWGRPRLRILLEAATESEWVAQQLETLGHEVIVADPNFTAMYGHRSRRIKTDRRDVAALAEACQRGCYRVAHRRSALRRTVQAQLNIRRELTEARTRAISLTRALVRGGGFRIRSGSTDSFLTRVAALDLPQGMTDTLAPMRRVIELLNTELTKADETFATHVAEDCVVRRLTTLPGIGPITASAYVAALDDAGRFGGAAQVASYLGLVPREYSSGEQQRRGHVMRSAHPYVQALLVQAAWRIVRVKDPRTVALRTWADAIAHRRGKKIAIVALARRLARVLFAMWRDEVAYDPARIRSSPRTLVVASDDGVTESAVNG

SEQ ID NO: 479259 - protein, 387 aa, unidentified
MSEMFNPSIATTAFDHTTTIVAVLELSGKTWLFGACAPGIARRIKQSIEARDIAAVVKALERLKAQSEKAGCAVTRIVLAYEAGRDGFWIARELQQRGVEVHVMHPASIAKERRGKRAKTDRLDVDLLLTTLLGWLRAEPGRCTMAPIPSEEEEDVREPGRRREALLGDRLKVENRIGGLLVRYGVVGFNPRLKSAEKQLAALKAPDGRPLPPNARNSLKLLLAQHRLLAQQMQEIEAAREKVLEVNWPDRLQRMIQMLARLVGVGVETATVLVYEVFSRRFKDRRALAGFVGMTGTPYDTGQSKREQGISKNGNPRVRRMLSQLAWRWLRHQKDSALARWFEARLGGAKGRMKKVLAVALARKLLIALWRYVETGEVPEGVRLAAR

SEQ ID NO: 479260 - protein, 354 aa, unidentified
MVATILALDLGKYKSVACLYKPEADTYEFETILTKPTVFHDLFVLHEPDRVVIEVGAQAGWVCDLAEALEIEIQVANTNHEGWRWKNTKRKTDRDDALKLARLSAMNQLPQVTLPDSRVRQWRSLIGYRHTLVGRRTAIKNSIRAILDRQGIGWPMGKLGWTEKSMLTLKRLARPIDQAHPYDLWRGQLHVEFQALQHVEGLISQVEHKLEVLSADNKRVALLRTIPGVGPRLAEVVVAVIDDPKRFQNSKQVGAYAGLVPKQYESGTMQRSGRITGQGNKLLRALLVEVGWLMRRYNGYLRDVFDRVCRGSKTRRKIAVVAVARRLLICCWAMLRDGTRWRDPLAHQTAGLST

SEQ ID NO: 479261 - protein, 407 aa, unidentified
MSITCGIDWAESHHDVALVDDGGKVVARQRISTGVEGFSGLLSLIAEQGGTPESTPIGIETEKSVMVVALTGAGFTVYPINPRAVARYRERHGQAGGKSDAGDAAVLANILRTDQHMHRPLATISEHALAIKALARQHQEAIWALNQTTSRLRSVLLEFYPNAVTTFANLKHHAATAILTAAPTPHAAAKLTGRRVVAILHRCGRRNDSSLVEKILTGLKAPALRQPTRVETALGTTVQQLIAIVEAMRTAVDTLETQLAEEFTAHPMAATLRSAPGLGPVLAARILAEIGDDPHRFTSAAGLRAFAGTAPVTRASGRSHYVKARKVRNKRLGDACHWWAFSMLTKSPGARAHYDRRRAAGDHHNAALRNLANKLLGRLWWCMAHDQPWDDTAAWPPPTSTPETAAA

SEQ ID NO: 479262 - protein, 341 aa, unidentified
MQSYYYVGLDVHKKTVSYAVKTAAGEKVAAGSVAANRGALSAWAEALPGPWVGALEATLFTGWIYDHLEPYAAELQVAHPAMLKAIACAKKKNDRLDAEKICDLARCDLLPGCYMAPAQIRELRRVLRYRNLLVREAVRLKNKISGLLMECGEEYVKDRLHGKKYFHKLLDSLEHTPESARELLAFSRGMLETFEDLERRLLKGLAQHRLLRERVERLQSIRGVGQVTALTWALEIAEPERFSSVRRAVSYCGLCAAQRESAGKTQRAPLSKQRNKHLQTVLIEAAKLAPRYNPEMKAVHERELLHGSRNRATLAVARKLAAYLLAVDRSGEPFTPRTRTA

SEQ ID NO: 479263 - protein, 405 aa, unidentified
MVTYVGIDWSSQKHDVCFVNEAGAAIARQVIAHTPAGFAEFERQRQRLGVEPAECVIGIETAHNLVLDYLWGHHYHQVYVIPPNKVNRESTARWPSGARSDPSAAYLLADLLRQDTTRFPVWRPDSLLTRQMRSRVSLVMHLTHHIVQMANRLRAVLWRYYPAALTVFSELTAQIELVFITAYPTPQAAAQLTYAEFQAFAAQHHYSQPRKLPAGYARLQQPQPQADASTVLTFQDEAVQLAHLLLPLVQAKQAQLRDLGQLFKQHPDAFIFDSLPAAGEVLAPGLLVKFGDDRQRFPSAASVQALAGTCPVTDGSGQRRVVRFRKACDHEFRTLTQQWAKATLDESAWAQAYWQEIRPHCDSNSAAYRRLANRWLAILWKLWQTRQAYDEDYHLQQRAARSKPR

SEQ ID NO: 479264 - protein, 382 aa, unidentified
MQASTLVTPTVGHCGTIFVAIELSQKTWLVTLHSPDRDRISRHKLEGGDHAGLQALIEQVRDRVARKLGSVPEIRSCYEAGYDGFWLHRLLEAAGIRNLVFDPASIAVEQRARRAKTDRIDGELLLRTLMAHLRGEPRVVRIVRVPSVAEEDARRASRERDRLITEQTAHTNRIKALLRLVGMAVGNPRRGDWLGWLDRQRDWQGQPPSPQLLAEVTREHARLMLVREQLAALEQAQAARALPMPEPMAERQDDLLRLKALGPAFSATLVNELFYKNFRNRREVASYCGLTPSPWRSGGIDREQGISKAGNHRARHKAIELAWLWLRHQPDSALSRWFRTRTANAGKRARRIAIVALARKLIVALWRYLTTGLVPEQAVMKA

SEQ ID NO: 479265 - protein, 390 aa, unidentified
MTFFVDIDIAKYKHDCFIIDETSCVIRDSFSFSNDSNGFNFLLSILKGIKKKGKIKIGFESTGHYHFNLKLALEKNGFDYIEINPLLIHKFMTTQTLRRTKTDKKDAKTIAKYITTVDYKPYPNSFYHINNLKSLYRLKETLITDRTRFLNLITAYLDQIFPEFKPIFNGSFNKSAFYLLTNYLTPHKMAKLDAKKYEKMKSELRNPISYQKLCTIRDAAKNTIGNSTPALEYSLKSSIDLYQFINNQIEEINQKILEIYNQLDSHIHTIKGIGTLTAAGILSEIGNFDKFTTANQLLAYAGLEPSKNQSGILDGGGKMVKHGSSYLRKYLMNAAETFYVYNPVISDFYWKKRNENKPHRVALSHVARKLVNTIFYLEKHKVDFDSSIVK

SEQ ID NO: 479266 - protein, 504 aa, unidentified
MAPGRRLNIGEAQRGTPLGESRGINPPGRPVFTNTGREGCDGMANEERTGRPEGLKPIDEGFPVLRADVAGIDIGSQQHWVCAPTPTGKGREVAVFAATTPGVEQLAAWLKDRGVTSVALESTGVYWIAPHEILEAHGFDVVLVDTRELGRVPGRNKSDRRDCEWIQRLHSCGLLRGAFRPVEQVCMLRTLVRDKGTLIAERADWIRRMQKTLDQMNVRVHRAVSDVDGATGMAILRAIVAGERDPHQLAALRDPRCRKSEVQIAEQLTGHWRDDHLFSLQQALKMYDALSETIAAYEREILRQLERMTNVDRRDDQAPPPTSPTKAKAIKKRGEDPLRHALYRISGVDLTTIDAVGVETVNVVLSEYGPNLSQFPTEKQFVSHVGLAPHTPTSGGKVVKKKKKPGSASARVGAALRMAATSMRHSQTALGAYYRHVARRGGADVAVFATARKLAQYIYRLLRWGQPYVDEGVAAYEKRYQLARAQRLAAAAKNLGYRLIPVEA

SEQ ID NO: 479267 - protein, 344 aa, unidentified
MKKNLFFIGLDIAKADFAASIYQTPDKPIVTKEAIPNDRKGFEMLLLWLYDHHINKKNCRICMEATGVYSQAISYYLLFQDFPVSVEPPLKVKRAFDPVGHKTDPVDSKQIAEYAYRFQDELTSWKPRDEILEKIRQLLSVREQFTKQKVALDNSVQAYSKQRVQVALIKTAQKETLNQLKKQIALIDKELEKLIKQDPEIFQRANNLDSIPGCGMLLAAHLLVITENFTKIQNSKRLAAFIGIVPYQHQSGTSVSKRAKIRHFGPGPSRKLLRLAAQSVATHNATFRHYYLRKLDQGKAKPLVLNNIANKLLKVACTIIRNNTRYIKEHRSIHPMYLKSLKSA

SEQ ID NO: 479268 - protein, 337 aa, unidentified
MEHFAGLDISMKETHICVMDRDGKVILEAKVATSTAAIAAELARAPALQRIVFETGRMATTLYHGLEALSLPVVCIESRHAYQALKSLATHKTDRNDARGLAHLARTGFYKPVHVKSLPAHAVRALIIARKKLVGQRVTLENQIRGLALVFGVRLPRGLSPAFARQVNTTGGELAALSSALRGLLAARDALLAAIAAINRDIKRLAHSLEACQRLMTIPGVGHLTALAFVAAIDGPDRFRSSRDVGPYLGLVPRRWKSGEVDYTGSISKVGDQRVRTLLYEAANVMLTRYRGDLALKDWALRIGRRSTMRKARVALARRLAIIMHAMLRDGTEFHVP

SEQ ID NO: 479269 - protein, 403 aa, unidentified
MNAVGIDVSKGKSTVVALAPGGKFLSRPFDVLHTKSGIKELVSFVRTLDGDTRIVMEHTGRYYEPLLQWLAASDLFVTAVNPKLIKDFGNNTLRKVKTDKADAKKIARYALDNWCDLRQHTGMDTTRTQLKTMNRQFAFCMKQKTACKNNLIALIDQVYPGANTYFESPARADGSQKWVDYVAAFWHVDYVCSMRLSTFTERYRKWCHRHGYNFQPDKPGLLMEKAKDLIAMLPMDKTTKMLVQTSIAQLNVLSKTVEALRTQMIALAEQLPEYPVVIDMNGVGPTLASQLIAEIGDITRFPRRGSLTAFAGVDPGAKQSGTMQVKSNKTSKAGSPHLRRALFQIVSGLLMRAPDDPVYNFMDKKRSEGKPYYVYMTAGANKFLRIYYGRVNEYLASCPKDHE

SEQ ID NO: 479270 - protein, 404 aa, unidentified
MTQTTTATNPTCNDRALYIGIDMGRDSWQLALGDGKTIRDAKVDRKDLGAAKERFLVEISAARERFGVADAGPVHVVYEAGRDGFWFARWLQDQGLQCVLVDPAAILVDRKAKRRKNDAIDARALLDLLIRHVTGDRVLQPVMVPPPEAEDARQLGRLLRTLGKTRRALATRLQSLLWRQGIDWKYSATLPNPDSLRTGDGRRLGPTLRQEVEILCGQVANIDRDICRLEDQRTAQIRKPETPTQQTAHDLERLVGIGPVGSWTLAHELFGWRTFDNAKKLGAFVGLCPMPFCSGTMDRDQGISKAGPGAIRALMVELAWDWLRYQPDSDLSKWYQTRFGETAKRSKRVGIVALARKLLVALWRYATQGVIPPGANTKPARHRAAAYRPCGVSKRPTAARLVTA

SEQ ID NO: 479271 - protein, 314 aa, unidentified
MQECLVGVDVSKDTLDIAFIPVQAPLRIGNSRCEILRWLKSLRAGSGVAMESTGPYHQLLAELARAAGMRVFVLNPKRIWHAARGEGRRGKTDRIDAQVIVKFLRDHLDQLHEWTPGTPVQREIATLERRRFCLEQHCTALRMMLQGLNGLESQVQHLLESTLELRRAIDARIGQLAELDQDISRGIRLLREIPAVGPVGATSLAALFARVPFKSSDAVVAYVGLDVRVHDSGHSRGKRRITKWGPAHLRRLVWLLGFTGAHTKVYKTYYDSLKARGLAFTEAAMILGRRILRIAWALWRSNHHFDPALLTRKS

SEQ ID NO: 479272 - protein, 325 aa, unidentified
MAKRPAAANSAVFVGIDVAKASVSVAVHPTGETWTAETTTRALRALAQRVARLTPTLVVLEATGGYEIPVIGALSEGELPVSLVQPGRVRHFAQAAGLLAKTDRLDAALLARYAAHLEPALYVLPDAVQRGLMLLVARRRQLEEMLTAERQRLEQQSFFPHSPVRAEIAETVAYLEGARGETDRQLHAYLAAHPRWDEAHTLLRSVPGVGFITAVTLLAYVPELGQLSRHAIAALVGVAPMACESGQWRAGRHIRGGRAAVRRVLYMAALTAARMNPILRAHYQQLRRRGKAPKVALTACMRRLLVILNAMLRTRTTWSVPLPQP

SEQ ID NO: 479273 - protein, 426 aa, unidentified
MRDIALDVHIDFCEVAIAEEGEIRSAGRISTKPEELELFAQSLGPDDRVALEVTGSAWAIKRILEPHVAEVIVVSPTDTGIRGARAKTDRLDARSLARLLAAGELDPVWMPNRETQVMRRRIGRRTQLVRARARAKNEIHATLMRCLVGRAPFREPFGPKGRRWLAGLGLPAEERESVDAALRQVDFLDSEIEAVERLICAEALRSPEIKRLMTVPGVNVIVAATFMAAIGEIARFRSPRKLAGYLGLDPRVIQSGSSPATHGRISQQGSVSARHALVEASWSVVRQPGPLHAFYQRVRARRGHSVAIVAVARKLACLFWCLLTREEDYAYAQPSLTAKKRRLLEVRAGAPTRRGIPSGTWPTRQRMRAAEQELAARAESAYKRMVAEWQRTQAKRKGAGATPGRASRGPSSGQAARQDKAPSPAL

SEQ ID NO: 479274 - protein, 397 aa, unidentified
MFYLGIDIAKHKHYASIIDQTGKPITKPFPFRNHKEGGQALLNWMYRYIESPTEIMIGMEATGHYWLAVYSFLLDHGFSVVVLNPIQTNAWRKGTEIRKRKTDAIDATMIADIIRFGRFVETPLVDEKMFALKQMSRFRNALVSNMSDLKRKALVVLDQTFPEYQSIFSDVFGKTSSQILLEYSSPSDYEQISIDDLTQIIEQTSRNRLGKKTANKLMELASNSFGVTFCKNAFSFQLKMLMEQIRFIEDQIKECEEEMSQLLIDLDTPIMTIPGVGPILGATILSEIGDIHRFDKPSKLVAYAGIDASVSQSGQFESSGTSISKRGSSHLRRALFQAAITAHKHDPVLKAFYEKKRKQGKHYYVCIGAVARKLCYIIYAILKSNKPYEIPPHTTKT

SEQ ID NO: 479275 - protein, 469 aa, unidentified
MGLRDAVGIDPDSKGFICATVRLSGAPVTTKGYMVTESDLKAFLRWVKDQGDIIVAIEGANGFSRPLEKALREAGVIFYSFKPADTNTFRKAVLGQNKDNRKDAESVARYAMALEAQGKLERYRRVWFADAELQLLTRFYERKSQAMTAETNRLWKLLRLACPDLYLALGGGHPEVELSENILKSQGILTLFSEKPQLGEWKLLTEKQLLEAMGGGKYKGREKLIQQLRILAPSLPPVSAAMALLIRSSAQQIQRLKAEQAEITKMLEELTRQNAAVQVLKQIRGIATRTAASMIAEIIDIRRFPREDSLACYSGLGMAEHSTGDSFRMVPTRMFNHRLKDAFMTAARNFVLYNPQSHLAGYHRNLVKRRMSSMEATKRVARALVRVIYRTLITLVAQQSDTPEADRTKEGEGEMASGLSRSDQSHKSNISPSSPRTSKTPGTKGVKRPTTRTVRNRSRGRKGVSEKTA

SEQ ID NO: 479276 - protein, 342 aa, unidentified
MEINTIGLDLAKSIFQVHAIDAAGTAVVRKALRRAQVVPFFAKLPRCLIGMEACGTSHHWARELARLGHEVRLMPPAYVKPYVKRGKTDAADAEAICEAVTRPSMRFVPVKSAEQQAALALHRTRDLLVKQRTQLVNMVRGLLAEFGIETARGLHHALSLAARLSAGDAPEVPALAQRVVKGLADQIGALQVQLDLLEKDLLAWHRSNELSQRLATIPGVGVISATALAASVTEPERFRSGRQFAASLGLTPLQNCSGGKERMGRISRMGDRYLRRLLVLGMTSLVRRARSTPDSVDPRFVAMLQRKPVRVVTVAAANRTARIAWAIMTHGGTYRTPLAAAA

SEQ ID NO: 479277 - protein, 434 aa, unidentified
MSKFSLNPVVGIDVSADFSYVAILAPNGDTFKKPFKIIHDSNGFNYLVETIKKVEEEFSMKSAIFMESTGVYHLPLFHFLNERFDNTFTINPLVTKYNNNSNIRKAKNDKLDSLKIANIAKFQNVKYSKAPDMSYFVLKKMLREYYKLTDRCSDTKKKLSTDLRIIFPGYCDIFSDLTSMTSLAILTNYSTPNALLSAPKDDILKILSKARKGNNWSLKIYSDLIKKAQDASVIAVKFNFLNTFIASSIDLINTYDRQISNLLSQIDSFIYSDLFPENIRTNISLVDSIHGIGHLTAATLIAEIGDINDFIKPKKLIAFLGIDSSVKDSGKFKSTNNKISKRGTRYGRRALYAVALASIRNSRNGSPINSVLQQYYNNNLNGKQSKVALIAITHKIVLYIYSVLKNQKPFNLRDPMIHKQMYLENHNTDTNTVA

SEQ ID NO: 479278 - protein, 398 aa, unidentified
MNSVFVGVDVSKDFFSAAGLDGEGKELFLGSYEMNTSGFSEFIAVLSSHGERVDQVMVAMESTGCYHINLYSFLMGKGIQAMVVNPLLIANFAKLSLRKTKTDKKDARTIAKFLMDHHGEISQLSISQDLQDLRDLSRERESLSHLMSAIKVEIKRVLRTTFPELESIGDIYTGVMLRFLQEYPSARLVRAAKPKAIAKVLKQPYVGNKLTFSAEDILRAAKSSIAVVSPAKEIILQGKIATLFHLQERLDEVTKLLSDLCKATRVEDLKILRSIKGVGPKTAAPFLAEMGKVDNFLSHKKLIAFAGMDPSVHQSGKFMGMSKLSKRGNRHLRRAIYLMTASVVSKNAFFKAYFLRRKGEGLPPQKALFATAHKLIRVIFAMLLSEHISRQRRLYKNS

SEQ ID NO: 479279 - protein, 367 aa, unidentified
MEQSTRGIARGEAVRVGVDLAKRVIQVHAVDAAGHVLTNRALTRDRFLAWCAQLPAGCIVAMETSSSAHYWARKLITMGLDARIIAAQLVSPYRKQGASGKNDANDAAAICEAAGRPQMHFVPVKSIEQQSMLCVHRLREGFKAERTACINRIRGLLAEFGLVFAKSPAALEPVLADVLEDASNEMNALARLVLQRAQGQWRELDAHLAWCDQRIAAHAKDNDAVKKAASLMGVGPIGASAVVATVGEFKQFRCGAQFGAWIGLVPRQHSSGGKNNLGGITKRGDTYLRSLLIQGAKSAVMSAHKRSDPISQWAAALRERAGWQKATVALANKNARILWAVMTKGEAFDARHVSVKPGAPVPAAASA

SEQ ID NO: 479280 - protein, 389 aa, unidentified
MKIYVGIDIAKLNHFAAAISSDGEIILEPFKFTNDADGFQLLVSKLESFDKNSIIIGLESTAHYGDNLVRYLVAEFYQVCVLNPIQTCQMRKNNIRKTKTDKVDTFVIAKTLMMQDDLRFITFFDLDMMDLKALGRFRQKTIKQRTRLKIQLTTYVDQVFPEIQYFFKSGLHQHAVYALLKEAPSPKEIASMHMTHLANLLKVNSHGHFTKEQAKELRVLAQKSVGANDSAISIQITQTIQQIELLDSQLEKIEAEMTDIMRFNDSVIMTIPGIGYINGGMILGEIGDIHRFSNPNKLLAFAGLDPSVYQSGNFQAKTTRMSKRGSRVLRYALVNAAWNVVRNNATFKAYYDAKRAEGRSHYNALGHCAGKLVRVIWKMLTDEVEFNLE

SEQ ID NO: 479281 - protein, 400 aa, unidentified
MIDSDGVGVFLGLDVGKSNHHGHGLTPAGKKVFDKALPNGEPQLRAVFDKLKAKFGTVLVVVDQPASIGALPLTVARDAGCKVAYLPGLAMRRIADLYPGEAKTDARDAAVIADAARTMPHTLRSLELADEITAELTMLVGFDQDLAGEANRTSNRIRGLLTQFHPSLERVLGPRLHHPAITWLLERYGSPAALRKAGRRKLVEVVRPKAPRMAQRLIDDIFDALDEQTVVVPGTGTLDVIVPSLAKSLAAVHEQRRALEAQIEALLEAHPLSQVLTSMPGIGVRTAAVLLATVGDGSSFPSAAHLASYAGLAPATKSSGTSIHGEHAPRRGNRQLKRAMFLSAFAALHDPASRGYYDRCRARGKTHTQALLRLARHRISVLFAMLRDGTFYEPRTPRIA

SEQ ID NO: 479282 - protein, 348 aa, unidentified
MSTMTDDESRVTVGVDTHGEVHVAAVLDERGRLLGTHSFPSTLNGHRHMESWASGFGGIDVVGVEGTGAWGAGLARHLTAEGYRVLEVDRPDRKTRRRRGKSDTIDAEAAARAVQAGTTSGTPKTRTGIVEAIRVLRVARRSAVKSRSQAAVQMHSLVSTAPDELREHLRKLGFAQLVARCSTFRPDGVANTVSATKASLRSISRRWLALDQEIDGLDELLSPLVRAAAPNLLALNGVGTDVAGQFLVTAGDNPDRLRSEAAFSHLCGVSPIPASSGRTDRHRLNRGGDRQANAALYRVVLCRLRWDPRTIAYAERRTKSGLSKPEILRCLKRYIAREIYRELLRLPT

SEQ ID NO: 479283 - protein, 347 aa, unidentified
MRFYNRPHQYNCGIDLHVKTMYICILDSAGQVLVHRNVPSTPAAFLEIVAPYRTELVVAAECMFTWYWLADVCAAEGITFVLGHALAMKAIHGGKAKNDRIDSHKIAVLLRGGMLPQAYVYPSAMRSTRDLIRRRLHLVRKRGQLLAHIQNTRAQYNLPVFGRKLAYRGNRDGVAEHFPDPNVQKSIEVDLALIDQYDALVTDLELTIVREAKRHDAEAFHRLRSVPGIGKVLALTILYEIHDITRFDRVQEFASYARLIKCLKESGGKKLGTSGAKMGNVHLKWAFSEAAVTFLRHNREGQRLLARLEKKHGKGKALSILAHKIGRAVYYMLARGMVFSMEKFLAA

SEQ ID NO: 479284 - protein, 420 aa, unidentified
MEDIIEEPAELVERVAALDIGKASLVCCVRVPHESKPGARRQEVRTCDTVTPALLELRDWLICQGVTRVVMEATSAYWKPPFYLLEDDIECWVVNARDVKNVPGRPKTDKIDSVWLCKLAERGMLRPSFIPARPQRQLRDLTRYRRTLTQERTREKQRAEKLLEDAQVKLSSVISDIFGVSGRDMLAALIAGQRDPHALADLARKSMRAKISVLRQALTGHFTDHHAFLLGMMLDRVDALTGLIDTLTTRIEDAIAPLAGQVAQLDEIPGIGVTTAQEIIAEIGTDMSRFPTPGHLVSWAKFAPKARQSAGRSKAAATGKGNPWLGGTIGEAAASAARTSTFLAGRYKRIVKRRGKKRALVAVGNSILTICWHLLSDPGAHFTDLGPDWHDRLAPQRRKHQLIAELERLSGKKVTLNDAA

SEQ ID NO: 479285 - protein, 329 aa, unidentified
MIVLGIDVSKLKLDAALWLPQGRKWYALRVDNSVAGVLKLLHWVQAKSGAPINACRVVLEATGVYHELAAETAFEAGAEVVLANPKRVRDFASGHGILNKTDAVDARSLARYGAEAEVIAWQQPPLEVRVLRALLARLAAVEEDLQRERNRREKAQATATPALVLESLERTIQALDAERKRLQQAIDDHYDQHPDLKRQYDLLRTIPAVGDKSANQLLCLLRSKHFDSARQAAACSGLVPVHHRSGTSVHQPPRLSKQGDPRLRKVLYMASVSALKYNPELRRIYDHFVQDGKAKMAALGVLMRKLVHIAYGILKHDQPYNPSLVSNRG

SEQ ID NO: 479286 - protein, 316 aa, unidentified
MDAVLECCAGLDVHQETVVACVLFGPLEHKPKKEIRMFSTTTPDLLKLADWLEGQKCSHVAMESTGIYWKPVWNILETGTFQLILANAQRIKNVPGRKTDVKDAEWIAQLLRSGLIEGSFVPPVEIRDLRDLTRYRKKLLQDTTQEKNRIHKVLQDANIKITTYISDIFGVSGRNIMEALIDGEVITAEKLTQMVKGKVKSKVLGLVDALNNRLRSHHREMIRYSWEHLKFLEQTIAHVEMRIDQCLTPYRQDLELLDSIPGVNQTASAVMIAELGTDMSVFPTDNHLSSWAGVSPGNNESAGKKKELEPPRETKR

SEQ ID NO: 479287 - protein, 427 aa, unidentified
MPYHIAGIDVHKKMLAVAVADVEVEGDFHFERLKVGTSPVQLRALAEWLVEREVEEVVMESTAQYWRPVWEALERSWKPKRRMRTDANPVSGTLHLAQAQSNRGAGGRKRDFPDAERLVKRLGAQELTLSFVPDAEQRLWRTVMRRQHQITRNRVQLHNRLESLLEEAHIKISSVVSDLLGTSARRMLHAVGDGETDPAALAALADQRLRATPEQLRDVFGACADLHPVYRRLLKLTRDELRMIEDHLAHLDQQMAQLLAHHHAAVQRLAEVPGLGVDSAQQIIAEVGAGAATFPSAKQLASWMGACPGNEESAGVNYSHRCPRGNRQMRRVLNQAANAAVKAKGTIFAIVYRRLVPRLGHAQAIGAIAHRLCRLIWKILHQGIRYEERGPAVSAEAKKVRTRKMIRELRTLGYHVERLPAPSSSPA

SEQ ID NO: 479288 - protein, 404 aa, unidentified
MNRLKTTRDVIIGVDPHKMSVTIEVVDPNERLLGTGRFGTDQAGYAAMQRYVKQWPHRTWAVEGANGAGRPLAQRLIAAGEHVVDVPAKLAARVRLFDTGHNRKTDALDAHSIAVVAVRTPGLRVVVEDGELEALRMLTERRDELAHQRVQTVNRLQRLLSELLPGQRKRDLSAAQAKAMLATVRPRDVAGKTRRRMAAEQVADLVVLDAKLKKIKAELKDAVTARGSNLMGIYGIGPAGAARILADVGDVARFADRNRFASWTGTAPLDASSGEQNRHRLSRAGNRRMNHVLHIAAIVQIRHDTEGRAYYRRKLAEGKTPMEALRCLKRRLSDVVYRQLVADSKAPTTPVDADPGGHRGATLHSSAVDSHPHIDTSDQPLPGPARPTLRPDREHVKNLVPSTR

SEQ ID NO: 479289 - protein, 406 aa, unidentified
MNYLGIDVSKANSRYVFLDNDGEKLVKPFTLDNGHNDFNKLLDRLKELTLLPDNLLIGIEATGIWWENLYSLLTEHKFKVIVLNPHQTNKFREALRIKAKTDDIDAYVIAGLLRSGEYASSYIPEESIQCLREITKLRFQLVKDRQNYERQTNALLGLLFPELAQTAIKNPFAVSSMAILKAYPTAKHLAEAKPKNIEKIVRSIKGNNFNIKEIQSLIECAQKSIYSGRAKHDRGLNLIILLTQVESLQNAIAQLDDRTNNILSPSDSNDANSFPGANLLSIPGVGPKTLAAILSAVGSDGQAFPDGKHLIGHIGFFPKIYESGETRHDNTMSNRGPKYLRAALYMSAVACLKHNPEFKALYDRKVSQGKTAKQSLVYVAKKLAHLCLSMLKSGESYNPARVFMPV

SEQ ID NO: 479290 - protein, 388 aa, unidentified
MYMIYVGIDISKYKHDCFICKDTGEVIVENLSFTNNKKGFQQFLDLLKPYDNSNVHIGLEATGHYGLNLKLFLEKNNYSFMEFNPLLVKEFYKSLSLRKTKTDKVDAVVITQKLMSVPYKPNSKLFYHKYSIKSLTRLRENLVKQRSKYKVQLTNILDIIFPEFKPFFSNSLGITSLYILNKYKTPNKIANMRDFETLNKLSRGNFTYAKFVKLKDLAKNTIGESNDIFEIELSSILNLYKNIDDHIIELDKQISTIIKDLNPPTLSIPGIGVISCASIISEFGDVSRFSNAAKMLSFAGLEPGIIESGTMSSKGKMVKHGSGYLRYSLMNVALTVIRYNNTFYDYYYKKISEGKCHRVALSHVCKKLIRVIYILETKNIQFNSSLLK

SEQ ID NO: 479291 - protein, 417 aa, unidentified
MTDETNASPCRYVALDIHKHYCVIAAVNRDGQIVLDPVRIEHEDLEAQLQKKILPSDQVVIESTTNAWHYYDLLILLAAKVLVANPIRVKQIAYAKVKTDIRDTLILARLLAANLVPTVWVPPVEVRNLRYLLSQRRRLVGMHTQTVNRMGSVAHRHHLNHPKGKRFIEKNTAWQQDDELSDSEKFQLELDMATGEHLDGQAKKIAEKVASLSHQKPWAESMTYLMQLPGFGVITGMTVLSAIGDITRFESSGKLSSYSGLTAGVEQSGTKNRGKGITKEGRKDLRWAMVEVAQRAVKSDPYWKSRFQALERRVHRNQAIVAIAHQMLELVWHVLTYKQAYRHFSEERIAYKYLTWGWQLDEEARGGLTRQQFARYYLMRLGIGHDLKRIALNPKYPRKLASEAEVLALKPELNQTR

SEQ ID NO: 479292 - protein, 412 aa, unidentified
MELEFPPIAFDPAISCRYGFPGLAEFGAINPDNGMDRPCSNRVNGNAAEAQLIREKERAMTDIAMHNDRIATIGMDLGKRSFHLIGMDARGKVIMRQQLSRGRFERDMANLQPCLVGVEACAGAHHIGRRLSAFGHNVRLIPAQYVKPFRKGQKNDYRDAEAIAEAVQRPTMRFVPIKSAEQLDLQALHRIRSRLVGHRTAVINQLRGFLLECGVIVPQGPAMLRKILPSVLAQRTDVLSPRMIRLIEELADDWRRLDDRVDAVTSEVQALARQDEGCRRLMSVPGIGALTASAVVATIGNGAAFTKGRDFGAWLGLVPKQLSTGDRTILGRLSKRGNKYMRTLFIIGARAVLAKPGSWAKFGLEGWLVGAAKRLHHNVLAAALANKLARIAWSVLYHGRSFARDFEPQSVS

SEQ ID NO: 479293 - protein, 346 aa, unidentified
MEVLFERVAGLDIGKATLTVCVRTPGPRSRRSEVRTFPTTTRALESMRDWLLTCGVTVAAMESTSTYWKAPFYCLEEVMDVWLANAAHIKAIPRRKTDVRDAEWIAQLLECGLVRPSFVPPPDIRRLRMLTRYRVQLMGDRTREATRLELMLEDASIKLSVVASSLTTVSARAMLNALIAGERDPAVLAELARGKMRAKIPALTEALTGHFDAGHAQLVRSMLHRLELVEDALAELDAVLATAFAPWAHQVELLQTIPGVGEKVAQVIVAETGADMSRFPTAAQLAAWAGVAPGVHESAGKHTAVGTRPGNKWLTAMLVEAAGSVGRMKGKNYLAVQHAGSPHGAE

SEQ ID NO: 479294 - protein, 341 aa, unidentified
MFKNKSMKVFYLGVDVSKKKLNLCLRSNGKDILYDVIPNDLSSIKSWLTRTFEKFFLSEDSLVVCAEHTGQYTYPLVCATKSIGVYLCLEDAAKIKYCHGIPRGKNDKIDACRIAMYAERYNDCLQPYTASELIIQKLKNLSTERSMLVADRAKYQSQLKDQVDYMEHSIYIAKCNRVEGIINTFTDYIAQIDLEIKELINQAPVIAHQMDLLMSVDGVGERVALKMIMETDAFTSFTDPRKFCCHAGVVPFVYVSGSSQRSKNRVSNRADKSIKHLLHMAALSVSQVKNSPLKKYYDRKVEEGKNKMSVLNAVRAKLVTIMFAVIRADAFFSRNYQNSLA

SEQ ID NO: 479295 - protein, 367 aa, unidentified
MKKHSSQQGSLSSTDVELCTTISVDLAKQVFQLAGEDATGRVIYEDRIKSRQAFHDFLLRLPAEVTVLMECGPGAQAWARLLQAKGNAVRILPAQRVAEHRSGAKNDRNDTHAILRAGRDTSITPIPIKSTTALAIQALHRIRRGNIKRHTALGNQIRGLLLEHGVSMPQGDAAISKHVPRSLEDASLPLPDLLRELLDELLTDWLSLGERIAGLSRRLEATAQEDKVAQRLVTIRGVGPIIATAIVAKQTEPSRFASGRMYSAFFGIVPDQHSSGKKVRLGRMSKRGDGYIRSLMIQGAHAVLSQLRPDSDQPDDRRLLRWLSRVGRKEAAIRLANRNLRIIWALLQNDQVYQRKPNNNPEAAMSL

SEQ ID NO: 479296 - protein, 357 aa, unidentified
MSKSRVLMDRACSSEATAFCGIDVSAATLSVAVEAGPEWKVGQRQFANSAAGHRQLINWLGKNRCPVRVTLEATGIYSVDVALALAEASGFAVQVLNPKKASDFARSLGRSKTDKSDAVALAEYSRRMEFVAWKRPSREVLELRVLGRYMATLSEEHARLLNRLHAAEASRMAPRCVRDDLKRTLAGIQKRLLRLRRDARARIESQAETHRKWLRLLAIPGIGELSGMQILAELAGMDEQMTVRQWVAHSGLDPAHQTSGTSVNKPSRISRQGNRHLRKALFMPALTAARFDPHLKAFYLQLLARGKTKLQALTAVARKMLHAIYGIFKTDTPYDGAKLFPAMAAALAKQPQSVPIY

SEQ ID NO: 479297 - protein, 340 aa, unidentified
MERRYIGIDLHRNRFTCCIRLENERMYVTEWALEALGRFVKKLRATDEVAVEITSNTRLFHEAVAPHVARVVVVDTNQFRVISQSVKKTDPNDARLLSLYLSKGLLPEVRMKDKELAQLASLTQTRDTLVKQRSALKNKVNNILSARGLNLAKEALSSEKKLAEVLELPFDEIVRIELRVVVEQIRSLNKSIAELEKAIGEESSKLEGHKGLSSIKGIGKITGAILLSVIGDVNDFPDEGRLASYFGIVPRVSNSNETERSGRIHKRGTKLGRTALVQSALIAANYSPYLKRFYDQVKARRGAGKAIIALAHKFLGIIYRTLRNKWVFEDFPNFVLAEES

SEQ ID NO: 479298 - protein, 424 aa, unidentified
MSQRTLTERVTMVKRGMLLVGIDLGRDDNVAVVLTDTAQRLARFKFPHTRAGYDFFYRQLEQLRAQHPGQGLLIGMEPTNHYWKWLAADLEAHQPPLPYRLVNAYTVRKHREGEQLERAKDDLRDAFQIAELLRTGKFTETQLLQGAYAQLRQYATLHMRLQHDAAQLQNVLTTAVDLGFPELRQVFKDLSGETALALLRTASCASTIRKLPLSEFLAQVREQLQGHRLSVSKLKQAHALAQTSVGLVDTGALHFTIQVYSEQLAHAHESLKRTETALVELFLTLPEAPYLLSLPAISPLFAALLLAELGDPRDFSCASQWVKLAGVQPVADSSGHRTRSPTPMSHKGRSRLRELLYWLVLRWVQHDPYFKAEYERLQTRPQHPLTKMEALGALMNKALHVIWAVLRDRTFYDPQYRQAGAGAL

SEQ ID NO: 479299 - protein, 417 aa, unidentified
MNASPETIPIQRYIGIDSHKHYVMVGGMNARREWNLRPRKVQMPRFRAWAAQNLKASDTVVLETTANVWDIYDIVAPLVSKTMVANAYKVRQIAEARVKTDKEDVKRLLTLLIANIVPEVWVPPMHVRELRSLISFRWRIGKQLTMSKNRLHSVVQRFNLKPPEGNLLAEKNQDWWAEQEFSELTGFQVELDLEIIAHLEGQKAKIDQKLAELSNIQPWSDEMVYLMQIPGFGLLTGMILLSAVGDISRFSHPKKLVGYAGLGAGVHSSGQKHQEKSITKQGRKELRWVVGQAAWAAVRSDPYWKAQYQRLTKAKHPNKAIVAIARRLLVSAWHILTKHEPYRRADDETIAYKMMIWSQRMDEKALRGLTRQQFIKYGLLRLGVGQDLTRIERRGVPRRIAPTNEVLALRPELKPPD

SEQ ID NO: 479300 - protein, 342 aa, unidentified
MEITTLGIDLSKTTFHVIGLNARGEIVLRKKFSRKQLLVFTANRQQILIGTEACGGAHYLARALREQGHDVRLMPAQYVKPYVKTNKNDYLDAEAIAEAVQRPTMRFVPIKTDEQLDLQALHRVRDRWVARRTAVMNQMRGFLLERGITMRKGPSHLAAQLQIILGEGNCSFSGRTQGLLLELKHEWDELERRIEEASVELQRIAKQDDACSRLMEIPGIGPLVSTALVASVGNAITFRKGRDLAAWLGLVPRQHSTGGRPKLLGISKRGNEYLRRMLLHGARSVMMQVERNRSALGVWITDLSKRKHHNVTAVALANKMARIAWAMLTRGSHYSAPQLAVA

SEQ ID NO: 479301 - protein, 359 aa, unidentified
MIAVGVDVHKRKCTVAIQREDGKLKCFGPMENTGEGWRGLLGQLPAEAEIALEVSTSGYFAMSVLEEAGWRERAHWVHTAGIDSLRKQKYDRLDAKRLARKLSVADRDPLPEAWFPPPAIRQLRLRARQRCWLALLRTQVKNRVQSLLQMHGLRPPVTDLFGPAGRAWLAAQSLPAATRESVEQLLRVHDFLSPEIEKAEAYLRAVDGQFPELARLRTIPGIGDVLAPVIWSEIGWLERFRSARALVNYTGLVPSLYESGEVSIRGGITHQGSAWLRWALVAAANSVIQGVNPFARRYCRLCRRKIPNVAKTAIARALAHCVYGVLKSGTNYQEARGERRPAGVVRSWGAGQPEVAIGH

SEQ ID NO: 479302 - protein, 384 aa, unidentified
MTKHNILFIGLDTHKEFVEVAYIEEHRGSNPVHHGRVSSAKQAIIKLARQFQSKYPYATLHFVYEAGPCGYWIYRLLTSLGHCCYVVAPSLIPKKPGERVKTDKRDALKLAKLLKSEDLTPIYVPEPEDEAVRDLSRAREVAMKDLKDAKYQLKALLLRNNINYAGTANWSLKHLRWLTELVLPHPAQQIVLQECLQAINERIARLQRLDNELTHHVYQWRYYPVVKAIQAMRGVRLLVAAGVVAELGDLTRFDHPRKLMSYLGLVPSEHSSGGKRHIGAITKCGNGRVRRLLIEGAHTYRYAANISTELQKRQEGLPKHIIAIAWKAQVRLCRRYQKLINKGKHYNLVITAIAREMIAYIWAIAKEVVLSQVDPKLRLARIPA

SEQ ID NO: 479303 - protein, 330 aa, unidentified
MYLGIDTHKKYSQVAVVDGDGNLQDEIRLPNDRLDELAEEYAGGDAAIEASGNYRPIYEMLDEHLDVTLVNPSKNRIIADATSKTDRVDAKRLAHMLRADMLAESYVPPDEIRTLRDLVRTRKLLVEERTAEKNRVRAVLTRTDNTYDSELFGPTGREFLAELSLNDADRTIIEAHLSVIDAYDEQIEAIEETIEQKVLESPAAQRLLTIPGVGQYTAAVIVAEVGEIDRFDEDKELVSYAGLDPTVHQSGDKEIRGGISKEGSAPLRWALVQCANIAVRCDEYLGNFYTRLKERKNHQIAIVATARKMLVSIFHMLTRKEAYDPPEVNA

SEQ ID NO: 479304 - protein, 320 aa, unidentified
MQIQSKALDIGADVGKDEIVVACAEESFSPRKITNRRAEIMAWLKTLPPGSRIGMESTGSYHELLAETAHQLAFVVYVLNPKDTHHYAKAMGLRGKTDRVDAKLIARLIDREHEKLHPWIMPTAEQRQIERMIKRRGKLSAIRASLSQSLKGLAGFAAELKALRRRLDKLIARIDARIKALIEANADRKQDYARLRKIPGVGSVVGGSLVNTLERVPFKKGDAFVAFTGLDPRPDESGHHIGRRRLSKRGPAELRRLLYLGAMAAAKTKTWKPLYERQRAKGLSTTEALVILARRIARTAWSIYTHKADFDPQRLTAGLT

SEQ ID NO: 479305 - protein, 361 aa, unidentified
MRSVTQSLLDRRASASRFVYCEQTIKCIFHLHGVDAQGKVQLKRKLRREELIAFFERQPRCTVVMEACGAAHHWARVLGGLGHTVKLIASEAVKPYVKRGKKNDPADAAAICAAASRPDAKFVAVKGLEQQGVLALHSVRSLLVKQETMLANAMRGLATEFGLVVPKGMGKLEELVALVEEGEGIPEQARKGFVELREHRRATAERIDGLERQIVAHARHDDTARRLATIPGIGPITASLTAATVGDGIGDFKSARHFAAWLGLVPRQHSSGGRTRLGRITKTGNRAIRTLLVLGATSMVYRAGQWNSAAGAWVRGLLERRPVRHVTVALANKMARIAWAVMARNEVYRARGGVTPAAATA

SEQ ID NO: 479306 - protein, 331 aa, unidentified
MQAITTVGLDIAKSVFQVHGVDAQGNVVLRRQLKRRYVLPFFQTLPPCLVGIEACATSHYWSRELQALGHKVRLMPPAYVKPYVKRQKKDATDAEAICEAVGRPNMRFVETKTPEQQGCLTIHRTRHLFIRQQTSVINAIRAHLAEFGIVAPVGRRGVDQLLAVVADPSDKRLPEVVRSCVAALGAQLQMLKAQILEFDRMIRAWHRSSETSKRLDAIPGVGPALATALVASVADPKAFRSGRDFSAWIGLVPRQSSSGGKDKLGSISKQGDPTCAACLRPAHSQSFATPRSMAPGTGRGSPRCWRGVRPRLRPSHWPTSSPEWHGHDGTR

SEQ ID NO: 479307 - protein, 466 aa, unidentified
MVQKQERAKEERASMTVKHPHAAGIDIGSRSHWVAVPPGCDGQPVREFGSFTGQLHELSDWLKSCGVVTVAMESTGVYWIPLYDVLEAAGFEVLLVNAEHLQKVPGRKSDVKDCQWIQQLHGFGLLRGSFRPPAEFLELRTYMRQRERIIEDAARHVQRMQKALTEMNLQLHHVVSDLTGVTGMAIVRAIVAGEHDGHKLAEHRDSRCKQPKARIAAALQGTFKTEHLFVLEQELSAYDHQQKLLRACDERLQQKLAELEKSAAAPHDPEGPLPQPCPPRRHGAPKGNQPRFEIQSPLHHICHDVDVTQIPGLAPATALNLIAEVGTDMSKWPTEKDFTSWLNLAPGTRITGGKRLSGRRRHSRQRAGEALRQAAVAVGRTDTALGGFYRRMASRKCAAVAAVATARKMAVFLYNALKHGKTFMEVGLAHYEKQHREQLVRRLTRQAAALGCQIVPVRTEPPAGGP

SEQ ID NO: 479308 - protein, 371 aa, unidentified
MDESSKTLYVGLDVHKDSIAVAYAPEDRGAEVVSLGAIGTRQSDIDKLIRRLESKSATLVFVYEAGPCGYWLYRYLTGKSLACHVVAPSLIPRKAGDRVKTDRRDAITLARLMRSGDLSSIYVPGIEDEALRDLSRGRDDAMQDLKRSKRRLKSFLLRQDIRYEGRANWNAAHLRWLSEVVCPTPPQQIVFQEYVRAVTEQQERVQRVERELHEAVNPWRLYPVVEAIQALRGVELTGAVILMAELGDITRFESPRQLMSYLGLTPSEYSSGARRRQGGITKAGNSHARRALVEGAWAYRYPAKVSRHLQLRLEKLPAEVQAIGWKAQVRLCRRYRQLTARGKHVNQVVVAIAREMAAFAWAIARLVPLAS

SEQ ID NO: 479309 - protein, 387 aa, unidentified
MPQPNDLSRSLVALDQNSTIIAVVELSHSSWLVGGIVPDIERQPRKKLEPNPERLLALLHRWQDEAVRAGSTITRIAVAFEAGRDGFWLARWLEARGVETHVIHASSVAVSREHRRAKTDRLDTELLKRGFLGWLRGERGHCSMARVPTIAEEDAKRPNRERDCLVGERTRIVNRIKSTLARLGIRTFKPTLRKAADRLATVHTPEGMPLPPNTLAELQRDMARLGLVVSQIRQIEEARQKRLEQQHETGPHAMVRLLARIVGVGVETADMLVHEVLSRPMRDRRAVARYAGLTGSPDESGAQRREQGLARAGNARVRRGMIQLAWRFLMFQKESALTLWYRARTADSRRGTRKTMIVALARKLIIALWRFVTTGEPLEGVVLRPAT

SEQ ID NO: 479310 - protein, 339 aa, unidentified
MKLYGAIDLHSNNNVVVVMDEQDKVALEKRLPNDLSRVLMELAPYRESMEAIAVESTFNWYWLIDGLMEAGYKVKLVNTVAVKVYDGLKYTGDEHDARHLAHLLRLGILPTGYIYPKEERAVRDLLRKRAQLVRCRTAQILSIQNLVSRNRGKGISKDEIRGLDEEGIARVCAGNEARALAIRSNLAVLRCLDEQVRGLERAALAQAKLKPEFKKLLTVNGIGNILAMTIMYEAGTMERFAKVGEFASYARCVSSSRWSNNKKKGEGNRKNGNKYLAWAFVEAANFAVRFDEQIRRFHQRKKAKRNGIVAIKAVAHKLARACYHVLKDQQSFDVTRAFA

SEQ ID NO: 479311 - protein, 356 aa, unidentified
MPTQVTKKIDFTGKQLFIGLDVHKKSWSVTILVDGTEHRTFTQPPEPESLNSYLQRMFPGGEYNSAYEAGFCGYGIHRRLNELGINNIVINAADIPTSQKDKLQKRDPVDSRKIARSLEKGSLRGIHIFDRELEEMRSLNRTRFYLMRDLRRSKTRIKSFLQYYGEPIPVEFDNNQWTLRFVSWLKQVKMQTMSGQDAFSNLISSYEYHRSQLLTLSRQIRERIREYDRELYTLLKSVSGIGPLTASALITELGDINRFTNIDQLGSYVGLIPRIRESGETTHTGGITFRCNSFLRTLLIESSWQAIRMDPAMMQYYHAHLINNKGHKVVIKVARKLLNRIRYVMKNRQPYVTGVV

SEQ ID NO: 479312 - protein, 435 aa, unidentified
MKVLHERVAGIDVHKDMVKVAIRSPGDKPWTRKTEILEFRTFYGVLQHMAAELRRREVTHVVMEASGVYTEPVYHALAERDFTEVAVINPAHARALKGHKTDARDCARLAELFECGLLRGSCIPAPELKEVRDLTRYRMKTVQARTSEIQRLGKALESAGIKLGSVASDITGKSATAMIEALIDGERRGGVLADLAIGRMRTAGKLADLSQALAGRFTGHHALLCRLHRDRITGFGDAVDDLDQRIAGKSARWQREADLLKTIPGFGDVVAWAWLGEIGPAPHQYFADHEKLASWVTLCPGSNISARKRKHGRTGDAGTYIKPMLVQAAWSAIRVRGRLQARYSRLVRRFGGDKNPGAKKKAITAIAHTLLKIAWQVLQAGTPYQEPGADFYTRRVSPEHRQAFLERQLQKLQPGCTITITISPTQAAPALPPGG

SEQ ID NO: 479313 - protein, 457 aa, unidentified
MKNEYFMGCDVSKGYADFIILDKSKRFIEHAFQLDDTFAGHNCLYEKLNRFFSDHPESRLYAGVESTGGYENNWYQAMHQFQGIFDIKVARLNPCGVHASSRADLKRTITDAVSAKTIAEYLIAYPDKIPYENDDSWASLRKQWSFIQMLTKQKAQLLNQLESLVYTANPEILCYCQDGVPDWILTLLSRYPTADKLAKARISDIAKIPYVSKQRAKTLKAKAKTSIASSLDEATRQLTTATVVQIKALKRTIHAQTKILSQQCSPPEVELLKTFNGIGDYSAIGLLLEIQSVKRFASAKKLASFFGLHPVFKISGDGSTGFRMSKQGRKAPRSILYMVAMSAIQSNSLIRSLYQEKVSGGMAKMAAIGLCMHKILRIVYGMLKNNTPFNPEIDRTNREKTRQSESTPTTDKSRRYQSYDENAPVSKRGRKRRLERQLSQGASNTECGIVKTVPAPA

SEQ ID NO: 479314 - protein, 419 aa, unidentified
MNKIETKKQRIVNSKTLIVAVDLGKTTDTGYCRCPDGKDIKPFEFSNNLEGFKKFWDRICWMKAAHQLEEVVVGFESTGAYGEPLVHYLRQKPVKLVQVNPMHTKRMKELQGNSPGKTDRKDPQVIADIICLGRALSVVIPEGAAAELRRLTLARERCLQRRTALYNQLQDLVFILFPEFLQVMKDVKSKTAYYLLSHCPMPQDIVTCGPEALTLILKRVSRGKLREARAQALYEVAQQSVGLKEGTRGILLEIEEILFAVEACQRFIEKVEEEMLPLLEQIPYSHSLLSVKGIGAVTVAGLIGEVGDFRQFRTLREVMKLAGLNLFEISSGKHQGNRHISKRGRPLLRKLLYFAAINTIRRGGVMQGCYQRHLEKGMPKTKALIAIARKLLGILFALVRDHNQYVDNYSPEEGLKLAA

SEQ ID NO: 479315 - protein, 325 aa, unidentified
MERQYVAVDLHAQRSLIVREDEAGDKVGVTQIDNDPLSLAAAVAEAGPNPEVAIEATYGWYWAVDVLQEMGATVRLVNPSGLGESWNERRVKNDYLDCCELIDRMRLRKLPEAWIAPLELRELRELVRYRAKLVCIRTGLKAQLKAVLAKHCLHPPVKDLWGVAGPRWLDGLELGEGYHTRVQSLRGLVGAIDDEIDMLERSIHQRLRDDRGYQAIQHIDGVGRTLGAMFVVEIGDVTRFPTPEALCSWAGLTPKHKESDRKVRRGKVTKQGSKLVRWAAIEAISKIRRPQTSSRLPPHRRPARDQHRPHRGRPQTPHPRLLRPA

SEQ ID NO: 479316 - protein, 366 aa, unidentified
MGYYIGMDGHKRYSEMAVMDEGGRIRERRKIVHTEGAIREFLSGFEAGTPVALETIGNWYWMVDEIEAAGCVPHLAHAMRAKVMMGHVDKSDKLDAHGLAKLERLGSLPTVWIPPGELRDQRELPRTRMALSQVRVGLKNRIHATLAKYNLKIDASDAFGKSGRQQMAQVMQRLPAETKRCVLEVLNVLDEVEAQLDRMEQRMLACLKEEAKLKLLISLPGVGRILAMVIDREVGEIERFPCVEKYAGYCGTVPRNSQSGGKRRQYGMRKPCNRYLKWVYIEAAETVVRMHHHPNWREKHVVRLYERLRGHTGHSKAVGAVARHLSEATFWMLKKDQPYQEPKVARGSGQSWGKRDFHMSSKKDEG

SEQ ID NO: 479317 - protein, 430 aa, unidentified
MGFIVPNAMPLEGAEQPIPYEWFVGVDWGSQQHQVCVLDRDRRLVGERAVEHDGASLAQLAAWLWTLSAGQPQRVSVAIEVPRGAIVEGLVERGFHVFAINPKQLDRFRDRHSVAGAKDDRRDAFVLADSVRTDRPSFRRLHLDAPHLLLLRELSRVEETLLEEFRRSANRLREQLHRFYPQMLQLCAAADEPWLWDLLHLAPTPAHAMLLSEEQVQRVLKAHRIRRIKAPEVLACLQALALPVAPGTAEAAQTHCGFLLPGLRVVAEQLQACSQQVDTLLRTLADEPGEGQSPSDVAIVQSLPGVGRKITAWLFAEAAQPLAERDYQVLRTHAGVAPVTKQSGKRRQVVMRHGCNPRLRHALYHMARVAMQRDAHFSSVYVALRAKGQRHGQALRNIGDRLLRILMAMLRHRTCYDASRIRCVPVVQMG

SEQ ID NO: 479318 - protein, 356 aa, unidentified
MSAAPEQVIARHGVVIAVDPHKASWTAVVVTADLAAAAAIRVEVNRAGYRQLRRFAAAWPDARWAIEGAVGLGAPLAQRLREDQIAVIDVPAKLARRVRLLSTGHGRKSDQADALSVGIAAWSAQTLRAVQIDDAIAALRAVTEHRDDMVRARTQLINRLHAVMVKLVPSGLARGLSADTAAEALRRVRPRDSLGRTLRTIAADLVTELRRLDRRIAETTQTLSDAVTASGTTLTALLGIGDVVAAKMLARTGPVGRFASSAAFASYCGVAPIEVSSGDIVRHRLSRAGDRQLNYALHVMALSQIRYDSPGRSYYQRKRAAGKSHKEAMRCLKRRLADVVYRTMTNDSVSSLSPAA

SEQ ID NO: 479319 - protein, 346 aa, unidentified
MVIIGCDFHPGYQQIAMLETDTGEVRYLQLAHKQEAEQFYGSLRGRQVLVGIEASGYSQWFEQLLEGLGHGFQIGDAAAIRASYVRKQKTDRRDAGHILRLLVEGRFPALWVPTAADRDARQLIVHRHKRVELRTRVKNQLHALALNQGLRLRWRLWTRAGLEQLQALPLQPYATARRADLLRQLQEMDAEIARLDGMVRQEAEARPAAMRLISHPGVGPVTALAFVLTIGDAGRFSRSRQVASYLGLIPSERSSGGKQRLGHISKQGNPLLRFLLVEAGHIAVRGDAELRRVYTRVRHRHSTGVAKVAVARKLAVRLYWMLRRQMDYAQLRGPYAGKPVSFCGRK

SEQ ID NO: 479320 - protein, 359 aa, unidentified
MTVIEGRERRIVGGVDTHKDLHVAAVVDEQDRVIGTQSFATTRQGYRQMLAFMRSFGHLQRIGVESTGSYGAGLLRFMQQAGIAVLEVTTPDKQDRRRRGKNDDLDAQNAAHAAFAGQRTVTPRSRDGMIESLRVLMACRKTAVSARRVALQMIHNTIVCAPDGLRDQLRSMTRMQLIRTLAAWRPDLTAYRDVEAAYRIAFKSLARRYLELHDEIADLDAMIVAIVDELAPNLVARNSIGHTGAAQLLLTAGDNPERLRSEASFASLCGVSPVPASSGKTVRHRLNRGGDRAANSALHIIAIGRLRTDKRTKDYVARRIAEGHSKLDAIRALKRYLAREVFTLVTQRHREINATRIAA

SEQ ID NO: 479321 - protein, 409 aa, unidentified
MVVHVAPLSSLTVVVAVDVGKNEFAVSVTDAQRRKLMKPRLGCPMTAPSLRQVQAAIEAVVPAASGVRVGIEAAGHYHQPLLSLAVWPSGWEVFELNPAQVSEQRKVLGKRTIKTDTVDLEAMTELVLAGHGWPVRDTATVLTQLTAWSAHRRSRVAVRSATKTQLLAQLDRTFPGLSIALPDVLGTKVGRLVAEEFTDPTRLAALGEARFIRFGATRGLQIRRPTASKIVAAARDALPMPDAPVARAVLRADLALLADLDAQIDAATAELDRLVPLSPFATLTTAPGWGPVRVGSYGGALGDPTRFHTARQVYRSAGLNPIQYESAGKRRDHSISREGSVELRRALIDLGIGLWLNDPNAKHYAAGLRARGKKGGVIACALAHRANRIAFALVRDQTSYDPAAWTREG

SEQ ID NO: 479322 - protein, 366 aa, unidentified
MREQQDNRHDRTTIGLDLGDRWHRFCVLGESGQVVEEGSVANNRVALSELSRRYLGALVVMEAGCHSPWVSRHLEQAGCEVVVSNPRKTRAIYQHERKSDRRDALMLARIARMEPALLYPVRHGSEEAQQDLLRIKLRDSLVRARVGLINSLRFTLKSLGYTIANPSTERFHRVVESALPESVVQVIAPSVQAIEELSLRIKLLEREIRTLAHTKYPETSWLEQIPGVGPITALYFVLKIGDPARFERVRDVGAFIGLCPRRDQSGENDPQLRISKRGDAYLRRLLVSSAQYILGPFGPPSALRQYGLALAAGGTSRAKKRAVVAVARKLAVLLLTLWKNQSAYQAFPGHKEKMRTSDRERLRCIA

SEQ ID NO: 479323 - protein, 336 aa, unidentified
MRFIGVDLHTTQITVCYLKAEEDFEIRKYQLIEMEKFVNTLEAGDEIAVEATGNTRWFAEQVASTARRVVVVNPRQFEVVKNSVKKTDKNDALNLARFLKADLLPEVRAKGEAAERVQSLVNTRTKLVRVKTSLINKIHALYVSNGRKLKKTSLASDKGLEKVLLSEWSAVERIELEIIIEQIRSLKVSIKKLDKAIEAESGKLKGFESLVSMSGIGSLSAGILLSVIGNIKDFATADKLASYFGIVPRVSNSNETVKTGRITKRGNRTGRTTLVQCSLAAIKKNEYLKKYYDGVKARRGHGKAKIALARKYLTIIYNTLSNNWVFADFNNFELAE

SEQ ID NO: 479324 - protein, 418 aa, unidentified
MKIVYLVCCGVNVHKNVIVATIAITDKSNITQYIMESFSTINADLIRFRTWLLSYQCFNVCMESTGKYWIPVFNILEEANIKVLLTHPKYVRAIKDKKTDKKDSKWIADLFKFDMVRSSFIPPKDIRALRELARYRYKLVCMRSSERNRYQNCMTVSNIGLASVLSDPFGKSASDIMRYVLTSNVFDEEYCKKLIQKSAKKKTELILESIRGSRIESDQRFKMNEAAAHMDYLEQAILRTEAELYTRIQPHYHFVEHISNQLPGISQLSAALIISEIGVDMSVFESDKHLNSWAGLAPANNESAGKKKSVRISKAGQFLKPLLVQCALAAVKSNKQPYFATKYQKLKKRRGHKKAIIAIARMMLTCIHHMLQTGETFNPSDYDNFDKPVIRKVALNNENAIAFLAAQGYDVSSISKIA

SEQ ID NO: 479325 - protein, 332 aa, unidentified
MNAVGIDVSKGKSMVTILRPFGEIVSSPFEIKHTSSDIHSLIKLIHSIEGESRVVMEHTGRYYEALAHQLSAADLFVSAVNPKLVKDFNNDSLRKIKSDKADSVKIARYALDKWQSLEPYSITDELRAQLKVMNRQFHFYVKQKTAMKNNLIGLIDQTYPNANTYFNSPTRSDGSQKWVDFVSTYWHVDCIRKMSLNAFVEHYQNWCKRKKYAFNKSKAEEIYTKTKELVPVFPKNEITKHIIRQAIDQLNSTSVTVETIRTLMNETASKLPEYSIVMQFKGIGPSLGPQLMAEIGDVTRFTHKGALTAFAGVDPGVNESGSYAQKVQSNTT

SEQ ID NO: 479326 - protein, 502 aa, unidentified
MKYVLKKKPSICGEPQSSLHKIADTEKNLEQFVAFGVGLDIHKNSIATCVSGQLSSGEILEYKEHTFRNNYPGVNELCGFLRKFIAKATVLMECTGVYHVAVYQTLTERFTSRNRCIIAMNPLLVHRKIADLGTKTDRADARTLSILALYGKLLRPSYVGTSEFFATRDLMRSYHKAQSRCTQFKNRLHRNLHLANQKFSFDFSTNWGITFLEHYISQDWSLGECYEDLLMNLEAEGKGKVLKKQAEEVAINASVTLTSLQRTLIQMDLIQLLQNQQACSLYIQQAEQEIIRNPELSQQYQRLSIIPGFSSITVLTVLTEIGDYTRFKNYSAFSKFCGVVPTIEDSGEHKSRGHVNRFTNKHLRKVLTQAAGVVIGRPNRQTDIGAYAFKQFKLRRLPFKKAMMKVAWKYSRIIYSVLSENREYNPCCESIQRKRSQLARKMAKKGSILESCRTRAVRQDISNILVKYSELLNRTSRYHLVNGFHRLIRKSQYLDGQTEVEN

SEQ ID NO: 479327 - protein, 388 aa, unidentified
MNVGADKSEPLTAIHTDLGAIFVSLELSRSSWLITSLSPRGGEKMSKHSIRGGDFAGLMERFAQLQEKARLRTGQSFRIIVVQEAGLDGFWIHRALQNEGIESHVVDAASIATSRRRRRAKTDKIDGETLVRVLLAYKRGEPRVCAMVKVPTPSEEDRRHLCRERKALTAERVRHVNRIKGFLFSQGVSGYQPLRRDRRQRLEELQTGDGRAFPQHLKALINRELDRLELLLKQIKSVEAARDALLAVKQTAKPAPAAMLLAIRGIGPEFAAILWSEGLFRHFENRRQIAAYAGLAPTPWQSGAVDREQGVSKAGNPRLRTTSIQLAWLWLRNQPRSALSVWFHERVSRNGGRLRKTTIVALARKLLVALWKYVTAGVVIEGVTMKVA

SEQ ID NO: 479328 - protein, 340 aa, unidentified
MKISKKNYLGIDVSKPWFDVSLLTELNHVKQPMLTLRFDNTAPGLKLFKKWLTAQRVSFDNNTLLVIENTGVYHRLLWSFCSTHNLQLHIGNAAHIKWSLGITRGKSDAIDSKRLCLYCCKQADELKATPALNPVFMKLKDLMTSRSRLVAQLHSTKNYLKEIQCTEDKQLLLVLERVHKAAIEGLKKSILKIEECITKMIKEDAAIYTNYELIKSVPGIGHLTAVYIICCTNNFASKISGKQLASYAGVVPFEHSSGISIKGKNRVHKMANKDLKKMLHLCALTAIKYYPEFSNYFNRKKTEGKNGMSALNAIRNKLVLRVVAVVNKQTPYVDYSVKAA

SEQ ID NO: 479329 - protein, 339 aa, unidentified
MNYAGVDLHKHTITVAVVDRERKLVARRRFSNQDSAGILRFLNAQRPFELTVEATAGYEWFVRLIEPSAARVVLAHPSKLRIIAQSTRKSDKFDATILAEMLALHQIPAAYRPTPRQREHRLYVRQREYVQRRITGTRNKIRRLLADHNLDRPDLFTQLGRRYLATLELPMADRFCVEQLLKQWQELRLQLHEVTAQLAMFAAGGSSQEQEDRVLLRSIPGVGVVTSEVVLAELADWRRFSSLKQLTAYAGLAPGQRESAGKRRALHIEKTGSPLLRWVLVQAAWQLVKRSPRWRVIYETLKLRLGVKKAVVAVARRLLGVCGAVLKNRRPYAEQALNA

SEQ ID NO: 479330 - protein, 462 aa, unidentified
MQVVYQRCCGLDIHKKLIVACLLLRSAQGVHKEMCTFGTRLRELYRLRDWLKSNDCQMVAMESTGVYWKPIWNVLEEELALMLVNAQHIKAVPGRKTDTKDAEWIADLLQHGLLRASFVPARPQREVRELTRYCSKLVQERARLVNRIQKVLEDSNVKLASVATDITGVSGRAILQALLDGEEDPQALAELARGRMRNKRAELAQAVQGTLSAHHRFLLQSQLRHLDFYDTQIAELDQEIARRLEGQTSPQDPRPDPTGDEPTSGQPIPSTEHTSEAAQSAAAPSPQPTADPGRSQAEVLAILDAVTGVNQRIAQIVIAELGIRLDQFPSEGQLVSWAGLCPAAKISAGKRLSTKTGKGNRWLRQALIEAAHGAARSKNTYLGAYYQRLKKRMGSKKAIVALAHRILVIIYHLLKEQQSYRELGPGHADEQALEFSKRWAIRRLEQLGFAVTLTPKDHEEVA

SEQ ID NO: 479331 - protein, 385 aa, unidentified
MKGKTFKPTDYEVFGGLDVDKRSISVTFTNHQGFIRSLRMPYSVEHLVNHVRKHFGDQKVAFAYEAGPTGYGLYDGLVAKAYPCLIAAPSMIPKAPGQRVKTNRLDSRGLSENLRGGQLKSIHVPCALYRELRHLTQLRDTFVSEMVGMKQRIKSLLLFEGIEFPPAPAGRQWSFRVKDKLRKLECSKTVRFKLDQLLDSLEFSEKQVLKATREIRRFCRNDAELSQCIEYLMTIPGIGWIVASQLVARIGDWRELKNIRQLGGFLGLVPTENSTGERTDRGSITHTGDGRLRSKLIQASWSAIRQDGELREFFRSVCRTHARHLASRVAIVAVARKLSVRISVVLMKQRPYEVRQKVRSTPLTQEETSPQGTTRRQAEPGEKNS

SEQ ID NO: 479332 - protein, 323 aa, unidentified
MRIIGVDLHTRQQSLAMLDTDTGEVIEKTLQHEGDEVREFYSALPDPVLVGIEAIGSMPWFLKLMEELKIECRVGHPAKIRAAEPRKQKHDRRDARLLPTLLAENRFPAIWMPSTEQRDLRTLLRHRHQWVRMRTRVQHTLQSLALAHGLRRGATLWSQAGQHALQALSLAPFASQRRAALLALYPVLQKAIDDLDQQVSEQALLHSQAQRLMTHPGVGPVTALATEAFLGDPLRFADGRAVASYIGMIPSEGSSGGRRQRLGKLTKQGNALVRYLWGEATIHAVRRDPELKRFYRRKLIQKGLGKAKTAAARKLGIRQQTNS

SEQ ID NO: 479333 - protein, 336 aa, unidentified
MSKELALGFDLSKDSAVVGLAIDGGCVDLHKISFQNGRRKALEELILQLKRLYPEYQLKAAFEDGGKLDVYDQLSDLGIDCLVVPRHYISKSDKLRRNKNDFSDAQNLAVELSLGKIEGRYVFDKEHREFQLLVRTHRNLVQSRTKLIQDLRDIFESSDIKQPLKINESSLDLLIESEDLNREYSFKVKQLIQGYTDHSSQIKICRIEIEKWLSLPRYLEFTNALLRIKGISHIIAAELISELGDFGRFDSFYKFKSFCGLAPYRYQSGQTDRHYRSRNTKPPVLKRTFSDARRCLATHNDYYKEKKALFQKQNQRNWRINLEREFAKEIFHLWQC

SEQ ID NO: 479334 - protein, 406 aa, unidentified
MRYVGIDIAKKDHQIAAVDEFGNVILKSFSASNNESGFAKIAEKLEAARIESDECLVGMEATGHYWISLWEFLDANGYEVVVINPIQTDAFRKVDSLRKTKTDAIDSVLIAEYLRFANPESSKMANPDVEQLRELARFRSFLVEQATQLKNKAIRVLDQAFPEYGKLFSNTFGEASKALLKQCPTPEEVLATDIRTLTRILKENSGGNCGRAKAEAVKDAARSSIGAKFGARALSFEIKLLVKRLSFTQVQIEELEDEISELLHRSDGHWLTTIPGIGDSLAASIAGEIGDPDRFETPKKLIAYAGMDASKYQSGANQDTNGHMSKRGSSELRRALMLAADKVRIYDPYFGEYYDSMKARGKHHYVALSGVARKLAGVCLSLMREQRPYESEPPEHHLPGHLQRQA

SEQ ID NO: 479335 - protein, 314 aa, unidentified
MSETTRIVVGVDVAKETLEIATSAGEHWQCANDAKGHRALSERLIGAGCIVLEATGGYEQPLLARLGQAGLPAVAVNPRQVRQFARAVGRLAKTDRIDAEMLVRFGQHTQPEVRPLPDEQTRLLEALLTRRQQLLEMIQAERNRLEHALGAVRTDVRQHIAFLVKRLKAVDRDLDGQLRESPLWREKEKLLKSIPGVGRQMVLRVCAQLPELGSIPRKKVAALVGVAPYNCDSGTLRGQRHCWGGRAAVRDVLYMAALAAVRHNPPIRAFYERLQAAGKPKKVALVACMHKLLLVMNAIVRDNTAWNPQMQRVN

SEQ ID NO: 479336 - protein, 341 aa, unidentified
MRYIGLDVHKDNITACVLTSTGKPKFEKDFRRESESWDLSELLEYGDKDGLCVMMESGTYAYQPFRFFSDRGMETYVVHAQSLKVITQSDKKTDKKDAQTIARMLRLWKKGDIDLQMAFMPTREQCELKDVCRYREEISKKIGDETRRIKSHMSRNCEFLPDSFDNFQTRKAREFVKKNYPSDLTLMRRMNSLERLFEERDSTQKEVESRLPDSREVELLSSIPGMGRQSAVQAMSMIVDINRFQDAEKFCAYFGMVPRVRDSGGKERHGRMTKNGDRMMRMIMERVTESHVRFCDSSVTRYYKRKCTEMGTKKALITASRKMLMVIFAILKSGTDFRLAA

SEQ ID NO: 479337 - protein, 343 aa, unidentified
MRRYVGVDYHRDYSYMTVMDQQGQIMQEGRVENQQAAVAEFLTRAHCDGNASAVLEAGRNWTVMHDWLEELVDEVKLAHPLKVKLIAEAKIKTDKIDARVLAHLLRTDLVPEAYVARPQAREVRGVLRQRMFLVRLRTMVKNRIRTLLDRYPSLTATCPTDDRFSRAARGWLQQVALKPTDRTLVDDDLRLLDELEAHIATTETLVATLAAGDARVTLLKTIPGLGDFFAVLIAYEVDDITRFAHQKKFFSYMGLVPSTHSSGGRTFHGRLTRQGNKYLRWAFVEAVWPAIRTDRGLRAYYEQLKTRKGVNPAKIATARRLATIVYRVLSQRRPYRVEGPGRP

SEQ ID NO: 479338 - protein, 353 aa, unidentified
MEQFIGCDAHKKFSVFVAVNEKGQAGEALRVVHDRQTYREFLSRLPARSAIAVEASGNYSWLVDEMERSGHYPRLCNPLEAKRRMGLTNKTDKLDARGLAILLRNGTLPEVWIPPSELRDQRELLRLRIFLVRLRTRVKNRIHGTLARHNVQVPGADLFGVAARLELSTRLPELPVHSREAVEQELATLDFLEIQIESAEQRLNAIMKVSAEADLLKTLPCVGKILSMVLMLEIGRVERFPTAAHLASYAGLVPRVHSSGGHTRMGQVCGNVNRNLKWAFVETGNLIVINQRGLAGTHVVRLYQRIKRGKNHQKAVVAVGRHLAEAAWWVLTKQEVYREPQGPRQQALSSTHG

SEQ ID NO: 479339 - protein, 335 aa, unidentified
MLGIDVSKGTLAAALVDPITHQVQWEQEFPNTSAGIARLLRRTPAHIPLVLEPTGRYGLAVVRQAMAEQRHVFVAQPRRAHAFLSALSPRAKTDRLDSRGLAVYGSCAVLAPYPVKSEAVDQLDQLLTARKGLSAALMRLRQQQDDLPYAAAALAPALVALAAQVKDLDRQIAARTTAPAGSASPASDFPMATALDRVPGIGPVTAAALASCLVNKHFPSSDAFVAYVGLDVRVRDSGKWRGHRALSKQGNAELRRLLYLCAQASLRTKTSPFRGQFERERTKGLSTTAALVAVARKLARLSWSMVTNGTVFDPERVYTRPPRRATDEQIPSPNP

SEQ ID NO: 479340 - protein, 317 aa, unidentified
MEVVGIDVSKKTIDVYKPSKGHIKINNTSEGFSKLAEWGGISHYVMESTGSYHYQLATYLYGQGLSVSVVNPLPVKRFIQMRLQRVKTDKSDAKMLSEYGLSERPKLWVPDPEHISYSKQTLSVLELYTKQQTALKNKIDSLLSGGVKKGKPLSSLRLQLKRIEGEIKKLEEELQETLSKGSGKAMTQLRSIPGIGKKTAAMLLVYSNEFRDFDNYRQFIAYAGLCPVHRQSGSSVRGRSYISKKGNKLLRNHLFLCSFTASQHNAQCRALYERIVAKGKSKKLALIAVANKLIKQSFGVIKNDLIYDPNYVSMKQI

SEQ ID NO: 479341 - protein, 317 aa, unidentified
MANYIGIDVGKRSLQIYLADKGNSFAVDNTIVGLKKFISNIRKHYKSFSTLIVAFEPTGGYELQLKQFLGQQKISFAVVHPTKVRNFAKAKGWLAKTDKIDSKLICSYAASFNMKPHSDYTTDAQRELHSLIKRREQLLLFKNQEAARADKQIPRYIEESIKKHIQYLDEQLKDINLAIEKLCHSNIEIQDKINKLTSIPGVGKVLAIAAICELPELGNIEFRKLTSLEGLAPFARSSGQYNGKRKIFSGRANIRKVLYMAAVASLRCNDKLKKFYDKLINNHKPPKVALVAVMRKLLGFMDALYRHNSYWNNLHAA

SEQ ID NO: 479342 - protein, 456 aa, unidentified
MSRKRKNNKKIGAPVLHCLNPNAAGVDVGATEIYIAVPADRDPQPVRHFSTFTEDLHAAADWLKGCRIETVAMESTGVYWIPLFQILEARGFQVFLVNARHVKNVPGRKSDVSDCQWLQYLHSVGLLRGSFRPEQAVCTVRSILRHRDSLVQMASSHVQHMQKALDQMNLQLHHVISDITGLTGMTILDAILAGERNPHTLAALRNGRVKATADTIAKSLVGDYRREHLFTLGQSLEAFRHYQELIGACDREIAQLLETFESKVDPPEGSLLESQNGQKPSGGEPRFDLKNHLYRIFGVDLTLIPGINVLTTQTLLAEIGPDLSCFACAPAFTSWLGLCPDNRVSGGKVLSVKTRKVKNRAATALRMAAQSLHRSQSYLGHFYRRMRAKLGAPKAITATAHKLARIIYHMVTTRHAYDETICVQNEVQNRQRLEARLRKQARDLGLEIIPLKTGAA

SEQ ID NO: 479343 - protein, 333 aa, unidentified
MKDLSTLQHFIGCDVSKDTLDFAIHARGKDYRTFEHIKVENSLDGFRAMRKWLRSFRIQMKDAVIAMEHTGSYSMALAEWCFKKGITFVFLHPLDVKNYGARGRNKTDKTDSQFIADYAYTMREKLAPSAPEAPAIKRLRQLRNERQMAVRSRTAYINLSKTFSDAATTKRIGKMIAVFDAQVRLIEEEIKKVIASDEALSRNYRLLVSIPGIGMVNAITTIIATGNFTRFQTARQYAKFCCVSPLSRQSGTSVNQGDHVSKAGHNDIKATLTEGARSAITHDRQIKAYYERKRAEGKSHGCVLNAVKFKLICRMFAVITRQTPYVNTDKYLS

SEQ ID NO: 479344 - protein, 370 aa, unidentified
MIIIGCDFHPSFQQIAMLDTETGAIEDHKLVHASGEAERFYRGLASAALVGIEAVGNDQWFVQLLQKLGHEVWVGDAAQIRASEVRQQKHDRRDAALILKLLMEGRFPRIWTPSGQEKDLRQLLIHRYKLVRIRAQVKTELQHLAMNQGVTKKRKLWSKAGEKVLRELPLKPWASRRRADLLKVKEMLNGQITELDQAVVEAAEKNEKAKLLMTQPGVGPITSMAFVLTMGDVNRFQRGKQVASYLGLIPREYSSGGHQRFGSISKQGNRFLRMLLVEAAQGAVRCDPGFRNEYLHRCHKKAKGVAKVAAGEEIGDSTLLDAAHQHWVSRGRSCREQLAGAGGQRKPAWAGKLDRRVDWALSSRRKPGFG

SEQ ID NO: 479345 - protein, 453 aa, unidentified
MSRVAKLPNEFEQINTNAAGIDIGAQKHFVAVPPGRDPQGRDVRHFDTFTTDLYALADWLQHCGIETIAMESTGIYWVPIFEILEQKGFHVRLVNPRSIKHAPGRKSDVVDCQWIQQLHAYGLLTGAFRPEEDISVLRAYHRQRTMLVNHAATHIQHMQKALEQMNLKLTNVISDITGSTGMKIIRSILAGERDPQKLAQHRHARCKKSLQEIQKSLHGNWRDEHLFALRQAVELYDFYQGQIQACDKKIQAQLCRFENRSGTGKLPPPSDKRNRSTKKLSFEAREHLYRMAGVDLTQVVGLDTPSVLTLLSEVGLDMSRWPTAKHFASWLGLCPGSKISGGKSLSSKSKPSANRAAHAFRMAAYSLHRSQSAIGAFLRRKKAQLGAPKAITATAHKIARIFYTMIKTRTEYKDLGVDYYQNRYKERMLGNLKRKAKAFGFTLVDQNQLVIEN

SEQ ID NO: 479346 - protein, 346 aa, unidentified
MEHYAGIDVSLGLSSVCVVDAQGKIVKEAKVASEPEAVVAFFEALGFAVKRIGLEAGPLSHWLHAGLKEAGFETVLLETRHVKAALSAMTVKTDRKDARGLAQLLRMGWFQPVHAKSMASQEVRALLVGRKQLLGRLIDVELSIRGILRGFGLKVGAVTRKGFEARIRELVTGQATLERIAEAMLSARAALKAEYEKLHKAVLAIVREDPVCRRLMTVPSVGPLVAITYKSAMDDPSRIAKSKAAGALFGLTPKKYQSGEKDVTGGITRTGDEMVRTALYEAANVLLSRITRFSKLKRWGMDVAKRRGSKRAKVALARKIAVILHRIWIDGTTYRWAEAKPIAAQA

SEQ ID NO: 479347 - protein, 409 aa, unidentified
MNIRVEKACGIDVHKSFLVATILTCDAAKETKEFNTGLEDLINLRDWLMERHCQRVAIESTGIYWIPVYTCLEGKVETIVANARQIKNMPGRKTDYLDSEWLAEICLNGQIKPSFIPSKEIRELRDLTRTRTKTTQTMTAFKNRVHKVLEKANIRISGVLSELFGIAGIQILNALLDKKNIDEVLKKVKRIGKKKAAIKEAVRGELSQTDIWLIRECLETIDFLKRKINLLDSMINQRIENTKKQDQMQILMSIPGISFTSASAILAEIGDISVFPNPKSLVGWSGLAPSLNESAGKSSNGHITKKGSKYLRRMLVQCAHVIAGHRPNKLRFFFQRILMKKGKKIAIVALARKLLSIIHHLLKNSEKYVEDSLKPKQIKQRKFQSISEFSLDEMIEIISRAGYTVDKSS

SEQ ID NO: 479348 - protein, 340 aa, unidentified
MTIKTIGLDLAKSVFQAHGVDESGATALVKKLHRKQMLPFFSKLPPCLIGVEACGTAHHWARTLSAMGHEVRLIPPSYVKAFVKRGKSDALDAEAICEAVQRRTMQFVPVKTVDQQGILMTHRARSLLVRQRTQAANALRSHLAELGLVANPGIAHLARLAEQALAGKDMLPSFARASLEIMLRQIVVLGQEIAELDRQIATWHAESEASRRLAAIPGLGVITATAVAATVTDPDQFRSGRQFAAWLGLTPQQQSTGGKTRLGGISKQGDRYLRRLLVVGATAVIRHTKDKPTPMAAWIRKLLEKKPFRLVSIALANKLARIAWVLLTRKEIYRPQQLAA

SEQ ID NO: 479349 - protein, 400 aa, unidentified
MFYCGIDIAKRNHEASIIDADGKPLLESITVTNTQDGCEKLFSLFERLSISRSDVIIGVEATGHYWLSVYECLTEQGYNVRVINPIQSDAFRKMYIRQTKNDSKDSFIIAQVMRFGQYSETTLSDENIVAMRQLTRFRMALVDNCGDCKRRIIALLDQVFPEYASLFSDTFGVTSKELLLQCPTPEDMLAVSTRKLTNLLNKDSHGRFGEEKARELRDAAAGSFGVGFAKNAFAFQIRQLIEQLMFLENQIEELDEQISHLLKQTNQVITTIPGIADTLGAIIISEIGDINRFDAPGKLVAFAGLDVKVTQSDEFTGTKQKISKRGSPYLRRAIWLAAQRAAFCDSILSEYYQSLKARGKHHLTAIGAVSRKMCNIIFMILRENRPYEVTPLKKTREESI

SEQ ID NO: 479350 - protein, 339 aa, unidentified
MKVSTLGIDLAKSVFVLHGVDHTGKNVLRKKLSRSQFIPFLAQLPPCLIGMEACSASHHFARLLEKAGHDVKLIPPQYVKPYVKTNKTDAADAEAICEAVTRPNMRFVQIKTVEQQGVLALHTERSFLMRQRTACSNSLRAMLAEFGCVMPTGFKALYQGVPEILEDGDNGLPHFVRQCVWRQLELLQELDARILQTERELNGWSKTQPACEQLQKVPGVGLMTATYIVASIGNGTQFHTSKQFASWVGLTPREHSSGGKQRLGHISKRGDGYFRSLLVHGARAVVNVVGRHERSMPWLSALVKRKHHNVAVVAQAAKTARIMWSMLVHGTEYRALPET

SEQ ID NO: 479351 - protein, 380 aa, unidentified
MEKDIRYVGLDVDSERVAVAVADSAVTEVRSLGMIPNAAESVRRLVKKLEPVHRLRFCYEAGPHGYGLYWQLTRLGAHCDVVAPTLIPVKSGDRVKTNRRDAEKLARLYRSGELTAVWVPDAAHEALRDLVRAREAAKKDQLRAKHRLGKFLLRRGLKAAVGLKSWTLKHLAWIKTLHFEHPAQEATFLDYLHEVEHATARIARLEGALDQAIETAPSTMRALIDGLQALRGVSRLSAATIVAEVGPLSRFARPKQLMGYSGMVSSENSTGNSVRRGAITKTGNAHLRRVIGEAAWAYQRRPSMYRALEKRQEGLSEEVKQIAWKAQHRLSGKYRRLLAKGKLHQKAVIAVGRELLGFVWAIGMQVEKEQRARTARGRAA

SEQ ID NO: 479352 - protein, 346 aa, unidentified
MLYAGLDLSRKRLDFHLLDGDGATVEVGASPPDADGLRRLSERVAHRGAPIRAAIESMNGARFVHDRLELHGWQVEIADAQKVKGLAPLACKTDRIDAWVLAELARRDLVPAIWLPDPQVRAERERARWRLHLVRHRSSLKQRVHAVLLTHGKPCPVADLFGVRGRQLLARLGLPEPWQGTIEASLRLIDELEREISECERELRRLGVDHRYVPLLCTVPGISWVLAYTIAAEIGDIERFASPRKLAGYSGLCPRVYQSGERDLRGPLSKQGPRYLRWALVEAATHACTAPVYRDRYQQTKARIGKQRGAKVAQIDLARRLSEAIWHMLRRGEAFAPKGATDPLAA

SEQ ID NO: 479353 - protein, 350 aa, unidentified
MASRTGAVRTRKSSSLGDVGIDLHRRRSVIVRMTEDGEVLECVRIDNDPVALSLELAKAGPDPEVALEATYGWYWAADLLAADGAGVHLVHPLGLHWDARRVKNDERDATELAHRLRRGDLPESWIAPPELRELRELIRYRAKLAALRTSAKAQIHAVMAKLGILPTLTDMFGPVGQVLLDEMPFEGAYAIRVGSLRGLLERYEQELAMAERELHGRLVDHKGYWAIQALNGVGRVTAAIFVAEIGDVTRFSDARHLCSWAGLTPTHRESDTKVHRGHITKQGSTLVRWAAIEAVARYHGGAPIAPAFRRIQQRRGTMIARVAAARKLLSLVFYGLRDGEIRCLADKEAG

SEQ ID NO: 479354 - protein, 330 aa, unidentified
MNSNCLSTDHVAAALPVLGLDVAKATVQAELRTNGNKVRFGFANNARGFAQLARILKEHNLTKVWAGLEATGPYSHALALWLHSQGHRVSLLNPRRVRHYACSAGNRNKTDLLDAAIIADFVYALKPAAWKPPTLEVAQLQALVRRREELSLMLQAEKNRLEGIAPNVRSSLERIIVTLSAEKARLEKLITQQIRSHQQLSRDHQLLCTIKGIGSLTAAILLAEMPRPGQVERARQAAAHAGLVPRRELSGTSVRCNRGLGKEGNRYLRKALYMPALVAIKYNAPLRHFASRLRAAGKPKMSIVCAIMRKLIHIAFGVLKHQKPFNPSLP

SEQ ID NO: 479355 - protein, 326 aa, unidentified
MEHELHYIGIDTAKEKLDVDVLRPDGRHRTKKFANTTKGHDELVSWLKGHKIDHAHICIEATGTYMEPVAECLYDTGYIVSVINPALGKAFAQSEGLRNKTDTVDARMLAEFCRQKRPAAWEAPHPLERALRALVVRHQALTDMHTQELNRTETAREVQRPSIDAHLLWLEAELKRLEKQIKDLTDDDPDMKHRRKLLESIPGIGEKTSAVLLAYIGLKDRFAHARQFAAFAGLTPRRYESGSSVRGASRLSKAGHVSLRRALYMPAMVATSKTEWGRAFRDRLAANGKKGKVILGAMMRKLAQVAYGVLRSGVPFDASRHNPVAA

SEQ ID NO: 479356 - protein, 318 aa, unidentified
MNTKINQSINVGVDTGKTQLDIHIRPLDLFFSVENNDKGIKKALKTIKSHSPERIVIEATGRLEMPFVLACAEAQLPIVRANPVHIKRFAGAIGRRAKNDRLDAELIAHYGEAIKPALTVIKPKNIRLMSDLVIRRNQLLSMQTMEKNRIQILPASLHPTIKPMLTTIKNQITKLEEKLVKLIEDSPEYQAKNKILQSVPGIGNIAAASIISNVPELGYITNKQAASLIGVAPITRESGRYKGKRVIQGGRAQVRTVLYMAMMSAMQCNPVFKATYARLVAAGKPKKVAIIACVRKMVVTLNSMLRDGAMWDENTAKN

SEQ ID NO: 479357 - protein, 349 aa, unidentified
MTTACSVTLGVDTHKDLHVAVTLDQLGRRLEVATFGTDDAHHASLWAWASDFGPIGQAGVEGTGSFGYRLAQFLTSSGVQVFEVNRPNRVTRRRRGKSDPIDAEAAARAVLAGDATATPKRRTGPAGQLRALLVARRSAIKARTQTEQQLRSLILELHDQQRQQVDRRRIVDLTSACATLTGADGTSLALQALTRRWQHLDQEVGDNDQHVTAIIRRVVPSLLARPGIGPVCAAQLLVTAGDNPDRLHSQAAFAALCGASPVEHSSGKTQRHRLNRGGDRAANSALWTIANNRLMHDPQTRAYAARRTATGASRKEILRLLKRYIARQVFPEIRHALSPANPVPNNSLT

SEQ ID NO: 479358 - protein, 347 aa, unidentified
MKDMIIGGDLAKRVFQLHGATTTGHVACRKKLTREQFRRFMAGQPPCLIVFEACGSASYWAREMAKLGHDAKLIAPQYVRPFVKRQKNDPADAEAIVIAARQPEMRFVSPKTEDQQARAVLFRGRERLVHQRTELVNALRAVLYEYGHAFPAGIGHLKRIEALIEDRTCDLPALITAECREQQAQIAEKTDRIDAKTEALKELAAGTDTARRLQTMPGVGPLTSLAVEAFAPDVSQFKRGRDFAAWLGLVPRQHSSGGKERLGRISNAGQTDIRRLLIIGAMTRIMGKRRAVNVVRIFPNRKAVIQLAGALMLEQNDEWAVSRRYMPVEKLTALCNDTDAAPMIAAQ

SEQ ID NO: 479359 - protein, 324 aa, unidentified
MAKRITICAGIDTGKRKLDVAIDGSSLQLQVENTAEGHEVLLVWLRRHKVKRIGIEASGGYELPVVTKLRRKRFVVVVFQPAQVRAYAKFHLQLAKNDKIDAALIAACTAAVKKIHDAPDPRLQPFAEHLTLIDQIGEDIQLHKNRLETCRDPRIQKLWEEEISRLAKRQRVELKALAAAIRQHPDLAQRLNLIYSVSGAGMSTAVAILVRMPEIGTLNREQVAALAGLAPYDDDSGERSGARHIDGGRKRLRRALYTAALPASFFWNPHLIALYKRLKAAGKGHKSALIACARKLLIFVNTVVARGTPWQEQQPARATNPAAA

SEQ ID NO: 479360 - protein, 417 aa, unidentified
MHQRVFVTMSQARLEIFRWLTYYNARRRHSALSYLSPMEFEQHHHMADQRPDVFGGVDTHADTHHAAAVDPIGRHLGDPQCPTTSNGYRALLAWLHSFGTVLAVGVEGTGSYGTQLARVLAASGLQVFDINRPDRRMRRQLGKSDPIDAYAAAEAVASGRAGIIPKTHTGAAEGLRVLHNARTSAMKARTQAINQIRSLLVTAPDTLRGQLRGLAAADLISVCARLRPTPDLADPTAAAKFTLRRLARRYQDLGREISEYDAELTALAARAAPMLLTVNGVGPETVARLLAAVGDNPERLRSEAAFAHLCGAAPLPASSGRRDRHRLNRGGNRSANAALYRIAVVRMQHDRRTREYVARRTAQGLQKKDIIRCLKRYIAREVFRALTCTNITKADLTQAARQEIGASPMIRRLGRSP

SEQ ID NO: 479361 - protein, 391 aa, unidentified
MVCVGIDVAKDKHDCCILDSDGTIRADCITIPNNMDGFKQLLQTIRDCTKKSDKIKVGLEATGHYSYNILGFLLDNDLAVYVMNPLHTNLYRKSLSLRKTKTDRVDARTIATMLLSDVDLKSYTDTAYHNEELKSLTRYRFDKVRERAKLKQSVSRLVTILFPELEKLVPSLHIASVYALLSEYPGAKQISEIHLTKLTNLLATASKGRYGKDKAIQIRDAARTSIGSVMPAKFLELKHTIKLIRELTSEIDEIEVSIQKIMDELNPPILSIPGVGIQSAAMILAEIGDFSNFESPDKILAYAGCSPSTYQSGKLTNCYAHMEKRGSRYLRYALYNATKYVCHWNPVFAKYLAKKRAEGKHYNVALSHATKKLVRLIYALQKSGKAYLTAA

SEQ ID NO: 479362 - protein, 343 aa, unidentified
MEQYIGLDVSMKETAISIRQDGKRMWRGKCASDPQLLAALIRKRAPDVRRVVFETGPLSVWFYHALMAEGLPVICIDARHAKAALDMAANKTDANDADGLAHLAEVGFYREVRVKGFDSMLIRTLITARRQLLKMRLQISNQIRGLMKTFGLVVPKGAGSVFERNVHDLLQGEAKLARIVVPMLRAWSDIRYQIAELSKQLAAMAREDQHCRLLMSVPGVGTVTATAFAAAVEDPANFRNSRAVGAWVGLTPRRYQSGEVDNDGHISRRGDNQLRGLLYEAAAVILNRSTDTSTLRTWALELKKRLGFKRAAVALARKLAVIMHAMLRTGELFDPHGGTPAAA

SEQ ID NO: 479363 - protein, 286 aa, unidentified
MNKYKENFGVDISKDVFDVHGSRKGHNQYKNDEIGFKKFLKELPKGSLVVMEATGYYHYRLAQFLYKNGVIVSVVNPLSIKRFIQMKLAKVKTDKSDAKAICEYGLVNEVPLYNALTATQSECLQLFRLLDTYLKQRTAIKNKIHGEVVLGIPSKFVYRSLIRNKKQLNKEVAAIESKILSLVKVDQQEQLTLLTSIPGIGQKTALFLIVDTDGFSKFENAAQLCSYVGITPTIRESGSSVRGRARISKVGNRKLRNLLFLCSFNACKHNKACKEVYERIVNKGAA

SEQ ID NO: 479364 - protein, 329 aa, unidentified
MSESHNAKNITKEKKLMGEKQWVGIDVCQKSLDVYLRPSQKLFQVTNNEIGIKKLVQTLKNIQPELIVLEATGGMEIDAAIQLAQAELAVAVINPRQARDFAKATGQLAKTDVIDARILAHFADAIRPEVRPISDESSRQLEDLVARRRQISDMITAEKNRRRGKSNSVQVDINEHIEWLEKRLKEIESQIQSAIAVNPDWQQKMDLLTSVPGIGEVVAVTLISSLPELGTISHKSISYLVGVAPLNRDSGKFRGKRKIWGGRTKVRCLLYMAALVAVRFNPVIKVFYERLISKGKLKKVALTACMHKLLIILNAMMKQNSSWKPQAES

SEQ ID NO: 479365 - protein, 339 aa, unidentified
MEIKRIGLDLAKNVFEVHGVDEIERVVLRKTLGRGKVLEFFAQLPACVVGMEACGGAHHWARKLIELGHDARLMAPQFVAPYRKGHKSDRNDAEAICEAAGRGSMRFVPVKDEEQQAVQMLHRMRALQIAERTALANQTRGLLAEFGIVVAQGLGRLRARLPEILEETENGLPALARELFADLRERLVALDAKIGGYDRRIEQLARASEVAQRLMRLEGIGAVTATAVIAAAGDARRFANGRQFAAWMGLVPREYSSGGKIRRGRIGKRGDAYLRTLLIHGARVVYRHLGEREDKKSRWLRQLAARRGVNKAVVALAAKHARILWALLSRGSDYQPMAA

SEQ ID NO: 479366 - protein, 340 aa, unidentified
MKQLYAGIDLHSNNNYLAIIDEQDKRIYKHRWPNKPDIILAELEPFKESIVGIVVESTFNWYWLVDILMDEGYKLHLANPAAIQKYKGLKYSDDSHDALWLAHLLRLGILPEGYIYPKADRPIRDFLRKRGHLVKLRTSLINSLQGIIYRNYGYKLNANKIKQSNENHVSSILSGNYHLELSGEVSKDTIDYLTRQIRKIESVILKEIKLRDSFKKLQTVPGIGKIIALTIMLETGSIKRFHEVGNFSSYCRKVPSKWTSNDKKKGKGNSKNGNKYLAWAFSEAAEFARRYDKSIRAFYDRKAAKTNRMVAHSALAHKLTRAAYYIMRDNVEFECQKLFA

SEQ ID NO: 479367 - protein, 345 aa, unidentified
MKITTVGIDLAKNVFQVHGIAERGKAVLRKQLRRSQVAVFFGNLPPCLIGMEACASAHYWARTLQCFGHTVRLMAPQFVKPYVKTNKNDVADAEAICEAVSRPNMRFVPIKSIEQQGVLSVHRVRQGFVKARTAQANQIRGLLGEFGLVIPQGIYNVAKRVPEILEDASNELPVPFRHLIDRLTQHLKELDRQVKEFEQEIIAWHRGSELSRKLEKIPGIGPLAASALVASIADARSFKNGRQVSAWLGLVPRQNSSGGKPTLLGMSKRGDAYLRTLLIHGARSAILAAKNKVDNTQGWLTNLLKRRHPNIAAVALANKNVRTVWAILAHGREFKADYVPTRMTA

SEQ ID NO: 479368 - protein, 347 aa, unidentified
MAAVMIGIDPHKGSHTAVAIGAGEERLGELRVRASAVQVQRLLAWAAPWPERTWAVEGAGGLGHLLAQQLLSAGERVLDVAPKLGARVRLLAAGAVNKNDPNDARSVAVAALRSASRREVAADDHAAVLKVWSKRHRDLGRARTQVACRLHAVLCELIPGGVSKRISAAQAGQLLEGIRPSGAVERARCELAAEFLADLRRIDAQMRDTKNKLTVAVRASGTTLTEVFGVGPIVAATVIGEARGVSRFASRDHFAAYNGTAPIEVSSGRRKIYRLSRRGNRRLNHAIHMAAVTQISHRHSPGRAYYQRKLAEGQTPKEALRSLKRRLSDVIFARLQADARRAVAGPR

SEQ ID NO: 479369 - protein, 418 aa, unidentified
MAMKIVRFNCCGMDVHKNLVVATIGITDRKTNITEYFQRSFSTLNSDLYRLKDWLRSHHCSDVCMESTGKYWIPIFNILEDEINVRLTHPKYVKAIKGKKTDKKDSKWICDLFKHDLIKFSFIPPKEIRELREIARYRYKLVCMRSSERNRYQNCMTVSNIGLASVISDPFGKTASNIMKEVMKSNVIDDDKILKLVHRNCKNKDKILDSLHGYRIESDQRFKMEKSLDHMEYLDQLIDSCEVELIKRAYPLRRSFQHITQIKGISALSAILIISEIGIDMSQFESDKQLVSWAGLSPANNESAGKKKSVRISKAGQYLKPLLVQCALSAIKDKASYFGRKYSNIKKRRGHKKAIIAIARMMLVSIYHMILTGEEFQPCDYESFMDPKPNANPSLTVEKALNFLKQSGIDISSIPINL

SEQ ID NO: 479370 - protein, 387 aa, unidentified
MPQPNDLSRSLVALDQDSTLIAVIEMGQASWLVAGIVPGVNRHPLKKIATDQEQLLQVLRRWAKEAETTGRMIKRIAVAYEAGRDGFWLARWLRARGVEAYVIHPSSVPVSREHRRAKTDRLDTELLKRAFLGWLRGEPDHCNMAAIPTLTEEDAKRPGRERESLVGERTRIINRIKGALARLGIREFKPMSRSAPQLLEALRTPEGAALPPNTLAELRRDVARLSFVKQQINEVERARLERLQRAPGERGNAMVHLLTRVVGVGVETADMLVQEIFSRNLRDRKAVARYAGLTGAPDESGKKRRERGLAKSGNARVRRGMLQLAWGFLVHQPDSVLAKWYRARTADARGVTRKTMIVALARKLLIALWRLAATGEVPEGLALRAAA

SEQ ID NO: 479371 - protein, 409 aa, unidentified
MEEHQIVFEQVVHRGCGVDVHKDNVVATIRGDGIKEETRTFSTFTKDLKALSEWIKPLGVTHIAMESTGVYWKPVYNILDPDFEIVLVNARHIKHVPGHKTDRKDSAWIAKLLLSGLLKGSFIPPQNFRELRELYRYKRKLIGQRTAECNRLQKVLEDANIKICSVLSDVFGVSGTAMVKAIVDGETKPGILVELAKGTLRRKKKELALALEGNITSHHRFMLRISLKAIDNIDALIVEVDEQIDVLLAAYEEQFQLLQTIPGVGEETATAIIAEISTDMSAFPNQHHLASWAGLCPGNNESAGKKKSERISPGNTSLKTALVEAAWVASHQQNTYFKKRYRALAARRGTKKALVAIAHKILTAAYFILQTKAPYQEPDNEAWAEKRKQAQIKTYLKRLHELGVDAPSQ

SEQ ID NO: 479372 - protein, 347 aa, unidentified
MVYNQPHRFYCGVDLHARSMFTHILDHKGKTVFEQDLPADPAAFLTAIKPYRKDLVVGCECMFAWYWLADLCEQEKIPFVLGHALAMKHIHQGKAKSDKIDAAKLAAMLRGGLFPMAYVYPKAKRQTRDLLRRRGFFVRQRSQLIAHIVNTNSQFNRPPLTKKLTYAANRSEEIAKRFTDPSTRLMIESDLALIDNYDTQIRTLELHLTRTAKVDDPVTFGFLRTVPGIGPILGLTLLYEIDRIARFPEVGNFLSYSRLVRCAHSSAGKVKGSGSKKVGNAHLKWAFSEAACLMLRTCPAIKSWVQRQQAKRGKRKALSVLEAKIGRAVYHLWRKQQAFDLKRFRKG

SEQ ID NO: 479373 - protein, 400 aa, unidentified
MLSIGIDVSKGKSTVCGMKPGGEIVYTPFEVQHTREGMSELVSLLRGSGEEVRVVLESTGSYHCPVVAALLENGIFVSVVNSLRMKRFCSQSIRRVKTDQIDAMQIALYGLAYWQELQPTRLPENTYRELQLLARQYYQMTSILIKAKVDFNALCDQVLPGMQELMNDHAGRHKLSDFVLRYRHTTHILEMGETRFRKDYCKWAEKKGYRNRERMAALIFATAQNGIPVLPNAPSTQIVITEAIRVLHTVEASRDAILTQMQALAKTLPEYSLVREMPCIGDTLAPRLIAEIGDVRRFHSKRALIAYAGIDAPPYQSGKFSANNRHISKRGNRYLRKTGYEVMQSYVMHKPANDPIFTFIEKKRSEGKCGKLAMVAGLNKFLRVYYGKVTELYRSLSAIE

SEQ ID NO: 479374 - protein, 324 aa, unidentified
MLPTLGIDISKDSFHLELSVNDKLRHRKFANRKEGFFEVCAWLTKHKAFPVHACLEATGPYSEDLALYLHQQGHTVSVVNPAQIKAFGQSELLRNKDDRPDAGVIRRFCEKQRPAAWKPPPPHLRELQALTRHLENLIETRQQQLNRLEGAKTKDVIKSLRKLVSYVDAEIARTEKQIQDHIDNHPDLKHQCQLLESIPGIGKRTAAKLLAEIEDIAGYQSARQVAAYAGLTPRNYRSGTIRGKTRLSKTGNARVRKALFLSAMTAKRYNPIVRSFCQRLASHGKNKMQVLGAAMRKLIHIAFGVLKSGKRFDPNHELLLNSGA

SEQ ID NO: 479375 - protein, 349 aa, unidentified
MSMVCGLDLHRQQITFDALDVESGEVWRGRLWQPDRERFRRWLRQDVAAKAQGAPVALAVEGCTGWRYVVEEITAAGYEAHLAEPADTQAARGRKRHAKTDRSDSRLLRELLHAGDLPESWIPPEQVLEWRERVRLYKSLVDQRTQWTKRIHAELYQHGVAVPEGNIRADKTRAWLASDAVQLSAAGRQRINVGYRMIDATDAEALPLRAALQRFGARQPACKALVAAHYGIGGLIAVVVWSELGDCRRFSRSMQVVRHTGLDVTVDSSDRRRANGYLTRQGPETLRWALYEAAKNSSHHRSPDHAYYAAVKERHDGKLAAISVARQLARRCYHTLRAVPPEKVYAIPA

SEQ ID NO: 479376 - protein, 413 aa, unidentified
MEILHERVCGLDIHKASIQACVRRVGPGGSVVSEVRTFGTMTRELLALADWLTAEGVTHVAMESTGVYWQPVYNLFEDRFDEVMVVNAQHVKNVPGRKTDVKDCQWLAHLLACGLLRGSLIPDRPRRERRELTRQRTQLVNQRAAVVNRIHKTLEDANIKLGCVASDVVGVSGRAMLRALLEGNSSPRQMAQLARKAMRKNIPALERALEGHVTDHHRFLLAELLDQADDLERRIDRFSARIEELCRPFEAQIKAIDAIPGFDVRGAQNVIAEIGTDMSRFPTAGHLASWAGMCPGNHKTGGKSRSGKTTKGSRWFRTTLAQAAQGARHTKTSYFRAQYGRLSRKRGAKKAVIAVGHSLLTTIWHVLKTGRPYEDLGVDYFDQLDEARIVASHVRRLQHLGYTVTATKTDQAA

SEQ ID NO: 479377 - protein, 410 aa, unidentified
MRYYLGVDWADKTHAVWVVDEQGAKVASRAVPHTAAGLSEWGRELDEWRAQGIELWAAIERPEGRVVDFLLDQGVVVYPVNPKALDRARDRFRPSAAKSDPFDARVLAEFLRTDHRHLQALQPSSEAAQELKYLTADYRRHVRQQTRLINQLTATLKAYYPRALEVSELTTALARQFLQAYPTPVAVAALTAKRWQRWASAHRLSDARIQELWGLLERPQLPVPDHVVRAKARLMLTLVAELTAVVAAVGQYREAIDAFFAGLPEAQWIRTLPIGDHGVTAPTLWALLGDAPRRWESWQHLQGHAGTVPVTIRSGQQRVVRFRFACDKALRYVVDQVAFLSLGKSEWARAYYDQQRARGHDHHPALRALGAKWLKIIFVMWDRQIPYDEEHHLATMTRQQLRQRSQKKVA

SEQ ID NO: 479378 - protein, 312 aa, unidentified
MTEISIGIDISKDHLDAHRLPDGAAGQFANSKAGLTRLIRWIGVADVARVVFEPTGRYHRDLERRLGEAGYPLAKVNPRQARRFAEALGVRAKTDRADAAMLARMGAALALQPQPVKSEILHELNDLQVARRALVKDRTAAQNRAKALRLPLLKRQNAARLKRIEADLAQIDGAITAMIMAEPELGARHEILISIAGISGVTAAAMITLMPELGALDQKQAASLAGLAPVTRQSGNWRGKAFIQGGRTALREALYMPALVACRFNPDLKAKYIQLIAAGKPPKVAIVAIMRKLLILANALIRDNRKWTPNAP

SEQ ID NO: 479379 - protein, 355 aa, unidentified
MNDAKYIGLDVHQATISVAVTDSQGKVMMESILETKASTLLEFLAGLRGSLFVTFEEGTWAAWLYDLLKPHVTEVLVCNPRKIPLHKQGNKSDKIDARKLAERLRLHDLKPVYHGENGIRMLRELARSYLTIVKDLSRVMNRLKALYRSWAIPCAGRDVYYRRHRSEWLEKIPEAGTRRRAEQLYQQLDLLQHLRQQARRELLAESRKHAITAKLRQIPSLGPIRCALAVALIQTPHRFRSKRQLWTYSGLGLETRDSGEYQFVQGQPRRRKKQATIRGLNKDYNHDLKGLFKGAATRASVKPGPFQEFYQRSLAKGIKPTMVRLTLARKIAAITLTLWKKGEDFDIHKLNSQAA

SEQ ID NO: 479380 - protein, 419 aa, unidentified
MSQFSTNQTKKQDGIETLHVGIDLALEKNVCVVTNGNGEKIDNFSFPQDRGGYDYFLKRVKMISQKQSESRLIVAMEPSNYFWKLMARELEENGITYHLVNAYTVKKHREGNQLDRSKDDRRDAVQIAELSRNGHYTETRLQKGRYEEIKQYAVAYHQISRSIRRERHILWGLVGQVFPEYFQIFKNLNGETSRAILISNACAAKIRNITEDDFLSEVKLQYLGKRLSVSKVHQIYQSAENSIGILEGLQAIQLSIQVHFSNIQRFQLQLNQITDEMTNCLASLPEAEYLLSVKSLGVISIALFLAEIGDPKRYKCASQWVKLAGIQPTPNSSGKKQHGHTPISRQGRPHLRTMLYFSCLRMIQYDSHFALLYSKLQRRSKNPLTKMQALGVLMNKLLHILWALIHQQTTYNPAFAQSM

SEQ ID NO: 479381 - protein, 393 aa, unidentified
MICVGIDVAKDKHDCVILNSEGKILAGVFTIPNNADGFDTLLQKIRSCTSSDDKIKVGLEATGHYSYNILGFLINQGLPTYVINPLHTNLYRKSMSLRKTKTDRVDAKTIATMLMSNVDLKSYTDTAYHNEELKSLTRYRFDKVRERAQLKQSVSRLVTILFPELEKLVPTLHMSSIYALLIEFPGAKQITEAHLTHLKSLLKDASKGRYGRDMATEIRDAAKHSIGSVMPAKSLELRHTIRLIRELDSEIKDIEAAIEAIMEELQSPITTIPGMGFRMGAMILAEIGDFARFDSPDKILAYAGMSPSTYQSGQLSLAGTYSHMEKRGSRYLRYALYNATKYVCHWDPGFAAYLAKKRAEGKHYNVALSHAAKKLVRLIYAMEKSRQPYKRAA

SEQ ID NO: 479382 - protein, 345 aa, unidentified
MKIVGCDLHTRYQQIAMLDTETGELSERRLEHENGEAQAFYAGLEGRVLVGIEATGHTRWFERMLAELGHELWVGDAAAIRAAMVRKQKTDARDAAHLLELLRSGRFPRLWRPTAGERDLRQLVWHRQKLVWMRTAVGNQLHALAMGEGVCRKKKLFTKHGRVELEGLNLDPWASRRRQELLRMLDQMDASVHEFDRAVAEQAEQNPAAVLLMTHPGVGPVTSLAFVLTLGPVERFTRSKQVVSYLGLNPREHSSGGRQRLGSISKQGNPMMRSLLVEAGHTAARLDAELRQDYQRLKQRRGSGVAKVAIARKLAVRMYWMLRRQASYAQLVRTRGSSGATLVQS

SEQ ID NO: 479383 - protein, 454 aa, unidentified
MKSTNLNSPTFELLRPNAAGIDIASQMHYVAVPCDRDAQSVRKFGGFTEDLHEMARWLQSCNIDTVAMESTGVYWIQPFLVLEEYGFDVFLVNARHIKNVSGRKSDVKDCQWIQQLHSYGLLNKSFQPDDLIRELRTYVRQRKNLTQGYSTQVQLMQKAFDQMNIKLHNVISDITGKSGMLMIDAILNGERDANILAQLADSRIKAPREDIVKSLQGIWRQDNLFELKQAYEIYLVFRDKIADCDKQIEAVLAQIAKNTSRTEQRPKDNQKGNSKRKANGKNKFTFNATSYLNDISGVNLTDIFGISELTVTEIVSEIGTDMSKWATEKNFTSWLNLAPNTRTSGGKRLKSKPMKKKNKAGQAFLLAASTLKSSNNWLGEFYRRIKAKSGSPTAIKATARKLAIIFFKMMKDKVDFNPLSLEEYNQYFKERKIKYINKQATNYGFKLVPADVVS

SEQ ID NO: 479384 - protein, 387 aa, unidentified
MAQVNDLSRSLTAFDPISTLVVVVEMSKASWLVSGAVPGVERQPLKKLEPDATALLRLIERWRNEAMRAGRPISRIALAYEAGRDGFWLARWLIARGIEAHVIHSASVAVSRERKRAKTDRLDAAMLMRVFLGWLRGERGHCGMVVIPTMEEEAARRPSRERESLVNERSRITNRMKSALSRLGIRGFKPHLRKAPERLAGLRTAEGTGLPANVIEEFRRDMARLALVREQISSIEKTRAERLERAPDTGPHAMVRLLARVIGIGIETADMLVREILSRKLRDRRAVARYAGLTGSPDESGLKRREKGLAKAGNARVRRGLIQLAWRFLMFQKDSALARWYRTRTEGPSGARKTTMIVALARKLLIALWRLVTTGEVPDGVELRPAL

SEQ ID NO: 479385 - protein, 338 aa, unidentified
MDTSKRFFQLHGVNAAEEVVLRKKLRRKEMVEFFQALAPTVIGIEACGSSHHWARLLRSFGHEVKLIAPQLVKPYVKRGKNDGADAEALCEAMSRPTMRFVPIKTAEQQAALMLIGLRERLIGNCTQLSNAIRGYAAEFGFTAAKGMAHLDPLLERIQADESLPLAARELFAVQSKEYAQLRGQINEVEAKLKAWHKSDECSQRLIKIPGVGPIGAVLLKMKTPAPEQFRTGRQFAAWIGLTPQDHSTAGKVRHGGITRAGDEALRAVLVAGATAVIQQAVRYGGRASPWLDALLKRKPPKLAAVALANKMARVAWKLMVTGDSYSTKSAPAALASRV

SEQ ID NO: 479386 - protein, 345 aa, unidentified
MLTPFIQFKNNMKKTNFIGIDVSKGTLDICLVRDNIVLDQMQVTNNLQGIKQAFARLRKLGVKKLNSCCCMEHTGIYNLPLLNYLWSRSYSIWLERALQIKQSIGAVRGKSDKIDAVRIAQYAFKNQLDARYWEPEREQILRLKILLADRRRLINAKKQLKAPLKEGIGFIDKASLKSSEKLSKPVITALERSIAKAEKDINQIIQQDQRLKHLNALITSVQGIGPVTAAHMITTTNEFKDYNNPKKYSCYSGVAPFPHTSGSSIRGRHRVSHLANKTMKTLMHLSAMAAINAKGELQDFYLRKVAEGKNKMSVINAVRNKLILRIFSVVKRNEPYRKNYQYSLA

SEQ ID NO: 479387 - protein, 336 aa, unidentified
MVYVGVDLHRKTAHVVAVDQGGAAILSRRVATRPDELLRVFGELDHQPLEVAFEATFGWGWFADLLSDAGIPAHMAHPLATKAISSARVKNDSVDAKTLAHLLRTNLLPEAWIAPPEAREARRLARMRTSLVRVRSQLRCQIHAVLAEHGVHADVSDVFGKAGRALLEDLALPPVSKARLDANLRLIDALTEEVAQAERELRALFRGDDRIKRLTAIPGVGLITAATVVTEVWDITRFPSADRLCSWAGLTPSEHSSGEHTRRGHISKQGSRWLRWVLVEAAARPQADPNLRTFVDRIASRRGTKIARVALARRLLTLSFYALRDERGCRAFPVAR

SEQ ID NO: 479388 - protein, 395 aa, unidentified
MKVCGLDIHKDSVFMCIIDENNQLTQKEFTTLTPDLERLRELLVTSGVDKVAMESTGIYWIPIWRVLEKGNFDLKLVNPLFIKQLPGRKTDVKDAHWIATVLQKDLIKGSYIPEKGIQEMRQYERRYVHLCENITRIEQEIDRQLQRCNIRITNYTSKIGSQSVMKVVKAIIEGETRSTELKKFIHGRITNKHKEKIEASLSGVISEADRFILRQNFEDWEMANRQQKECLQHMEEMCDKLYKEELQLLITIPGIQKLSAMTLISEIGVDLKTFATAVSLVGWAGLRPRNDQSAGKVKSRKTTNGNKYLRRILVQCSWVITRMKSGFLKIKYDALCKRMSAKKALIAIARKLLVIIWNLLSRKEQYREFKIKPDEVKLKKRIVRLEKELAELKTA

SEQ ID NO: 479389 - protein, 337 aa, unidentified
MTLELLAIDLGKRSFHLYGIDTDGVILSRKVSRAKLPEVVGDLAPTAIAMEACASAHHWGRCWLAAGRQVRLINPRFVKPFVKGSKNDAVDAEAIFEAAMRPTMRFVPVKSTEQQDLQSLHRARDRLICQRTALINHTRGLLAEYGIVLPQGPWRFTAQAPTAIAAADLSDLARAIFGELLDELDDLDRRVKKLDATIVALCRTNEACRRLAKLPGVGPVVATAIIAAVNDGRQFRSGREMAAWIGLVPRQYTTGGKPRLGGIGRRANHYLRRQLIHGARAVVSRLPKLPKHDDRRSIWLNALAARRGFNRTIVALANKTARIAWALLTRKEEYAIS

SEQ ID NO: 479390 - protein, 374 aa, unidentified
METTRHIGIDLHRNKFTCCMQLANGRNYLSEWRLENLPVFVKKLRPTDEVAVEVTGNTRLFYDAVAPHVARVVAVDPNQFQVISHSVKKTDPNDARNLALYLSKGLLPEVRMKEKTQPQIASLTQTRDTLVKLRTALKNKVNNILSAHGINLAKEALSSEKQLTEVLTVKFDPMIRIELKVIVEQIRSLNQSIAELEKTITQEGQKLEGHKNLTSIKGIGPLTGSILLSVIGNIHDFADEGKLAAYFGIVPRVNNSNETERSGHITKRGSKLGRTALVQCALIAQRYSPYLKKFYEKTKARRGNRQGDHRTGAEVVGHRLPNAEGQLGVQGFSQFHSGRGIVKCIGLPPFSSRLSSRTVLAVKGSLRRAKPARP

SEQ ID NO: 479391 - protein, 342 aa, unidentified
MSGMIIGLDLAKSVFQVHAVDAEGKVVITRKVRRSQMLEFFTRLEPCLVGMEACPSAHHWARELSALGHEVRLMVASYVKPYVKRQKNDMVDAEAICEAVTRPTMRFVPIKSESQQAILMVHKTRALLVRQRTMLVNALRGHLTEMGVVAPKGIRRHADLVERVLAHGADEIDLPPLVRDIVFSSARQIGSLNAEIKELERKILEWHRTSDASQRLATIPGVGVITASAMAATVVDPAAFRSGRDLAAWLGLTPRSNSSGGKERLGRITKAGNRYLRTLLVIGATAVVGFSRRTTEGPLINWVRKLLQAKSARLTTVALANKMARICWAVMAHKTVFGEAAA

SEQ ID NO: 479392 - protein, 343 aa, unidentified
MYYIGLDVHKKTISYCVKDAAGCVHQEGKIGTTRHELDAWIRTLPQPRMIAMEATIFTGWIYDHLLPHAEQVKVAHPLMLRAITAAKRKNDRIDAGKIADCLRCDFLPECHMASTEIRNRRRILRYRGLVLRQAVQMKNRISGLLMETGVSYNKLRLHRMGYFAELLATNAEVSESIRPLLKLCREHIDRSIRLDTTLLRSLEQDPLLADRLRRLRTIPGVGPITALTWALEVGDTSRFRSIKQAISYCGLCSAEKSSADKVMRTPISKQRNKHIQQVLVEAARLAPRYSDELALLHEKERQRGNGNRATLAVARKMVALMLAVERRNTDYVPAAEFRRTAAA

SEQ ID NO: 479393 - protein, 426 aa, unidentified
MKSTTQNAKIAAINEKTLIIGIDVGSEIHYARAFSWRGYEFSRKPLEFTNTEEGFETFRIWIEALKEKHGMDKVIPGMEPTGHYWFNLGKFLQDNGMTPVHVNPHHVKKSKELDDNNPSKNDRKDPKVIAGLIKDGRYFRPYIPDGVYAEIRALTGLQVLARSEITRLKNRIARWFSIYFPNYKDVYGNVGAISGLMVLKAAPLPEDIVKLGVDGVNRIWRDAKLRGVGLKRAKTLVTAAEHSIGSREAQDAARVELKILLSDYEMQTVREAELMALIEEKITEVPYVDKLLEIRGVGIKTVIGFVAEVGDITRFDDPKQLQKLAGYAIVKNESGKHKGESHISYRGRKRLRYVLYEAAVSVVSHSPEFRSIHQYYTTREKNPLKKMQSMIAVACKLIRVFYLILHTGVTYDAAKLMGDIRRPVAA

SEQ ID NO: 479394 - protein, 278 aa, unidentified
MKDSRKRYIGLDVHKHYLIAIGVDNDLNVVLPARRVEFSYLEAWMQKTLTRQDAVVLEMTTNTWQLYDELCEHAGSVLVVHPPHVALITRSLVMNDKIAASILARLLAKGLLVGIWVPPQEVRELRGLVAQRKKLTELATQAKNRLHAVLQRHHLVPPEGNPFHASQQDWWLTLPLGSLEKVNLQSDLETLQFAETQRMRLTSMMEEIANQNDEVTRLLQLPGFGVVTAVTVWAAIGDVQRFADPQHLVGYAGLGTKVHDSGMTSRSGRITKAGRRDL

SEQ ID NO: 479395 - protein, 366 aa, unidentified
MKKISTVQVFGNEIFKEQKLTIGVDLGDRWSCYCVLDEAGKIILEQKVSTTTEAMKETFERIPRSLLALETGTHSPWVSRLLKELGHEVLVAHAQKVELISKSKRKDDRHDARTLARLARIDPELLGPVRHRSAKAQIHLTVIRARAELVRARTGLVNAARGLVKSYGERLPKCGTQQVSRGLAAELSAELREVLEPLLNEIESLNERIKEYDARMEKIARESYPHVELLKQVKGVGTQIALTYVLTLDDPHRFRRSRDAGCFLGLCPGRRDSGQSQPQMHISKEGDRYLRTMLVQGAHYILGPFGEDSDLRRWGLRLAERGGKNAKKRAVVAVARKLAVLLHRLWVSAEVYEPLRNSHKAMRAVA

SEQ ID NO: 479396 - protein, 424 aa, unidentified
MKVTYQTCCGVDVHKSFLVATIVKTTGGIEPSYQKKRFSTFNNSILEFKQWLLDNHCHDVCMESTGKYWVPVFNLLEDKINVVIANPKWVKAVKGNKDDTKDSKWIGDLFRLGLVKGSYIPCKKVRILREYTRYRYKLVSCRSSEKNRYQNALTVCNVALDSIVSDIFGKSSTSIIDYLLEQSGTSINHEEIASKLLRSLKSKEDAVIESVEGYQMTDAQKYRMRLVRAHMDYITAEINDVDKMIENMISSNPDFENAVQFLCTIPGVKRDSAITIISETGTDMSQFSSSKRLCCWAGLTHGSNESAGKKKSVRITRAGVYLKPALVQCAHAAVKSDKSPYYKKKYESLVKRRGKKRAIIAIARMILTAIYQMLSTGEQWNPSDLYKIDMPVALVEKQKAKAIKQAKKLLQREGLLPPDEPLAS

SEQ ID NO: 479397 - protein, 338 aa, unidentified
MYYTGIDLHKKTSFITTIDESGKVVFRHNFPNNEEHILDYFVNLDGSTKIVIESMCSWYWLYDLLRAQHFDVVISNPLKTKAIASAKIKNDKVDSHMLAQLLRADLIATVHVCSLKTRKLKELLRHRRRLVQDATRMKNRIHMLLMKNNTSIPVSDLFGARGMKYLKQIDLPIYHRQQLKSYLTLYGHLTKQIEPLTKRIGHLAKKDPMAKLLMTIPGIGPLTAMYIKAEIEDISRFPSYRNLAAYAGLVPSLDASADKSRTGRITKQGSSYLRTALVEAAQTIPRMKKTRLNIFFRKRIVRAGYQKAIVATAHKILQYVYYVLKNQTPYLEQYPAGA

SEQ ID NO: 479398 - protein, 392 aa, unidentified
MYIVGIDIGKNHHEASIVSPKGKQIGRSLRFATTHKGADSLMSFIFKNIGNSPCVFGMEATGHYWYPIYSFLKAKGYTICVINPIQSDSLRKMYIRQTKNDSIDSFLIAEVIRFGQFGTTSMADENILAMRQLCRYRDSVISSRTEIKLRIGTIMEQIFPEYEKQFSSLWVSTSMGILEKYLTPENIENAPIDELFEIIKDKSHNKLTMKKAISIREAAADTFGIKIAQDAFSFQLKQLIDRMNFLDKQIEALDCQILEYYEKFDCYLHTIPGIGMIAAATILAEIGDINRFKSSSALVAFAGIDPTVRQSGEFSSTHNHMSKRGSPYLRHAIFLVATTCSFHNSPLNAYYKKKREQGKHHLTATGAVARKLTTVIYAVLRDGKPYEPKSFC

SEQ ID NO: 479399 - protein, 354 aa, unidentified
MKRNSKYVGLDVHQAMTAATVRTEGGRVIARSVMETSERSIMEFFGGLRGTVHVAFEEGTQAQWLYDLLIARVDRVIVCDVRGEKRSGNKGDRIDADHLSDRLLRGGLRAVYHGSRDRADLKELTRAYRNLVEDSTRVMLRLKALFRARAIRTTGSGVYDPTKRAVWVAQLAGQGARLRAQTLYAQLDVLRAQRKKTKAAMVTEAKRDPAWGVLETIPYFGPVRIAMLLATIGTPWRFRTKRNLWAYAGLAVVTVSSSDYEMFDGRSRRRSRRPLTRGLNRNHNRVLKGVFKGAATTATGRPGPLQDFYHGMLERGMREELARVTLARKLAALTLRLLKTGEVFDPTQLSRPQT

SEQ ID NO: 479400 - protein, 425 aa, unidentified
MNYKQNEKINQVKESTLVVGIDIGSTTQYARAFDWRGIELGKVFPFSNSREGFESFKAWMQHLQDKYKKLDAIVGIEPTGHYWFDLGAYLEDEGILLVMVNPYAVKQTKELDDNSQSKNDRKDPKVIAKLVTEGRYSAPYTPDGVYADLRIMVANRKRLIREMTQIKNRFARWFAIYFPEYTDVFGDYEAQSSMLLLKKVCTPEAIVELGAEKINQIWRDAKLRAVGMKRATTLCETAKRSIGLKKGSSAARYEMKLLLEDYEYKKAQLDAVMEEIEKLCRKIPESEQMLAIKGIGVITVAGFLAEVGDVRRFESPRQIQKLAGLSLRENSSGKHKGQTTISKRGRSKLRAVLFNAAIPLIATNPEFKSLHEYYTTRANNPLKKKQSVIAISCKLIRVFYAILANGVTYDPQKMLSDIHRQPQAA

SEQ ID NO: 479401 - protein, 434 aa, unidentified
MTTVPPTASNGEPAWFVGFDWGSEKHRVALFDRAGKLIERRDVAHSAAAYAELGDWLLRTTQASPAEIAVAIETTHGPVVDALIDRGFRVYAINPMPLDRFRDRYSVAGAKDDTRDADTLGRSLRTDPEAFRALSPDNPLIVQLREASRTAAELTRDLGRLTNQLRDLLWRYYPQMLALDDNLAAPWLLELWQHAPTPAKGARLHKETVARILKTHRIRRLDADQVRTVLREPPLPSAPGVTEAATGHIRLLLPRIRLLNSQIKAVHTEIDALCQQLAGPQTIDPGGEPGESVPGQSIEQRDVAILHSVPGVGRIVGATLLAEASEPLRRRDYHAIRTLAGQAPVTKRSGKSCFVQRRLACNKRLANAMYHWARVAVMCDPRSKQRYAALRARGCSHGRTLRSVADRLLKLLCTLLQRQVSFDPNHNAKQAAAG

SEQ ID NO: 479402 - protein, 343 aa, unidentified
MKLSRVGVDLAKNVYQLHGVDRHGKTVWKRRLRRGQWLQALMDKAEPGCVIGMEACTGAHHWARELQSRGYEVRLIAPQFVKPYVKSNKNDANDAEAICEAMGRPHMRFVTVKSVEQQDIQATHRVRTELKDHRNSKANQIRGLVAEYGLVAPQTLLALRKALPCWLEDAENGLTDHFRSLLHGLWDDLLTLEDRLKELDKAIEKIARSNEVAMRLQQLRGVGPIVATALVATVGDGAQYKKGRQMAAALGLTPRQFSSGDKHRLYGISKRGDVYLRTQMIHGARAVVSQAKHRDDPLSRWVTDIAERRHPNVAAVALANKTARMAWAMLQDDTDYDPALAIG

SEQ ID NO: 479403 - protein, 387 aa, unidentified
MIYIGIDIAKQKHFAAAMTADGETLIPPFGFENNSEGFKLFLSKLKTFEKKNILIGLESTAHYGENLVCYLFDLGYSITVINPIETSSLRKGNIRMTKTDRIDTLLIIKAMIVNSHRLYTRADINSLRLKSLCRFREKSKKANSKLKIQLVTSIDMVFPELQYFFKSGIHINACYELLKRHSSPDDIAALHLTYLGNLLQKASHGHFGKEQAIALKSLAKSSVGTANTYYSIQITQTISQIELLEMQLDELDEAIKSIMLEMDSVILTIPGIGFLNGAMILGEIGDLSRFPHPSKLLAYAGLDPSVNQSGKFNAKSTRMSKRGSALLRYALINAAWNVSLNNKTFNDYFELKKAQGNNHYAALGHVAHKLVRIIFKMIKDNVAFNLN

SEQ ID NO: 479404 - protein, 451 aa, unidentified
MKPPVLEIEADEEQVVERVAAVDVAKASGMVCTRVPHPSVAGRRVTRVWEVPATTNAIVELADQLAREGIERVVVESTSDYWRPFVYLLDARGLEVWLVNARDVKQVPGRPKTDKLDVVWLAKLNERGMLRRSFVPPVEIRRLRDYTRLRIDLVEERSRHVQRLEKLLEDALIKLSTVATDIMGVSGRAMLDALIAGERDPRVLAELARGRMRVKRAALVEALTGRFDDHHAELAQLLLDQIDALTAKADLLTLRIDQLIAEIPAAQAPILGPGPGGEPPDSGSVPLAVVERLDEITGIGVHAAHVIIAEVGLDMTQFPTPDHLASWTKVSPRTIQSGPKRRSGRTGKGNAYLKRVLGEAAAAAAKTDTFLGARYRRLVKRRGKLTALVAVERSILVIVWHLLADPTARYHDLGADFYANRINKDRKTSQLVHQLEALGHHVTLQPIAMAA

SEQ ID NO: 479405 - protein, 397 aa, unidentified
MIAVGIDISKAKSTVAVIDSDGTVLASPFTMAHTQPEMEAFVTYLKGLGEPTTILMEYTGHYHYPVLKKLQDEGFPVCIVNPYQMKKYGDVEIHKAKTDKKDALRIAAYALEKSYKLVPYSSMEQKYEDLKFLSRQYSQRITYVAKLKVQLIALLDQTMPGITRILPLNSRNPEKCALLLFVKRFKSFDEIHRIGKARFLASYDVLAKKASERSASSKGLSIYEFAVDSITTRGEDPYIWLSQNQCVDLLSATQNAADEIISQMRNIAETIPEYKVLRAMRGVGDRLGPIILAEIGDIRRFHSGKALNSYAGNDAPPYQSGQFESRNRHISKRGSSALRKACYEVMQALKLTKPQDDPVYLFMLKKEQEGKPFNVAKMAGVNKFLRIYYARAMELYK

SEQ ID NO: 479406 - protein, 338 aa, unidentified
MNYVGIDHHRQYSHMTVMDQMGQVLRSGRVPNLQNDIGKFLEGFEAVEAVIETGRSSYTMVDVLEEMGIAVKIAHPNEVKAIARAKIKTDKRDSEVLAHLLRMNMIPEVYRRSPENRRDQRILRQRAFYVRAMTALKNRVHALLAQQKEEVRQEVARETNIFSAKGQKRLLGLDLTRGEKSLLEALLKTYRHLETRIAESTALVEKLYAEIREAQLIRTIPGFGKYLSVLVAVEIADLSRFADAAHLHAYAGVIPSVHSSGDKTYYGKIIRAGNRWLRWAAVEAVWPAIRADFDLRCFYERLARRKGANKAKVATARRLLTIIYKVWKEQRNYIPYRR

SEQ ID NO: 479407 - protein, 411 aa, unidentified
MRRVIGIDVHRTFGEVVIWEDGRLRHAGRIDMTRTALEGFGKTLLASDEVVVEATANSMAVSRVLAPFVARVIIANPLQVKAIAQAHVKTDKIDAGTLASLQAAGYLPQIWTPDAETERKRRLVARRYQVVRHRTRLKNEVHSILHAHLIPKCPHADLFNGRGRAWLVAQPLPDDERAAIDRHVRELDRLAEDLALLDREIAQDAIDDSAVNRLMTITGVNLAVAAGIMAAIGDISRFNSPQKLVSYFGLNPRVRQSGLGAAHHGHISKIGRSHARAMLVEAAWAAAKAPGPLHAFFVRIRARRGHQIAAVAVARKLTVLCWHLLTKGEDYLWARPALVAIKTRAMQLQAGHPQQKGSRRGPAYAYNIKALRDREMLIAAQAEQSYERLVTQWKPRRPKTGARAPQLGKTK

SEQ ID NO: 479408 - protein, 311 aa, unidentified
MAAPRSLGLDVAKATVELASEPAGLTGQFATDAAGLRALVAQCQAEPVTLIVLEATGGYEAPVAAALATAGLPVAIVNPRHVRAFAQALGRLAKTDRLDAQVLALFAAHIRPTPRPLPDEATQELEALLARRRQLLEMLHAERQRLPRARGREVRRNLRTHIRWLEQSVIDADAGLETLIQASPLWRVQDALLQSVPGVGPTLARTLLGLVPELGHLDRHQIAALVGVAPLARDSGTLRGRRTCWGGRPAVRTVLYMAALTAARYNPVLRTFYQRLRAAGKPAKVALTAVARKLVVLLNAMLRDQRPWRYA

SEQ ID NO: 479409 - protein, 394 aa, unidentified
MSYRSDPYIRVTKIVLLPFDVEHTAEGLKKLITKLRELDGEIRIIMEHTGMYWRPIAMTLKEAGFYVSVVNAILIHNFSDNSIRKVKTDRADAMKIANYGLTFWIDLQEYAGEDENRQLLKIQSRLYERTATTAGMLRNGLISLLDQTFPGANKLFRDESRNSRGHVKWIDFVLRFWHKECVAALSLATFTDTFQKWCKRTGYKFSASDAERIHAIARNAVATLPKNDSTKLLITQATNSLNAIYDSLQAIRTEMDRLASMLPEYELVMGMEGIGKVTGPQLMAEVGDVRRFSHKGALVAYAGVDASPYQSGSFDSKSRHVSKRGSPHLRRVLFVIMSMTLIRANTANPVFCFMDKKRAEGKHFYVYTVAGSAKFLRIYYAKVKEYLNALEETA

SEQ ID NO: 479410 - protein, 358 aa, unidentified
MQVQRNKLNFEGQNIYIGIDVHKKDWTVCIFSEHLEHKKFSQPPSAEALKSYLHRTFPGAKYFSAYESGFCGFHVHTKLQEAGITNIVVNAADVPTTHKEKNNKDDKRDSRKLGRSLRAGELQGIHIPSRKTQEDRSLLRMRYTVRKDLTRMKLRIKSLMNFYGIEHPERFSSTSKHWSGKYMGWLKTIRMEEDSGQSTLQTLISEVEEMRKVQLKVTRKIKILSQTQSYEKDYQLIYGIPGIGLITGMSFLTEIEDINRFSSTDRFASFAGLVPSCHSSGERENNGDITSRANKLMRDMIVESAWRAAEKDPALHMAFGKLCKKMEPNKAIIRIARKLLNRIYHTLKTKTAYVCGVV

SEQ ID NO: 479411 - protein, 286 aa, unidentified
MDGSKEHPLMTAGLDLGDKYSYLCLIDTQSGETLEEGRLLTTPETLRRRFTSERPLRIAIETGTHSPWVSRLLEECGHEVLVANARKLRLIYSNKQKTDEVDAENLARLARVDPKLLYPVSHRGEDSQAHMALIRSRQTLIGCRTQLVNHVRGTVKSFGARLPKCPARSFHKRAKEHIPEALRPALGAILEQIGSLTERIREYDRELEAIAKESYPETELLKQLEGIGPLTALTFVLTLEDPYRFEKSRSVEAYLGLVPATKRSGDRDPQKRISKEGDEMLRKLSW

SEQ ID NO: 479412 - protein, 357 aa, unidentified
MLIIGCDYHPGFQQIAYVDSETGELQERRLEHPEEAEKFYRELAAQGMKVRVGMEASGHARWFERLLAELNFEVWIGDAAEIHRKRERKQKTDRQDAQHILRLLLKDDFPRIWVPSWENRDVRQLLWHRHRMVQARTRLMNQLQAVALNEGLRCKKRLWREAGRQQLEAFWLAPWASRRRQDLLELLDRLNPTIAELTQAIEREAEKCPEARRLQTHPGVGPLTALAFVLIIGKADRFQCGKQIASYLGLVPLEDSSGSRRRLGHITKQGNSLLRFLLVEAAQVTVRSDPGWRSKYHHLMMRRGRKIAKVAMARRLAVRMYWMMRKGWNYEQFKKFGSHAGQLVPGDGVKVEHRVID

SEQ ID NO: 479413 - protein, 367 aa, unidentified
MKKVSTVAAKPSKKISQQKLTVGLDLGDRNSWYCVLDESGQIQLEQRVRTHAKALREVFGAMPHSRIGLEIGTHSPWISRLLSELGHEVIVANARKVRLIGESRKKDDRLDAQTLARLARIDPELLSPVKHRSARAQADLMMIRARAGLVRARTGLVNTARGLAKSYGERLRGCNVRNMNPEKGEGLSPELQSALEPLLAGIEVLSEQIRKYNERIEKLAQQSYPQVALLKQIKGVGTLIALTFLLTLEDPHRFRKSRDVGCYLGLQPGRRNSGQSEPQMHISKEGDPYLRTLLVQGAQHILGPFGVDCDLRRWGLKLAERGGKSGKKRAIVATARKLAVLLHHLWVSGEVYEPLHNSSPATAAAAA

SEQ ID NO: 479414 - protein, 355 aa, unidentified
MNQEKYIGMDVHDASISVAVKNAEGKLLMECVLETKAATILEFIQGLRGTLALTFEEGTLAAWLHDLLKPHVSRLVVCDPRKNALMRDGNQNDRVDARNLAELLRTNQVKAVYHGKHGTRALKELGRNYLAFTQDRTRVMNRIKSVYRSWAIPCAGTSVYSRRHRAEWLAKLVEPGVRMRAEHLYQQLDSLKAVRQAARRELLQESRKHAAVELLRQIPSIGPIRSALLVAILQTPHRFRSKRQLWAYSGLAVQTYDSGEYRFVGGKLQRNRERITVRGLNRNHNHDLKNLLKGAAISASERPGPLQDFYAALVEKGMRPSMARLTLARKIAAIILIMWKKGVSFDPKQLQPQAA

SEQ ID NO: 479415 - protein, 340 aa, unidentified
MVYGAIDLHMQFSQIRIVDAEGKVLRDRRVLTTRERLVQAFDGYGPMRILVEAGTESEWVAQTLEVVGHEMVVADPNYGPMYGALRRRVKTDRRDTAALAEANRRGWYRPAHRVSRAQRTMRQQLAVRRQLVRMRSSLISHLRAILRQDGLRLPSGSSTTVAARLTRLTVPPEVQTIVTPLLEALGALTPLIAAQDRVLRRAAASDPVVERLQSVPGVGPIVALTYRATLDDVARFPSAGHASSSVGLVPREDSSGERRQRRHLTKVGSSEARVMLIQAAWTCWRSRSVRTTPLRTWADALAARRGKRIAVVGLARRLSRILYALWRDDTVFGATAAVAA

SEQ ID NO: 479416 - protein, 489 aa, unidentified
MNLAQLRALVAVADQASFTGAAAALGLTQSAVSHTVASLEKELAVPLVLRRRGGTILTSHGQQVLRHAREAVHRVDRIAQDCAVLAGRHRGRLRVAAFPSAAQLLPRLIAELARCQPEVTVVLLEGTDAEVRDWLRDRVIDLGVVAELGTGDQPSSPAPGALLAQDQMVAVVDRGHPLAGQPAVALDDLVDDAFLLSDGGCEPLLHQMHQSAGLRLQPARRVRDMATLLALGRKWPERCWAVEGCQGVGRHLAQRLVADGEADVDVPAKLSARARVFSTGQGRKTDVTDAHSVAVVALRTPGLRAVQVDNATVAIRLLADRRDELGAARTLTVNRLHRLLVELIPGGAKKFLSAPQAKALLATVRPRDVVGKTRRQLAVELVGELEATDKKIKAAKKQLTELVEATDSTLLELNGIGPSGAARLIGDIGDVARFPTRGHFASWNGTAPIDASSGEQNRHRLSRAGNRRINRVLHIMAIVQLRNDTEGRA

SEQ ID NO: 479417 - protein, 355 aa, unidentified
MNDTKYIGMDVHQATISVAVLDAAGKLVMEAVLETKAETILQFIHGVRGSLHVTFEEGTCAAWLHDLLKPHVAQVLVCDPRKNALIKAGNKSDRIDARKLADLLYPVKLNPVYHGEAGIRTLKEVARSYLALTRDTTRVMNRLKALYRSWAIPCAGQRVYAPCYRSEWLAKITEAGVRRRAEIYYQQLDALRSLREQVRRDLLAEGRKHSAMRLLRQIPSIGPIRAVLLIALMQTPHRFRTKRQLWAYCGLALKTSTSGEYRIVGGQLKRSQKFLAIRGLNTNHNHDLKNIFKGAATRAAAVRGPFQQFHAGLLARGMKPTMARLTLARKIAAITLIVWKKGVSFDAEHLKQQAA

SEQ ID NO: 479418 - protein, 400 aa, unidentified
MAQQLWAGVDAGKSDHHCVVIDAEGSRLLSQRVANDEAALLALIKAVAALADGGELTWAIDLNGGGAALLICLLMAAEQRLLYIPGRTIYHASASYRGDGKTDAKDAAIIADQARMRRDLQPLRAGDDIAVELRILTSRRADLVADRTRAINRLRAQLLDYFPALERAFDYSNSKAALLLLSSYQTPDGLRRAGAARLAAWLRKRKARNVDAVVATALAAANAQHTIMPGQQLAATVVARLAKEVMTLDIEIGDTDTMIEERFRRHRHAEILLSMPGFGVTLAAEFLAATGGDMSAFDSVDRLAGVSGLAPVPRDSGRITGNLKRPRRYDRRLLRSCYLSAQIAIRTDPASRTYYDRKRAEGKTHTQAVLALARRRLNVLWAMLRDHTPYQPTATTAAAA

SEQ ID NO: 479419 - protein, 411 aa, unidentified
MGEQPDVIRFAGVDWGNEEHYACVVDAEGTVMGQSRFRATGDGLEQLTAWLTRRAGVRSDHVGVGIEITHGPVVDVLLERGFVVFALNPKQLDRFRDRFTVAGAKDDRRDARVLADSLRTDRRAFRQLTAAAPEIVELREWSRMAEDLTDERRRLVNRLRAQLRRYFPQALELTDDPGTEWFLRVLERIPTPAAARQRHHAAIGKILREHRLRKWTPQTLLATLRQTPLVVAPGTIEAATAHVRLVRERIRLVNGQLKMCLRRLDEICDEAQAGGQRDIGILRSFPGVGPIVLATLLAEAWRPLASRDYPVLRALCGVAPVTRRSGKRRLVLMRRACNGRLRNALYHWAEVAAQRDDVWKARSVALKKRGHSHARTCRALGDRLLAAAMAALRTQTLYDPTRLRQPSALAA

SEQ ID NO: 479420 - protein, 404 aa, unidentified
MDTILERCAGIDVGKKIAVGCLITDQGRKAPTVQIRTYGTAVTQLDQLRDWLKQAGCTHVVMESTGSYWKPIFNVLEATMTVVLANPAHLKNVPGRKTDVKDCQWLAELLRHGLIRGSFIPPRPIRELRDLTRRRRRLIATGTSERNRIQKVLEDANVKLGCVLSDLFGVSGQDMLEALLEGNPTAEQVAQFARGTLKRKIPEIIASLEGHRLSDHHRFLIRQCLAHMDFLESQICDLDAEILRKLQPYQQQFELLQTIPGIKADAAASILAEIGSDMSQFPTAAHLASWAGVCPGNNESAGKQRSGKARKGNAWLRGTLSQSAWAAANTKNCSYKSRYRRLAARRGKKRAVVALVHALLRTSYYVLRRASPYQELGSDYLDERRREALIRYHTKRLHELTVSA

SEQ ID NO: 479421 - protein, 354 aa, unidentified
MSQPIEVIGGIDTHTDVHQAAVIDTIGRHLATEAFPTTSAGCRDLLEWLQSYGQVLVVGMEGTGSFGAELGRYLRANQIAVIEVDRPDRRARRAAGKSDSIDAYAAATAALAGRATGIPKSRDGAVEAIRGLRVVRASAVKARTQTINQIKSLIITAPAAVREALRSLTTTELVRRLAASRPGADLAAPATAVKLALKRLARRYRHLSEEIAEADGDLRVLIARTAPGLLALQGVGTESAGQLLVTAGDNPDRLASEASFAHLCAAAPVPASSGRTDRHRLNRGGDRQANRALHTIVLVRMRHDPRTRDYVARRTQEGLKTKDIFRCLKRFVAREVYHHLTSAFSGAPRLSPTA

SEQ ID NO: 479422 - protein, 440 aa, unidentified
MRIMYERCCGLDIHKASIAACALISEKGKPQEETRRFGTMTADLRELAGWLQQKGIRHVAMESTGVYWKPVWNILEPAGFELLLANAQEVKVVPGRKTDQKDSQWIADLHKHGLLRNSFVPPRTIRDLRDLTRTRAILTQEHTSICNRIQKVLEDANIKLGSVASDVFGVSGRAILRALMKEENDAEALADLSKGLLRKKIPQLRRALEGQVTAHHRSLLTGQWSRMEFLEREIVDLETQIAERMKPTPEETALTLPNTAEDAPAPLSPREEAIQLWMEIPGVGWTAACSMVAELGVNMDQFPSAAHVASWAALCPGNNESAGKRLSGKTRKGNVWLRRTMCEVAWAASHTKDTYFAAQFHRIASRRGNKRALMAVAHSILVTAYHMLKHKRHYQELGADFFDAINRDKVRDRLVQRLAKLGFDVTLKSKDSIASDSQKN

SEQ ID NO: 479423 - protein, 314 aa, unidentified
METNTQPVFVGIDVSKNKLDVALWPSGEGFAVERNANGLNSLCAKLAALNPVTIALEATGGFETVAAAALAAASLPVAVVNPAQIRAFAQALGKRTKTDPIDAAVIARFTEAAKPAIRPLADAETQLLADLIARRRQIVEMIVAEKQRLDRAPAKRLKKSIERLLKALEKELSNLNGDIDTAVRASPLWRANEELLTSVPGVGPTTARTLIAELPELGTLTRKEIAALAGLCPFTRQSGQWRGKSFIAGGRASVRAALFMAAMVAARFNPILKTFYARLTAAGKPKKAALIAVARKLLTILNAILRDQKPWQIA

SEQ ID NO: 479424 - protein, 397 aa, unidentified
MNHILSFDISKNKSFVCLIDDKRNIIIDPFEINHNRKEFDDLYSKVNDYEGLIVVMESTSIYHLPVEKYFRNKFKIVEVMNPRLVKQFNDTLNKSKTDRVDCLKIARCYLATIDEFRLKNDDYFKFNPISRQYYSLVESIVRYKNRYKQLIDIVFPEFHQIFSNLYSDMALKFIHEFPHPELFYKKRTDYLTNKLALFNNSSQAFRFKKKVEKMKSLADNSLWFVSSSSFEVFNLKQIIEIIIFTEKEINKLRDLLINSLKETHLFKIIKSIPFMSDLNVALFLSEIGDVTRFDNASQLISFCGIDSIIKQSGKSVNYHGPISKTGNKYVRKLLFNTCTQIISVSARLYPSHPVYLFFRKKQNENKHHYVSIIACSTKLCRIIFTLCKKDCFYLPKH

SEQ ID NO: 479425 - protein, 363 aa, unidentified
MMIIGCDLHTRYQQIAMLDTETGEEVERRLEHENGEARAFYSALQGPVRVGIEATGHTHWFEAMLAELGHELWMGDAAKIRASVIRKQKTDARDAEHLLNLLRQDRFPQIWRPSPAERDLRQLVWHRQKLVWMRGAVKNQLHALAMGEGVCRKKKLFTAKGRKELEGLALGPWASYRRQELLRMFDELAAATAQLDLAVEQAAKNQPLAVRLMTHPGVGPVTSLAFVLIIGPVERFERSKQVVSYLGLNPQEHSSGGKQRLGAISKQGNPMMRSLLVEAGHTAARFDPALKRMYQRLKFRRGASVAKVAVARKLAVRNVLDAAQHGGLCAAGSHARQPVGHPGGKQFIAGLIGRLASPRSRGV

SEQ ID NO: 479426 - protein, 411 aa, unidentified
MEVIYKRCCGLDVHKEIVVACLLIREGGKVLKEIRTFLTMTVDLVVLHDWLKAHQVTHVAMESTGIYWRPVFNLLEEDFTVLLVNAAHIKTVPGRKTDVKDCEWIADLLSHGLLRGSFIPPEPIRDLRDLTRYRKSLTDERVREVNRLQKFLEVANIKLSSVASNVMGVSGRAMLEALTSGSTDPQVLAELAKGRLRKKLPELKKALEGRFRAHHQFMVAEILTHLDFLDEAIERVSQEVSSRMIPFSKIVELMDLVPGINQRVAEGVLSEMGVDMSCFPSHGHAASWAALCPGNNESAGKRKSGKTRKGNRWLRRYLIEASWAAVRSKRTYLSALYYRLVPRRGKNKAIVAVAHALLVMIYHILKDQVSYRELGSDHFNKLNAAYIQRHHVKRLESLGFKVILEPLSEAA

SEQ ID NO: 479427 - protein, 405 aa, unidentified
MAKKRRKESKANHAILPVMRPDAAGVDIGATEIFVAVPADRVAENVRSFPTFTQDLYALADWLQECRVKTVAMESTGVYWIPLFQILEARGLEVCLVNARHVKNVPGRRTDVSDCQWLQFLHSVGLLRASFRPDQEVCAVRSLLRHRENLVQMAATHIHHMQKALDQMNLQLHHVISDITGPTGLAIVDAILAGERDPLVLARLRNQRIKASEEVIAKSLVGDYRPEHLFTLRQSLAAYRSYQKLIDDCDREIRQHLEDFQPPTPPAENPPVQRKNQARAPESILQSELKRVFGVDLTHIPGIRTGIAQTLFGEVGPDFTKFRSMSAFASWMGLCPDNDITGGRVVWVGTRKVSAGLPRLCAWPRSRCTTARAPWATSTVGCEPNWVRPKPSPWPPTNSPGSSFI

SEQ ID NO: 479428 - protein, 331 aa, unidentified
MKENLIFIGIDVSKLKLDICVISNQGLESFEINNSPSSITRLFKQLIKNYSKEKLLVCMESTGYYNWPCYQSLKELALELYVINALHLKRSLGLVRGKNDLIDAERIARFIKLHHKNLHPFIFTRLIIRKIQALIAYRNRLIKSKVKFKVPCKELEFLGEKNLAKEVKKSSQKIIREIQKQIDGIEIKLSEIIQNDIELNQTYKYITSVQGVGKVLAWNILVKTNEFKSINNPRKLACYAGVVPFEFQSGSSIYRRPRVSYIADKSLKKLLHLSAMRAVRLEGDLQKYYLRKVDEGKNKMLVLNAVRNKIVARICSVVNNQKIYQNNLVLS

SEQ ID NO: 479429 - protein, 355 aa, unidentified
MDSKKYIGMDVHKESISIAVMNGAGKIVMECVIETKASMILQFIDGLRGDLQVTFEEGTSAAWLYDLLKPHVTKLLVCDPRKNASMREGNQSDKIDARRLAELLRLNHLSPVYHGEHGLRSLKELVRSYLTITKDLVRVMTRVKAIYRSWAIPCTGKQVYAARHRAEWLGKITEPGVRRRAEFYYQQLDALRTVRQEVRRELLAEGKKHQAWKRLCQIPSIGPIRSAVLLGILQTPHRFRTKRQLWTYSGFGIETQSSADHRSVDGQLQRAKKQNSIRGLNRNCNHDLKNVFKGAAIVASSKPGPLQEFYSALLTKGIRPEMARLTLARKIATIVLMVWKRGACFDAQHLKPQTA

SEQ ID NO: 479430 - protein, 462 aa, unidentified
MRDSQKRKDGAGNARQVEGLPAIRGRVAGMDLGSERHWVCAPTVTGGGREVEDFGATTPELIRMAKWLKERNVESVAMESTGVYWIAPHEVLEAESLEVLLVDTRQLARVPGRDKKTDPVDCEWIQRLHSCGLLMGSFRPQQAVCMLRTLVRDKGNLVAEAGDWLRRMQKSLDQMNVRVHRAVADLQGATGMAIVRAIVEGERDPQKLAKLRDPRCHQSEAAIAEQLTGHWREDHLFSLRQALKMYHSIQERISDYDKELLEKLAAMEREECRGQDAPKVKNPNKANAIRKRGEEPMRQALYRMSGVDLTGIDAIGVATVETVLTEYGPDLSRFPTEKQFVSHVTLAPHRPTSGGKPVKKKKRNSASTRVAAALRMAALSLRHSDTALGAYYRNIARRTKGDVAVFATARKLATLIYRLLRWGQPYVDEGAEAYENRYQQTRIRSLTERAKELGYQLTPTTV

SEQ ID NO: 479431 - protein, 356 aa, unidentified
MNFLKDTQKFVKGKMVFCGIDIHKHHWSLCFFCEGTVVERLVIPGNFKSLHHHVLRFYNSAQRVKFVYEAGFSGFHLYRSLSSAGFECVITPPNRVPSADGKIKTDKRDARKLDRFLAGDLLKEIYVPSVSVETHRHLIRLRAGYQKKQTRVKNQIKSLLHLHGLMWPRERGNKWTKRYISWLESLELKEDILRYTLDQHLREYRFIRDQIVDTTQRLKELSMSEAYRVHFDRLTSCKGVGLITGMTFLLELGDIHRFSSAIKFCGYIGLSPSQHSSGERVRLGHITREGNIHLRRALVECSWTVIRYDQFLREKYERIRAKGTNGKKAIVAVARSLAIRLRRCLLDETPYAMGIC

SEQ ID NO: 479432 - protein, 312 aa, unidentified
MNKNKCGVDVSKEWLDARIEPVGVVGRFPNNAAGIAELVALCRAHDVELVIMEASGGYERLPFLLLWEAGMACAIANARSVRRFAEGLGILEKTDKIDAGVIAYYGEVKRLKPTPPPSAAQQRLKALVTRLSQVTGDLTIQKQRRKATAEAEIIASLDQVIALLKRQERQLEGEIASLIDDDPLWAHLDKAFRSLKGVASRTVARLMAEVPEIGTLSNKAVAKLVGLAPIANDSGKRVGRRPVRGGRAGPRSILFLVARMVAKHDPHLGAFHQRLKAAGKEKMVIRIALARKLLVILNAKARDARIEFANAT

SEQ ID NO: 479433 - protein, 399 aa, unidentified
MRYCLGVDVAAVDSMYCLVAETGEIIFMPAKSPRTKSGFQWILEKLNGIEQKDIAVIMESTSTYHLKVERFFRENTDCEVIILNPMISKNHKRNLRKTKTDKEDCLNLVDIFFKGEYNCQVRHEEIYAEMQFLSRQIQHLQEGATRTRNRLRQLLSMLNPAYFDAFRNDFMYSETGLRFIAAWPHCDLLNAATAEDIAISLASTHQRSPGYYRRKAERLKTFAANCYPAVSKESVMTDCLAETALRLLAQQQEIEVLKSRLVALGSSTELYDLFISVPGIGPYLASSLIAELKDIRRFENHKKLIAYCGFDPTIIQSGKSIHYNGPISKRGNSTARKILFYTVSIILVVARKTNRQMPLLLYYEKKRGEGKHHHACLVACCTKLLRILLAMSKQNTPYS

SEQ ID NO: 479434 - protein, 341 aa, unidentified
MDITTIGLDLAKSVSHVVCCNQAGKIVRKKMLRRTQILHFFSELAPCLVGVESCASAHYWAREIAKYGHQVKQIAPQHVKAYVRGNKTDFNDALAIAEAVVRPEMRFVRTKTQTQQDIQALHVMRKKCERDRTANSNEIRGLLNEYGIILPVGISHVYKSLPKLFDRQVENGLSELFKELLERHYQKLVELDEHLDWYTKKIKQLSQHEACRRLQSIPGVGPIIASALYQHIGNGSEFKNGRAVSSSLGLVPKQHSSGGKHNLQGISKRGDSYLRTLLIHGARAVMRVSKHKETPLSQWIKRIEQTRGRNKAAVALANKLARIAWALLAQGGDYQPELTTA

SEQ ID NO: 479435 - protein, 338 aa, unidentified
MSKLATVGIDLAKSVFQVHGVDENGRIFARRQLRRSQLLAFFQKRPRCLIGMEAWAGAHDWGRRLQELGHDVRLMPPSYVKPYVKRGKTDAADAAAICEAVTRPSMRFVAIKSEACSSVLVLHRTRDFLVRQRTQIGNAIRAHMTEFGIIAAKGAQNVDGLKEQLDRLPEVARMPVSLLFDQLAETNKRIERLTDEIEETHVQNETSQRLATIPGVGMLTATIIAATTPDVDNFDCARDYAAWLGLTPKPHSTGGKQKVGRISKMGNRYIRRLLYLGAMAQIMLRCRLKREPGPDWLSSMLMRKKTKVVAIALAHRMARTIFAVLRDGSRYKPQATAA

SEQ ID NO: 479436 - protein, 386 aa, unidentified
MRKHTTAKKNQKALTKTKGKQVRQMAVRQRLTIGLDLGDITSRYCILDEAGEVVSEGQVPTTKAGMNSLFEKMPSSRVALEVGTHSPWISRHLGSLGHEVIVANPHKVKLITQSVRKNDRIDAQQLARLARVDRKLLSPIRHRGEQAQADLAVIRARGELVESRTGLINCARGLVKPMGERLKKCDADQVAEALAKPLSEVAQVVIGPLLKSVETISEQIGVYDQKIGEIAKRYPEVELLTQVHGVGTLIALTYILTIEDAERFQHSRDVGAFLGLQPKQRESGNSQPQLGISKTGDRLMRSLLVQAAHCVLRKGAPDSDLRAWGLGKMGQGGKNAKRRTIVAVARKLSVLLHRLWVTGEVYDPLYQRKSAPAAKAAASSGRKPAG

SEQ ID NO: 479437 - protein, 454 aa, unidentified
MKKKETKLQPDIVTMPLVHPRAAGIDVGDTLHSVAIPEGIFAERVKTFGSMTCDLEAIAAWLLEAKITTVAIESTGIYWKPLFSLLNKKGLEVYLVNSRQTKNVSGRKTDEDDAMWIQKLHSCGLLKSSYLADDEQEALRTLVRYRHTLVQDCSRFKNRMQKSLELMDIKFHTLFADITGKTSLAFIEAILAGERNPENFLPLVDGRIKANREEILKSVVGTWRSEHLFTLAQSYEMTKVYTEKITACDRAIEERLQCYQAFTNYGECDAVVSANNKPVLRKKKQRGAPVFDVRSYLKKIYKADVLAIYGLSEMGGLEILAETGVDLKKWPTKNHFKSWLNLCPNNKISGGKLISSKLLKKKPNAASQAFRIAANTVQRSNHWLGDYFRRMKSKGGNKFAVVATANKIAMIFYKMVTEQKDFIPVNQEAYQLKYKQAKIAFYKKKLLQLESAAA

SEQ ID NO: 479438 - protein, 338 aa, unidentified
MIVIGVDVHKHSLTAVAVDELGRPLAERSGPVEDELVRWARSLADGRLLWAVEDCRHVTRGLEQLLLGAGERLVRVPPRLTGPERRRGRTRGKSDRLDALAVARAALREPRLDGPRPQEPRLRELKLLVDHRDDLVAERRRCQQRLRWHLHELDPSVQVPLGALDRTVWLDRLRRQLARREQTTQVRIARDLLGRCRELTRSISELDQELQERMQTTAPRLLELAGCGPISGAKLVCEIGPIDRFASDAQLARHAGVAPLDASSGKHQRHRLDRGGNRQLNCALHRIAVTQGRTYGPARAYLERKQNEGKSRREAIRCLKRQLARTVYTTLKTESALT

SEQ ID NO: 479439 - protein, 344 aa, unidentified
MDYYAGIDVSLELSSVCIVDAAGKVVKESKVETHPDALVKFFKNLGLPLTRIGLEAGPLSQWLHGGLIAAGFETVLMETRHVKKALSASMVKTDRRDARGIAQLLRLGWFRPVHAKSLGSQEVRALLVARKQLQHKLTDIELSIRGILRGFGLKVGKVTDSTFEGRIGQLVTGHKTLEEIAAAMLSARATLLTEFTKLHKAVLDIVRGDEVCRRFMTTPSVGAIVAITYKSALDDPHRITKSKNAGPLFGLTPSRYQSGETDVSGGITRVGDEMVRTALYEAANVLLSPRTRFSPLKRWGLEVAKRRGSKRAKVAVARKLAVILHRMWIDGTTFRWTKTEAARA

SEQ ID NO: 479440 - protein, 385 aa, unidentified
MTNQLQETTLIPRDYDIFGGLDVDKKSMAVTFRDHGTMRKSLKLPYSASQLLNYTRKNFPGQRVAFVYEAGPTGFGLHDELTAASHPCLVVSPSMVPTVQRKRVKTNRLDSNKLSEGLRGGQLRGIHVPAPAYRELRHLVQLRDTQVAQLRASKCRIKSLLLYEGIPFPAANGKWSVPALRQLEALPCNATVRFKLDQLIDALQFHFLAAAKVQKQIRYFCQNDPELRRCISFLVSLPGVGTITATHALARLGDWRQIKDVRQIAGFLGLVSSEHSTGDKENRGEITRIGDSRLRNKLIQCAWTAIRKDPELRAFYRRIYERQPKKVAARKAIVAVARKLTTRMYAVLKEQRPFVIRADSSIAPLTAEETVGPRERLDTAQNEQP

SEQ ID NO: 479441 - protein, 408 aa, unidentified
MDAYYIGIDWADAAHAACVVDAAGEVVWTGAIVHTAAGLAAWRERLEGWRVPGREIAVAIERPDGLLVEQMLAQGVPVYPVNPKALDRARDRFRVSGAKSDPFDAAVLAQWLRTDHAQWVPLQPQSAPAQELRLLTEDHQRLVRERTRLVNQVTATLKAYYPRALELWPDLTTASARGFLRAYPTPDALTAGTRAQWERFTRRQRMASRTRSELWARLRVPQIPVPPHLVRAKASLLGALLDQLDAVIRHLADYQRRIEDFFGSLPAAAWARTLPASQSGTTVATLWAQMGDAPGRWASWHHLQAHAGTVPITRTSGQQHSVRFRRACDHLFRAAMDRYAFLSMRQSEWARAYYRQQRARGHRHHRALRALAAKWLKILFVLWQRQEGYDETRHLAMIARQHLRAAAA

SEQ ID NO: 479442 - protein, 337 aa, unidentified
MYYVGLDVHRDTSFCVIMDKAGDTIAERNLENDVLEFANFFAQFNQRMEAAMEATTDAYFIQALLDELQIPVHLAHPRKLRLIAESSSKTDRTDAHLIADLLRMGRLPEAYLAPSEVTEMRQLTRGRQSLVNTRTRLKNQVSAVLRRHGCKCPLSDKFGKAGRAWLDSVQLPTIAAMMLDIYLAVIDVLSAYIAQCGSKLREISRHDERIQRLQEIPGIAEVFGPMIVAEIGEISRFCTKRRFVAYCGLAPIVRQSADKTYIGPLRRDCNHWLRYAFIEAAHSCARSPGRYRHYYQRKVEQRDTKVAAIATARRLCRLVFAILWSGERYRPDEAQAA

SEQ ID NO: 479443 - protein, 428 aa, unidentified
MNDNEIIRHQQFCQLKEVIRGSDQHLIIGIDVAKDKHHAFMGTATGKSLLRRLIFENNLEGFGKLITHVEAVKVQNGLPLSVFGMEPTGNYHKALGSYLINAGHQVVLVAGQAVKNNRILLDGRWDKHDTKCAANVADLISQGKCLFYDSPPGAIVELRSLLSLRRRLKKEEHSLRMRIRNSLLAKHFPEMDRYFGQCLSENLSIVYWCLDPKKIAQMDFGRFFQLVTTRERGLAQQRRLKAIWQVAATSIGVVVDRSSRFEAQVLVEKIFQVQKEIKDTQQLIETISQQFMEYHLLLTIPGFGPYVASLVLAVIGDAWRFGSAKQVLKMAGFDLSAERSGKSSKKAIPVISKKGNAALRYGVYQAAFIASTRNIDFVEYYTNTLRGRERERGIKTKMRVKLAAKMLVIAWTLMKKKEEFNPDYLKQD

SEQ ID NO: 479444 - protein, 338 aa, unidentified
MELYAAIDLHSNNSVVVVTDASDHVVMAKRFRNDLEAIVTALRSCAGEVRAVAVESTYNWYWLVDGLQSAGFDVRLVNTAAVKQYDGLKHGDDFSDAKHLAQLLRLGILPQGYICPPELRALRDLMRKRAQLVRQRTANILSIHNLLARNLATSVRGDDIKRLGDAEIDGLGLLEDQKRAIKANAAVLRCLEEQIRLLERAILAKGRLREEFQGLKTVSGIGDVLALTIALETGDIHRFASVGKFASYARMVNSRRESNGKSKGIGNRKCGNKHLSWAFIEAAHHAVRYDPSIRRFYQRKRAKTLAVVAIKAVAHKLARACYHVMRNGVPYDGARAFA

SEQ ID NO: 479445 - protein, 430 aa, unidentified
MKKNNSNSQTNSDRAGKPGKARGPVQRDAKEVMAELVARLSQKLEPRSAAARAGEGRQQDLPGPNRDRLTVGVDLGDKWSNFCIVGLDGEKLTEGELRTTQEDFAEFFQSLAAARVVMEVGTHSAWARDVVAGCGHEVLVANPRQMEGPKRRKRKNDRIDAHKLARIGRMDPQSLFPVEHRSVKVRQDLVAVRARDALVAARTQLINTTRGLVKSMGGRLPKCSSPSFPHKVEESLPAEVREVLLPLVRLVETLSDGIAAYDKKMEKLGSEKYPQTKLLRQVKGVGPITALAYILTLENPERFAQSRDVGPYLGLVPKQEDSGDSQPQLRITKMGDMMLRRLLVGSAHYILGPFGPDTDLRRYGIRLSERGGKNAKKRAVVAVARKLAVLLHSLWVSGEVYEPLRYALPEATEREAVRHAPAEATEKEAA

SEQ ID NO: 479446 - protein, 329 aa, unidentified
MSALVCGLDVHKDSTYATILDSSGKIVNQTRMNNERVLGYLSRFSVGRVAMESSNQVASLYRKLESEGYSVVLSHPKKTRYIAEAKIKSDRVDSEAIAELLRLDALPLAYMPDKEVSVLREQVRRRAFLVRERVRLRVKIKSILTYEGIRWPSDSGLFTRKGVEWLHGLCLEPVESYLRVLKPLDDEIRLVSKRLRGLAEEDEDVKLLMTIPGIGYYSALLVKSEIGDVNRFPFGDRLCSYAGLVPSTHASGGVTRHGSITKEGSKWLRWVMVEAAQTHVHKYDTSVTRVYNRIAERRGKRSAVVAAAHKLLLVCYSVLRNKRPYYDQA

SEQ ID NO: 479447 - protein, 404 aa, unidentified
MIIIGLDWSRYKHDFAIMDAQGNVVQRGTVAHNTEALEELAATIQHQVNSVEEVRVGLELNDGALLAWLVSKGYTIFGIQPKSAQRARDIYRPSGSKDDGIDAFVLAEFIRVNTNRLRPWHPPSAITLELRELLRWREQLIHQRTAAYQRLGALLAEWSPQLAELCDDLGRIWQLDLLSQFPTQARLHQAHGNRIRCFARKHRLRATTYQKIEKARRSTPMPIPTGRVRPVERQTHFLIEQVQLLNSEIKDVEAELDRLTAQHPDVNVFDSLPVHGTVTTASLLAIFGDEHERPLSADELAALCGVAPVTIASGKSKKVRQRRACDHTFRQALVHFAFNTAFSSGCWAEQFYRRKRDEGATHHAALRCLAKRWLRILLRIWKDHATYDEALHRSNQRANQSHAA

SEQ ID NO: 479448 - protein, 342 aa, unidentified
MEIATVGIDLAKSIFQVHAVDAAGQVAVRKTLRRAQVAPFFAKLPRCLVGMEACGTSHYWARELMKLGHDVRLMPPAYVKPYVKRGKTDANDAAAICEAVTRPSMRFVPVKSTEQQAALALHRTRDLLIKQRTQLVNMIRGLLAEFGIEMARGLRHALELAARLSAGDAAEVPPLAQRVVTGLADQIGALQIQLTRLEKELLAWHRASDLSQRLATIPGVGVVSATALAAAVSEPERFRSGRQFAASLGLTPLQNCSGGKERLGRISRMGDRYLRRLLVVGMTSLIRRAKATPTSVDPRLPALLLRKPARVVTVAAANRTARVAWAIMTRGGTYRAPAAAAA

SEQ ID NO: 479449 - protein, 349 aa, unidentified
MSEPYAGRQIVGIDLHRRRSVLVRMTEAGERLETVRISNDPEYLREVMTRAGEAPEVVLEACYGWYWAADTLADLGATVHLAHPLGVKMFSYRRLKNDERDAADLADLLRMGRLPEAWIAPPATRELRGWVRHRAKLVGLRSNLKCQVHGILANAGITVPMSDLFGASGQRLLATADLATESRSRIDSLQRMITALDFEVELFAKLVAGRLRTHPGYQAIQLIPGVGPILAAVFVAEIGDITRFRRPEQLASWAGLTPKHHESDTTVHRGRITKQGSRLVRWAAIEAVQRLPGHTRIGQVRDRVAARRGRNIGVVAAARELTELVFYGLRDHRVHALAVHSPARTPLPA

SEQ ID NO: 479450 - protein, 340 aa, unidentified
MNTMTLLGIDIGKHSFHLHGQDAKGHQVLRKKTNRGQLLNTLAQLPACTVVMESCGGAHWLARQIKALGHEVKLIAPQYVKPFVKGNKNDFIDAEAICEAASRPAMRFCSIKTAEQQTLSALHRVRDSLIGHRIVATNQIHGFLLEFGISLPIGIAALHRVPALLDDPQHPVPLRLKGLVMRLHHQIQQFNDEIKDIESSLKQQLKEDDAGGRLQSIPGIGPITASALLADVGDASNYRNGRDFSASLGLVPKQYSTGGKTVLLGISKRGDKHIRRLLVQGARSIMLRIDKREDALGSWVRELLTRRHSNVVACALANKLARIVWAVLAKGGQYNPHPNT

SEQ ID NO: 479451 - protein, 402 aa, unidentified
MKVFIGVDPHKLSATIEVVDDRETVLATGRFGTDKAGYTAMRKVVARWPDRTWAVEGSNGAGRPLAQRLLADGERVVDVPAKLSARARQFDTGHNRKTDAHDAHAVAAVAVRTAGLRVLSYDVQLETLRMLVDRRQELTRTRIQTVNRLQRLLAELTPGKAKKDITTLQAKAILGSVRPRDLAGRTRRRLAAEQLAELVVVDKKIKALTKELKIMVLARGSTLMDLRGVGPVVAARTLADVGDVARFADRNRFASWTGTAPIEASSGEIVRHRLSRAGNRRMNHMIHIAAACQIRLDTPGRAYYRRKLAAGKTRAEAMRCLKRRISDALYRRLLIDARALMSGGADAGPGGHCGASLESSAAGSHPYTSTSDQPLPGPARTTLPAPTSTQKSSISRPLQPAS

SEQ ID NO: 479452 - protein, 522 aa, unidentified
MPVKTSAPSKRRSSKNRQSFHKPNGVIAPRVKAVGAEHFAIVCIDPAKLRSELMMADYMGNILIDSMTVGHLPNSIDNAIQLVKDQVEKHRIKDLIVTVERTGNYHRILQHAFNRAGFEVRIIHPLATKQYRVPADPENKTDQTDLAAHHRAAIAGFGLCELKLPELYEQLRLRVRHRRDLVEKSTAIVCQVREHLHLSMPGYAGIFSDFFTHSAAIEVARKANSAQAVLSLGVKGLSEHLAKQNIRFQRSTIDKIIGWAQQAIKLDHESPALHHSMWTELHDLYTMLEKQISRLEVEIARDIVKTPYVRLLSIPAINVVSAADFAGEMGPISHYANANAITGRSGLFPSRYQSDQTDNAGSIVKCANRRLRAALMRIADNLAKLNGHFRVVAASDAIQKIDKRATRVKIAKRFSRIAFACVAGDAPLKHECCRDPNSILVKLRLFHDDHATPLDQTLIDMENAVAQLPLKTRGCEVELVAQSLEQGSTRRGPKRIGELLTTILARLKAESKLTNEDQTASS

SEQ ID NO: 479453 - protein, 338 aa, unidentified
METYAGIDLHSSNNFIGVIDAKDQRLYSKRHENQLTHVLKALAPFKSTLKGVVVESTYNWYWLIDGLQEHGFKVHLANPSAVKTYEGLKHTDDQWDSFWLAHLLRLGILPEGYIYPKEQRAVRDLLRRRLMFVRQRTAQILSLQSMIARIRGLDFSAESIKQLRVDLVDRLFESHYHRFTAQRNLATIKFLGGIIHEIETEVRSQIQLRRDFQLLLTTPGIGLVLGLTIMLEVGDIKRFPKAGDYSSYCRCVESKRITNKKKKGEGNKKNGNRYLAWAYVEAANHAARTSQGAHKFLQRKMSKSNRTLAIKALANKLSKATYYIMRDQVPYDAEKLFR

SEQ ID NO: 479454 - protein, 367 aa, unidentified
MKSIVYVGMDVHSEDNCMVVYLDDRGEPEYESTIPNNEAMIRKFFEKLKTKYADSKIQTIYEAGPTGFVLYRQLKALSITCMVAAPSLLPHASGGRLKTDRRDAKSLAKALRSGMATPCHIPSKEFEEVRDYQRMVADTKDAVGTAKKRLIMFLHRQDCPSYEGTYWTQRYLQWIKTVSLDPVDRETCDEYLMMVKELQDRLDRQLVRLEEFAAMKEFSEEVAKLKCFKGISTQTALALVTEVEDFQRFPTARSFMAYLGLVTSEHSSGGRRVQGGITKAGNKHVRSLLVESSWHFRYPFVQKSRALKERQQHQKAAIVSYADKANNRLTRKFSKMTYRNKSTKTTVVAVAREMSGFVWGMMTGNIA

SEQ ID NO: 479455 - protein, 411 aa, unidentified
MNPVIGLDVAKGESQVQAYLERKKPYKKSFKVKHDLDGLASLLDFIKEVEEISGERPPLVMESTGHYHTPVVQYFEDKGYLIIIVNPLISYKTKSSSLRKVKTDIVDANHLCELYYKEDLEPYKKRGIQLANLRHLTRQHDNITGMFVQTKLQFQAVLDQVFPEYSNVFGDLYSNVSLKILQTYPTSEDILSANNEVLTTKIKEFCNSRSLQWANQQAEKLMTAAAQNPFQQALYSSLALSLDMYINMIFEYKKHLSLLENEIDALAKSIEESKIIQSIPGIGEKIATTIISEIGEIERFNHPKKLVAFAGLDPSIFESGTFKGTYNRITKRGSSRLRQALYMAVKCAIRDCRKQKTTDEILPRNKKLRAFYDKKREEGKPFRVAVIACANKLLHWIYALLKNKTSFQDIA

SEQ ID NO: 479456 - protein, 367 aa, unidentified
MKKVSTAAAQTTKNFSQPKLTIGLDLGDRSSWYCVLDERGEVVLEQKLGTTPKAMREVFGSMPRCRIALETGMHSPWVSRVLSELGHEVIVAHARNVRLIGESRKKDDRLDARTLARLARIDPQLLCPVKHRSAKAQADLTVIRARAGLVRARTALVNTARGLAKSYGERLRGCNVRNMNPEKAEGLSPELQAALEPLLRGLESLSQQIREYNERIEKLAQESYPQVALLKQVKGVGTLIALTYMLTLEDPHRFRKSRDVGCYLGLQPGRRNSGQSQPQMHISKEGDPYLRTLLVQGAQHILGPFGADSDLRRWGLKLAERGGRNGKKRAIIATARKLAVLLHRLWVSGEAYEPLRNNNQRAMPAAA

SEQ ID NO: 479457 - protein, 428 aa, unidentified
MTVAILEPPHITVAVASPNTIFAGVDTHKDTHHVAIVDGLGRPIADREFLAVGSGYRQIIDFLHAHGIVEAVGVEGTGSYGAELARVLAGAGMRVLEVCRANRAERRLRGKSDPLDARQAALSVVAGRGLATPKQRDGDVESMRILLAERSSATKARTASINQIHSLLVSAPEAVRQDFRRFDGDKLANTLARARPAPGTTPELVVRASAKRLAQRHQALTADIAYIDQQLTVLAVRQNPALMAASGVGPFVAAHLLATAGDNPDRITTKAQFAALCGVAPIPASSGTRQRFRLSRGGDRQANAALHRIVLLRKRHKEPRTMAYIARRTAEGLSDRDIVRCLKRHVANEIFALLTQNHAVPLPSGPWLRQRRQTLGIVLTDAAKQLNVPYQRLRRLEIGQRADTDLETAFSAWLDGKAQQPNTAQRVA

SEQ ID NO: 479458 - protein, 321 aa, unidentified
MAKRTTICAGIDTGKRKLDVALDGNSLQLQVENTAEGHKVLLEWLRRHKVKRIGIEASGGYEQPVVAELRRKRFVVVVFQPAQVRAYAKFHLQRAKNDKIDAALIAACTAAVKKIHPAPDPRLQPFAEHLTMIEQIGEDIKLYKNRLETCRDPRIQKVWKEEIARLAKRERAELKALVAAIREHRDLAHRLDLIYSVGGAGLPTAVAILVRMPEIGQLSREQVAALAGLAPYDDDSGEQVGARHIHGGRKRLRRALYAAALPASFRWNPQLIALYTRLKAAGKEHKRCLIACARKLLIFVNTVVARGTPWQDEPLPTAATG

SEQ ID NO: 479459 - protein, 453 aa, unidentified
MEQPQEIEDQEYERTWERVAAIDVAKGSGVVCTRVPDEDRPGRRKTHVWTVKATKRAVIELADHLRGLQIQVVTLESTSDYWRIWWVVLEAAGLKVQLVNARHVKNVPGRAKTGKKDAVWLAKLTERGLLQPSFVPPPEIRRLREFTRLRTDLVRERTRYWARLEKLLERAQIKISAVLSKLTTDTARAMIEALIGGQRNPKVLAELAIGKARSKRGELAEALDGDWQPHHGELARILLDQIDALTAQVDALTDRVSELIDQIPAAWGVDAGGVTGPQAGTGPDAVILPALARLDEITGCGIIAAQAVIAEIGLDMTVFGTSGRLVSWARRSPQTRQSGKKTTTGRAGKDNPYLNGMLGEIAASASRTDTFLGERYRRLARRRGKRKALAAIARSILVIIFHLLADPTARFTDLGPGWYDNQIDAQRKTRGLIRQLEALGHTVTLTPAGAAAA

SEQ ID NO: 479460 - protein, 316 aa, unidentified
MTTNSVVMGVDVAKDRLDVAVRPSGEAWSAANDDAGVRALVARLRPLAPALIVCEATGGFERAAIAALAAAGFPVVVANPRQVRDFARATGQLAKTDQLDAAILALFAERVRPTPRPLPDAAAQLLDAVLTRRRQLLEMLVAEKNRLGFAPQPLHRGIQAHIRWLERQLDDVTKELAALIEASPVWRAKDDLLQSVPGVGPIVSSTLLGELPELGTLSHKQIAALVGVAPLARDSGTLRGKRLIWGGRASVRTALFLAAMCGRRWNPALKVFYERLKAAGKPTKVALIACARKLLTILNAMMRDQSRWTPSVQYSC

SEQ ID NO: 479461 - protein, 361 aa, unidentified
MLMPRTRNKISFNGQNIYVGIDAHLRNWTVTILTEHNFHKKFSQDPKPETLYNYLQRNFPGAKYHTAYEAGFCGFNLHRRLNELGVNNIVVNPADVPTTDKEKKQKEDARDSRKLAMTLRSGELKSIYVPSRESEELRSLLRYRKTLVKDISRGKNRIKSNLYFHGVEIPPEHQQNSKYWSNKFTQWLKSISHTTAYGTIVLQDLIETNLNLRAKLLKVTQDIRKASKDKRYSKLIELLTSIPGIGIITAMTILTELETLERFKSFDKLCSYTGLVPTTHSSGDKDKTGKITPRANIILRNALIESAWIAARIDPALSLTYNELCKRMKPTMAIVRIAKKLLNRIRFVLKNETKYIYAVIS

SEQ ID NO: 479462 - protein, 387 aa, unidentified
MPQSNDLSRSLAALDQDSTLIAVIEMSQSSWLVGAIVPGISRQPLKKLVVEERELLRLLHRWRDEATKAGRMINRITVAYEAGRDGFWLARWLQEQGIEAHVIHPTSVAVSREHRRAKTDRLDTELLKRAFLGWLRGERGHCSMAMIPTPQEEDAKRPNREREGLVGERTRIVNRMKSTLARLGIRGFKTTLRKAPERLTGLLTPEGVPLPPNTLAELRRDMARLRFVMGQIREIEAARLQQLEQHPEQGPHAMVRLLAQVIGVGIETADMLVHEILSRTLRDRKAVARYAGLTGAPDESGARRREKGLARAGNARVRRGMIQLAWRFLMFQKDSALAQWYRARTADARGTTRKTMIVALARKLLIALWQLVTTGEIPQGVVLRAAA

SEQ ID NO: 479463 - protein, 354 aa, unidentified
MSQTLKTAIAVVGIDIGKNSFHVVGLDQRGAMVLRQKWSRGQVEARFANMPPCLIGMEACVGAHHLSRKLKALGHDARLMPAKYVRPYSKGQKNDFRDAEAIGEAVQRPTMKFVATKTADQLDLQALHRVRERLVSQRNGVINQIRTFLLERGVAVRQGLRFLRAELPRILGMPPEVLSLRMVRVIEDLAGDWRRLDERVESLSDEIEAVARKDAGCERLMSVPGIGPIISSATVAAIGTGDVFSKGRDFAAWLGLVPKQISTGDRTILGKISKRGNRYLRVLFVQAAWVVLIKPKSWERHGLKHWIEAAKKRLHRNVLAIALANKLARIAWSVLAHGRNFEARKIDEAAAQPA

SEQ ID NO: 479464 - protein, 349 aa, unidentified
MDHIGIDVHKRESQIYILAEGGEVIERRIRTEPERFAAVLGARRRARILIEASTDSEWVARCLEALGHEIIVADPNFAPMYATRTRKVKTDRRDARALAEACLLGAYRPAHRLSDPQRHVRGRLLVRDAVVRTRTRYISLIRALLRQHGYRVPSGSAESFIHRVQGLPLPGRLLSVVAPLLALMRPLNRQLTYSDERIEHLAIQDPRVPRLRSVPSVGPVTAAAFIAAIDDAQRFRHAHQLEAYLGLVPREYSSGETQRRGPITKAGHSRTRWLLIQAAVSILRRRPPQAEELRTWAVRIAARRGKQVAVVALARRLAGILYALLRDGSVFEPQRVRHPRLPAAAPMAM

SEQ ID NO: 479465 - protein, 313 aa, unidentified
MSQNNLAILHVGLDVAKLSLQLHLAGSLHSLANDPKGHAQLLKLLRAHPKAQVVCEATGGYEQPVVRALQAADIPVSVLEAGRVRYFARAQGQRAKTDPIDAAVLTHYGVTFQPAPTPGLSIQQHRLADVTQRRRQLIHTRTMETNRADHYTDPLCVRQHRQFLKLLEKQIDQCDQLITTLIAADAELARKAKRLEAIPGVGRVVAATVLAEMPELGKLNTQTVAALAGVAPYNRDSGKLTGWRHISGGRRPVRSALYMAALSAVRHDRILKDFYQRLRSAGKKPLVALTACMRKLIVLMNHLLKNDHFQLAS

SEQ ID NO: 479466 - protein, 348 aa, unidentified
MVTIGVDPHKSSHTFVAVDGNGRKLAEKTCSAKAEGDLEALRWAGQWPERAWALENCRHLVRRLERDLLVAGEAVVRVPSRLMAKTRRTGRQRGKSDPIDALAVARVALQEPGLPVAHLEGISRDVRLLVDHREDLIGERSRIQNRLRWHLHELEPGHQVGSLSGTAGLRKLETWLAGHSGRVAELAGELLGRIRELTVRVKQLEAELGQLVRPLVPILLALQGCGVLTAAKIIGEVGTISHFRSRAAFARYNGSAPIPVWSGNDDHHRLNPGGNRQLNAALHRIAITQLRREGLGRAYLEHRLHEGDTRKEAIRALKRRLSNEVYQRLLSDERTQMASADRPHVEAA

SEQ ID NO: 479467 - protein, 356 aa, unidentified
MKYYTSTTEFNCGIDLHARQMYVCVMDRQGKKLVHTNVKDNDWEFFLKLIAPYKHDLTICCECMFGWYWLADACQETGLTFVLAHALYLRAIHGGKNKNDRIDSEKITHLLRSNLIPPAYVYPAQKRPMRALLRQRVCYVWRRTELLNRIQSHQLAHNRRPTKCTTRYNRDPWQEKILATEPHPLRTLALQTDMAMVRHYDEHIRTLEAKLISLAKEHCVRDFTLLLSVPGIGENLGLTILHEVGDINRFPTVKDFLSYCRLVKGTVASAGKIKGLRGAKLGNPYLRWAFGEAAVIAKRDHAVIGPLAMGLEARMGGNKFKANTVVAIKLARAVYFMLKNKTIFDADRLVAVLSKN

SEQ ID NO: 479468 - protein, 329 aa, unidentified
MQPCVGIDVSSEHFHAAIYAAQGQVACQRFDNTLNGVEALVKWCDDHDMPLQQVWFVVENTGVYSATVCYGLHERGLRVALLSPLQVRDGFRARKTDEVDAARLAEYGYRFADRLVAWEPPRETVVRLAHWLQIREQHRDRWQRLRNLLESIQRHPRHDAASVQHLEEEITRCQRLQSEVEEQIGQLIAGDAELWARREQVFSVRGCGEGMFWQLAMVTDGFRDIPTGRRLASWAGVCPHERRSGRRVRHGTHSRGYGNEEFRRVLHMAALAAVRLPGELRSYYLRKVGEGKPKLLVLNNVKNKLLHRVVACLRDGRCYSSEYALVGGS

SEQ ID NO: 479469 - protein, 390 aa, unidentified
MARGPGLVTIAVDPHKRLNVVEVIDAASTVLASQQFEHSTAGFKELMRFVCGWRRRQWAIEGATGVGKNLAQRLVAADEVVLDVPSRKSSLVRAFSATSGRKSDEVDAHAVALAALNTPDLERVRADDHATALRLLASRRKELVGLRTQAVNRVHRELQILIPGGAKRGLSAARAKAMLSSVRPRDEVAKLRKSLVADQIADLVSIDKRLDDISRQIKAAVKAARTTLPELRGVGPVITAIVVGEVRDVARFVDEDHFAAYNGTAPTTWGSAGDARPCVNRGGNRVLNHAIHMAAVTQLRNPGPGRDYYQRKIASGKKPKAALRCLKRRISDAIYRRLVLDAQNALGGPGGHVGTTRNTSATGSTPNAGSSVKPQPGPRRNATPTAAHAS

SEQ ID NO: 479470 - protein, 416 aa, unidentified
MNAVGIDVSSRKSTVAVLRPLGEVVCLPFDVTHDIVGLASLAEKLKTIDGETRVVMEHTGRYYEAVAKALHEAGFFVCAVNPLLIKEYGANSLRRVKTDKADAVKIARYALDNWADLRDFTPMDAIRYDLKTLNRQFQLASKQRTASANNLIALLEQSFPGIRKCFDSPVRSDGTQKWVDFAHSFWHVDCVRKQPFAAFCERYRKWCKRHAYLFKLSNAEEVYALAKRAVVLTPKSKVVKVLVQEAANQLISISRSVEVYRAEMDRLAAMLPEYPVVMAMYGVGKSYGPQLMAEIGDVRRFERKQALVAFAGIDPMPNQSGDKNVRSNKSSKRGSPYLRKTLFNVIRTYLQCAPQDEPVFQFLNRKRAEGKPFYVYMLAAANKFLRRYYAKLRDYFASLDTLQPVDPIPTILKATL

SEQ ID NO: 479471 - protein, 359 aa, unidentified
MKIVGCDFHPSWQQVAVFDPATGELLEGKLLHGDGEAERFYRELEAPALIGIEACGNSQWFIDLAEGLGHVVWVGDASQIRASYVRRQKTDRRDAGHILKLLLENRFPRLWVPSSEQRDMRQLLIHRHKLVEIRTRVKNGLQHLALNKGLQKKSRLWSVRGRADLEKLPLEGWTLRRREDLLGLLGELNRTVDELDAAASKAAEEHPQARLLMTQPGVGPITSLAFVLTIGDVSRFRHSKQVSSYLGLIPREHSSGGKQRLGSISKQGNCFMRQLLVEAAQTANRLDEGFRKQYQARCHHKEKGVAKVATARKLAVRLYWMLRQNVGYPEIARIESSPRVPLVDRSHTAGLIGRSRTQQ

SEQ ID NO: 479472 - protein, 424 aa, unidentified
MATITPVTATVKSEDLMQVCCDVSKEKIDVYSRVGHEGALFEMMDTIRNCGSVLQRQLKAWQELAQAHGHAGVLVVCEPTGGHERKLLALARQAGSRTAYVSGEAVGKARVIESNDTGKTDRKDARIIATLAGMGKTLKVRQLPDEYERLRELNTTYDLECTTVATIRNHVHDQVRQLFPDLDGEDGFVFSATGRAIRQLFGLNPARIRECSWREFVAKVKTFVKAARLERLEKVWAAAASSLLHQCPATVRAMREERLGELFEDLERHLGRKLQLRTRILDAYGKTEESRKLADIPDASSFQLARVIAESGPLADFRHASQLLRYFGMNIRERQSGKWTGKNRISKKGRALGRKVLYQLVFSSLIGEGKLFADPYRRKKADCACGMKAIVCLMRKALKMILGVFRSREEFSRDRVFASLPAAA

SEQ ID NO: 479473 - protein, 355 aa, unidentified
MNSEKYIGLDVHQATISVAVLDSTGKLVMESILETKAATILELLAGLRGTLSVTFEEGTWAAWLYDLLKPHVAKLVVCNPRKNALLKDGNKSDRIDAHKLAELLYLNKLSSVYHGETGVRMLRELARSYLTIVKDLSRVMNRLKAVYRSWAIPCAGRDVYYTRHRAEWLGKIKEAGVRRRAERLYQQLDMLQYLRQQARRELLAESRKHAITVKLRQIPSLGPIRSALAVALIQTPHRFRTKRQLWAYSGLALETRTSAEYCYVKGGLRRSKKQISIRGLNKDHNHDLKGLFKGAATRASVLPGPFQDFYQRSLAKGIKPTMARLTLARKIAAITLTLWKKGENFDADKLKSQAA

SEQ ID NO: 479474 - protein, 368 aa, unidentified
MNKRTYVGLDVHARSVKGCAIDRETGEILRQSLAANDAGIAEWVARLPSPVLVVYEAGPTGFGLARLLNAAGIECVVAAPSKLQRPPGDRVKTDARDAEHLARLALLGQITPVRVPGPSQEAARDLVRAREDVRADLMRARHRVSKLLLRHGLVYSGGQAWTDAHHTWLHRQHFDDPALQAAYEAGLEMAELTLDRRNRLDAKITAMAATEPYAPVVRALMCLRGVSVLTAFGLAVEIGDWNRFTGSTIGAYLGLVPSEHSSGASRSQGAITKTGNTHARRLLVEAAWHHRRPYNNASRDMRSRWDAADEASRVRGHQGNHRLHHKWEQFETRHKRRVIANVAIARELAGWCWSLAAPVQKEHPWTDD

SEQ ID NO: 479475 - protein, 367 aa, unidentified
MKKHTSVDQSLSSSDLSACTTVAVDLAKRVFQVAGEDALGQVLYEERIKSREAFYAFLRKLPPTVVVLMETGPGAQAWARQLQAQGNLARILPAQHVADHRSGAKNDRNDALAILRAGRDTRILAVPIKSAAALAMQALHRARQGYVRRRTAMSNQMRGLLLEHGVALAQGDVAISQTIPRVLEDATQPLPDMLRELIDELLGEWRHLGERINVLTGRLEAAASADKTAKRLMTVRGIGPIIATALLAKQTQPERFADARQFAAYFGMVPDQHSSGEKVRMGKMSKRGDRYVSSLMIQGAHAVLRQMRPDSEQPDDRRLQRWVSRLGRKEAAVRLANRNLRIVWVLLQNEQTYRRQPGNGQEAAVSH

SEQ ID NO: 479476 - protein, 379 aa, unidentified
MKKNSTDLKDGKQAAKAGKAVNKRGSQITIGLDLGDKSSRYCALDESGEVLFERSLATTPKGFAQVFGALGRCRVALEVGTHSPWVSRLLKGFGQEVIVANARQVQLIAQSSRKNDKLDARTLARLARLDPELLRPIQHRSEEAQQDLTLIRVRAALVEGRTALINSARGLAKSLGERLPACDADSLDTEYLNGLPAKLKTSLQPLLEEVESLTKKIHACDERIEQIAREKYPETKLLKQVKGVGTLIALTFVLTLEDPGRFRKSRDVGCYVGLRPKSRESGESQPQLGISKEGDVYLRKLLVQGAHCILSRRGPDTDLKRWGLRLCARGGKNAKKRAVVAVGRKLGVLLHRLWVTGEVYEPLRNSQTGPVAQRRTRAA

SEQ ID NO: 479477 - protein, 326 aa, unidentified
MQNILGIDVSKDTLDLVLINEEGKFHKVISNDPAGLKAMDKWLVSRHVDRVHACLEATGQYGDEVSEYLYGQGHDVSVVNPTRIKRYGESKLHRNKTDKADADLIAEFCLKEKPALWEPLSPDLKHLRALVRRLNDLQTNYRQESNRLLSGEKDAWVINDLSVHVEYLKARIVATEEEIQNFINQTPDLKAKQDLLVSIPGIGKKSSAMLLAELGEISGFENAPQLAAYAGLNPKGFSSGSSVHKKTRISKQGRSELRSCLYMPAVVAMTHNSVVRALKDRLRERQLPTMAIVAASMRKLLHIAYGVLKNQKPFDPEYDRQFNFSA

SEQ ID NO: 479478 - protein, 340 aa, unidentified
MTPIRIGLDIAKNVFQVHGVDDKGTVVIRKRLRRPDMLRFFASLPPCLIGIEACSASHHWARELIRLGHEVRLMPARYVKPYVQRGKSDALDAEAICEAVGRPTMRFATIKTAEQQAVLTLHRARELLVKQQTMLANLIRGCLGEFGIVAPLGIRRVSELIAVINDDADTRILPEARIAMRAVADQLCDLQTRIKQIEQAIRAWHRSNEASRRLATIPGVGSITASAIVATVANATEFKSARHFAAFLGLTPKQYSTGGRQRLGRISKQGDVYIRRLLILGGTSLVRYARGAGGSIWAKQLLARRPTRIVTVALANKAARIIWALLTRGEVYRAPQPQTA

SEQ ID NO: 479479 - protein, 336 aa, unidentified
MLYVGLDVHKRFWSCCVLDERLRKRAAVVLPGEVDALVRFLEHLGERYSICFEASSQYGYLYDRLRPHAERVAVAHPAHVRLIYRSKRKNDRLDAQKLAKLLAIGAIPMVHVPSGEIRALRSAVVARERLVGECTRCKNAIRALLEANGIRPPKRLWSKQGRRWLADVELAHELYAERRDLLLEALEQAMARLKRLERSLNKRSGRLPAVALLRTIPGVGVRTAEALVAFIADPRRFTSNKTIGSYFGLVPKEDSSGGCQRLGHITKNGPSVVRRLLNQAAWQAIRRSPQLRSFFEKIRRGKKERRKIAIVATMHRLARVALAMLRSGEAWRWQEA

SEQ ID NO: 479480 - protein, 357 aa, unidentified
MEKITRIGVDLAKNVIQVHGVNSIECVVVRKAIPRQKFLEWFANLEPCLVAMEACSTAHYWGRKLRALGHEVRLIAPQFAAPYRKGGQHVKNDKLDAEAICEAAGRPHMRFVAIKTADQQNVLVVHRMRSGFVEERTALVNRLRGELVEFGVFLPQGIDAFRAHFVEALEDGATELNGVARTALLRGWDHLQALDQQITWCDAQIAAQVKHDSNAQRVMVVIGIGPLTASAAVATVGDARLFTNGRQFAAWLGTVPKQASSGGKTRLGRITKQGNTYLRTLLFQGARSALTSAHRRTDRLSRWIVQLQARVGWYRTLVAVANKHARILWAILAKGERFDPSYVSTPPTPASHGTATA

SEQ ID NO: 479481 - protein, 376 aa, unidentified
MENQVALRELSLTRNTRLLVALELDSKRWRVAVTDGSTRVSEHKVDAGDGPALLAVIERARARFGLAKDAAVLSCYEAGRDGFWLHRFLMTNGVENRVVDAASMEVNRRKRRAKTDRIDCRKLLTHLMRFAAGENKPWSVLRVPSEAEEDARRPHRERERLVKERRAHVSRIKDLLVMHNVRVKRVSGPGWKKQLAALALPPSLRAELERETERLALVERQIAQLQREHAEELKASNDETCAKQQHLQRLRAVGKVGAWTLVRELFGWRTFNNRRELAGSVGLCGSPYSSGTMERDQGISKAGNPRIRTLMVELAWQWLRWQPESALSKWYMERFGRSGGRSRRIGIVALARRLLIALWRFVEHGLIPQGAKLKAA

SEQ ID NO: 479482 - protein, 343 aa, unidentified
MIGLDTAKSVFQIHAVNESGKAELKRKLHRSELRPFFEKHPPCTVVLEACGAAHHWARMLSSLGHSPKLIAPEAVKPFVKKGRKNDAVDAAALCTAGTRPDVEFVPVKSGEQQGILALHSARTLLVKQRTMLGNAMRGLASEFGLTVPKSIDKLGELMALVDGDESFPATARQAIRGLFDHCGWLVESIATFEAEIVAHVRRDETARRLATIPGVGPITASLIVATVADIGMFKSARHFAAWLGLVPRQHSTGGKSRLGRITKTGKREIRRMLVLGATSMVYRAQQWNSAVGAWLREVLERRPVRLATVALANKMARIAWALMTRNEVYRPKGTASTAVAAAG

SEQ ID NO: 479483 - protein, 430 aa, unidentified
MHNKNYISVGIDVGSAFSFMTILAPDETVILKPFKISHNNKDSLERAVSEIKKAEELYSLESRTFLESTGIYHFPLFCYLVDCGFNASIINPIITHSTKNGNIRKVKNDKIDSKGIAKLGLSKHIPVSQFPAKLVLELRSLTRKYYDLTDERSAHINKLKGDLHTVFPQYLDVFCDVTGKTSTMILRQYGTPDKILRGHKKTMIEKISKASRKGLAKASERYEKLCAAANAAKTFGCQIDSIYFNIFLTLDLVEKLDSALDSILNRIRQLITFNKNEKFIQQIKPLNTIPGVGFLTAVTIMCEIGDFSAFRNPKQLFAYFGLDPEVNESGKFVGTQLHMSKRGSRIARRAIFAVALASIRTKRNGEGINPYLRKYYELKSGQKPKMVAIGAVMHKVCNIVFAVLRDEKAFELRSPEEHCKQYQRPALAAA

SEQ ID NO: 479484 - protein, 300 aa, unidentified
MWIIGVDYHPSVQQIAWVDTDTGEIEEQRLKHSGGEAERFYRDLKEKGFSVRVGMEATGHARWFERLLRELGFELWVGDAARIRAKQVKKQKNDRQDAQHLLKLLLKDDFPRIWVPTPENRDRRQLLLHRHRLVQMRTRVMNQLQAVAMNEGIRRKRGLWTRQGRAELESLWLPTWTSRRRQELLELVDQLDPSIDQLSQAIEQEAEQQPEVQRLMTHPGVGPITALAFVLVLGTPQRFSCGKQVASYLGLVPSEDSSGNRRRLGHITKQGNTLLRHLLGQAAQSVANSDEEWRAVGHEA

SEQ ID NO: 479485 - protein, 389 aa, unidentified
MSQPFDASKSLATLEQDNTVIAVIEMSQSKWLVAAVVPGVKRQPLKKLQADEEALLKLLNRWRTEAGQTGREIKRVVVAYEAGRDGFWLARWLRTRGVEAYVIHPASIAVSREHRRAKTDRLDTELLMRAFLGWLRGEKRHCSMAAIPAAEEEDARRPNRERENLVTERTRIANQMKAILARFGIRSFKPTLRKAAEKLDGLRTAEGTPLLENTRAELSRHLARLRVVREQIRAIEQKRLHKLAAAPAEENGPHVMVRLIARVFGVGVETADMLVNEVFARHLRDRKAVARYAGLTGSPDESGKRRRERGLARAGNARVRRGMIQLAWCFIKFQKDSALAKWFDARTADGRGSTRKTMIVALARKLLIALWRLVTTGEVPEGVILRPAA

SEQ ID NO: 479486 - protein, 436 aa, unidentified
MRKFLECCAGIDIGKREITVTILTGSAEIEPVSQTRTFGTTVQELSRCLECLLGSHCSTVVMESTGTYWVPVWNVLHEQIAVIVANPEHVKARRGEKTDPEDSRRLAERLRVGDVRGSFVPSAQIVELRDLTRRRKRLLSAANSERNRIQKLLEQANVKIGNVVSDVFGVSGQRILQALLQHPQLPPADLAELAKGRLRHKQQALIETLQGHRLNDHVRWMIQHSLDHLVFLENQLTELSQRTLQKLQPFEREYELLQTIPGIAGETAAVILAETGGNMAQFPSPKHLTSWAGVCPGNNRSAGKQKSTSIKRANKWLLAALVQSAWATVRQRGSIFKKRFYRQMQHRGRKRALIAAARSLLAAVWQVLQRMTPYDEPANEIFQERERGKKIQHHLRRLQQLGVDISTLELPPPIPSDRLRPLPNLHPFGVLGIHAR

SEQ ID NO: 479487 - protein, 365 aa, unidentified
MSSLKYVGLDVHKDSIAVAIAEGRAEVRFYGEMPATVEALRNLVRRLGTPKTLRFAYEAGPCGYDVYRTLTSLGAECLVAAPSLIPHRPGDRVKTDRRDACGLARLHRAGELTGVWVPDEAHEAMRDLTRAREDAKLAETRARQRLGSFLLRHGFRFTGRTRWSTAYFAWLTTLRLPHPIQHVVVEEYRQAVEQATARVTRLTAQLEAAVSTWELAPHVQALQSLRGVSLVVASTVMAEIGALKRFNHPKELMAFIGVVPSEATTGDRVRRGPITKTGNGHVRRVLIEASWAYRHPPRRSYALRRRQQTQSDQAKAIAWRAQLRLCGRYQRLVARGKVKQQVVTAVARELIAYMWEMDRAVAPAA

SEQ ID NO: 479488 - protein, 355 aa, unidentified
MTASYDYHIGVDYHKSYSHLVVQDSSGKTLRSGRVKNDRQSLGGFLERYRENSHAVIEATRNWMVMYDWLDDICDDVVLAHPLKVKAIADAKIKTDKIDATVLAHLLRADLVPEAWAPSEKSRELRVALRERMFYVRLRTMTKNRVVTVFDRYPEQTAQLKKLGDLFGKAGRIQLAEVNVSDIDRIQIDRGLAFIGDINERIKQSETTIRAMTKANANVKLLKTIPGIGEFFARLIDAEIDDVSRFRNAKKFAAYAGLVPSTYSSGGKTYHGKIIKQGNKWLRWAFVEAVAPAIASDAQLRAQYEQLKIRGTNKARVAIARKLLTIAFQILRDQRAYEPRGTTTTEGASTISRLS

SEQ ID NO: 479489 - protein, 426 aa, unidentified
MKLEEKEQEKSIRAWIGIDWADEKHDVSLYDIATEKQEIATIRQSPEALQEWLGQLRRRYEDGYVAVVLEQGRGGLLNALMSCEFLVLYIINPKSLSSFREAFYGSGATSDPVDAELMREMVRQNPSRFRAWRPDDVMTRSLRLLTEGRRNLVNQSTALTNQLTALLKGYYPQALAWVGRLDTAWACDFLGQWPTLQSLRASSRRQILRFYEKHPRASLDLSEQLKQIQNARALTQDEAVLESSALMVQALVSQLRPLLASIAEFDRKIAMIFRKHPDRPIFESFPGAGAALAPRLTAAFGTDRDRFQAAKDMQELAGIAPVTEKSGKKKFVHWRYACPKFMRQTFQEFADHSRRWCKWAKVEYELLRKRGKSHNAAVRALAYKWIRILFRCWKDRKPYQDEIYTKALLLHGSPLSSLLAECVENP

SEQ ID NO: 479490 - protein, 333 aa, unidentified
MVYAALDIHKRIFQAAVLDADTGELVQERLPATREALDDWATRWAGKLEAVALEATTGWRWVARELQARGFDVRLCDPGEARALGGSKRRPKTDRLDAAWLARLLAKEMLPEAWLPPEEIQYLRDRTRLRHALAQDRNRWAQRLHALLTHEGWPCGRGRLLTVSGQQWASALVLPEPARASVEAMLTVIHALDEQIELLDGELRRLARSDPRLTALCAIFGVGPVLAAHLLAEIGAASRFRRARQVVRLSGLDPVVSESADVRRRGRLSKQGSPELRWALAEAAHHACRHRSPDHDLYLDVKQRRGTQRATLTVARKLAHRAYHVLADLEQVA

SEQ ID NO: 479491 - protein, 343 aa, unidentified
MAVIIGVDPHKATHTAVAIDGGEEELDRKRVRSGAAQADQLLAWAEPFLGRTWAIESAGGLGYLLAQQLVAAGETVVDVPATLASRVRVLSSGRSNKNDPNDALSVAVAALRSPGLRPVAAVGHSEVVRLLPKRNNDIGNQRTRVVCRLHALLAELAAGGIAKEINASDVDRFLETITPSTPVEQLRYDLAAELLDDIRRLDAQLKASHQRIRAAVRASATTVTDLFGVGPILAGMLIGYTGDVTRFRNRDHYAAYNGTAPVEFSSGGRVVHRVSERGNRQLNHAIHMAAVCQLRQPHSAGRAYFDRRVAEGKTTREALRALKRHVSNAVHRQLLADARRAGA

SEQ ID NO: 479492 - protein, 342 aa, unidentified
MEKVSIIGLDLAKRSFQAHGALADGGVGFRKKLSREKVLAFFAEQPRCVVAMEACGSAPHWGRAIRDLGHNVRLIPPAYVKPFVKRQKSDAADAEAIAEAASRPTMRFVAVKAEEQQARAMLFRTRDLLVRQRTQLINALRGHLSEHGVVVPQGPANLKVLEEAVEDQTTSLPLLVVELARVFLDLIEGLSKKISELEKATAHEAARGETTRRLQTMPGVGPITALAIETFAPPMDVFKRGRDFAAWLGLVPRQHSTGGKQVLGKISKMGQRDIRRLLIIGAMAVVRAALRKGAPKGSWLQRMLARKPKMLVAIALANKMARSIWAMLAKGEDFRVPKVAAI

SEQ ID NO: 479493 - protein, 349 aa, unidentified
MLHAGLDLSRRSLEVHLLAENGSTVSTMSVPPDLDGLRGLVRKVALLPGGRQVLAVIESMNGARFVHDTLELEGWQVEIADAAKVKGLAPLACKTDRIDAWVLAELSRRDLVPSIWLPDPATRSARELARWRLHLVRHRTALKNRVHATLVTFGHPCPVADLFGLKGRDLLRRLQFPEPWLGDLEAALRLIDTLNFEIATLENELKAEGADHPYVRLLLSVPGISWVLAYTIASEIGDINRFASPVKLCGYTGLCPRVYQSGQSDHRGALSKNGPKYLRWALIEAATHAASHPLYAERYQYMARRLGRQRGKKVARVDLARRLAEAIWHMLTTGEVFAPAGLKASKAAA

SEQ ID NO: 479494 - protein, 521 aa, unidentified
MATKTKSTRNGKKRSPRRRYIGKPTGVIQQRVQEVTPQRFGIVSVDCAKRRSKWLLCDYFGRVIIEPTTVEHNAGCLTAMTQQVRIECEAEGIVDCIAAVEMTGIYHKLIVAAFQKAGIETRIVHPFASTHYRKLLHPDNKSDDNDLEAIFHAAVNGYGLSILPVGETHLALQRLSRHRRNLVKQRSRIQVQVRAMMHQAMPGYADLWEDDKLFNRSIAMPIAKQFSSADAIKMAKPKGMSVFLRKQKVRFQECTLDKIYAWSLQAADPALLQSLFTEQWKQLAEFHALLTTQVNATEIEMAHFLVKTPYILLLSATGINVISAGDLAGEAGPIEHYASHTALNGRAGLYPARYQSDEVDRTNSVAKSCNRRLRAACILVAKNLIKCHPFYRGLAAVWKQRGVATADRQCRMANRANRMVFQIVSGRQVWRGKGVDREYLLLKLREFHRTHGTPLDATVADMDAAFEWLPKVTYADEAKPLAELAGKKRQGAASIGDLLIPLLIRLGVWQQTEVESSSSEA

SEQ ID NO: 479495 - protein, 351 aa, unidentified
MDSIGLDAHKRYSQFEVLDCFGNTLSRGRIPHNRGAIHEFCSQFSPGTPVALETVGNWYWIADEIESAGCIPRLAHAAKAKVMMGNVNKTDKIDAHGLAILQHNNTLPAVWIPPHQVRDERELPRTRMAFAKLRNAIKNRIHATLAKYALSIDDGKELFCKTGRRWLENTILQLPQETQRCVQQELVLLDHIQGEISSLEDRIRQCLQETPRIQLLKTLPGVGDILSIVIDREVGDISRFSHSDSFASYCGTTPRVSGSGGKFHYGHLRKESNQYLQFAFIEAANVIVAHHNRKTWQNRHVVRLYERVRARRGSAVAVGAVARHLSESAFWILTKLEPYREPSPNPKRARA

SEQ ID NO: 479496 - protein, 369 aa, unidentified
MARNGTLAKSQELQPSFHATTEQITIGIDLGDRFSHCCVLGPDGKILTEGRLRSTPETMARHFQDLPLSRIAIEVGTHSRWVSQLLAEWGHEVIVANPRNLRMIADSIRKSDQVDAHMLARLARVDPKLLSPIAHRKQEIYPDIIQLKARDLLVKNRTRLMNAVRGVLKSAGLRVPNSGTSCFPSKAAQCIPEELKPSLTPLLETISHLNKQIYSLDKAIECTAQTRYPETNRLRQISGVGSITALQYVLTIGNPGRFAHSRDVPAYLGLTPRRHQSGSVEQQLRISKAGNKQLRSLLVQCAQYLLGRFGPDSDLKRWGTRMFERGGKNSKKRAIVAVARKLAVLLHRLWVTGDTYHPLYNVATSSVTS

SEQ ID NO: 479497 - protein, 374 aa, unidentified
MDTIYIGVDFHARQQTICYLKTETGELVTCELKHQDKEAVRAFYQQFGGPVIVGLEASGYSPWFERLLEELGCEVWLGHATEIRRRARWRQKNDRRDAELILDLMLHHEFPRLHRPAVQSREVMRMLRYRQKLIKIRTMSKNSLQALALQAGVAKRSHLFTREGQQELTAALMSPAMQWQREHWLQLLQPLNQQVLESMVWLKAQSKDNVDVARLRTHPGIGLLTSLCLAHTLQPIDRFRNTRKVAAYAGFDPVERSSAEHKRFLGISKAGSRILRHLMVEAAHVAVRKDEDLKRFYQRLADRRGRPKAKVAAARKLLIRAYIMLRDEIDYAEFRRRAVAARLARLGHGPKVPEVVIGQPASTERQEQLTRTRK

SEQ ID NO: 479498 - protein, 462 aa, unidentified
MKFFCHPKFHIMSKVSLKKQKKKHVATFPLVNIDSAGIDISDKEMMVAVPVDRDEDFVRAFGSFTCELHQIAKWLKSCKISTVAMESTGVYWVQLFLILQDYGFEVYLVNSRYVKNVTGRKTDESDAMWIQKLHSCGLLKNSFQPDNATRTLRALVRHRKSLVKGGSAYVNRMQKSLEQMNIKVHTVISDILGKTGTLIIEAILSGERSAATLAGLADRRIKASKEDMVKSLEGDWRAEHLFELKHSYEIYNYHQAKIEECNQQIEQQLLEQIADKNGGDISFLDANKTATKSGQKNQVSFDLKLYLKSLLGVDPTEIFGISEISTLEIVSETGTDMSKWPNEKHFTSWLGLAPNNKISGGKIISSRIMKKKHNAGQAFRMAANSLYRSQNPLGDYYRRIKARQGAGKAVVATARKLAVIYYNMVSKKEGFNPNQLLEYQEKYKQKKIRSLEKRLADLKEAS

SEQ ID NO: 479499 - protein, 390 aa, unidentified
MNAEGKRLAGGRLPEGVEGIARFHELAARHADDPGQVVIGIETDRGLFVAALVAAGYQVFAVNPLSTSRYRDRHSVSGAKSDPGDAKILADMVRTDRHNHRPVAADTDLAGAVKVLARAHQSMIWSRQRQANQLRSALREFYPAALAAFDDLTSGDAVEVLRTAPAPAAGAALSKTQIAAALRRGGRQRRITERTAAIQAALRTPQLASPPVIAAAMGASVSASAAVIAEMTVQIVRLEAELAADFEQHPDAVVVRSLPGLGTILGARVLGEFGDEPDRYATAKCRKNYASTSPITRASGTKRVVLARHVRNQRLADAIYLWAFAALTASPGARTFYDARRAAGDTHHAALRTLGNRLVGILHGCLAHHTVYSETTAWAHRTSPEISQAA

SEQ ID NO: 479500 - protein, 355 aa, unidentified
MNSVKYIGMDVHTATISVAVLDVAGKLIMESVIETKASTILQLIQGLRGDLHVTFEEGTWAAWLYDLVKLYVTKIVVCDPRRNALLKEGNKSDRIDARKLAELLRANLLRSVYHGEKSLRTVKELVRSYLTFGKDLTRVMNRVKAIFRSWGIPCGGKSVYNPRHRDEWLSKIAEVGVRRRAELYYAQLDALASLRQQARRKLLAESRKHRAWKLLRSIPALGPIRVALLMGIVQTPHRFRSKRPLWRYSGFGVVTHTSADHRYVDGQLERSKKPVSVRGLDPNHNHHLKDLFKGAAIQAATREGPLWEFYEALVAKGMRPEMARLTLARKIAAITLTVWRKGVAFDAKYLKPQTA

SEQ ID NO: 479501 - protein, 376 aa, unidentified
MQAAQVKGYEVNTSLYMAMELSNSKWKLGFGNGTKIRRKSIDARDRQRCLEEVALAKVKLKLPADAAVVCCFEAGRDGHWIYRWLESEGFEVMEIDSSSIETARGRKHVKTDRIDVEKLLDLLIRFHCFGLRKAFRVVRVPSVAAEAGQRLHREDEYLIRQRTRVSNRIKGLLIAQGVDTVSLRGNFTSYLERVRLWNGEGLSAELKTELTRMHAQYVVFNDQLKALAKSYAEELAADTPLAEMRRCLETLKSMGPKTSRILSAEVFGWRSFANTKQVGAFAGLTPTPSQSGDSDTEQGISKAGNRRVRRVMIEFAWLWLRWQPDSALSQWFDRRFAHGGKRQRRIGIVALARKLLIALWRYTEHGVIPEGALLKG

SEQ ID NO: 479502 - protein, 399 aa, unidentified
MDEGYEIYCGLDVGKSEHHAAALNAAGERVFDKPLPQDEARLRELFTNLQQHGRVLVIVDQPNTIGALPIAVARDCGCTVAYLPGLAMRKAADLYPGKSKTDARDAFIIAETARSMPHTLRAVDRDSEVLAALKVLSGFDADLTHECTRAINRLRSLLLQIFPALERVFPGTVLTRSLVLELFTKYAGPTGLRAAGRGNVLRWARNHSRKDPVNLIDAVFSALGEQTVTVIGTEAVELVIPRIAAQIKELKHQRAIVAEEVEKLLDDFPLSRVLMSMPGVGIKTAATILLTIGDAGTFTTPGHLAAYAGIAPVTRRSGTSIRGEFPARSGNKQLKNALFRSAWIASCHHPASKAYYQKKRDQGKKHNAAVICLARRRCDVIYSMLKHGTLFEEKPALAA

SEQ ID NO: 479503 - protein, 340 aa, unidentified
MQIATIGLDIAKNVFQVHGTGEEGQVLLRRKVRRDQLLTLFSGLEPCLIGMEACATAHHWARELKALGHQVKLMAPAYVKAYVKRNKNDAADAEAICEAVRRPTMRFVAVKSANAQSILILHRSRHLLVRQRTAQVNAMRAHLAEYGVVAPKGREHVRELVDVLNRGKDLLPELARQTLILLATMIEGLSMQIRKIEVALMAWHRADPTCRRLETIPGIGFITATALAATVSDAKVFRSGRQFAAWLGLVPKQHSSGGKQRMGGISKMGDRYLRHLLVIGATAVVRFTRRKKTTISIWADQLLERKPARLVTVAVANKMARIAWAVMVREENYRSVSAGA

SEQ ID NO: 479504 - protein, 328 aa, unidentified
MTKRTTICAGIDTGKRKLDVGLDGSGKQLQVENTPEGHKILLAWLRQHRVKRVGIEASGGYEQPVVAELRRKRFVVVVFQPAQVRAYAKFHLQRAKNDKIDAALIAACTAAVRKIHAAPDPRLLPFAEQLTMIDQINEDTARLKNRIESCRNAQIKKLWKEDIARLEKREKAELKALVASIRKHPDLAKRLGLINSVHGIGLPTAVAILVRLPEIGRITREQAVALAGLAPYDDDSGEQVGVRHIEGGRKRLRRALYTASLAASFRWNQQLIQLYQRLTAAGKEHKRALVACARKMLIFANTVVARGTPWCDEPLAVKASMAGSLSVS

SEQ ID NO: 479505 - protein, 359 aa, unidentified
MRIIGCDLHARQQTLAMLDTTTGEVVKTTLKHEGNNVREFYCNLPRPVRVGIEATGSMQWFVNLMEELGIECLVGHPAEIRAAEPRKQKHDRRDADLLLSLLVEERFPAIWLPTKELLDLRALLRHRHQWVCLRVKLQNALQAIALANGLRRGSSLWTQAGQHAIASLPLSPHAAYRRSELQAMYVHFETEIEKLNRRVEQQACERPGARLLMTHPGVGPITALATEVFLGDPARFADSKELASYVGMIPGEYSSGKRQRLGGLTKQGNPLLRFLWSEAAIHAVRRDPELKQFYRRKLIQKGLGKARAAVARKLGIRMWIMLRDGIEYNEFCRRGQMQQKSGDACAGMPEARYGAKVTG

SEQ ID NO: 479506 - protein, 322 aa, unidentified
MAKLSFGGIDVSKDRLDVMILPEERCSSVPNDAAGWADLVERLSGSSIAAIGIEASGGYERGVVRALLAAGMPVRQVNPFKLRQFARASGVLAKNDPLDARMIASFVTIMPTRPAQRQTPAAERLAEMLAIRRQLSTEKVAAENASRLLEDAMLQRLSRRRIVRLAADIDLLDKRMVEIVATDDALVHRYRLLTSMPGVGAVLACTLIALLPELGRMSRKQVAALVGVAPYAFESGTLKGRRCIWGGRAHVRQVLYMAAMSASNWNPVLKAFHDRLTAAGKLPKVVIVAVMRKMITMLNAMVRDDVVWADRLSGRHVLPTAR

SEQ ID NO: 479507 - protein, 410 aa, unidentified
MEVLHQRCAGLDVHKKTVVAAVRLVEGNKVITEVRTFATTTAGLLALADWLTQNGCTHVAMEATGVYWKPVWHVLSDGEIELVLANAAHVKNVPGRKTDVSDATWLAELLAHGLIRASFVPDGQTQELRALLRTRKQLVRERSRHIQRIHKVLEDANIKIDAELSDMLGKSGRAMLNAIVAGETDPARLAALAHPNVKSPQTKLAEALRGRVRHHHRFLLQLHLQQIDGLDASLGMMDSEIEANLAPFRTAVDIVSTHPGIGKLSANAIVSEIGTDMSRFATAGHLLSWAGMCPRNDESAGRRRSNRLRKGAQWLKTTLVQCAQAAKNKKGSYYQAQYLRLRSRRGPQKAICAVAASILTAIYHMLKNGTVYQDLGADHFNLRSKITQTQRLVKRLEHLGYAVEIQPLAA

SEQ ID NO: 479508 - protein, 363 aa, unidentified
MSHNEFKKIREPIEPQEVSPMKQEMTVLGIDLAKHVFHAVGMDNTGKIVFRKRLSRHDLMPFIAKLPMVLIGLEACGGAHYWARRFRASGHEVKLMAPQFVKPYVKSNKNDSRDAEAIAEAVTRPTMRFVPAKDVDQQDIQALHRVRERLISERTALVNEVHGLMHEYGIVMPKGVSKFRQAVVGKLESEKDKLTPLSQEMFWKLVEEFAALEEQLAYYQKKLEALATTHPECQRLMTIPGIGPLSATALVAAVSDASAFKNGRQFAAWLGLVPRQHSTGGKERLLGISKRGDSYLRKLLIHGARATLRWVGRKTDRRSQWMRQLVERRGHNRTVVAIANKNARIVWALLTSHQAYEPAKGSS

SEQ ID NO: 479509 - protein, 338 aa, unidentified
MRLYCGIDLHATNCWVVILDASFRVVREIKVPNELAAVLAVLQEHREALEGIAVESTFNWYWLVDGLQDAGYRVHLTNTWAVKKYDGLKYADDRHDARWLAHLLVLGILPEGFIYPKEERPLRDLLRRRAFLVRKKSSMLLSMHGAFECRTGERVKANDLKRWTAEEIEARLEDPTVSLGITCLLKPMQVLDEQIHTIEKVVVKRARLREEFGLLQTVWGIGKVLALTIMYEVGPIARFATVGDFASYCRCVKTDRLSNGKRKGSGNRRNGNPYLSWAFSEVAHYAARFYPEAQRYFQRKRAATNGIIGNRALAHKLARASFYVMRDQVPFDPDRLFA

SEQ ID NO: 479510 - protein, 469 aa, unidentified
MAAVMIGVDPHKASHTAVAISSAEEPLGELRVRACVAQAERLLAWAAAWPQRTWAVEGAGGTGHLLAQQLVSAGERVLDVQPKLGARVRLLAAGDVNKNDPNDARSVAVAALRSAGVQEVRADDHAAVLKIWSKRYRDLGRSRTQVVCRLHAVLGELIPGGVPKAITAARAARVLKAIRPEGAVQAARCELAADLLEDLRRIDAGIRETRKKLAAAVAAAGTSLTGLFGVGPVIAAAVIGDVRDVSRFPGRDHFAAYNGTAPIEVSSGQRKVYRLSRRGNRRLNHAIHMAAITQIRNRHSQGRAYYDKKLAEGKTPKEALRALKRQVSNAIFVCLQADARRAAARAKGPGGQQGNDSVASAAGSHPRRRLFGQATPGPGHHPTTVTRGPPPGPARSRDRAGHSSIAATLPATPQVQVERPQRSEDERPGGAARRRPHSAARKATGQTAQVKTQRPKGTSQAAERTDGTS

SEQ ID NO: 479511 - protein, 416 aa, unidentified
MFAVGVDVANGRSMVAVLDGMRNMVAKPFEVVHTAQGFAALVEKLRQLDGEVRIVMEHTGRYYESFAMSMHRAGFFVSAVNPLLIKNYQGSINVRKVKTDKADAQKIAQFALDKWTILPHYTPMDTIRYNLKTLHRQFQLASKTKTALSNNLIALLEQSYPGANRYFDSPVRTDGSQKWVDFVDTFWHVDCVARSSEHAFVERYRKWCKRHGYVFSEQKAIQLHADARQKIPLVPKSDTCKLLVREAVSQLNAVSRTVETYRAEMDRLASQLPEYETVMGMTGVGKSMGPQLMAEIGDLRCFAHQKSLVGFAGTDPIKEESGDKVSQSAPSSKRGSPYLRKTLFVIMTILLQLQPQEDPVYQFLDKKRSEGKPYYVYMTAGGTKFLRVYYGKVRDCLKAKGLWEVPASASQEVNPG

SEQ ID NO: 479512 - protein, 357 aa, unidentified
MEAQVKKIDFTGHNIFVGFDTHLKSWKVTIMTEDIVYKTFTQPPKPEVLYNYLKNNFPGGNYHSAYEAGFCGYWIHDKLVSYGINSIVVNPADIPTTDKERVQKEDKRDSRKIARSLSNGTLMPIYVPSIKTQRDRSLLRARAMLVKDLARYKNRIKSFLYFYGINIDDSFSNPESHWSNRFILWLESIEIDGGSGKEALQILISECKNLRTSILEVTRLIRQLSQTTAYQENVILLKSVPGIGLLTAMIILTELESIDRFNNLDKMCGYIGLIPSTKSSGEKERTGDITPRGHSVLRTAIIESSWTSIRNDPSLMKSYLSYCRRMESNKAIIKIARKLLSRVRFVLSNKKPYVCLI

SEQ ID NO: 479513 - protein, 420 aa, unidentified
MDTIVERPGALDVHKEQVTACVRVPAADGKGREQHVAEFKTTVRGLLALRDWLAAHRVEQVVMEATGVFWKPIWHVLEDDFPLMLVNARHVKQVPGRKTDVSDAAWLCQLLEAGLLKASFVPPKPIRNLRNLTRYRKTQIQERQREANRLHKALEDTGIKLDCVATDILGVSGRLMLDALVHGTTDPEVLADLAKGRLRAKLPALKEALEGRFDDLHALWIGAILAHIDFLDEQIDRLSDAIEEQIAPFASAVELLCTIPGVQRRAAEVIISEIGVDMSVFPTAKHLASWAGQCPGNDQSAGKRRSGKSRKGSKWLDWTLEESALAAVRTKDVYLAAQYARLKPRRGHKKALGAVKHSIIIAIWHMLTTGELYNDLGGDYFQRRDPEREAQRLVKRLEALGHVVTLQATSTSTTEEVVAA

SEQ ID NO: 479514 - protein, 328 aa, unidentified
MFFIGIDVSKAKLDCCLLLDTANYKRRTKSVSNSKIGIAELLAWCAKYNVDPSELHAILEGTGVYHEQAALALFDNGVTVSIVNPAQVKDFGRSMGIRTKTDGVDSFVLARYGASHKPRAWTPPAQEARTLQALLSRREAIVQDLQRERNRLEKADATDTPPLIRQSLVDSIAFLEKQLAKLQHDIDDHIHKHPNLKADRDLLISIPAVGPQVGNHLLAVMHNHEFQSAEQLAAYLGLVPVERQSGTSLRGRPRLSKAGPAHIRAVLYMAAIVATQHNPHLKALYQRLQDRGKTKMSALGAVMRKLVHLCFGVLKTRQPYQPNYGIPA

SEQ ID NO: 479515 - protein, 428 aa, unidentified
MNYNTQNAKIASITEKTLIVGIDVGSETHYARAFDWRNYEYTKKPLEFSNTEAGFQTFKAWMEDIAEKYGKTAVIPGMEPTGHYWFALGKFLQDSGMRPVHVNPHHVKKSKELDDNNPNKNDRKDPKTIATLVNEGRFSYPYIPTGIYAEIRSLSNLRFQTQEELTRIRNRLARWFAIYFPEYKDVYGDLKAVSGRMVLKEAPLPEDIRKLGVEGVDRIWRDAKLRGAGMKRAKTLVTAAEHSVGSTEAPEAARMELKNLLADMDVYTSRLEGLLLKIEEKLKEIPYVDKLMGIKGIGLATVSGFIAEAGDIGRFDNPKQLQKLAGYAVVANDSGKHNGESRISYRGRKRLRYVLYEAAISLIGKNAEFRAIHGYYRTRKENPLKKMQSVVAVACKVLGIFYTILTKGVDYDAGKLMGDIRRPQIQAA

SEQ ID NO: 479516 - protein, 334 aa, unidentified
MGKITTVGIDLAKSVFSVHAIDENGAVLIRKTVSRARLMAMVGQWPACVIGMEACSGAHEWARRFQGLGHTARIMAARLVAPYRMSGKNDGNDAEAICEAVGRPSMRFVPVKSAEQQAILSLHRVRQGFVEERTATVNRIRGLLAEFGFVLPNRVVEVRRGAARAAESLPPLARHAIGDLVEHLRALDARITAYERELEHLAHSNEAAERLMTINGVGPMTALATVASVGSAHEFINGRQFAAWLGLVPRQWSTGGKTRLGHITKRGDAYLRTLLILGARAVLQMAAKRDDKLSRWALAVKARCGYHKAVVAIAAKNARIIWALLARGTTFRAA

SEQ ID NO: 479517 - protein, 423 aa, unidentified
MENTAARKRKQVPEGYLIIGIDPHKKRHAAVAITQDFTTRDKFKFDNTREGLETMLRRARTEMVKSDCRGVMFAIETGGHYWRNVAYYLDEQGIPFRFINQFTLKRRREGKDLNRRENDYRDSEVAAQLLCTGEFTESKVPQGVYAELRTAHNAYRRLVKERTRITNLIKGLLDGLFPEFTRVFKDPCGLTALSVLSTCAIPSVIAGTTEDEFVATIEAKHKGRLMRKKLRALHYSARTSIGIDAGARSVSSEIAFLVEKLELIRRHIRIIGGTLISLVDETEEGKYLLSIRGLNYIAVGGLLAELGCFKAYRSAKQMIKMAGSNPTESESAGKRGSHTPMSKQGRPVLRYCAWTAVIPMLRFNPDFRAWSRQRRERPAHANPLNGREVVGAALNRLLRLAFAMVKNQTYYQVSKPELTLVAV

SEQ ID NO: 479518 - protein, 328 aa, unidentified
MFDPSAVKGHQYRTVTRPTTAEAIEAVLRPHERRCQVAFEVGTQAQWIARIVRPLAAEMQVANPSRIPWLFRDGRKNDRHDARKLATLLYLNQLPTVHLPAANISAWRALINHRRTLIKRRTMIKNQVRSILRAFGIRCPHRSCWTQKGIAWLRSLGFDEVRLLMMHSLLDALCFMNEQIDDVEAQLDRIARRQPNVALLRTIPGIGPRTAEAIVAFADGANRFPDRKRFASYFGMTPTEDSSGLFQRHGHISKRGPSVVRWVLTEAAHRVIARCPALRTFFDRIHRGKKDRYKKAIIATGRKVLTICYGMMRDQTVFDANKVMRTAA

SEQ ID NO: 479519 - protein, 376 aa, unidentified
MNRIIYVGMDVHKDTYSLCSFDSKQNYMFLETTVKADTSSVLSYIKSIEKHFINDGVLTICGYEAGPTGFSLCRDLQKNNISCVVMAPSSLPKSPDDKKRKTDKIDARNLALHLAHNTYKAVHVLTPEMETIKDLTRTRAAALKAQKRAKQNFLSFLLRKGMVYPFGGRSTYWTQKFYTWLKTLEFTNALERYSFEEYLAEVNHQMSRVSRLDDKISEIAETPSIKDDVKKLCCFSGISTLTAVSFICEIGDFNRFEKASYFASYLGLCPGVHSSGLSSQNLGITKSGNKNLRCLLIEAAQSMSHSQLCGKKSLRLLARQKNMDPLIIAYADRAVERIKKRRSSMIFRGVPINKATTAAAREMACFIWGMMTNNIS

SEQ ID NO: 479520 - protein, 333 aa, unidentified
MYALGIDISANTYTASCLSDDFSVVFFGKTFEQSTEGWTQLLTLLKTHKIRKNHMRGVIMESTGVYGERLCHFFFHEGFSVYVEPPHRIKKAFYEEDKDDPIDSRQIAEYLLRYPDKLHPWQPPNNIVEEIHLMLSTWEQLTKMQTACKNISHSLSRKQREFQHVQQVFLDLVAGIETQKSRITKNLTTITETNPLLHQQVQDILAFKNVGILIIAYLIDITNGFTEHTEYTSLSKYIGICPLKHKSGTSINRKPRSRGHGPRQLRKQFYLCAMRMRKNDPEFRKYFERKFAEGKEKRLILNNIENKVLRIICGIIKSGKPYMPNYRSIKPDT

SEQ ID NO: 479521 - protein, 343 aa, unidentified
MTFVGCDLHTRQQQVAVLDTTTGEIHEQQLPHEGTTVEDFYAALPRPVTVGIESTGYAIWFHTLLQRLGHTVLVGDAAKIRAMVVRKTKTDRRDARHILDLLRHDRFPTIWLPDPATRELRAVLMHRLRLVRIQTMLKNGVQALALNQGLVRGSKLLRRAGLAQLGTLPLPPSAAQRRDQSLDLLGTLRTHLAHLDEAIAAAALAHPEAPRLLTHPGVGPLTALATVVVLGTVSRFPDSKHVVSYVGLAPTLNASADKYRLGKITKQGSTLLRFVLGQAAAHAARLDPDLIRTYRTLAPRRGRSKARVAVARKLLVRLFIMLRDHIDYDEFRRRGRAPAAAPG

SEQ ID NO: 479522 - protein, 337 aa, unidentified
MNDAKYIGMDVHQATISVAVRDSRGNLVMEAIVETKAETILQFIRGLRGSLSVTFEEGTWAAWLHDLLQPHVTRVVVCDPRKNALLKVGNKNDRIDARKLSELLYLNKLSSVYHGEPGIRTLKELARSYIAMTRDLTRVMSRLKAIYRSWGIPCAGQQVYAPRYRAEWLAKISEAGVCRRAGLYYQQFDALAALKLLRQIPTIGLIRAALLIALMQTPNRFRTKRQLWAYCGLALRTYTSGEYRFVGGQLKRSKKVLAVRGLNINHNHDLKNIFKGAATRAASTVGPFQDFYQACVARGVKPHLARLTLARKIAATTLLVWKKGVRFDPEHLKQQAA

SEQ ID NO: 479523 - protein, 381 aa, unidentified
MEKACGLDVHKDSVFACILDEQGKKILEKRYGTLTPDLTTLRDTLVSHGCGSIAMESTSIYWMPIWHVLESDFSLKLANPYFIHQLPGRKSDVKDAHWIAECLQKDLIKGSFVPEGVLQEMRQFSRQCFRLTKSLVRIEQQLDNQLQRCNIRLSNYVSNQGNNVSLRKVIGAIIQGERDPYKLVRLVHGRIKNKHGHQVITDSLDGVLNPTDIEMLKQCMEQLDLFEKQQATSLNHLEELADQYYAREISLLCTIPGIQKYSAMCILSEIGNDMSAFGKASHLVGWAGLRPRNDESAGKIQSRKTLHGNKYLRKMLVQVSLSASRSNKTFLGKKYNQFSKRMISQKATLAITRKILVIIFNVLQTGRPFDAQRNLQAVKPD

SEQ ID NO: 479524 - protein, 345 aa, unidentified
MRFYNKEHQYYCGVDLHTKSMYICIINQQGKVLVHKNIKTNPDSLLKIISPFLPDMGLAVECIFTWYWVSDFCNEHQIPFILGHALYMKAIHGSKTKNDRIDSHKIAALLRAGMIPMAYVYPAEMRATRDLLRRRMFFKHKRSELLGHIENTRHQYLLPEFHKKIAYKSNREGIAERFPNPSTQKNIQTNLDLLTVYDQKITEIELFVTHHATEHNPNDLFLLKSIPGIGKVLSLVILYEIHDISRFPTVQDFSSYARLIKPKRESAGKTYSGGNRKIGNAYLKWAFSEAAILLIRESDEIKEYHLKLKNKHGKAKAIAILSHRLGRTVYYILKNKQAFDMKRFL

SEQ ID NO: 479525 - protein, 420 aa, unidentified
MGRLKIVYPVCCGMDVHRDFLIACIATTNAQGVTEYQSRRFSTYTGSLRELRDWLLANDCKDVCMESTGKYWFPVHNILEESCHVVVSHPKFVKAIKGKKTDKKDAQWIADLFKHDLVRGSFIPPKDIRQLRDLCRYWVKLSSYMTGEKNRAQNCLTVSNFKLDDVFSNVFGKSASAITTQLLEHPGEQFDVAPFVDGRCKTPIAQIQEAVDGIFTYEQAEKLKIIRGHMDSLERHKAELESLILEIAQNYLPQIELLLTVPGIHDAFTAIRILAEIGADMTVFDTSKHLCSWAGLTPQNAESAGKKKTTRIGKSGAYLKPLLIQVALAASRGEKHPEIYGKKQALQKRRGKKKAIVAIARRLLTAIYHILSKNEPYNPAAYIQEDKNPMARQISQEKAFEMLARMGFIVSNPSPLSSSG

SEQ ID NO: 479526 - protein, 312 aa, unidentified
MAKDTIGIDVSKDRLDAFWHSRTEARCLPNTPEGFGQLCDWLGKEEDVLIVFEATGAYHRGLERHLSLAGLPFIKVNPKQARRFAQAIGRLAKTDSVDARMLARMGVVLELTPQDVEGEDVHDLRELLTARRALVKDQVTAKTRLATALNPLVREQLGRRIEDIGADIQALDEIIAQIAKQRGTLEERIRHLMTIPGIGRLTATTMLIDMPELGYLDGKKITALAGLAPMTQQSGKWQGKERITGGRSSIRRAIYMPALVAIRFNRDLHDKYQQLLKAGKAKKVAITAIMRRIIILANTLLRERRDWLPDRP

SEQ ID NO: 479527 - protein, 343 aa, unidentified
MKHIGFDIDSTTTHISVFSERGREIMHTKIATHEADLVAFMMSIAGPKRVALEESQMADFVTRAIEPYATKVIRCLPQHNRLISESEQKYDRADARALAELLFLNKLKEVHHAPWEYRQLREGVRAYWTASRDLSRHKSQLKAFYLYNGVHCTGEKVYASHYRAAFTKQAEKRSANMQILNQLYLQLDFFRTRKAAHIKILKELLHPFKQDERNLKTYPGVGLIGACSLIAYLENGWRLKNKRKLWQYCGVGVRRHESGGKGHRKASRQGNRYLKNAVMTAAATIANRRMADNALTTMWRAGIAAGIPGDRMKRNMARKVAVLVQRSLRFKEEYRDDRVTTTS

SEQ ID NO: 479528 - protein, 410 aa, unidentified
MKVAGIDVHKKVLMVVVVDASTPEEKPARRRFVTMPSELHRLLTWLREQGVEEAVMESTAQYWRSVWLELEPHMRLHLAQAFSNRAPRGRKHDFKDAERLVRRLIADELILSFVPSGEQRIWRSLTRMKLQLTRDRVRLQNQIECLLEEMRIKLSIVVSNLLGASGLRILHALANGETDPKRLAQLGGERLQCTEEQLVDALTGRAQPVHGAMLALQLERLQLIDQQMERLNSMIAAAMKPQQDAVMRLAEVPGLGVDSAQQIIAEVGAQAGTFASAAELTSWVGTCPGKEESAEQNHSSRSAKGNKYMRRVLNQAAHAAAAKKGSHFQIVFRRLLPRLGYQSAIWAVAHRLCRLVWKILHEGVRFIEKGAEVHPRDKKKRAQMLARALRKLGYEVTITPLNQLVPKPAV

SEQ ID NO: 479529 - protein, 389 aa, unidentified
MFCHMARLQNCPPRLKLVLSDGVDGSTQSASQCAITVVSETHIEKEPSTMDITTLGIDLAKSVFQLHGVDAQGVIVLQKKLRRGAVVKFLSKLEPCLIGIEACATSHYWAREIAALGHDVKMIPPAYVKPYVKRQKNDAADAEAICEAVTRPNMRFVPVKTEEQQAVLVLHRSRDLLMRQRTMILNAIRSHCAEFGIIAAQGARKVSELVTKLRNDDTLGVPEVGVSALLSLASQLDCLEQEVRKIEHQLLAWHRQNAASQRLETIPGIGLITATALAASVPDPAVFKSGRQFAAYLGLVPRQNSSGGKDRLGRISKMGNGYLRRLLVVGATSVTRRAPTIDTRTGTWVRSLLEHKPTRVVTVAIANKTARTAWALLSKGESYKAVPAI

SEQ ID NO: 479530 - protein, 360 aa, unidentified
METIHDTSLSFENQNFFIGIDTHKKQWTLNIVSMNMVLKKRLSIDPYPSVLLNYMKRHYPDGNYYAVYEAGFGGFWAARKLNDLGIRCIVVHPSDVPSSQKERLNKNDRVDSRKLARSLSNGELMPIYVPDKIAEEYRYLNRHRLKTIKDQTRLKNRIKSVLHQFGIDLPLAYQERRWSGAFINWLITIKFDTEYAQFAYDDLVDQYIETRDRITKLLKKMRLMAKEQAPFNSLIPLLLTVPGIGFITAMTLATEIIDMNRFKTLEHVASYVGLIPSIQSSDDTETISGISPRRNKYLRTMLVEAAWTAVRKDPALTMKFNHLSRRMNRNKAIVRIAKILLNRIRYVWKNQKPYVLSVVN

SEQ ID NO: 479531 - protein, 295 aa, unidentified
MAGAERVQVDNNSEGHRSLLAWLRQREVERIGIEASGGYEQAVVSSLRADGFVVIIFQPVQVRAYARFVLQHAKNDTIDAALIARCTAAATDIREPPDARLALLAQHLTMIEQLTEDVGQLKTRREACREERIREFWKREVDRLKVLQNSELKQLVAAIRAHRDLSHRLDLIASVDGVGLRTAVAILVRMPEIGRVTREQAAAIAGLAPYDDDSGLRRGSRHIKGGRQRLRQSLYAAALPAVFYWNPQLKAFYRRLLAAGKPHTLALVACARKLLIFVNTVVARGTSWRSSAVTT

SEQ ID NO: 479532 - protein, 340 aa, unidentified
MEEYDGREFVGIDLHRRRSVIVRMTPDGQRIGPAVRIDNDPFELAQQVASWGESPEVVLEATYGWYWAADVLADTGANVHLAHPLGVKGFAYRRLKNDERDAADLADLLRMGRLPEGWIAPPEIRGLREAIRHRSKLVALRSGLKAQVHAVLAKQGVRVPMSDLFGVGGQKLLDELQLDAPFSARVASLRRLIDAFTFEIDILTKRNSAQLKTHPGFQAIQAIRGVGPVLAAIFVAEIGDVSRFARPQQLCSWAGMTPKHRESDTKVHRGRITKQGNPLVRWAAVEAVQTLREGPLGRARVRIGERRGANIGKVAAARKLLTLVFYGLRDGHIRCLAPTA

SEQ ID NO: 479533 - protein, 438 aa, unidentified
MWWSSQWLLYLTLKGVLTMKVVYQTCCGVDVHKSFLVATIIKTTSGVEPSYQKKRFSTFNNSILQFKNWLIENQCRDVCMESTGKYWVPVFNLLEDDINVTIANPKWVKAVKGNKDDTKDSKWIGDLFRLGLVPGSYIPCKPIRILREFTRYRYKLTSCRTSEKNRYQNALTVCNVALDSVVSDIFGKSATSVIDYLIERSDNSINHEEIASRLLRSLKKKSDSVIESIEGYQMTDSQKYRMRLVRAHLDYITSTINDIDTMLDSLIAPYENAVQLLCTIPGVDRNSAITVISEIGTGMTPFSNSKRLCCWAGLTPGNNESAGKKKSVRITRAGVYLKPALVQVAHAAVKSDKSPYYKQKYERIMKRRGKKRAIIAIARMILTAIYQMLSTGEAWNPTDLYKIDIPEPLKEKQKEKAIKQAKKLLIREGILSESQLAS

SEQ ID NO: 479534 - protein, 385 aa, unidentified
MSRSKFDPRRSLVALDQHKCLIAVVELSLSTWLVGGIVPGIARDPLKKLTPPDPETLLRILYRWRDEAVKAGCSITRIVVGYEAGRDGFWLARWLQAHGIEAYVMHPTSIAVSREHRRAKTDRLDVSLLKRSLLGWLRGEEKHCSMVAIPTVEEEDAKRPHREREQLVGKCTGTVNRIKALCIRHGIRGFKPKLRNAAQRVCTLRTPAGEALPPNTLAELQRELEHLRFIKQQIKQIEQARLQQLEQTPQQALNATRRDLLRVRSVGIETADLLTSEVFTREYRDQRAIARYVGLTGSPDESGSRRREKGLAKAGNARVRRGMIQLAWRFLIHQKDSSLVQWFEACIAAGKKRKTMIVALARKLLIALWRFVTLGEVPEGVILVD

SEQ ID NO: 479535 - protein, 350 aa, unidentified
MIIGGLDLHRAQITYDVLDTESGEVRRGQIAPADRPTLREWLGRQPHERGSFAVEATTGWLFVVEELARAGHEPHLAEPAETARMRGPKRRAKTDPLDARRLRTLLQQWQLPESWIPPAHIVELRHVVRLRKALVDERTAWLQRIQATLYHHGVPRPRGTLHGRDTRRWVEQVPLPWGARMAIDIALRCADGLSAQLDIVERWLRCYAERQPGCRALMAQYYGIGPILAVTIIAELGDVARFHNGREVVRYTGLDVTVFSSDGHRSDGRLSYQGPGLLRWALVEAAQRASRSQSPDHAYYAQVKERIDGGRAALSVARLLAKRIRYTLLALGDEALAPVSDLPDIHSFAA

SEQ ID NO: 479536 - protein, 340 aa, unidentified
MNEIATIGLDLAKHVFQVHGVGASGVTVVRKRLRRSEVLAFFTRLPRCLIGLEACATAHYWARELQAIGHEVRLMPAQYVKAYVKRNKNDAADAEAICEAVQRPTMRFVPVKTAEQQAALLLHRGRERLVRQRTALVNALRAHLAEYGVIAPLGLRNVARLIAIVRDEIDTRLPAPARQVLEVLATQVEQLEAAVAALEKQLMAWHKANPVSQRLATIPGIGPIIATAVAATVVEASGFRSGREFAAWLGLVPRQHSTGGKARLGGISKRGNRYLRRLLINGASANLLRSKATNADPWVIGLRRRRPSLVVAVALANKTARIAWAVMHRQENYQRMAAAA

SEQ ID NO: 479537 - protein, 381 aa, unidentified
MKDVSIFVGLDVHKDSIDIALVEGDRNATVRFYGTIGGDLTDLEKAVRKIKKSHPGATFHFVYEAGPCGYGIYRYLTKAGHECMVVAPSMIPKRSGNRIKTDRRDAIMLASLHRAGELTAVYVPRAEDEAMRDLVRARQDAVKAERVAKQQLKGFLLRHGVKNAGPGDWKPSYMKWLAEIKMPDPTQQIVLQDYLNTVKDCTERKMRFNTQIWDVLPSWDLAPLVKALQAMRGVALMIAVTVVAELGDLKRFDSPRQLMSYLGLVPSEHSSGGTRRTGGITKAGNGHVRKVLVEAAQTYRLPARISKILLERQEGLPKEIRDIAWKAQVRLCGRFRKMVARGKKHQTVVCATARELCAFMWAIAREVTTISSPVATGGQQI

SEQ ID NO: 479538 - protein, 445 aa, unidentified
MKKETKAFPVLYPNACGIDISSKEHYVAVNPLMDPKPVRAFGAFTEDLYAIAQWLKQCKVETVAMEATGIYWVSLFLVLEEEGFEVILVNAKHVKNVRGKKTDVKDAEWIRQLHSCGLLSASFQPDGFTRQLRTYMRHRKNLLEMAATHIRMMHKALEQMNVKLQHVISDITGKSGQAIIKAIIDGDTNPDTLISHLDRRIKASHEEVKKSLKGIWKKEHLFELKQSYEMYHSYNDKIKECDKEIEMLLRQHPASGQPDKQMPGKAKPKSNKNNVSFDASSILYAITGQDLTAIYGINDSNALEILSEIGFDMGKWPTAKHFTSWLNLAPNNKISGAKVLSSKTQKKKNKAGLIFRLAAYAIQRSKNHLASFFQRIKAKHGAPKAITATARKLAVIFYKMLKDNVPFNPPSIEEYNQSIREKQIQGLTKKAHKLGLKLQILEVVS

SEQ ID NO: 479539 - protein, 328 aa, unidentified
MSDVIVGIDVSKETLDANSARGQRKQGRIFANNPDGWNLVLSWLKALSSKQAHICMEATGRHSLGVALALHDAGHVVSVVNPAQIRDFARTKLGRNKTDKVDAALIREYAELFKPGPWTPPSTAMRRLCELQTIRAGIVSNRAEWKNRIGSGLADATATRLAAATIEHFTTQLEAIDKAIAETIDQDAELRGRRDLLLSVVGVGETLAASLLAEMPEPGVLRRSGEIVAYAGLNPSHHRSGTSIDRPTRISKIGNATLRSSLYMPALSAMRFNPAVKALVARLKTAGRLKPKQIVVAAMRKLLVICFGVLKTGRRFDPAIAMPASAPK

SEQ ID NO: 479540 - protein, 406 aa, unidentified
MLFVGDDWAEDHHDVEVQDEAGRRLGKAKLQEGIAGIARLHELIAEQLEQGAEAEQVVIGIETDRGPWVQALLAAGYRVWAINPLQVARYRERHSVSGAKSDAADAHTLADMVRTDRHQLRPVAGDSDLAEAIKVVARAHKTLLWERTRHMLRLRVALREFFPAALEAFTELTAADALELLGRAPDPVSAAGLTTAQITAALKRARRHHAPDKAQAIRAALRAEHLTQPAAVVTAYAATVRAQVAILATLNAEIARMEEQVAAHFGRHPQVEIYRSQPGLGQILGARVLAEFGDDPTRYADARSRKNYAGTSPITRQSGKKKLVLARYVHNDRLIDALGRQAFAAMIASPGARAYYDQLRGRGVGHHAALRQLANRLVGILHGCLKTGTTYDEATAWSHREHKAAA

SEQ ID NO: 479541 - protein, 391 aa, unidentified
MILVGIDVAKDKHDCFITNSDGEVIFDPFTIANNKAGFNDLLKKIQSVSKDPSKVKVGLEATGHYSYNILGFVLDKGFPTYVINPLHTNLFRKGQSLRKTKTDRIDARTIANMLLWDQSLQPYSLESYHNEELKSLTRYRFSKVQERSKLKTSVARLVNILFPELEHLVPTLFTVSALALLSELPGASYVADCHLTRLTHLLQEASKGHYGREKAIEIRDAAKNSIGSVMPAKSLELKHTIALIRILDDEIREIESEIKTLMDKTNSTITSIPGINYRMGSMILAEIGDFKKFKSPDQILAYAGLSPSTYQSGQLTSSYAHMEKRGSKYLRYALFNAAIYVCHWDPVFKAYLDKKQKEGKHYYVAISHAAKKLVRLIYAMEISGRPYFKVA

SEQ ID NO: 479542 - protein, 425 aa, unidentified
MNYKQNEKINQVKESTLVVGIDIGSTTQYARAFDWRGIELGKVFTFSNSREGFESFKAWMQHLQDKYKKLDAIVGIEPTGHYWFDLGAYLEDEGILLVMVNPYAVKQTKELDDNSQSKNDRKDPKVIAKLVTEGRYSAPYTPDGVYADLRIMVANRKRLIREMTQIKNRFARWFAIYFPEYTDVFGDYEAQSSMLLLKKVCTPEAIVELGAEKINQIWRDAKLRAVGMKRATTLCETAKRSIGLKKGSSAARYEMKLLLEDYEYKKAQLDAVMEEIEKLCRKIPESEQMLAIKGIGVITVAGFLAEVGDVRRFESPRQIQKLAGLSLRENSSGKHKGQTTISKRGRSKLRAVLFNAAIPLIAKNPEFKSLHEYYTTRANNPLKKKQSVIAISCKLIRVFYAILANGVTYDAQKMLSDIHRQPQAA

SEQ ID NO: 479543 - protein, 407 aa, unidentified
MPEQVVTTHVVGIDIGMESCTMACLTRDKRQIIKSTPFANAVQGFDWLFERLEGLGVVPKQILVGLEATSRDGENLVQALLKRGYQVCLFHPAQMHAFAQQRGLRAKTDQLDAVTIARALLSGEARFGYVPNEQVATYRELMRLQHQLSDDVVRYKNEIHALLVVLFPEFTQVFVDPTRPTALAVLKRYPSAQAIAQTEVETLSTFLHELAPRHYGRPTAQELVRLAKASISSGVAVAARSSSLRILCDQLEHTQTNLEQLQREIDQLLDQDPKAKGMLSVPEFGPTTVAVLRAELGDLTRFTRIDQVVAYVGLDLQVKQSGKWKGQTKLSKHGSGRVRRILYLAALRSIHLETSPFGAYYQRLVARGMKKGMAVVAVMRKMLSVAVHLIQTEERYDPGKVAVQAGS

SEQ ID NO: 479544 - protein, 465 aa, unidentified
MSCKRKSKRPVQAGRPESIPILNPNAAGMDIGADEIYLAVPADRDGQPVQRFGTFTGELGRLSEWLQQCRIETVAMEATGVYWIPVYQILEAAGFEVCLVNARYFQNVPGRKTDVSDCQWLQRLHSAGLLRGSFRPAHEVCVLRSLTRHRDNLIRLASTHVLHMQKALDQMNVQLHHVLSDITGLSGLAILDAILAGERDPRVLAGLRDGRVKASEETIVQALTGDYRAEHVFALKQSLAAYRHYQKLMAACDLEIEQQLKRFDAKVDAKAKPLAPPKVRRRKIFSNEPNFDLRSHLYRIFGVDLTAVPGISVLTAHTILSEIGPDISKFRSAAAFASWLGLCPHNDISGGKILSVKTRRVNNRAALAFRMAANALFRSQSPLGDFFRRMRAKLGAPPAITAAAHKLARIVFHMLTTRDAYDEAILKKNERGFRARAEARLRAQAKALGYSLVAAAAQTDHSKTA

SEQ ID NO: 479545 - protein, 354 aa, unidentified
MSQKLDSEIAVIGIDIGKNSFHLVGQDRRGSIVLRQKWSRGQVEARLANLQPCLIGMEACVGAHHLSRNLQALGHDARLMPAKYVRPYSKGEKNDYRDAEAIAEAVQRPTMKFVATKTAEQLDLQALHRVRERLVGQRTSIINQIRAFLLERGIAVRQGLHFLRAELSTILAKRTDVLSPRMLRVIEDLAGDWRRLDERIDALSEEIMTVGRQDKGCERLMTVPGIGPIISTAIVAAIGTGDAFAKGRDFGAWLGLVPKQMSTGDRTILGSISRRGNRYLRKLFVQAAWVVLAKITPEGWERYGLKSWIEAAKQRLHRNVLAIALANKLARIAWAVLHKGRAFECVKTNAPRAA

SEQ ID NO: 479546 - protein, 457 aa, unidentified
MNANSARLKLVTKIRISLLLIVLQRPTKGGDNMKNNILSTLFVGIDVSSKTNVLCALDFQGNKLLNLKALNNNPGAESMSKSILDCLNSNNLKYAVIALESTSIYSIHVANFLSSHENLALFEPKVYCLNPKTIANYRKSFVDMDKTDPLDAYVIADFARCGRITSSSWRGSQFLALQRLTRHRLHLVECITREKTYMVSNIYLKFSQLAVLDKEDKPFSNNYGATSAAVLTEFLSLDDITYSSIEDLVDFVKEKGKNRFSNPQATAKLLQKAARDSYRLDKVLYEPLNVSIASSFNLIKAFESEVKTIDKAIEKNIKGINTTEYQSLRSIPGIGPVLASGILAEIGSINAFNSHNSLAKYAGLTWRVSQSGDYTSDDTNMTKTGNKYLRYYLIEAANSVKNNSPEYKEYYSKKFGEVTTHQHKRALALTSRKLVRLIFGLLTKNQIYSSNKVGEIQ

SEQ ID NO: 479547 - protein, 394 aa, unidentified
MILVGIDIGKNQHTFSIIDKGTGEILLNPSVFDNNQNGFMFLIKKLSSYSKSEILIGMEDTGHYHFALLKYLLDNRYTVALINPTTTDLTRKIQGGITKNDPLDSITICDVISSNQRKKPYRVTKVNSFDLYEQKQLTRHHHNLKEELNIYKNRLQKCIDIVFPEFNSLFKSKYGIVYMSVLKNFSSANAIANADIRSIRKCFEHKGRGGRISLSAEQLKTAAKSSIGIPSTAEEIQIRHLVCQIELLEEQISEIDKRIEEFSVQNNSTILSIPGISHFSGTSILAELGDVCNYQKSSQIIKFAGVAPYHYQSSQFTAQHTSITKKGSRYLRKTLYQIILPVINNNEVFKAYYNKKLAEGKGHRCAQGHCIRKLLRVIYHLLTTGQQFNPELLV

SEQ ID NO: 479548 - protein, 345 aa, unidentified
MEIRVIGIDLGKSVFHLVAADARGQVLQRKKLSRLQLLRYTGPLRSCLIGMEAGAGAHHLGRRLRAQGHDVRLMPAQYVRPYVKSSNKNDTVDAEGIVEAVQRPTMRFIPLKTPEQLDLQALHRVRDRLVARRTSVINQLRAFLLERGITIRQGRRHLERQLPEILEDADNDLSARMRALLQGLRDEWKTLEVDIARVDEEIAQLAAQDDACQRLTEIPGIGPLVATALVAAVGNAAAFAKGRDLAAWLGLVPRQYSTGGRTRLLGISKRGNPYVRRLLIHGARSVLISSRRERYSFDRWLGALQARAHPNVVVVALANKLARIAWAVLTRREHYRATVPAHASA

SEQ ID NO: 479549 - protein, 369 aa, unidentified
MKKDTTYVALDDSKNSLVAGLLRPEAEVPELRSIPNAPRHLRRFFDRLKREGPVVACYEAGPAGYDLYRQLTALGVPCQVMAPALTPRKPGDRIKTNRRDAAKLVRAFRAGDLTPIRVPDEAQEAVRDLLRCREDVKEDLLRWRHRLLKFLARHGRVYREGRHWTQRHWAWLRGQRFADPVLGRTCQEYLCTVEQLLARRTDLERELAAIAQQAPYREPVGWLRCFRGIDTLSALALLIEVGDFQRFPHPRQLMAYIGLVPSEASTGDRARRGSITKAGNTHVRRVLVEAAWHYRHPPRLGKALTRRSQGQPAAVLAQAWQAQRRLHRRYRHLVGHGKRPPVAVVAIARELVGFLWAVLARPAPLAQAA

SEQ ID NO: 479550 - protein, 309 aa, unidentified
MKEELVYLGVDIAKSYLDAAIGDERRRFANERIGHRELIKWVKQLKAPVQVICESSGGYERALVQALVGAKLKVSLVQANRVRQFARAAGILAKTDRIDAEVLCEFGRRMRPQTVTAARLEQERLRELESQRRHLTHLLVMEQNRGARVSDASIQRLNRRLINQIKKQIEHLDLLIKGYIDQSHELSAKAAKLTSISGVGARTAALLLAQLPELGQLNRREVAALVGVAPFNRDSGKMRGKRAIYGGRRPVRHGLYMAALVAAHHNPILRAFYLRLRAAGKPGKLAITATMRKLLIVLNSALKPDLNYT

SEQ ID NO: 479551 - protein, 339 aa, unidentified
MNEDTVIGLDIAKQIFQVHAVDDRTGEIVRTRLRRNQVLEFFARQAPTRVALEACGSAHWWARQLSALGHRVTLLPPRAVRPFVLRNKTDAADAQAIWTAAQQPGLKAVAIKTPQQQSILALHRLRSQLLKMRIMQSNALRGLLYEFGVILPESYRALRQQLPARWADLERELPAFLLESLREHWTRVGELDTQIAALDRRLERICEHDPHCEALSAILGVGVLTATASVAAMGDPRSFRSGREFAAWLGLVPRQTGTGGRIRQLGISKRGDAYLRTLLMHAARAVIVRRPHSPWLSALLKRRPFNVAVAALANKLARTIWAVLAHGRSYQPPTSAAVA

SEQ ID NO: 479552 - protein, 403 aa, unidentified
MTYNVVFGIDVSSKSSTVSVLIKRNEFKHFTIANDLVGFNELLEQLQCYKHPVVIFEATGVYSLPLQSFLDHHNYDYTRINPLSAKKLMDNNLRHLKTDRTDAHNLAKIQCDVPQPLTPKQDYRYHEMQNASRFYEELTRDLVKYKNRLHRALQSTFPQIEQISSSRSGEVYWHIVDLFPHAKFVLDSSYDQIASQLVKIKGIGASKANQVACSLQSLAQRTWYYDDCDSITVELIKYCIEHLLQIEQRRKHILAYIKQIAPNPKDVQIYLSVPGIGKKTALRIYAELGDLRRFNNANQVDAFIGIDPGESQSGNTDKHLPITKHGNAIARKIMYRIITQMESAKKTKPCHITDYYEHKKQLSQTKGHKKAAIASMHKLIRTVYALIINDQSYDYHKALRNQR

SEQ ID NO: 479553 - protein, 379 aa, unidentified
MPSENLVYVSIELSVSSWLIAARLPNTEKLRLHRVAGGDTATLLTVMAELRSRASARLGRPADVACCFEAGRDGFWLHRLLTAHGIAAYVLEPTSILVNRRARRAKTDRLDAEGMLRVLAAWLGGDRQVCSMVRVPSPEEEDARRPHREREHLVQDKLRIENRIEALLFTQGIRGRPSLRSWERDVAELRTGDGRALPQLLRTELDRLRRRLVLVLELIRELEADRAKALKEAETADMAVNKIITLQRIRGIGENFAAVLVREVFYRSFDNRRQLASYVGITPMPYQSGGMDRDRSISRAGNPRARTTMIQLAWLWLRYQPESALARWFRERVGTLQGRTRRIAIVAMARKLLIALWRYVETGVVPDGCAIKAETAIAA

SEQ ID NO: 479554 - protein, 350 aa, unidentified
MTIGADAYTHVVGVDTHSRTHTYAVLDTRTGAVDATDTFPTTVAGMRRAIAWIGHRTSQASTLLVVECIGSYGAQFAKLADQTGYPVVEPFPIAAAVKAGHGKSDPLDAAWLARSVLGARTDRLRHPRDDDGIRAALRVLIDARDMITADHTRTINTLTALVRTIDLGVDARRPLTKTQITQITAWRHRGEPIAEATARREAVRLATRITAMDKELADNRARIDALVHTSQVAPLLTHVGIAAINAAVILIAWSHPGRIHSEAAFAALAGVAPIPASSGNTTRHRLSRHGDRRLNRALNSIVLTRLRYDPATRAYHDRRLAEGLTTREIRRILKRYTARQIFRQLAHTTT

SEQ ID NO: 479555 - protein, 418 aa, unidentified
MKSNKTKKVTKINSKTLIATLDIGKNVQYGYFRAPNGNDIKPFAFYNSKKSFNAFWAKLVEFKNKAKLEDIVIGFESTGPYAEPLFHFLRKKPVKLVQVNPVHTKRIKELTGNSPNKTDKKDPRVIADVICLGHALTLVVPEGPAAELRRLSQARERAIKTRTAMINQLQHLMFVIFPEFFTVLNISTKTARYFTKHYTTPEKIYALGLDSVSQIMKKVSRGKLGQERAKQLHEAAADSVGISEGKHSIVFEIEHLVARIEAEDQFVDCLEQQMCDYLQQIPYSQSILSIKGLAEVTVAGLIGEVADFNKFDTISEVMKLAGLDLYEISSGKHRGQRRISKRGRPLMRKLLFFAAINVVKSKGIMHKKYQQMLDRGMLKMKALVAISRKLLAIIFALVRDQTRYVENYSNSNHYKLAA

SEQ ID NO: 479556 - protein, 509 aa, unidentified
MNLREWRWFASRRSVTAQHYDAPARAARWKDWFRLVTCALIGEPYASRWRDLTSSDPSRAPGVDPKPAKPMTTASLPVLDPTAAAIDVGSEQLHVSIAGGPPKVFGTTTGQLHEMRDWLKSQGVRSVAMEATGVYWLCPYAVLEQAGLEVVVVNGKYVKNLPGRKTDMKDCQWQATLHAHGLLKPGFVPPAHIRRLQDYLRVRTDHITMAGSHEQHMQKALDRMNLKIHEVISDLTGMSGLKMVEAILAGERNPVALLVLCDPQVQRNKAGRLRAALEGDWKEEHLFALRQAYELWQFYQQKIAECDQAIAKVLQDIAGPDDPAHPAPPAAKRGGVNTPQIAGLHGLLFRLCGGKDLTVLPGVADNVLLQLLAEVGTDLEKHWKSEKHFTAYLGLAPGSRQSGKRKGSQRRSRNRAGRLFCVIARSVGRSVDKGLGGFYRRLKGRRGGLVANLALARKLAELFWRLMVHGIAYVEQGLKKYEEKVARTEQLLLQKLARKYNLTLQPKAA

SEQ ID NO: 479557 - protein, 362 aa, unidentified
MEHIAIDLGGRESQVCIRSSEGTILEERRVATTRLGVALKRRPPSCVVLETCAEAFAVADQALALGHEVRVVPSTLVKALGVGARGVKNDLADARNLSAASCRMPLPSVHVPSAEARRRKAVCGSRDALVGARTRLIQTVWGQLRATATRPRSGTPETFPARARTALGGTAPPHQESVLVAIETLTTAIRAADGAVRALAAQDPVCARLMSVPGVGPVTAVRFVAALDDATRFHGAHQVASYLGLTPGEHSSGDHQRTTHITKAGSAAVRRCLVQASWVARRHAARDPLVQWSLQIERRRGKRIAVVAQARKLAGILFAMWRDGTRYAPQRGALPPPAPPPVDLHDVIPLCELATEVSAPSD

SEQ ID NO: 479558 - protein, 408 aa, unidentified
MQLPPMHKRAMALDVHQAKISACAIVEHDDGRVEVTMREFGAFKRDRRALAQWALEIRPEVVVMESTGVYWKSPFAALESVGITAWVVNARHVKAVPGRKTDIADAQWLATLARAGLLRASFIPPLLMRQLRLVARQRQKLVGMCSAEKNRLHKVLVDAGMRINVVVSDIHGASARAMVKALIADKPMHEVLDCKGRLRASRDELFEALSTEQFSAVHRFVADEIVQHIEQIEQRIARLDAYLLEGLKAYGPQLNLLQTIPGIDLQGAAMLLVEIGADMSPFGSAERLASWVGICPGNNESAGKRKTGKIRKGNAWVRRLLCEFAQAAARTRCALRAKFEALAIRKGHKKSIVALAHKMLRTVYAMLSTGTHYQDKTVDYEALSVARNAPRWIKMLRKHGFIATPAAA

SEQ ID NO: 479559 - protein, 379 aa, unidentified
MEIITRNEKILYIGIDVHKDTYSLCCFDFFRNELSDEMTIKATTKAVIKYLEAIKKKHREEILFACGYEAGPTGYGLCRGLQKAGYGCVVMAPTTMSNPDGKRRVKTDRIDARAIARILAYKSYSQVHLPSEEMEALKEYTRARDAKKRMFKKAKQELLSFLLRNGKSYPESGNYWTEKFFKWVKTVQFSEKWMQEAFNEYLAEVYSLKAKIELMDMKIREIAELEIIKDKVDKLVCFSGIDVTTAVETVVEIHDFTRFATAAQFVSYLGLCPGEDSSGKTKNMLPLTKAGNKRVRALFCESAKAIKRTNPYGQKSKRILERQKNASPEIVAYADKATKRIRTKMKHLEERGKNYNVSSAAGARELACFVWGMMNGKIA

SEQ ID NO: 479560 - protein, 312 aa, unidentified
MPTNPPHYVAIDIAKDSLQIQTDHAAWSVPHTATGHRQLLERLQPLGPVQVVCEASGGYEQPLLVFLHQNGVPVSLLNPVRVRAFARSEGQRAKTDPLDAAMLLRFAHEKRPLPTPPPAPQQAALAAWLDRRAQLSEQLAREKNRLQKSPVLLHPGIRAMIAFVEDQLAEVDRQLHRVVQADATLRDRAAVLQSVTGIGVVTTWSLLAYLSEIAATDWHRNQLVALAGLAPWNRDSGKWKGKRSISGGRGKVRRCLYMAAQSAAQHNPVIREYVQRLIARGKPYRCAIVAAMRKLLIHLQSLLKHHHYALAS

SEQ ID NO: 479561 - protein, 394 aa, unidentified
MLYLGIDIAKNNHVASLINEDGKTLFKAFSFSNTSDGGEALLSKLNSFTSNTSNFIIGMEATGHYWLALYSFLYDNGFTIHVINPIQTDGWRKGTEIRKRKTDIIDSLLIADLIRYGSFIETSLSHENMFSLRNLTRFRSYLVQSISDLKRKVISVLDQVFPEYQSIFSNVFGKTSKELLLQFSSPIDFEDISTESLAELINKLSRKSFGDTKANLIKSKSKNSFGVTFSKDSFTFQLKALIQQMNFIESQVKDTEKEINSLMSLIESPITTIPGIGNIIGATILGEIGDIDKFDSPRKLVAYAGIDAVVSSSGEFQATNTVMSKRGSPYLRKALFQAALVASFNDPVLNAYYLKKRGEGKHHLTCVGAVSRKMCNIIYAVLKNQSPYEIRITE

SEQ ID NO: 479562 - protein, 345 aa, unidentified
MELHTIGIDLGKTVFHLVGLSLRGEVVVRKRFTRKQLLHFTANLQVELIGMEACGGAHFLGRALRAQGHAVRLIPAQYVKPYVKTNKSDYIDAEAIAEAVGRPTMRFVPIKTDAQLDMQSLHRVRERWVMRRTAIVNQIRSLLLERGITLRQGRHYVDAALPRILEDADLNLSGALRMLLAQLKLELEQMALRIDEADSVLNKNAQENEDCQRLVAIPGVGPVTATALIAAIGNGAAFRKGREFAAWMGVVPREHSTGGKQKLLGISKRGNSYLRKLFIQGARAVLQHRTKQSSGLSAWLSQLAIRSHQNVVAVALANKLARIAWAVLAKQETYRPAVLTSASAA

SEQ ID NO: 479563 - protein, 330 aa, unidentified
MIDEGWTPADEDGLAMLVGHLGPDAVACLEMMSGAAWVRDQLTAAGWTVQIADARKAKAVGSLAAKTDKLDARVLAELVRRDLVPQVHVPTFADRELKEHLGRRMHMVRLRTAAINRAHGVLSQFGVTLAFKRLRGDDRELLLIDRGVPEVWRRSVDEAVAVVSMLDQRLIGLEQQLRPLARADPRVALLVTIPGVGDLLGLTIASEIGEISRFASARKLVGYSGLTPRVYQSGQKARTGKLSKSGATMLRWAAIEAAQQAWRPSNPWHQLYLDVKQRCGGKGNPAKAAVARKVLIAVWHVLALQQPFIPSRPRGADAPVPASSSCVLAA

SEQ ID NO: 479564 - protein, 371 aa, unidentified
MKRILYVGMDVHKENHTLCCYSVDDDELRYKQTIKPDYKMILRYLEGVRRRYTEEIEYVCGYEAGCLGYTLYHQLTERGVKCVILAPTTMGITNTSRIKTDKRDAGNIARCLAFHTYSEVHIPTEEDESVKEYIRMRDDQKKALKVNKQQILAFVLRQGYRYDCGKNYWTQKHVKWLKSLKLGGILQECLDEYLVTYDYLANKVERLDKRIEELACGESYQEKVKKLSCLIGVKTHTALAALVEIGDFNRFAEAEKLAAFLGLVPSEESSGGKLIHGSITKAGNSHVRRLLVEAAQSYTRGAVGYKSKELKRRQSGNTPQVIAYADRANERLRRKFYHMTLLNGTNRNVAATAIARELACFMWGLMTDNVA

SEQ ID NO: 479565 - protein, 353 aa, unidentified
MNQELRRVIGGVDSHADNHQAAALDERGRLLGSKSFAVSAAGYRELQAWLASFGLIDRVGVESTGSYAAGLTRHLLAEGVRVLEVNQPHAHSRRRRGKTDAIDAELAARHALSLASAVTPKQSSGIVESIRQLRVARGSAVKSRSAAIVQLGDLVRTAPSELREQLAIRSTVKGKAALCRRLRPDTDRLGEPANGAKLALRSLAGRIARLDDEIAQLDGQLAPLVATAAPRTTALLGISTGHAGQLLITAGQNIDRLHSEAAFAALCGASPIPIASGKRGRYRLNPGGDRQANRALHMIAVCRLRHCPKTRAYAHRRSSEGKTKKEIIRCLKRYIARQTYATLRDDLRSLPIG

SEQ ID NO: 479566 - protein, 364 aa, unidentified
MKRKVYVGMDVHKETIQIAYLTSNTKEMVKEQQIKHNEVHVKKFINKLKTEWNEIHCCYEAGVTGYPLYRYLKSLGVNCILVAPGKIPRQSSDKIKTDKRDAIKLARLLRSGDLESIHVPSEEDEAVRDYLRSRDSLRLDLGRNRQRLMKFLLRKGNVYSTTKYWTVSHYKWLNNLHFENEILHETFNDYYSRVRVQEENLKAMDQKIQEIAKSEAFRERVGILRCFRGVDYLTAMFLLSEVNDFRRFKTAGSFMSFLGLVPGEYSSGSKRKQTGITKTGSPRLRRILTEAAWQHRFPGTGSKIVAARRTGQPALVVALAEKASLRLHKKFRNLQLRGKTPQVMITAVSRELSGFLWAAMNLVA

SEQ ID NO: 479567 - protein, 370 aa, unidentified
MSVRRILAKTINTDLEYEAIGIDLAKNCVSVALLTTDGEVVCIDRLDYSELEKSAQVLCPTTFAMEPCTEMNYLVQKLEAWGHRCLVIGGKNVQNYVENHYSGQKTDLNDAQALAFLAQDTQLRPIKAKDMEQQKYASLTTLREQYIKQYRQTIVSLKGICQSWGLNISKGISGKARLKDLIENHAAFPEELKESLVDMVTHAQTTQKALNKITKTLEELAKNDKLCQLIQTIPGLGPVCSCRLRATIGDIQRFKNPKDFPAYYGLVPRSIATGHNEKKGRITHRGDKTMRSLMVQGAGSVVNMATKGKLKSKQLTKWILKKQKEKMSWGKLVCAVAAKLLRIVRAVLISSKPYNPKIAGVAKCSLPKGT

SEQ ID NO: 479568 - protein, 314 aa, unidentified
MPAAVVVGIDVSKRTLEVALSNGGGFSVVNNEDGISELLARLRQSGAALVVLEASGGYESPAYLALWEAGVPTALINPRDAYHFAQANRQLAKTDQLDARGLCEFGLRMQPEPFPPPEAADEELKALAVRRRQVVKMLAAERTRVQQAPGSVRSSIKRMVRALERELGALDHQIEQRLRDNPRLAQRCAQLEQVPGLGSVTCAILVSRLPELGLLGPKQVAALVGVAPYDHQSGEWRGRSPIFGGRAEVRSALYMATLSAIRCNPVLRSFYRRLRAAGKPAKVAIIAAMRKLLVILNAMLKTNSPWRPPCAVVA

SEQ ID NO: 479569 - protein, 472 aa, unidentified
MKKHQRAQAKSKANQPIHVLQPDAAGVDIAANEIWAAVPPERTEQSVRKFAAFTADLKELVKWFLDCGVRSVAMDATGVYWIALFQLLEDAGLQVCLVNARHVKNVPGRKSDVRDCQWLQYLHSVGLLTGSFRPAQAICALRSIYRYRQELLSLAGQHVQHMQAALDQMNIKLHHVIDDLTGLTGQNIVQAILSGQRDPVQLAKLRDKRIQAAESTIAKALEGDWRKEHLFVLQKAWENWTGVQKQIQDCDKELSDYTRELEACTTVIKPVKVVRLKAELLGAEPVSNPAPKKKAGRKTSKNQPEGPWQQELERFFGVDLTVIPGISVLTGLTLMTELGNDLRAFKTEHHFASWLCLCPDNETSASKVLRRRTRRSQNRLRQALRMAASSLHHEKSYLGDKYRRLRARLGAPKAITAMAHQLARIIWTLITRQIPFDQSLFAYHEKVNEQRRLKRLQASARQMGYQLTPIAA

SEQ ID NO: 479570 - protein, 450 aa, unidentified
MPKLFVGLDVSQKSVAACFLLEDGSEPIKRFSFPHTPTGVESLVPRINATADSLGITHLFVGMETTGLLWWHLSEALRTCEQLQHLVPAIYTINAKLVANFKKAYIEAEKTDPGDAFVIADRLRFGRLPRLAEPDERYLAIQKLTRHRFHLMNSLGREKNRFLSHLFLKFSNFCQQQPLSDPFGAAAGALLTEFLSVDEIAHTPIEDLADFLIEKGRNRFTDPEAVAEAIKQAARNSYILSKALTNPVNVVLAMTLENIRFFERQVEAIDKAIARELAALPSAQVLLSVPGLGPVFTAGIIAEVQDANRFDTDAQLARFASIVWKKSQSGEFSADETPMMRSGNQYLRYYLIEAANSLRMHNEEYAAYYQIKYRESTTHHHKRACVLTARKLVRLIHTLLRKGQLYQTPDQRKETHAASPLPIGMTPGELARQVVRRRQAKDRMRVHLDR

SEQ ID NO: 479571 - protein, 404 aa, unidentified
MKGPIVSIDVSKGKSDYQAFKNLNVKYTGSRSIKHTKEGFDEIVNLVREMEKKLETEVCVVYEATGVYHRVLKKVLEDNDIKQFIINPLLSAKTRKNDSLRCPKTDKLDPKSIAKTYYSHSLHNSHKQETIYHELRELSRYYEDILVHIRKDKVAFRAQLDIVFPGYDTLYDDLYGPVALAVIEKYPHPEMLQKKKINTVSKVIQSKTCHRQAVSDTMADKAIEYSKTIYSGCDKDDIEVLILQRFIKKLKEDMAEAERTIGEMIKLAQELPDFSIIKSIPGIGDNLAARIIAELGDMTRFKKKNELVAFAGLDPRISESGQNDGDHMHITKKGNKRLRCLLYLAVTCSIRLKRDDNSIKDFYIKKKQQSNPMCSKAAKTACASKLVRIIYSMCKTGELYQYNK

SEQ ID NO: 479572 - protein, 323 aa, unidentified
MNGYVGIDVSKERLDVLLLHEANRVGQHFTNTATGFDKLDGWLKRRFKPDQVHICLEATGPYGEAVADYLFAQGYTVSVVNPARIKGYAESQMQRNKTDKLDAALIADFCRTQHPAAWTPAPPQIRQLQQLVRHLDDLTQMRQQAKNRLGLPGQRQPVTDHLRAQITFLDQQIRETKQAITDLLNHYPDLKRQKDLLLSIPGLGELTIGKLIAECRDLRAFRDVRQLVAFAGLNPRQHVSGSSIHWKPSISRTGSASLRAALYMPALTAMRFNPVLRAFADRLRARGVTGKALVVAVMRKLLHLVFGVLKSGQPFDPNWATAS

SEQ ID NO: 479573 - protein, 418 aa, unidentified
MRRVIGMDIHRTFAEVVFWEDGRLRWHGRVDMTRSGLEGFGRSLAKGDEVVLEATGNAMAVVRVLSPYVARVIMANPLQVKAIAHAHVKTDKIDAGVLASLHAAGYLPEVWLPDAETERRRRLVARRNQIVRHRTRVKNETHAILAAHLVPPCPHAELFNGPGRVWLARQALPGDERAAITRHLRELDRLGEDLTVLDREIAEATVDDPAVRRLLTIAGVNLTVAAGLVAAIGDIRRFASPQQLVSYFGLNPRVRQSGLGLAQHGRISKIGRSHARALLVEAAWAAAKAPGPLHAFFLRIRARRGHQIAAVATARKMAVLVWHLLAKETDYLWARPALVAHKLRALELQAGRPMKKGNRRGSAFAYNVKALRNQEMAIAEQAERAYQHFVAQWQPKPTRNRRATNPTAWSRGAPRQPG

SEQ ID NO: 479574 - protein, 370 aa, unidentified
MKHFITSVGLDVHKDSTEIVLAEHSGKQEVRPYGTIGGDLLSLDKAVKKLKREGTELRFVYEAGPCGYEIYRHLTKQGFHCTVVAPSLIPRKTGDRIKTDRRDAEMLARLHRAGELTPIYVPREDDEAMRDLCRGRGDAIKAYGAARLRLGSFLLRHGYRYSGKTTWTLAHFRWLASIKMPHEAQQFTLQEYIHAVMECKERILRLTDMIQKLMPTWRMAPVVSALQALRGVAPLTAATTVAEIGDLGRFNHPRELMAYLGLVPSEHSSGKTTKRGSITKTGNGHVRRALIEAAHTYCHPARVSRVLLKRHEGLPQSIRDIAWKAQVRLCGKYRRLMAKGKSRNMAVTAVARELSGFMWAIAREVQMPAA

SEQ ID NO: 479575 - protein, 428 aa, unidentified
MKNRNDQKLKAITPGTLIVGVDIAKETQWARFVDYRGLELRKAFKFKNHKKGFDSILASIKEICKKRRLDNIIIGMEPTGHYWKPLANYLLIHEVNVVMVNPYHTKRAKELDDNSQTKSDKKDALTIARLVRDGRYYEVYMPQDIFAELRVLSNSRVSLMKRSNALKNTITAVMDEYFPEIVTVFKYPLKGKAAMQILKSCPFPSLILKLGIDGVLFEIKKAVKKTVGIKKAQQLVETAKSSIGVGYGLVSAKLKLGLMIEELELLSKQLEQLEKAMEKALADTGYGEIILSIPGIGVVTAASFLGEIGYPMRFDHPRQICKMAGYNLIEDSSGKNKSKTKISKRGRKNLRSVLYQMARTMVAVNTEMKELYQYLKTRPNNPLKKKQALVVISKKIVTVIYNLIKKQTGYQAELVFNKFRKNQMKQVA

SEQ ID NO: 479576 - protein, 358 aa, unidentified
MAGKVTETAVVGGVDTHKDLHVAAVVDQNNKVLGTQFFSTTRQGYRQMLAWMTSFGALKRIGVECTGTYGSGLLRYLQNAGLDVLEVTAPDRMERRKRGKSDTIDAECAAHAAFSGIRTVTPKTRNGMIESLRVLKTCRKTAISARRVALQIIHSNIISAPDELREQLRNMTRMQLIRTLGSWRPDASEYRNVTNVYRISLKSLARCYLELHDEIADLDVMIAAIVDELAPELIKRNAIGYESASQLLITAGDNPQRLRSESGFAALCGVSPVPVSSGKTNRYRLNRGGDRAANSALHIIAIGRLRTDDKTKEYVARRVAEGHTKMEAIRCLKRYISREVYTLLRNQNRQLNSIPITA

SEQ ID NO: 479577 - protein, 348 aa, unidentified
MGERLRHQLFCILNLYTILERPHGESEFIRLTTMHNYLGIDVSKHTLSCCLIKNDDFIESEFTNDTKGFKELQSWLHQNQATELHCCCEATGIYHQAIAEYLSQHYKITVENPRKIKGFSVTVLQRSKTDKQDARLIARYCQSMKPPEWQPPSSESKQLQELTRFIERTKKQRASEQTKYQTAPECIKHHIQATIKHLNSLIKNAESELKVFYNQHQTYSQQHKRLKTIPGIGNNAASVLLSVLLDGRFEKASQFVAYIGLDPRQRQSGTSVNGRPSISKVGKSSTRSSLFLPAMVAYRDGAFPEFVARLKKSGKKPKVIIVAIMRKLAVIAFHLINTGQDYDKARYQ

SEQ ID NO: 479578 - protein, 346 aa, unidentified
MRYKGMKNKSFIGIDISKNVIDASIFCEGTPIKDFPHAVFNNSRKGFGEMCTWLKKNHVVLSNCLFGMEFTGSYSMELEKFLYARNYQFCMLSTHVVKHYPMGSKDKSDKIDSAKIADFLYRYNGTECVKPYKMPDKTMQRLKTLMNERKFLVEQRTCFMNRRQLCSTKEDAQLYDGYIRKLGHDIENIELEEQKLLATDDSLLTTYKNLLTIPGIGFVNAINAIVITRNFTAFETARQYASYVGVAPHSHTSGTSVRWRPRPSARCDGQTKADLSMAATVAVQYDAELQSFYNRKLGGKQDSDTKRKALNAVKFKLVLRMFAIGKQNRKWEPLDSKSSNEKLAIS

SEQ ID NO: 479579 - protein, 344 aa, unidentified
MNNLSRVGVDLAKNIFQLHGINRTETSTWCRRLKRDNWIKVLLNKVEPGCEIGMEACTGAHHWARLLQCKGFHVKLIAPQFVKPYVKSNKNDANDAEAICEAMSRPGMRFVTVKTVEQQNIQAVHRIRSELVGQRTAKGNQIRGLVAEYGLVAPQQMNHLRAAIPAWLEDAENGLSDRFRRLLNGLWGDLKRLDERVSEMDKEIALIAESDPVAKRLQQLRGVGPMIATALIASVGDGKQFANGRQMAASLGLTPKQHSSGGKDRLLGISKRGDAYLRSLLIHGARSVIYAAREKEDRLSQWVMSIASRRHPNVAAVALANKTARMAWAMLRHDTDYDPELAAA

SEQ ID NO: 479580 - protein, 428 aa, unidentified
MRFDRCVRTRRRGRLLGLIGTITATEVFVAQPVWAGVDAGKADHYCMVIDGDGQRLLSRRVANDEAALLEVIAAVTTLADGGEVTWAIDLNAGGAALLITLLIAAEQRLLYIPGRTVYHAAGSYRGDGKTDAKDAAIIADQARMRRDLQPLRAGDDITVELRILTARRTDLVADRTRAINRLRAQLLEYFPALERAFDYSKSKAALILLTGYQTPDGLRRAGAARLVAWLRNRKARNADAVAATAIAAAHAQHTTVPGQQLAAAVVARLAKEVMALDTEIGDTDTMIEERFRRHRHAEIILSLPGFGNTLGAEFLAATGGDMTAFDSVDRLAGVSGLAPVPRDSGRINGNLKRPRRYDRRILRACYLAAHIAIRTDTASRTYYDRKRSEGKTHTQAVLALARRRLNVLWAMLRDHTPYQPTTPNATAA

SEQ ID NO: 479581 - protein, 353 aa, unidentified
MKPKAETTEAPLAVVGVDIGKEVFHLVGLGTDGKIAFRRKIRRLGLKEAFERLPPCIVSMEACLSAHFVSRTLRALGHEPRIIPAIYVKPFVKGQKNDYNDAEAIAEAALRPNLRFVQEKSQDQLDLQACHRVRSRLVSRRTATINQIRAFLIEQGIAVRVGPRALRNSLFAILENRKDEISPRMAKLILGLYEDWCHLDERVETVTGEIEELSRVETKCQRLMSVPGIGPVISTGLVAAIGTGEAFERGRDFGAWLGLVPRQHSTGGRSVLGRISKRGSKYLRTLLIQAAKVLLMRPHNWPRYSFGAWLKTASDRLHRNKLAVALANKLARIAWSVLRNDKAFDTHLVTEAI

SEQ ID NO: 479582 - protein, 421 aa, unidentified
MTPPNEVVWAGIDTHTDTHTIALLDERGRPLGVETFTADPDGYDRLIGMLPEPRVVAAVGVEGTNSFGAALARRLTAAGYEVREVLRPRRSVRRRDGKSDPLAAVAAARSVMAGDDAGLPKSSDGWVEALRHLNAQRSQLVSAMTAISNSANGLLVTAPESVRERYRGLRSETRMNRPAECRPAGGLVEHSVPAALKSAAKAWKALKRQSGLLEERMREILEEHARPLLDMYCAGTVIAATLAIVAGDNPERIRSEAAFAKLRGVCPIPASSGRTNRHRLNKGGNRQGNMALHRIAIVRLRYHKPTRDYVARKTREGKGKLEIIRCVKRFIAREAYRALISIRNGEAGRGTPAEHGAKLRELRVSRNITQQQIGEALCVPSSRISEIERGARDLPELEQRAIQWIHSTTNPKQHTQTLDNV

SEQ ID NO: 479583 - protein, 408 aa, unidentified
MQVAYPVCCGIDVHKDTLTACLRRVDANGQVSKERREFATTYTSLLTLSDWLVEQHCPIVAMESTGVYWKPVYHVLVGTVEVYIGNAHELRSRPGKKTDKRDAAWIAELLAHGLIQPSFVPPPEIGALRDVTRTRVALVQTRSQSKNRVHKLLEDTNLKLGSVVSDLFGVTGRRMLAALVAGERDPQVLASLALGALKHKRPQLELALTGQFTAHHGTLLGLLLELIEMLDRQIATLDQQIGELVAPLQAQIAQLDSIPGVDIIAARDILAEIGTDMSRFGDAARLASWAGVCPGNHESAGKRYRGKTRKGNRYLRRVLVQCAWGARKTPTFLGHTFRRLEVRIGKKKAALAIAHNILVIVYHLLATGRCYEEARYDHYHPKQEARERQRAIKALERLGYTVTIERAA

SEQ ID NO: 479584 - protein, 323 aa, unidentified
MEFKRIAVDTSKAVFTLHGVDPADRPVLRRDVRRAGFEAFFAKLAPTEVVMEACGGSHHWGRVLAGLGHRVRLIPAQYVKPFVKRGKNDRNDAEAICEAATRPGMRDVGIKSAESQARAMLLSVRELLVRQRTQMVNALRGHAAEMGLVAARGDKGLATLRAEIAADASLPEQAAEALRLLGSEVDRIEARLAEADKRLMAQLQADADARRLAAIPGVGPMIALSFALRVEATQFASGRHFAAWLGLVPRENSTGGKQRLGGISRAGNERLRQLLVLGATSVIRHAKPGRPGVSVWLLALLERKPRKLAAVALANSKRPVSGV

SEQ ID NO: 479585 - protein, 360 aa, unidentified
MKVQRTSVGLDVHARSVVACALDGDTGEVFQRRLTPDHGEIVAWLGDLPGPVAVTYEAGPTGFGLARALNAAGIACGVAAPSKLIRPAGDRVKTDARDAAHLARLLHLGQITEVTVPTASQEAARDLVRARDDCRGDLMTARHRVSKLLLRQGIVYSGGKAWTRKHELWLRAQRFDNPALQLSYEAAFDAMLACVDRRDRLDKAITTMAAASEFTPVVHRLGCIRGVATLTAFGLAVEIGDWHRLTGRSIGAYVGLVPCEYSSGESRTQGGVTKTGNGHVRRLLVEAAWHHRTQYRPGVELRRRWDLASPAARARGQAANRRLHLRWAGFDTRKKRPVIANVAIARELAGWCWSLAVMPD

SEQ ID NO: 479586 - protein, 346 aa, unidentified
MMIIGCDFHPSWQQVSWLDTETGETGERKLVQASGDAERFYRQVAAPALIGMEATGNCHWLVDLLAELGHELWVGDAAQIRASYVRQQKTDKRDAAHILKLLVEGRFPRIWMPSSEVRDLRQLLLHRYKLVIMRARVKNELQHLCLNKGVQRKHKLWSQAGQQILRELPLQPWAGRRRDDLLKLMAMLDQQIEPLDQAVKAEAQRDKMALLLQTQPGVGPITALAYVLTLGDVSRFPRGKQVASYLGLIPREHSSGGRQKLGAITKQGNRMLRMLLVEAAQAAVRYDPGFRREYLHRCHQKPKAVAKVAAARKLAVRLYWMLRTQQPYPAVVRIESSPRVPLVGAS

SEQ ID NO: 479587 - protein, 408 aa, unidentified
MDIAKHKHYAAMVDERGRELKKPFPVLQSRIGFEQFYASIEEAKKVFGKTEVIVGIEPTGHYWLNLAYFLEEKGIPLVMVNPMHVKRSKELDDNLPTKHDAKDARIIAKLVKDGRFSYPRILHEVEAELRAGSTFRESLITERNAVHNQMIRWTDRYFPEFTQVFPSFGKIALAVLEKTPFPNEIVDQTVEELIERYRQSEGLKCPQKPKIQKLLEVSRQSIGITQGQQMARIEIATLVRRYRQLEQEIAALTEQLIALAQTTVEYEWLQTIPGLGDATIVELLSEIGSFHQYQDPRQLMKLAGLTLKENSSGQHKGQKRISKRGRKRLRALLFRVMMPLIRHNEAFRALHEYYTTRPINPLRKKQSIVVLCGKLLKILYAVCVKQQAFDGERMIRDISHTHTQAHAA

SEQ ID NO: 479588 - protein, 347 aa, unidentified
MPYHAQEEVQVFAGIDVSAGELNVAWRRPEKDKETTATFTNTRSGHKALIAFLLRGNQHVRVCLEVTGNYSLDLALALHAHGQFEINVVNPRRARRFAESLGERSKTDPVDAHVLCEYARRMPWVPWQPPSSTALHLRAVMRAVEDLTSILTQEKNREHALAASQALPALVLTELKRHQRYLQNRLVRLRREALQLVARDPQLSRRFQLMQTTPGIGENSALQILGELAVLPDTLDARQWVAFSGLDPRRFKSGTSVEQRPRISRSGSRHLRRALYMPALVALRHDPHLGSFYQHLLKHGKARLQAVVAVMRKLLHAFFAMFRSDQSYDGSRLCPFELANKPVASCG

SEQ ID NO: 479589 - protein, 368 aa, unidentified
MTKTVYIGMDVHSTNYTLSSYIFEEDKSFATVKLSAETESILKYIRRIRSEYGDGVDIVTGYEAGSLGYTLYKDLKNNGIECIIIAPTSLSKKKAGEIKTDKRDAQKLAHALAVGDFKAVYVPDEHDDEVKQYIRMRDDHKLALKKVKQQILAFCLRNGHKYDTGKSYWTHKHLKWLRDLELPDLLKNILEEYLISYDYYSLRIEQMDQRIERFCNEERYKEKVERLCCLSGMSYHKALCHIVETSDFDRFRKANSYSAYIGTVPGEFSSSDDVNRLGITKAGNRHLRTLDIEAAHAIGRTSKKKSRALIQRQAKCSSEVISYCDKANERMRKMYIDISLRKNKNIAAAAVARELACFIWGLMTDHIS

SEQ ID NO: 479590 - protein, 271 aa, unidentified
MDFLHYIGIDIAKATLDWAVYNRQGSLLHLHTPNTVAGIKLALRQLKSVPGWDITQVVFCMEHTGIYNAHLLEFLHKLRLPIWLESSLQIKQAGGMQRGKNDTVDAYRIAEYAYRFRDQIRLWQPPRPVIQQLAFLSAARQRLIQAYNLLAGPLAEQDSFINPLLQKQLQRSSRKSLIALKDEQKAIEQQINKLIQNDGRLKELFEWIVSVPGIGSTTATEIIVVTNEMTTITDPKQMACHAGVAPFEYRSGTSIRGKTRVSHQARKRLKA

SEQ ID NO: 479591 - protein, 339 aa, unidentified
MQLYSGIDLHSTNSYLAIVDENGKRIFKEKLPNDFATINERLSLYSGTLEGVVVESTYNWYWLVDALMAAGYIVHLANPAAIQKYTGLKHADDKHDAFWLAEMLRLNILPTGYIYPKEERPIRDLLRKRSHLVRLRTSLMLSLQSIISRNCGFKLRPDDLKCLSDNRVAPLLSSNEDLALAGQASKEAIDALTRQIRTIESFIEKRLKLKEGYRHLLSIPGVGRILGLTIMLETGPIERFGQVGNYASYCRTVSSKWTSNGKAKGKGNKKNGNKYLSWAFAEAAELARRYDEQARAFYNRKLNRTNFMIAHAALAHKLARAAYYIMRDQVPFQPEKTFA

SEQ ID NO: 479592 - protein, 344 aa, unidentified
MNSTTIAVDVAKSVFEVAVSEHPGQVRERHRLSRGRFSRFLAEHPPATVVMEACGSAHHWAREAQSRGHRVVLVPPHAARPYVLRNKTDRTDAKGLLEAFRNDDLRPVPVKSETQQALAGLHRLRSTWVATRTARLNTLRGILREFGVVIPTGAHHVVPHVRALLEDLDAGVPGLLRVALGEAIREVGELEERIRAIERQLATAAEPALLIRRLRTVPGIGVLTATALVAVVGDVQRFPSARHFASYLGLTPREHSSGQRRHLGAISKRGDTYLRMLFIHGARSVLHHAKSKTAPARDRLRTWALQVERLRGHNKAAVALANKLARIAWAVWRSGNDFITAAVV

SEQ ID NO: 479593 - protein, 342 aa, unidentified
MDIKVLGIDLGKTVCSLAGLDEAGAVVFRKRLQRHRLLDFLETLPPCVVAMEACGGAHHIGRFCLQKGHEPRLMSPLYVRPYVKVHKNDDRDAEAIAEAATRPTMSFVAIKSEEQLDLQALHRARERLVSDRTRLINQGRGFLMERGIRIGTGRHVFQKELARLAAEGADDLSPRMLLLVTDMASELDVINDRVAAIDAEVKALARTDADMQRLMEIPGIGPTIATALVAAIGSGSSFGKGRDLAAWLGLVPRQVTTGGKAKLIGISKHGNRYLRKLFIHGARTVLHLVRDRTSPITAWADALKERAHVNVAAVAMANKMARVAWAVLTKGERYRPHALSGL

SEQ ID NO: 479594 - protein, 350 aa, unidentified
MLIIGADYHPGFQQIAYVDTESGELQERRLQHREEAEKFYRDLAAQEMKVRVGMEASGQARWFERLLGELQFELWIGDAAEIRTRRVRKQKTDRQDAQLILKLMLKDDFPRIWVPSWENRDLRQLLWHRHRIVQMRTRVMNQLQAVALNEGVRRKKALWRPAGRIQLESLGLAPWASRRRHDLLELLDRLNPSIAQLTKAVEQEAEKCSEAQRLMTHPGVGPLTALAFVLVIGTAERFRCGKQIASYLGLVPSEDSSGDRRRLGHIWKQGNSLLRFLLVEAAQVTVRSHQEWRSKFFHLAMRRGRKIAKVAMARRLAIRLYWMWRKGWNYEQLTQFGSHAGQPGNPHGVQ

SEQ ID NO: 479595 - protein, 410 aa, unidentified
MELLHPHCAGLDIHKETVVACVRHLRSGKVTTGIKTFKTTTEELIALSDWLATEGCTHIVMEATGVYWKPVWHILSDGEFDLVLANAGHVKNVPGRKTDVHDAVWLAELMAHGLVKASFVPDEPTQQMRDLLRTRKQFVRERSSHIQRIQKTLEDANIKLDLVVTDVLGLSGRRILQALIAGQTVPQALAALADRRIHATSSQLEAALRGRVTDHHRFMLKLHLDQIDAQNAAIARIDKEVDGNVEPFRVALEMLNGIPGVSSLSAEVIIAEIGVDMSRFETAGHLISWAGLCPRNEESAGKRRSSRMKKGAPWLKTTLVQCAWAAARTKDSYFHAQYHRLRSRRGPKKAIGAVASSLLTTAYHMLKSGTLYQDLSANHFNHRAKDKQALHLIHRLKNLGFNVQITPSPA

SEQ ID NO: 479596 - protein, 334 aa, unidentified
METIYFLGVDISKKTIDTALTIDGKHFNEVQVDNQTKTVESFLENLKKQIASFSKLIVCMEHTGIYCLPLLNVLTKLKIKVCVEPALQIKQSQGMTRGKTDQVDARRIALYAIKNKEHLVFWKPQRLTIQKLKALLVTRERLLKMRKQLAIPIEESQEFVEEVIWKEMVKCCSNTIRALNRDIEKIDSEIDKVVKSDTQLSEQFLLITSVPGIGKLTALNMIISTGEFKRITEAKKFACYAGVAPFEHSSGISYRGKTRVSKMANMTLKRLLHLAAMSAIKCCDELKAFYHRKVEAGKNKMSVINAVRNKLISRVFACINNGRKYQKIYENAFV

SEQ ID NO: 479597 - protein, 416 aa, unidentified
MRMHRNCCGLDVHKETIAACLISESEDGTSSQQKRIFGTMTQQLRELAQWLAEAKVTAVAMEATGIYWVPVWNVLEPYGFELLLINPEHYKAVRGKKTDLKDGTRIAELLQDGRLAGSYVPPVAIRVLRDLTRYRTKLVQYQSSIANRIQRLLEQCNVKLASVASDVLGVSAQAMLRALAAGETNPQRMADLAKRQLRKKIPVLQLALEGCLLPHHRFLLADMLEELDHIGSKIARLEQAIAEQMRPYQKAVDAWMTVPGVKQRLAWNLVAEVGPTVDAFPSAADLVSWAGICPGNNETAGKRKSGTTRNGNRWARKALCEAAWAASKTKATYLQAQFRRLAAIRGSKRAIIAVASTILTIGYHMLKEGTTYRELGGNYFDKRNLLRTTRRLVKRLEALGHRVILAPTPSPLQSSD

SEQ ID NO: 479598 - protein, 323 aa, unidentified
MAVVVGIDIAKRSFDLAVLQPNGKYRTKGKLSNDPSGFAIFADWLQKHAEPGAWIVMEATGIYHEALAEHFHAMGYRIAVLNPAQIARYAQSQLQRSKTDKLDAKLIATYGQRHVDSLRDWHPEPVSIRTLRALTRRLEDLQSLRQMELNRLEVSPKKVQDSIRAVLQRLDEQIAWTLEQIKRHIDDDPDLRSKRHLLVSIDGIADKTAALILAELGDIDRFADAHAVTAFAGLNPRLQESGVARGHTRISRTGSARLRSALYLPAVVALTYNPAIKAQAERLKARGKKGKQTVCAAMRKLLTIAYGVLKSGKPFDPSLAIAR

SEQ ID NO: 479599 - protein, 353 aa, unidentified
MPILEGRVDAVIGVDTHRDTHAAALLDPNGGVRATLEVVPSDRAGHARLLQLAAAQAPGRRVWALEGTGCYGAGLTGFLLDHGEWVVEIDRPKRSRGRNGAKSDALDAVRAGREALAREQLATPRQRGHREAIRVLHTTRTAIVDTGANARRQLKALIITAPEPLRDILRGRTWLQQARACAALVAVPSDPVEHRATVRALRMTAQRVLAARLEAKQLEAELRQLITVMAPVLLAQRGIGPISAAQVLISWSHPGRFRSEAAFAMLGGAAPVEASSGQVVRHRLNRGGDRQLNRALHTIVMIRQTHHGPTRAYTSRRIAQGKSERDIRRCLKRTVARQLYRLLERTAANQATT

SEQ ID NO: 479600 - protein, 325 aa, unidentified
MRQPQSQVKPHTQVGLDVSSQTLDAHIRVDGKAFTVPNTDAGFDQLCEMLSAYDVSMILMESTGGYEDNVACYLQLQGYDVVVINPRHARRFAQSMGRLAKTDRIDAAILAHMAFMIDSGPDRERYIKPVTDEQRKQLSRMSSRRRQIVDLITIEKQRLTHADDYARESINDIISLLNERLKRIESDILRYVKKNFSELASRLLSIPGVGSQAVTVLIADLAELGHVNRRRISALLGVAPFNHDSGKFKGQRRIRDGRQSVRNVLYMGVISATRFNPVIRAFYDSLLLRGKPRKVAIIACMHKLIRIINAMMRTGQPFDMSLHGV

SEQ ID NO: 479601 - protein, 386 aa, unidentified
MQKLNDLSRCLTPLEPDSTLIAVIEMSLSSWLVAGIVPGVERQPLKKLAVDESVLLNLLHRWRGEAEKAGYMIKRIAVAFEAGRDGFWLARWLRARDIEVHVIHTSSVAVSREHRRAKTDRLDTELLKRAFLGWLRGERDHCKMVAIPTIMDEDGKRPNRERESLVGEQSRIINRIKATLVRLGIRGFNPKLKRAAERLEGLRTPEGEPIPPNTLSELHRDMERRRLVRDQIRQIESARRDRLEHAPGEGAHAMVRLLARVIGIGIETADLLVQEVLSRNLRDRRAVARYAGLTGSPDESGKKRREKGLARSGNPRVRHGMIQLAWRFLLFQKDSALAQWFRDRTENARGTRKTMIVALARKLLIALWRLVREGVVPDGVILRSAQ

SEQ ID NO: 479602 - protein, 326 aa, unidentified
MQKSLKFIGIDISKSTLDICALDKDSSVHYQIKNQALEIRKFFKPFSKNSTRICFENTGKYGWALIEILTDLGFKFYQVNALHLKRSMGLIRGKNDVVDALRIAQFISKNYEETPLYQTSDKNIKKIQVLMSKRNLLVKQRAQHKALKKENELIKSLKLPALEKHSNAIVSLLNKHIKEIEKMINTIITQDQILSKNHRIATSVPGVGKIVSWNMLVKTNGYKGMCNPRKFACYAGVAPFSQRSGTSINKKARVSHLADKTMKKLLHMAAMRAIQLENDLKKYYIRKVNQGKNKMLVLNAVRNKIIHRIFAMVKSEKLYDFNLHMS

SEQ ID NO: 479603 - protein, 403 aa, unidentified
MYKYFLGIDISKDSFDFCFTDETEKVLYKDHYQMDMTDFIKLSDYLSPFSKDEILIVMEATGIYHLTLLSYLLEQGLNVSVVNPLFIHAFTKSMTIRKTKTDSKDAHIISIFAKRNCATIRLSSASDIETIKPIVREKEKLTNQISTIKTDIKSLVNQLFPEMLKNTNIFLKSSLNLLLQAPSKRIIRNLKEKKIASYLSCDTKRGAKPKVDAKEILLMAKNSIGINNQSLEKILVSKIKQLDFLQTQLDEFNETIEQFVDEHHHDDMDLLTSIGGVGKPSAASFLTELGDINNFATYKQLTAFIGTDPTIYQSGTSINVKGSISKRGNSHLRRVLWHMARAATVWNETLKAYYDKKRSEGKTFKQSVIAVANKLIRIIFSMLKNNTKFDSNFSNLAIKSASI

SEQ ID NO: 479604 - protein, 347 aa, unidentified
MEAYAGPQVVGMDLHRKRSVLVRMDMAGEVLEVVRIANDPDLLAEVLARSGEDPEVVLEATYGWFWAVDALQDAGASVHLAHPLGVKAFETRRVKNDVRDATDLADLLRMGRLPEAWIAPPETRELRALVRHRAKLVGLRTSCKAQIHAVLANCGVQVPMSDLFGAAGTRLLERLALPQVYADRVVSLRRVIETLEGEIDAFATAIHTRLAQDPAYAAVQTIPGIGPVFGAIFVAEIGDISRFTRPEQLTAWAGLTPRHHESDTKVYRGRITKQGSKLVRWAAVESVKKLPATTLVGRLRERVAARRGRNIGAVAAARRQVELVFYALRDGHVHALQAYTYRAPAAA

SEQ ID NO: 479605 - protein, 364 aa, unidentified
MKRKVYVGMDVHKETIRIAYLTSNSKEILKEQQIKHNEVQIKKFIKKLKTEWNEIYCCYEAGVTGYPLYRYLKSLGVNCILVAPGKIPRQNTDKIKTDKRDAIKLARLMRSGELESIHVPSEEDEAVRDYLRSRDSLRLDLGRNRQRLMKFLLRKDIKYSTTKYWTVSHYKWLNNLHFNNEILQETFNDYYSRVRVQEENLKSMDKKIQEIAESEPYREKVGILRCFRGVDYLTAMFLLCEVNDFKRFKTAGSFMSFLGLVPGEYSSGSKRKQTGITKTGSPRLRRILTEAAWQHRFPGTGSKIITARRSRQPALVVALAEKASLRLHKKFRNLQLRGKTPQVMITAVSRELSGFLWAAMNLVA

SEQ ID NO: 479606 - protein, 398 aa, unidentified
MISVGIDVSKEKSTVCVLKPYGEIVMKPKDVQHTESELSKLVGELQELQEEIRVVMEATGAYHLPILSYLKEKGFFVALVNPLEMKRYRCQGIRNAKTDKIDSKIIANYGIDFWYHLSDFKGSEEHYLELRLLGRQYRQYMKFRVENVLALANMLDQTMPGIKTLLCDWNKYTGKDKLADFAYDYWHFDNITKKSEKQFLESYSKWAKKKGYRQDESKAKQIYALAKEGIPTLPSSTPSTKMLVQESVKIVREVDDTLTQILTRMSEIAKMLPEYQVVHDMGGVGDALAARLIGEIGDVRRFHNAKSLIAYAGIDAPPYQSGKFTGTDRHISKRGSSTLRKVGFETMTCLVMQKKHGDPVYDFIKKKQNEGKACKVAKIAGFNKFLRIYYARVMEVYQ

SEQ ID NO: 479607 - protein, 350 aa, unidentified
MKQYAGLDVSLEQTSVCVVDEAGTVVREAKVASDPEALIAFFAVLDSAMARIGLEAGPLSQWLHEGLAGAGLPVICVETRHMKAVLSAATVNKTDRNDARGIAQMMRAGLYRPVHVKTVASQERRMLLTSRKLLVHKLRDVENEIRGTLRNFGLKVGAVGKRRFEGRILELVRGRQTLAAIIKPMLRVRAVLLAECDTLHRMVLAMVRDDAVCRRLMTVPGVGPVVALTFRATVDVPARFARSKAVGAHFGLTPRKYQSGEIERSGRISKCGDEMMRTALYEAANSILTRTTRWSWLKAWAMGVAKRRGMQKAKVALARRLGVILHRMWLNGTEFHWRREAAEHPAATAA

SEQ ID NO: 479608 - protein, 342 aa, unidentified
MKYVGIDLHKQTISACVVVKERGRRQVVARKRLECRDEAGIAAWFGELGKFEVVVEATASYEWFVKLAEPLAQRVLLAHPKKLRVIAESKRKSDKLDAQVLAEFLASDEIPLAYRPGPRVREHRVLVRYRHYTQRRITSVKNKLRHILAGYNADVRHLFTAEGREHLAGIKLSACDRFVADELAAELRQHQKRQAKVNRELRRFAAKAPLAEREARAVLDSIPNVGPVTSDVVLSELGDWRRFRSQADVACYAGLAPGFRESAGKFKQLGITKEGSRLLRWAMIELAWRMVRTSRKWGRHYTRLEARVGAKKAIVAIARRLLGVIFTLLRSGQKYALALEAA

SEQ ID NO: 479609 - protein, 396 aa, unidentified
MISVGIDVSKGKSTVCIMKPCGEILESPFDIGHTADELDSLISLIKSFDEETRVVMEDTGHYHLPVATYLSSHNIFVCCVNALRMKKFCSQSIRRSKTDKIDSIKIASFGITYWNELVKAYPSNVIYDELKFLARQYYQVTGMLVKSKVNFSNLLDQVMPKINDVLSNQGENHKLTEFVNRYIHFQNILDMGEMKFTSDYCKWAKKKGYRLNERKAAEILALAQNGIPTLPNSQSVKIAVSEAVKLIHSIEESRNTILAQMQELCNTLPEYSVVKEMDCIGDTLAPRIIAEIGDVRRFKNKHSLVAYAGIDAPPYQSGAFHASERHISKRGNSYLRKTGYEIMQSLIKHKPADNAVYDFIQKKRSEGKCGKEAMIVGLNKFLRVYYGKVMEFYSEH

SEQ ID NO: 479610 - protein, 399 aa, unidentified
MLAVGIDISKSKSVAAILNQDGSMHTSPFEFHHTQPELDAFIKYILNSNQSATILMENTGHYHYPVLKAFREAGLPVCMVNAYQIKKFGDMDLRKAKTDKKDAVRIARYALEKSYSLVPYTSMEQKYEDLKFLARQYNQRMLTLKTNKVFLLNLLDETMPGITNILPLTTRTPETSLSVLFINRFKSYDRIKKMGKSRFLDAFEKITRKSRNRQTKTYGLAIYEAALRNITTRGENEYTLAAQDQCLELVCESQKAADSIILKMQTLAETLPEYAVLRSMAGVGDRLGPLILAEIGDIRRFHSGKALNAYAGNDAPPYQSGTFESHNRHISKRGNAALRKYCFEVMQALKLTRPQDDPVYLFLLKKEQEGKPYNVAKMAGVNKFLRIYYARAMETLKQQ

SEQ ID NO: 479611 - protein, 341 aa, unidentified
MKTKTFVGLDVHRKLVVATAVNPLGKRIRQSSFGPKPKELTRFISRLPKPTKVVLEACSVWERYYEAAVSTGAEVVVSHPLRTRLIAEASIKTDKVDSAALANLLRLDSIPLTFVPPPEIRALRRLYLEREFYARMKSSTMRHAYARLSERGVDYGKGVLQHRPQREKLRKHRIREFDRAIDTMDDLERKCKALDAEIHAAFLESEDAQLLKSIPGIGELMAVGIAGFLCPIDRFPNADKLTSYVGLCPTTHQSADTLYHGKLKKDVNRTLRALLVAASWTHRVHAPKGEVAKLVRRVVRRKGKMRGTVVGAHKLLRIIYAILKQRRPYLPRAPEGFASGQ

SEQ ID NO: 479612 - protein, 398 aa, unidentified
MTESSDYESVQVFIGVDVGKDTHHAVAINRSGKRLFNKALPNDENKLRSLISDLKQHGQILLVVDQPATIGALPVAVARSEGVLVGYLPGLAMRRIADLYAGEAKTDARDAAIIAEAARTLPHALRTLKLADEQIAELSMLYGFDDDLAAQTTQASNRIRGLLTQIHPALERVLGPRLDHPAVLDLLQQYPSPEKLASLGEKKLAAQLCKLAPRLGKRLAADIAQALAEQTVVVPGTNAAAVVLPRLALQLITLRKQRDEVALEVEQRVLAHPLYPVLISMPGVGVRTAARLLTEVACRAFASAAHLAAYAGLAPVTRRSGSSIRGEHPSRRGNKALKRALFLSAFAALRDPISRAYYTRKMSQGKRHNQALIALARRRCDVLFAMMRDGTFYTPQAS

SEQ ID NO: 479613 - protein, 403 aa, unidentified
MNAVGIDVSKGRSMVAILRPGGEIVSKPFVVRHLSDEIHSLIGLIQSLEGESRIVMEHTGRYYEPVAKQLSNAGLFVSAVNPKLISDFQDEDNSLRKVKSDKADAIKIARYTLDRWQKLKQYSPMDKIRIQLKTMNRQFAFYMKHKTAMKNNLIGILDQTFPGVNTYFDSPAREDGSQKWVDFASTYWHVDCVRKMSRNAFVEHYRKWCCRRKYNFSKSKAEEIYGTAKELVPVLPKDQTTRLIIRQAADQLNTASQTVEHLRSLMNETAARLPEYPVVMAMKGVGPSLGPQLMAEIGDVTRFTHRGAITAFAGVDPGVNESGDYRQKSVHASKRGSSTLRRTLFLIMDVLIKTRPQDDPVYRFMDKKRAQGKPYYVYMTAGANKFLRIYYGRVKEYLSSLSQ

SEQ ID NO: 479614 - protein, 375 aa, unidentified
MTYYAGIDVSLEYSSVCVVDGAGKIIREQRIASEPEALIAWFRGLGFGLERIGLEAGPMSQWLYAAMRAAGLAVELLETRHVRDAFKAMPVKSDRNDARGIAQLMRLGWFRPVHCKSMAAQEVRALLTARKLVQSKLLDVQMSLRGLLRGFGLKVGATTPSRFAGRIRDLVEGNATLEVIAAALLAVHETLRRELAGFEKRVRSIARSDGRVRLLMSTPGVGAIVALTYVAAIDDPARFKSSKGVGAHFGLTPKKYQSGETDITGRISKIGDEGVRTALYEAGHIILTQPLKGCTALKSWAMRLAKRAGMRKAKVALARKLAVIMHRMLVDGHCSLMSPWRPDRRVQRISGSTGHRLPEAESLAGTMDQVRPQVG

SEQ ID NO: 479615 - protein, 263 aa, unidentified
MRIIGCDLHARQQTLAMLDTTTGEVVEVTLKHEGDNVREFYSSLPRPVRVGIEATGSMQWFLNLMEELGIECVVGHPAQIRAAEPRKQKHDRRDADLILKLLAENRFPAIWLPSKELLDLRALLRHRHQWVRMRTRIQNALQSIALANGLRRGTALWSHDGQSRIASLPLAPHTAYRRSELQALYEKFEAEIEKLNQRVEEQACKRLGARLLMTHPGVGPITALATEVFLGDPARFADSKALASYVGMIPREYSSGGGSGSVG

SEQ ID NO: 479616 - protein, 428 aa, unidentified
MNNEDITRHQQFEQLKKEIRGSKEYLIVGIDIGKETHHSFMGTATGKSLYRKLIFKNNIDGFTMLLAHVESIKVQNDLSEIVFGLEPTGNYHKPLGNHLIRCGYNVVMISGVAVKRNRELLDGRWDKHDTKCAANVADLISQGKCQYYEAPSSKISEIRDLLSLRKILKKEEHRLTLRVRNNLLAKFFPEFDRYFGQNKKSGLGVVRWCIDTGRIAGMEFNDFFNTVTVRRNSLKQKQRLIKIHALAIDSIGCSTNSSTEFEAKLLVAKIKLVSEHIKETEDIIHDRCQEFAEYRCLMSIPGFGPYISSMVMAKIGNPFRFNNRRQVVKMAGFDLNANRSGKSSAGAIPKISKKGSGDLRYALYQAALVASARNIHFIKYFTRKLKGRAKERGIKTKMRVKLAAKMLVIAWTLMKHRIEFNPDFLKTE

SEQ ID NO: 479617 - protein, 408 aa, unidentified
MNSLFVGIDVGSKNNVAYLMKPDGSKHSGFSVQNNLGGAKLLSEGIVSALKSMQLSDVVIGLEATSIYGDSLVYALREDGSLGRFQRKIHVLNPKQVRKFKEAYPDLPKNDWVDAFVIADHLRFGRIAKEVYVDDYRYQALRTLTRSRFDVIQNLTREKQRFANYLFLKCSGIAQAKDIQNTSATTIALMEHFESVDDLANADLNELTAFIFKAGRGKFADPNATAKAVQAAARGSYRLPKTVNDTVNQAMAVSITSMRALKEQVKTLDNAIEQQFEIIPNTLSSIPGIGTVYSAGIIAEIGDVHRFASQASVAKFAGLVWTQHQSSEFEAETTHLIKSGNRYLRYYLLEAANSVRRCDSEFQRYYDLKFHEVNRFQHKRALALTARKLVRLVFRLLKDNRLYIPPEG

SEQ ID NO: 479618 - protein, 322 aa, unidentified
MYKYNKIYGVDISKDVFDTFSSRGDHNLHDNDPKGFSKFSKKLHPDDLIVMESTGYYHFRLAQYLSKKGYNCAVVNPLSVKRFIQMKLAKVKTDKADAKAICEYALANEVSLYDPLDDTHAECLQLFSILQYYQKQLTAIKNKLHGEVVLGRPSKAVYHSLNRSEKHLQKEVKQLEERLLELVKKENQEQITLLKSIPGLGIKTILFLIVTTEGFTKFENASQLCSFAGITPTERTSGSSIRGRSRISKVGNRRLRRLLFMCSFTACKHNGACRALYERIVNKGKSKKLALLAVSNKLLKQAFAIAKSGIPYDAEHRSALAN

SEQ ID NO: 479619 - protein, 323 aa, unidentified
MPDFVGIDVSAEELVVASDHEEFRVPNTGEGHAELTSRLTRGHRRAVHVAIEPTGTYGLDLALYLDQAKRVEVMVVNPRAARDFARAMMRRSKTDPVDARVLGEFARRMEFRIWQAPATEVLQLRTITRRCTQLIKDRTKEKNRLHAAKNSEALAFIRPDITMSIKQLDERIEDLKKIALKLVDQHPRILLAIRRLTSIKGIAFLSAIQIFSELSVLPKDMTAAQWVAHAGLDPRYIESGKRAGKVRISKCGNKYLRAALYFPAMTAARCEPNVRAYYEKLLAKGKLKMVATVAVMRKLLHAIWGMLKHDADFDGQKFYALPA

SEQ ID NO: 479620 - protein, 340 aa, unidentified
MKKEVKFYLGMDVSKLWVDITLLCVVDHKKQTMICERFDNDAEGMKALHKWLKKHKVTFNQNSLLVIENTGVYHRLVWEYCSTHGLPLYIGNATHIKYSFGIARGKNDKVDSERLCVYAFKNADELKATPVLNPVFLRLKDMMTARSRLLSQKNSIKVYLGEMKLSNSKETQKVIEQAHEAALEGIAASLKNVEKQIIQMIQQDAAIKKNYDLLLSVPGIGHLTAVYIICCTNNFISKITGKQLASYAGVAPFSNTSGTSIKGRDKVHKMANKDLKKLFHMGAVSAITHYPEFKDYYERKVKEGKHELSVLNAIRSKIALRAVAVINNQEKYVDKYKKAA

SEQ ID NO: 479621 - protein, 452 aa, unidentified
MAKGSGLTRGDRRRDQRIEGLRAVIRPDRAILAIDLGEDKQVAALMDHDGRVVGRRTVKAKAHTLGGLLAWAGGQAARRGFGGVVVGCEPTGRRWRSVMALAEEAGMGFVCVQSLRVHLAREADDYTRDKTDHKDAVLIGKLIARLDCHLPERADAEWARLRHLGARRSRLVTEVVACGQQVSDLLSCAWPAALACAARPLESTTWLACLAATAQACDGDPATLRSMGPDQFFAAARAQLPRFAARRLSGRVARRFFDALADRAGVAAQRRGALERVHFLIEDRRHAAARLAEVEHRMVGVLDGMGLTALVTSIPGVSAVGAAVILAETGDLSRFASARSVVKHAGLNPAENTSATFRGVTRVSHRGRPGLRAAAWRAAWGALPHNRVLGEKYTHLTTRDHDRLAPQQARAACAGALLRWLHAIVTQRQPFHPDIAAGRVRAGQPGPAAQAA

SEQ ID NO: 479622 - protein, 429 aa, unidentified
MKIIYPRVCGIDVHKKFIVAVICISESVEPVYLKKRFSTFHNDLIRFRDWLIQNDCQNVCMESTGKYYIPVYNVLESHISNIVVANPKWVRAVKGEKDDDKDAKWIADLFKLGIVKSSFIPQKDFRILRELTRYKYKLVNMRSSEKNRYQNALTSGNCKLDMVFTDVFGKSASNIIDLILSDNPYTDEDILSKVHKNCKASPDMILNSINGTDLTPVQKSRIELVNDHIKQLSSNIQKLDKLIDLMIEPYEDYISFLCQIPGVSRNSAITILSEIGVDMNQFTSTRRLTSWAGLTPSSNQSAGKKKSVRISRAGVYLKPCLVEVAHAAVKDTNHPYYANKFNKISKRRGKKRAYIAIARKILVAAYHMLLTGEIWNPADLAEVETPVEQRIKYVKNNLKSDIKQLLDIGLTVEELTLMIQQNANNIATQ

SEQ ID NO: 479623 - protein, 325 aa, unidentified
MRKVGWTGVRRSDVPCFIGIDVAKAQLDIALRPAGERWSVPNDAGGVATLVDRLQALQPTLIVLEATGGLERLVTSALATAGLPVVVVNPRQARDFARATGQLAKTDALDARALAHFADVIRPTPRPLPDAQTQELRALLGRRQQLIVMRTAEQNRLAGTHERLVTDIEAHITWINTRLATLDDDLETALRASPLWRENDDLLQSAKGIGSVCARTLLLELPELGALTRQQIAALVGVAPLNCDSGTMRGRRMIWGGRAHVRTVLYMGTLVATRYNPQIKAFYQRLLAAGKVKKVALTACMHKFLTILNAMLKHRTPWQPQEVQS

SEQ ID NO: 479624 - protein, 394 aa, unidentified
MKLVGIDVGKNSHHFCVMDKETGEFNVTPTSFSNNKEGFDFLINSLKPYSKKSILLGMEDTGHYHVALLKFLLSNGYTVALINPKTTDLTRKMEGGITKNDKLDTITICDVLDTPERKKQYRITKVDRFDFYEQRQLTRHHHDLKEELNVYCNRLQKSIDLVFPEFNTLFSSKYGIVYMNLLKTFGSAEAIASTDIRTIRKFFEIKGKGNRISLTPEKLKECAKNSIGISSEVETIQIKHLVSQITLIKEQIAEIDKKIEEFSIKNNSPILSIPGISHFSGTSILAELGDIGNYSKPSQIIKFAGVAPYHYESSQYNAQHTAITKKGSKYLRKTLYQIILPVINNNPVLKKYYLLKISQGKGHRCAQGHCIRKLLRIIYHLLETGQSFDPALLR

SEQ ID NO: 479625 - protein, 399 aa, unidentified
MSLKGSFDGFVGIDVSKDKFDACGITGDEVKLFQFSTTMDRKGFEKLKGHLAAVSISSVLIGMESTASYHVNLFSYLVSEGYKVFLINPLLISNYVKMQLRKTKTDKKDAVVIAQFLLTNGDTLVQRATPSLVSDLRDLSRQRESLIDEMTSLKIEIKQLLNITFPELEHMAGIFTKSILKLLQQYPSAFALRDANLGQLSQMLIVDSYGHKREAFAAELIKAAHSSIGSKSPAKDMILKQKIALLLHLEDALQEVTGMLIEMSRKLMDEEINIMTSIKGIGDKSAANFLIEMGGDINQFERSGKIIAMAGLDPAVYQSGKHDGKGRITKRGNRHLRKIIWLMTTKVIQYTDVFSVYYLKRRKEGLPYKMAVLATAHKLIRVIYAMLTQRTTFCPQVNS

SEQ ID NO: 479626 - protein, 420 aa, unidentified
MDIVHPRVAGIDVHKKVVWVAVRLPGEAPGERTVVIKRFKTFWRPLTKMAAWLAELGVTDAALESTGVYWWPVYHALAGAGIEVCVCNAAHMRNVPGRKTDLKDCQWIAELHEYGLLRPSFIPAAEVAALRQRTRYRKRLIEQRTAEGQRLSKVLEDAGIKIDSVASRLLGESGREMIEALIAGERNPGRLADLARGVLRRKTDDLQMACDGRFTGGHGQMCRLHLDAYDHLTAKIAELDALIAEAAAPFAAVIARLMTIPGIGQRTAEVIVAETGGDMTRFATSARLAAWAGLAPGDNQSAGKRKRAPTRTDDVHLRTAMAGAAWATWRTATRPGARFRRLARRSGKGNQNKAAVPSPHPAVHRLAVHALPRRPVRARHRPAAVRVAQHHSQPPPVDLPQARRLLTGPRPAADRELRLL

SEQ ID NO: 479627 - protein, 351 aa, unidentified
MKIKALTFENQVFYIGIDTHLKSWTVTIRTSDNEIKTFRMDPVPEQLVAYLNKNFPSGIYKSVYEAGFCGFWIHHRLTKLGVNNIVTHAADVPTTQKEKQQKSDPRDSRKLAREHECNNLKPIYVFSLEDQTLKSLCRLRESQGRDLTVVKNRICSYIHLFGQRIPEESRWTGAFIKKLYIISERLHNGETLKHLANSLVSKKKEILATTRNLRKAILRSEKGNILRLLLKIPGIGFITAATLITEICNIHRFRNFNTLASFTGFIPSIESSDEKIIVKGLTKRRNKHIQEMLIEASWVAIRKDLVLLNDFTKFSKRMKKQEAIIKIAKKLLNRVKAVWLNNIEYKTCLVD

SEQ ID NO: 479628 - protein, 436 aa, unidentified
MTSHCQFYNYKFQEVILLSFKILKFNCCGLDVHKTWIYACIGITDSNNRTEYKQARFSSFTKGLNELCDWLAKYNCTDVCMEFTGKYWIPVFNILEQHNLWVTLSHPKYTKPMKGNKTDRKDAKWICDLYMCGMVKPSFIPPADIRELRDLVRYRFKLTCMITGEKNRAQNCLTVSNLKLDDVFSDVFGKSSRSITEQILQHPGETFDVTPFVDGRCKTPIEEIQASVDGAISKEQAVKLRQCLDHIDELEKHISEVEQEILRLSDKYEAALNLIRTVPGFDKNPMTSIQVLSEIGCDMSVFPTDKHLVSWAGCCPRNDKSDRKIKSTRISRAGSYFKPVLVQVANALIKSKKHPEFITRYKRIKARRGHKKAIIAICRMILTAIWHILTDLKPYTPEGFLESRPVKEEKILTTSQALNLLKLRGYVIKDDPLPTY

SEQ ID NO: 479629 - protein, 345 aa, unidentified
MIYIGMDISSKSFTIHAINEAKKLVFKGDISPTRAGLRAMISQLGNQSKLVVFEAGNQLKWIALTLKKIKGVHIHVVHPNEIKWINQSSGKTDKIDANKLAQLARGDMLPRQVHIVEGKVRELRELISARRTLQSKRIALINSIRGNLKQEGYKLPEGFFKKEGWRERLKKMSIGNTQKLILGKFMDSIEGMVKAETELTSKILEIENKDIGLLETIPAIGGLTSRVLVSAIDDAKRFDNKKSVSKYGGLTPRIYQSGGVTHLGRINRDGRMEMRRVLLQCAHTITRMKSYEARPLKEFFERIKKRRGKKVAVVALARKLLTVAYGVLRTKRVYDPNILISGLGV

SEQ ID NO: 479630 - protein, 372 aa, unidentified
MNYNTVYVGMDVHKESFTLCAYTIDAEKGSHFQRTEADYKNVLKYLEFLRTVYGNDANFICGYEAGCLSYTLYHQLTEHDVNCVILAPTTMLEQRSKRRIKTDRRDAEIIGKCLAQHNYSPVHIPTATDEETKEFLRMRDDHKLALKKVKQQILAFCLRHNYRYDGNSHWTAAHIKWLKSLNPEALYKEILDEYLLTYTTLSDKAERLDKRIEELASKDEYRESVKKLCCFIGIKTHTALSVLGEVGDFQRFASAQNFASYLGLVPGEDSSGDGQTRLGITKAGNRHVRMLLTEASQCYARGQIGFKSKELKSRQAGNSPQVIAYADKANERLRRRYYKMVLGKSKKHNVAKTAIARELACFMWGMMTEHIA

SEQ ID NO: 479631 - protein, 466 aa, unidentified
MENNYILYVGMDISKGKADAAILKVSDRRSVKPKFIRKKLSFMFVKSEVASFLETVRSYSDVNCTSICFALEVTGIYSTNVYNYIKANLYENESIKFLNTDFVNQWRNAHNIAKSDPLDAQTISTIIGTDSDVQYVNDNVFENKNGYQDLKALVHRHYQIKKIYSQEINRLIAQCDCLFPELQYVFEPKSAAFIAVLSSYPTTHDIINASRVEVFDVVYEATKHRCSMDKVDKLFELCQDTLVPDDISSYGKSIILDLVENIKNIKGQLKSIERYIRDVVSLNPAYKLLLTITGCDPITTATVIAETGNIRRFKNADCFVSYSGTSPRNKRSGTSVETMGKISKKGSRYLRHAIYMIAEFARRHNPVLKHQFEKIKNGNKKRHKLANIAIANKIARYIYSIMKNKSSFVILHDHIMRLPEETRYTFFNSISLDFPKNTRKQIYQYSDINGEVHRFVYIKTDEMIPV

SEQ ID NO: 479632 - protein, 332 aa, unidentified
MYFNHYLGIDISKATLDAALIIKEGEVVGQTKVANNLHGFNDLASWIRKLKVKLSDVLVCAEHTGIYGYDLQIWLDDMQVSFAFVPALEIKRSLGIRRGKNDAVDALRIAEYAYIRRESISLSNKPSDVIFQLRALLGERKQYVRMRAALLARKDALHQYESKESIDRREEIIDKYAEYIASVDKQMRGLMEHDDEIKRNYELISSVKGIGLVNAINTLVYTNNFTSFQTPRQYACYCGIAPFEHTSGTSIKGRTAVSKMGNHQLKCELTMAARSAIIHDPWMKQYYKRKMMSKGNAPGAHGIVLNAIKFKLIVRMFSVVKSGIPYKVMAYC

SEQ ID NO: 479633 - protein, 410 aa, unidentified
MEVLHQRCAGLDVHKKTVVAAVRLATENRLVTEVKTFATTTAGLLALSDWLGENGCTHAAMEATGIYWRPVWHVLSDGEIELILANAAHVKNVPGRKTDVSDAGWLAELLAHGLIRPSFVPDGQTQELRALLRTRKQFVRERTRHAQRIHKTLEDANIKIDAELSDILGRSGRAMLEAMIAGESDPVRLAALAHRNVKASQGELQQALRGRVTAHHRFLLKLHLEQVDHLDAAIATLDGQVEVNLAPFRTAVELVSTIPGVSTLSAEVIVSEIGLDMSRFPTVGHLISWAGLSPRNDQSAGKRRSTRLRKGAQWLKTTLVQCAWAAKNKKGSYLQAQFRRLLVRRGPQKAICAVAASILTAAYHMLKDGTCYQDLGSDHFSRRSKTTHLQRLLRQVQRLGYAVEIKPMQA

SEQ ID NO: 479634 - protein, 409 aa, unidentified
MEVIFSRCAGLDVHQETVVACVRIQSGSKADQEVRTFSTTTEGLLALSDWLVGQDVTHAALESTGVYWKPVWHVLEASVELVLANARQVRNLPGRKTDVADAVWLADLLAHGLIRGSFVPPVAIQELRDLTRTRTQFVREASRHTQRIQKTLEDANIKLTSILSDILGVSGRAILRGIVSGTTDPAALAALRCARGLKATEEQFVQALTGKVRDHHRFLLKLHIDQVDSIEASVGLVERRIGELLQPFRIEVALLTTIPGVSDTVARTIIAEIGLDMSRFPSAAHLVSWAGLCPRNDESAGKRRSTKLRKGDTWLKTVLVQSAWAATRKKDSYLRGLFLRLKARRGPKKAIVAVAASILTSAYFILKRREPWKDLGINYFDTRDRTKLANRLVKRLENLGLRVQLSEAA

SEQ ID NO: 479635 - protein, 345 aa, unidentified
MTKRQSQDVAVYAGADISKDTIDISYHFGDKLIIDKIANNEQAIKRFVRTMKMEKGAVLHFILEPTGHYSQTLYRTLRDMKVRFTQLNPRLSRQFAEFTGVMEKTDKKDAQVLEDYGRLLKPKPTIPEEDIQMELHDLYVLRNALAKERGEWKQRKHQHKGGIPKRFVERVSKALDKEIAALDDTIEQQVKSLEVYKAIYEEVVKIVGVGRNTACAILCLLPEIGVLNSNKITKLAGLAPIPNESGTSVKKTAHTRGGRKNVRTALYMPCMVACRCNPVLRPYYQRIRERKGGKGVKGSGAIALTACMRKLLIHINSVARIVREKMQRNVAAVGCGEAAQASPCR

SEQ ID NO: 479636 - protein, 323 aa, unidentified
MNKDIKYFGLDISHLVFDVTDSDGKYYQFKNNGSGFKKFAKLLNSDSHCVMEATGYYHYQLAYHLLESGIKVSVENPLSVKRFIQMKLSKIKTDKSDSKLICEYAQKVELKLWKGNSKDEIECLQITRALSVYTKQSTMLKNKLHGEAVLGEPSKAVVRSLKRSLTQLTKEMKTLEDKLLVLVKQTHQDLLTRLKTIPGIGPKTSIMLVVLTGGFERFSSANELCSYAGLTPVIRQSGSSVKGRPRISKIGNQKLRNLLFMCSFNACKCNKACRDLYERLVAKGKSKKLALIAVCNKLLKQAFAIAKSGLIYDNDYRSTLVKN

SEQ ID NO: 479637 - protein, 322 aa, unidentified
MLYVGIDISKSSFDVAILTNDSYQNSRFTNNSKGFKAFSQELKALEGEAVFCMEATGIYGLALAKYLVQKGEKVIVVNPIKTNAFAKMEMARNKTDKADAQSIARYCKHLDDAGEISKNLFKPKGEAFEKLQFLITRLEQLDKIATQENNRLGVSLDKEAVRSIKSIISHIDKQIIKIKKVLKEIVKQDDTLKQQVDLLISIPGIGEKTAWSILAYLGDISLFSNAKQVTSYAGINPKIEQSGTSINKSSLSKIGNKRLRKALYMPALTAAKHNPLMKDLYKRLQQKGKPNKVALCAVMRKLLVLAYGVLKSGKAFDPCYQR

SEQ ID NO: 479638 - protein, 358 aa, unidentified
MTSKVKELDYSGVNIYSGIDTHLKNWRVTILVDDVYYKTISIDPQAKVLSKFLKKNFPKGNYFSAYEAGFCGYSVHRLLVNEGIQNIIVNPADIPTTDKERKQKEDTRDSRKIARSLRNGELEGIYIPTQKTEELRSLVRYRKSLVKDIGRNKSRIKSFLYRHGIEVPLELDTASKYWSSNFTIWLRTVQLSTDFGHTVIHNMLDTVTLLRTKLLEVQKELRRIAKQEGYSQQVKWLTSIPGIGLITAMALLSELESIFRFGSLDKLCSYIGLVPTTNSSSDTERVGGITPRSNQYLRGIIIESAWIAIRNDPALALAYNNLCKRMKPNKAIIRIAKKLLNRIRFVLKNQTEYEYAIV

SEQ ID NO: 479639 - protein, 343 aa, unidentified
MEESQGLVVGVDTHKDSHSAALVDELGAVLAATDVGANQRGYVQLLEWARGRSSRRTWVVEGTGSYGAGLASFLARCGEVVYEGDRPQRRKRGAGGKSDQLDAIKVAREALAREHHAIPRRRGNREAIRVLLSTREGAVSASRQALNQLYALVVTAPEPIHEHLIRLKGEQLVTACLRLRSTAGDIETSVTTRALRQVARRIRSFQAEAADHEAQLESLVAEAVPALLSEPGVGAITAAQLLVSWSHAGRIRNENAFAAMAGVAPVPASSGRFVRHRLNRQGDRRLNRALHVVAVCRSSFHRPTKDYIARRTAEGKSTREIRRCLKRYLARRFFRLLQGLDNP

SEQ ID NO: 479640 - protein, 401 aa, unidentified
MFFAGVDWADDHHDVAIVDQGGRLVGSTRVPHSPAGLAELRAFLLGIAGDPAEVPCFVETNHGLLVSSLLEGGFPVYPVNPKTVDRHRKSSGAKTDQIDAYILARTGRSDLADLRRLEPDSPIVQELKALTRDQDTLIQSQTRLVNQLTACLKAYYPAALELFCKLQQPSTLAFLEAYPTPEAALGADIEDIAALLKRNAHPQPNRTAERIMLKIREPHLKADTITVRTKARLMLALVSQLAPLLDQIKAYDREIDRLFRSHPDSELFSSLPGAGKRLAPRLLAGWGDDRSRYASAASIQALAGTSPVAYQSGNYRKVHKRHGCVKILRNVLHQFAWESTKEPWAEAYYRRKRAEGKSHSMALRALANIWVRIIYAMWLKHEPYEASTFLAAQQAHAREAA

SEQ ID NO: 479641 - protein, 344 aa, unidentified
MEAKRYIGIDLHRDCFTACLRLENGREYLKQWKLEELAKFTAKLRPTDQVAVEVTGNTRLFHEAVAPYVERVVAVNPSQFKVITHSVKKTDPNDARNLALYLAKDLLPEVRMKDKTQAQIASLTQTRDTMVKLRTALKNKVNNLCSAHGVNLNKESLASQKGLRAVLEMRFDPLVNLELKIIIDQIRSLNQSIAELEQAIGKEGQKLEGHKNLTSIKGIGGLSAGILLSIIGDIGDFSDEGKLAAYFGIVPRISNSNETEHSGRITKRGTKLGRTTLVQCALIAQRYSPYLKNYYEKKKSRGTGKAIIALARKFLGIIYRTLKNKWLFEDFPNFVLAEEARHET

SEQ ID NO: 479642 - protein, 418 aa, unidentified
MPMNMQYERAFGLDLSKKTFHGCMLDGPDLGNRHFFTGEMGPQGKAKLAGRLCKCDLVLMEAGTSSFSLARFLLENTEAEVVVLNPAKLYNIFNSTLKTDKSDSEKIARIARTMPRDEWPTVSIPTKEEQAERSTVSLEVFLAQEITMLVNRLYALFNSMGHPFIKKSDLKTEEARLTLANRLLCEEALAMEQVIMLSNQIEHVTDQLEQCKQRLREICLSHPMQALSLLSLPGVGLMTTASQIAFLGDGSRFNSPDSYVNYVGLSERRFDSGTKVSKGHISHMGNKCIRRNIIQAAWVASTKLKGNPLSMKYKDLRLRGKNKPVAAVAIAKKMIQLSYILVKSNGIYEFTKQQGLGAFRRKLQYHKLTQNSNTTSLHSCLIFCPKSRREKWRRLIGQKGKRQLQLPLVQRNSHKLCN

SEQ ID NO: 479643 - protein, 413 aa, unidentified
MSSKTQSRRKINPDVVVVGIDVAKRRHVAVCRDGHGNKYRPFSFPNDRVGFEKLVEQARSTQHRVGCRAVVFALEATGHYGHALRQYLADAGFGLLAINPAHTKRAKELEDNSPEKSDRKDAGVIADLAAEGRGRTMTIPRGAFAELRRLGKQHERLVVERTRQLNRYHGLVDLLFPELTFVVRDVACRSLLKLMAEYPTAADLAQLDYEELESQLRRWSRGQINRGQIGRIHRLSKESVGLREGLSAARLEMRQTLQALKAVEEALREVEREQTGTLKRVPYADLLKTVPGLGETTLAIILGETGDLRQYPHGDAVIKLAGYNLYRIASGCSKGRVRITKRGRPLLRRQLYLAAMRLAKEGEPLGGYRERLKPRVAGPKIMVGGCRKLIRLMVALVRDGRPYEPGRLGVQSL

SEQ ID NO: 479644 - protein, 452 aa, unidentified
MDEEEISMQIVNPRAAGIDIGSRSHWVAIGQGEKDYREFGVFNDDLYAIASWLKENRIKTAAMESTGTYWQSLYAVLVSEGFEVILCNGKFTKNIKGKKTDIQDCQWIQKLHSLGLLSSSFLPDEKTEHLRTLCRHRSGIQDNAASTSKKMQKYLRLLNLRLDVVVKDVCGQTGLKIIKAICSGETDSDKLSDLRHYNCRKSKDEISRALKTNGRKDYLFALGQELEMYEMLESKITQCDVEIGKLLHEIIDNDPDKKQHYIEEKPHKRVNKNDPKNIDLNLMSYQYFEGIDLMAIEGLSHLTALSLMSEVGLEGLRRFPTAKHFVSWLRLAPNNKISGGKVLSSKVPKGSSRLKIALRRAANAIGNLKESTPLSDFFKRINFRKGRVSAISATARKLAVIIWNMVVKCVPYNNPEGYLYLDQKRKLGIVKRINKQISRYGLSTEDLNLVTG

SEQ ID NO: 479645 - protein, 345 aa, unidentified
MELHTIGIDLGKTVFHLVGLDLRGEVVVRKKFSRTQLLRFTANIHVELMGMEACGGAHFLGRALREQGHEVRLIPAQYVKPYVKTNKSDYIDAEAIAEAVARPTMRFVPIKTDDQLDMQSLHRVRERWVMRRTAVINQIRGLLLERGITLRKGRRHVDAALPLILEDADTKLSGAVRMLLAQLKLDLDQLAVRIDEADAVIKKTAHENEACRRLVAIPGIGPVTATALIAAIGNGGAFHKGREFAAWMGVVPREHSTGGQQKLLGISKRGNPYLRRLFVQGARAVMQQRTKQSSGLSAWLAQLTSRTHRNVAAVALANKLARIAWAVLAKNEQYRPPVLADVAAA

SEQ ID NO: 479646 - protein, 455 aa, unidentified
MAHKGKKTKPTPEDLPLVHPHAAGIDVGAEEHWVCVPADRDVQPIQKFSAFTCDLHRLADWLTACRITTVVMESTGVYWIPLFQILEARGFEVALVNARHAKNVPGRPKTDRFDGRWLQKLHSYGLLAPSFRPPEHVCQLRSLLRHRDNLIQMMVKHIQHLQKALDQMNLHLHHVISDLTGVTGMRILRAIVAGERDPHPLAQYRDYRIKASPETIAKALEGDYRSEHLFTLTQSLALYDFTQQHIADCDQEIERVLSTFETRVDPATHPLPPPTTTHRQPQRNAPAFDLRTHLYRITGVDLTQVPGLQAPTIHVILAEVGLNMHKWPTDKHFASWLGLCPDNQISGGKVLATGSRRVQNRASRALRMAAQSLRTSPSYLGAFFRRMRSKLGPAKATTATAHKLAKIIYHMLKEHTPYRERSAEDYLHKEQERQLRLLRKQAKSLGFTLVPQTSP

SEQ ID NO: 479647 - protein, 387 aa, unidentified
MTVQSQVPTFIPGQYEIFAGLDVDKHSIAVTFTDHTRLLKSLRLPYSSEQLLNYTRKHFPDRRLAFVYEAGPTGFGLYDDLRASGHPCLVVAPSMVPTAPGQRVKTNRLDSKKLSEGLRGGQLRSIHVPSPTYRQLRHLVQLRDTHVRQLTATKCRIKALLLYEGIAFPEAPAGGQWSARVLRQLEALPCAEAVRFKVNHLIGTLHFHFLSAAAVQKQIRRFCQNDPELRQVIGLLTSLPGVGWIVAAHLIARLGDWREITSVRQIAAFLGLVSSEHSTGDQENRGAITRSGDSRLRNKLIQSAWTTIGKDPELRAFYRRIYQRHPKKLAARKAIVAVARKLTTRIYAVLKQQRPFVLRPDSSSAPLTAEETAGPRGRLDAAQNEQK

SEQ ID NO: 479648 - protein, 339 aa, unidentified
MKYTPVGVDIAKHLIQVHFIDEHTGEVIDKQLRRQDFLMFFCNRSPCLIGMEACRGSQHWVRELTKLGHKVRLLQAHFVKAFVMGNKNDVMDARAIWMAVQQPGKDIAVKTEEQQSVLVLHRSRRQLVKFRTMQINSLHGTLLEFGETIHKGRAAMERELPEALERMKERLPPYLITVLENQYNRLNELDSLIEDIEKKITSVARQNETCKRLLDIPGVGPLIATAAVATMGEASAFKSGREFAAYVGLVPKQTGSGGKIRLLGISKRGNTYLRALFIHSARAAALLPKEPGTWITELKKRRPTSVAIVAMANKLARTVWAIAAHGSKYDKNHVSIRSY

SEQ ID NO: 479649 - protein, 342 aa, unidentified
MKDTMIGVDLAKNVFQLHAASMTGRLEYRKKLTRVQFPRFMASQPPAVVVMEACASASYWARELAKLGHEVKLIAPQYVRPFVKRQKNDAVDAEAIVIAAQRPEMRFVPAKSEEQQARAALFRSRERLVHQRTELVNALRGLLYEFGQVVPQGIHHLKSIEEMLEDPASPLPGLVRHECRDLLLQIAEKTERIDARTKAAKDLAETTDTARRLQTMPGVGPMTALAVEAFAPDMQSFQRGRDFAAWLGLVPRQHSSGGKERLGRVSKAGQADIRKLLIIGAMARLTARGRKSVREGSWLARMLARKPKMLVAIALANRMARQLWAMMVKGEDFKDPVQTGAA

SEQ ID NO: 479650 - protein, 353 aa, unidentified
MNSLADLREVVDVVIGVDTHVQTHSAAVLDTATGGVLDEITVEATAEGYAELVEFANNHATLRAWAIEGTGGHGAGLSRHLLGMSEIVVELDRPKRAARRNGAKSDPLDAIRAAREAMARPRLGTPRRGGERQALSVLLAARRSAINASTEAQQQVFSLVIAAPEPIRARFRGQKLAVMLNTAASLRVHSSWDVETTSTVVALRTLARRAHAMLKEARELQKAILAIIRSWRPDLLEEFGVGPIVAATVLCAWSHPGRIHSEAAFAMLAGVAPIPANSGQVTTRYRLNRYGDRNLNTALHTVVQVRIQYQQATRDYIGRRTAEGKTSREIKRCLARYVARDLDRLLESGAATA

SEQ ID NO: 479651 - protein, 313 aa, unidentified
MSKKEEIGFEQLVERGCGIDIHKKVLVATIKGTGIKEETKTFGAFTENIEQIRDWLLSNKITHVAMESTGVYWKTVFNILEKDFEIILVNARHIKNVPGHKTDKKDSKWIAKLLLSGLLKGSFIPKLPIRELRDLTRYKRKITEQLSSEKNRIQKILEDANIKLSSVVSSMSGSTATKIIDAMISGEDNIEKLVKYKHGRMQVSDEDLASALKGNLTPHHKFMLQTIKMSIEEKQKILTTLDEQIDTHLKANELELDANLLTSIPGVGKDGAAYILAEIGNNMEQFPDEKHLSSWAGISPGNNESAGKKKVDA

SEQ ID NO: 479652 - protein, 404 aa, unidentified
MKGPIVSIDVSKGKSDYQAFKEMNVKYTGSRSIKHNKEGFDEIVSLVREMEKKLETEVCVVYEATGVYHRVLKKVLEDNNIKQFIINPLLSAKTRKNDSLRSPKTDKLDPKSIAKTYYSHSLHNSHKPETIYHELRELSRYYEDILVHLRKDKVAFRAQLDVVFPGYDTLYDDLYGPVALAVIEKYPHPEMLQKKKINTVSKVIQSKTCHRQAMSDTMADKAIEYSKTIYSGCDKDDIEVLILQRFIKKLKEDMAEAERTIGEMIKLAQELPDFSIIKSIPGIGDNLAARIIAELGDMTRFKKKNELVAFAGLDPRISESGQNDGDHMHITKKGNKRLRCLLYLAVTCSIRLKRDDNSIKDFYIKKKQQSNPMCSKAAKTACASKLVRIIYSMCKTGELYQYNK

SEQ ID NO: 479653 - protein, 315 aa, unidentified
MTITSEEYVGIDVAKDKLDMAVLGQKATSEVFNTKRGITALVKKMCQLNPKLIVVEATGGYEEALVLALYEAGMPVALVSPQRVRQYAKARGLLAKTDKLDAQNLAEYGKHIQPRLFVAKSEEGRRLSAIIGRCRQLADMQKAEKNRLRTAYLEMKSSIHTVIDCLEAEIERLDEEIRNFMNEHENFKEQEELLRSAKSIGPMTAATLLADLPELGKLDRKQIAALVGVAPINQDSGKKRGYRKTKGGRPEVRSVLYMSALSGIRYNPILKAQYDQLVKRGKEKKVAITACMRKMLTILNAMMRDQQPFRKVSML

SEQ ID NO: 479654 - protein, 426 aa, unidentified
MRSVGRAIGLDVHRDFCEVAIAENGQIRSCGRIVTVPEQLELFAASLGPRDRVALEVTGSAWEVARILEPHVARVVVVSPADTGIRQARAKTDRLDARALARLLAAGQLDAVWSPDERCRVMRRRLSRREQLVRSRSRAKNEIHAILVRRLKGKPPMSDLFGVKGLKWLTELELPLEETETREACMRHIEFLDREIAAVERQIATEALHSPEIRRLMTVPGVNVICAATFMAAVGDIRRFPTSRKLVGYLGLDPKVYQSGSAPATGGRISKQGSPSARWALVEAAWNVVRQPGPMHAFYARIRARRCGQVAAVAVARKLGCLFWCLLTRGEDYAHQQPTLTAKKLRLLEVRAGAPTLKGKQTGVWANRAALRDAERKLAEQAEASYKRVVSDWHAATPKKVGASVTPGRASQKPTKGKVARQTASP

SEQ ID NO: 479655 - protein, 422 aa, unidentified
MLAESQDEEQIIARVAAIDIGKAELVCCVRIPGPGNTRRRLQEVSTHSTMTRSLSDLANHLVGLGIERVVMEATSDYWKPVFYLLEAHGLQPWLVNARDVKHLPGRPKTDVLDAVWLCKVAERQMLRPSFVPPYPIRRLRDLTRYRIDLVGTRTAEKNRVEKLLEDACIKLSVVASDIFGVSGRAMMAALIAGERNPSVLAQMARSSMRRKISELEEAFTGHFDDHHAFLLARMLARIDGIDTDIAALDEQIEAQLAPFAAAAERLHEIPGIGRVAAAVILAETGVDMTRFPTAGHLCSWAKFSPGITSSAGKNKGSGSTGHGNPYLARVLGEAAVNAGRTKTFLGERYRRLARRRGKKRAIVAIGRSILVIIWHLLQDPEARFHDLGPEHFSHRTNPDASKLNHVRQLEALGYAVSLTPAA

SEQ ID NO: 479656 - protein, 468 aa, unidentified
MPKRSGREGDRRRGRSWTPLLERVNPGAAGIDCGSAEHYVAVPADRDPNPVRAFKTFTTDLHRLADWLTTCRVTTVAMEATGVYWIPLYEILEARGLVVILVNARHVKSVPGRKSDVTDCEWLRELHSVGLLRGSFRPAAEVAALRSYLRHRETLVRAAATVASRMEKALLQMNLQLHLVISDLVGATGLRILRDIVNGRTDPEQLAKHRDVRCQASEAEIAAALTGNYRPEHIFVLRSNLDLFDAYQQQIQVCDVELQQRLQELAAKTLPPEKALPPRRRSTRSKGRNEPRFEIRGPLHQLTGMDPTQINGIGPYNALRLISEVGTDMSRWPTPGHFTSWLTLAPRNKISGGRLLGSTTQPSANRAATIFRLAAVSVGRTQTALGAFYRRLIFRLGKAKATTATARKLAILFYRCMKGEIVYRDPGVNAYDLRYHAALVRRLRDRAHALGFVIVPRHTLTEPGAGVS

SEQ ID NO: 479657 - protein, 348 aa, unidentified
MHIAVIGIDLGKNSCSVAGFDATGRIVLRRRMSRDGVIKLGARLPACVMAMEACCGAHHLGRALQAHGHEVRLMSPEYVQPYVKAQKNDERDAEAIAEAATRPTMRFVALKSETQLDMQTLHRARSRLVGERTALINQLRAVLLERGITVAQGRRKLEQYLALSLDGEDAPPLALSPRMRLLIDDMRAQWRELDRRIAASDAEFVAAARIDPTARRLVTIPGIGAINATALVAAVGDARSFARARDLAAWLGLVPRQATTGGRPKLLGITKRGNKYLRTLLIHGARAALPSLAATAGSLGNWLRGLSARAHRNTVIVALASKLARIAWAVLRSAATYQTTIGDQPAAA

SEQ ID NO: 479658 - protein, 351 aa, unidentified
MLIIGCDFHTRFQQIAMVDTTTGELVKRRLEHSTGEAERFYAALPAPARVGIEATIATQWFEKMLTRYGHVLWFGDAAEIRAAMVRKQKTDDRDALHILDLLMQNRFPRIWVPSAAERDVRQLVRHRHKLVRMRTSVMNQLHALAMGQGLCLRKKLWTTVGRQKFESLTLDPWASFRRRELLQLLDQLDPSIEELNRAVISEAESRPTAVCLMQQAGVGPVTALAFVLTVGPVSRFANSKKLVSYLGLNPSEESSAGRQRLGAISKQGNSMMRSLLVEAAQTASIYDPELRRDYQRLKFRRGHSGVAKLAIARKLAVRLYWKLREAARPVPLAPMQGSPAVAVVGENLSCF

SEQ ID NO: 479659 - protein, 430 aa, unidentified
MKQFELLHSLFVGIDVSMKENVVHAMPFSPEDHPGHAHLRFSASNTPAGSAEIVEKVGDFLKFYPDVTQVVIALEATSVYSFHLATFLSVAQFNGHISAIVYSVNPKEIHAYKKTFTDVGKDDYVDAMVIADYARSNKIRSRPWKGPELLGLRILTRLRFHIARLIGILKNSTGNSIYLECSGFMTGENPFCNVWTATCQQLLTTFQGPDEILNLSDEELLNFITEKGHGRFSHPLDVVKKVKKAARNSYRLDKRVYEPLTSGLSVSFFIIHSLEAAIKKLDKSIETIAKSFSSDSYQILLSIDGVGPVIAGGLLAEIGDIKRFETDDDLAKYMGLTWRGKQSGQSESPVKHMSKAGDVYLRYYVLLATGQIINYSAKYREAYERIRSRKTLFPYRAALNLVARKIVRLIFTLLDRHQLYSDNKVMVTLE

SEQ ID NO: 479660 - protein, 346 aa, unidentified
MKILALDLAKSKSVCCLLDTETGEVQYRTIATTAAMIDRGIRRSGAEHLVLEVCTLAGWVYDVGVGAGVTVHVANPNHEGWRWRNVKRKTDRLDALKLAELLAMRQLPEVHMPSRAVREHRALIEYRGQLVARQVRVKNTIRSVLLRQGLSFTPGKCGWTLKTRRELAGLALGWEQACDGQLWRSQLGEELAALEEIESRLARVEGRLDALARTDGRIRRLQTIPCVGPRTAEMLVAVLDDPHRFGSGKQVGSYVGLTPRQYQSGSMDRQGRISKQGHRRLRSLLVEVSWLALRYNPPLRAFYQRVCRGTPARRKIAIVAVARKLLIIAWAMLRDGTTWSPERVAA

SEQ ID NO: 479661 - protein, 376 aa, unidentified
MSNVRFIGLDVHAETIAIAAAEPDGEVRSLGVIPNRPESIRRLIKKLGPADQLRVCYEAGPTGYVVYWQLTALGVRCAVVAPTLVPVKAGDRVKTDRRDALKLARSYRAGDLTPVWVPDAAHEALRDLVRAREAAKRDQLRARHRLGKFLLRHGRRPPTAMHPWTQRHLTWVRTVHFEHAAQDATVLDYLHEVEHMVDRIERLECAIDKAVKTAPERMRAVIAALQALRGIAQVSAVTIVAEVGELSRFAKPRQLMGYSGAVASEDSTGERIRRGGITKTGNAHLRRIVIEAAWAYRHRPGIGAALRKRQATVSPEVNAIAWKAQHRLHARYRHLTLKGKCTQETVTAVGRELLGFIWAIGVKAETLRGHEPSAAA

SEQ ID NO: 479662 - protein, 454 aa, unidentified
MSCHLMACLSWSPSSLPGRVIGTREQPLRGPNNEEPTVDPAPAAMSACGGDQVFCGWDWGSTRHGVCVIDAEGVIVRRWLVQHTDDDLARLFEELDDVVDAKALPIAIERGEGLVVGLMADAGHPVLMVEPAAFKAARPRWGSAGAKSDLGDAFMLADYARTDGHRLRRIEPVCQATRELGALVRARASLVEARTAASNQLWAVLAEHWPGAGVLFQKLISPIALAFLTDYPTPQSAALLGEGRMSLFCKRHAYRGAKTPVELLGRLRAAPASADPIAPAVLTVIVWSSVAQIRMLNTEIAQLERELRTALSTHPKAGLLETLPRVGRVSLAQLIAEIAPLLDRCDNPEQVAAMCGAAPVTRASGKTRTVGFRYAANKPARVAITGFADNSRHQSAWAGDAYRRARARGARHPHAVRIVARGWIRVIWACWHTGTVYDPSRHRREQLLTTPDLT

SEQ ID NO: 479663 - protein, 315 aa, unidentified
MTPHEMFIGIDVSKAQLDWAARPSGERHQVPNTEAGISGLVEPWRAAPPTAIVVEATGRLEVPLVSALAAAGLPVSVVNPRQVRDFAKATGRWAKTDALDAAVLAQFAEAVRPTPRPIADDATQDLRALLTRRRQLLDMRTAEQQRLSGAPRRVHQQIQAHLAWLDHQLAQLEKDLTQMIRALPVWREKEDLLRSVPGIGPVMSRTLLAELPELGTLSPKPLAALVGVAPLNRDSGTLRGRRTCWGGRATVRRVLYMATLVATKWNPVIRAFYARLRGAGKPAKVALVACMHKLLTILNAMLKHQTSWQAPGLSA

SEQ ID NO: 479664 - protein, 424 aa, unidentified
MKVTYQTCCGVDVHKSFLVATSVKTTGGIEPSYQKKRFSTFNNSILEFKQWLLDNHCHDVCMESTGKYWVPVFNLLEDEINVVIANPKWVKAVKGNKDDAKDSKWIGDLFRLGLVKGSYIPCKKVRILREYTRYRYKLVSCRSSEKNRYQNALTVCNVALDSVVSDIFGKSSTSIIDYLLEQSGTSINHEEIASKLLRSLKSKEDAVIESIEGYQMTDAQKYRMRLVRVHMDYITAEINDVDKMIENMIFSNPDFENAVQFLCTIPGVKRDSAITIISEIGTDMSQFSSSKRLCCWAGLTPGSNESAGKKKSVRITRAGVYLKPALVQCAHAAVKSDKSPYYKKKYEALVKRRGKKRAIIAIARMILTAIYQMLSTGEQWNPSDLYKIDMPVALVEKQKAKAIRQAKKLLQREGTLPPDKPLAS

SEQ ID NO: 479665 - protein, 344 aa, unidentified
MKVTTLGIDLAKNVFQLHGVNEFGKPVIKKQLKREQMATYFVNLPACLIGMEACGSAHYWARKLQSFGHTVKLMAPQFVKPYVKTNKNDAADAEAICEAVTRPNMRFVPIKNVEQQSVLALHTVRQGFVKARTAQANQIRGLLSEFGLIIPQGIGHIANRVPQLIEDASNELPGAFRLLIQRLLDHLKELDNQVKELESQIVRWHRQSELSSKLAGVPGIGPITASALVATIGDAKNFDNGRQVAAWLGLVPRQHSSGGKQNLLGISKRGDTYLRTLLIHGARSVIQWESRKPDSCSWVSGVLKRRNKNVAAVALANKNARIVWALLAHDREFRPDYVSTKAAT

SEQ ID NO: 479666 - protein, 401 aa, unidentified
MTVVGIDVSKGKSTVCILRPYGEVVESPYDVLHTEKDLASLVSTIQAIDGEVRIVMEATGAYHLPLLSVFKEAGFFVSVINPLAMKKYASATLRKGKTDKIDSIRIANYGIDHWFKLIDYALPEDIYEELRLLGRQYSYYVKLRVESKLAISNLLDRTMPGIKGLLSSKRSETPTRDKLCDFVAEYWHFDNITKKSEAQFVRSFCSWAKKKGYHASESKAKEIYALACSGIPTLPSNAPSTKMLVLEAVRVQKEINRTLETILSQMHDLAIALPEYDVVRSMSGVGDILAMRLIAEIGDVRRFHNSSALIAFAGIDSPPFQSGTFIGTKRTISKRGSSLLRKTGYEVMKCLKTVKPTEDAAVYEYMLKKEAEGKPKKVAKIAALNKFLRIYYARVNEVYAA

SEQ ID NO: 479667 - protein, 399 aa, unidentified
MDHCTAGLDWASEGHAISVVDSHGAVRDSFEVRHDAAGLAELVRRLRRYPDVRLAIERPDGLLVDTLVDAGIAVVPIHPNKLKAARTRYTTSGAKSDVGDAYVLADLLRTDGHRFRELAPLSEATRALRALVRTRDDLVKSRTALTNQLNAQLAAFWPGAAELFQRVDSHIAIAFLERYPTPETAAQLGERRLAAFLRRNAYSGRRPVGELFARLEAAPRGLVGAAESEARGECVKALVTALKALLPKIAELEGAIAVALDEHADGAIFKSFPRAGEVNAAQLLAEIGDVRERYLSDDVLAMEGGVVPVTKRSGKSKSVGFRWACNKRLRRALTSWADNTRHASPWAAQIYARARERGADHPHAVRILARAWLRVLWRCWQDRVPYEPARHHGAATLAA

SEQ ID NO: 479668 - protein, 464 aa, unidentified
MLLRLGIDVACRAAHQVSLADEQGRFVWTGRRFRTTPQDLARLWNMLPKGTDPADVLVVMEPTRNAWVPLAAWFRRHGAEVVLVPPERSADLRRYYAKHSKTDRLDSQLLARLPMLHPDGLYAEQGLGPGDALKRAAKLHSTLTHRRSQSLARLDALLEILGPAWHAAIGADLANRTPLKFLAAGYADPYVVKRLGRTRLARFCYRHSRGAWGEPHADALLAAANQTLQLWAGGELDYPDLAEDIAIEARLALQLTEEIKDLDERTTLLLHQADPMGILTSAPGVAAITAAAILGRLGDPKRFDSLAGARAFTGLVPILDSSGLNGRHGGPTKRGDAVLRQAQFMAAGQARRIDPTLAAKYHRLMIDAGKHHNSALCHIATTLLTRVIACWRAGQPYQLRDVDGTPVTMDQARTIIAERYAIPKDLRARRKTTADTGTDRRSKESPSAPSTGPSNHNATTPDAA

SEQ ID NO: 479669 - protein, 400 aa, unidentified
MELITKLSGLLKAITYSTYDKSIVSGTLPKLISNLLLPNKIQETMQTQVTKKIDFKGKDLYIGLDVHKKSWSVTILVEGMEHKTFTQPPDPQALYNYLQKMFPGGTYYSAYEAGFCGYGIHRELNSLGIKNIVINAADIPASQKDQLQKRDPVDSRKIARALEKGLLRAIHIFDRDMEELRSLNRTRFYLMRDLRRSKNRIKSFLQYYSISIPLEMDNNQWTLKFVFWLKEIQMQTLSGQDALSNLIRSYEYHREQILTLSRQIRLRIREYDNELYSLLKTISGIGPLTSSALITELGDINRFPHIDHLSSFVGLIPRVKQSGETSYSGGITFRCNEYLRTLLIEASWQAIRQDPALMQYYHEHLINNKGQKVIIKIARKLLNRIRYVMKNRQPYVTGVA

SEQ ID NO: 479670 - protein, 360 aa, unidentified
MIVQGTSVGLDVHALSVVAHGIDEETGKISRARLCPDYGEVLGWLGQLRAPVRVTYEAGPTGFGLARAITGAGMVCLVAAPSKLQRPAGDRIKTDARDAAHLARLLRLGEITEVTVPDREIEAVRDLVRAREDARADLMRVRHRLSKLLLRQGIVYYGGTAWTGKHEQWLRRQRFADRHLTAAFDHGFDAVLAASAARDRLDEQILEVAASPRFADPVNRLGCLRGISALTGLALTVEIGDWTRFTGSSIGAYVGLVPSEHSSGGSRVQGSITKAGNTHVRRLLIESAWHHRKSYSTSGSTLRARWAKVDPALRARGHTGNRRLNKRWQGFIDRGKNPIVANVAIARELAGWCWSLATLQ

SEQ ID NO: 479671 - protein, 373 aa, unidentified
MKYTKFIGLDVHKETIAVAVAEEGREAAESLGTISNNPEAIAKLVRKLGSVNTLYFCYEAGPCGYGIYRQLTAAGSTCMVAAPSLIPRKPGERVKTDRRDAKKLAQLLRSGELTSVWVPDENQEAMRDLVRAREDTQEDIIRKRNQISKFLLRLEKRPPHGMKNWTIKYWQWLNSLDFKQAAQGIVLKEYIHALEEAEARKKRLEEEITELVKYSEQAPVIAALQSLRGVGLITAATVVAEAGDLSRFDSPKQLMSYVGLVPSEFSSAGSRHQGRITKSGNAHIRRVIVESAWHYQRQPAIGTGLRKRQEGQSEEIKAISWQAQHRLNLKFRRLSGRGKPSQTAAVAVARELLGFIWAISQEIRQKNDLQKIS

SEQ ID NO: 479672 - protein, 338 aa, unidentified
MKLYGGIDLHSNNSVIALLDEEDRAIYRQRLGNDLGLILSKLAPHQASLEGLVVESTYNWYWLVDGLMEAGYRVPLANTAAIVPYEGLKFSNDDSDACWLAKLLRLGLLPEGYIYPKEERAVRDLLRKRSQLVRQRTANLLSVQNLLARNLGHAPGANAIKRLSPEAVDQLLPDRHLALAVQSNLAVMQALDAQITALEQVVRAEIRPRPEFQPLRTVSGIGEILGLTIVLETGAISRFDTVGDYASYCRCVGSARLSNGQRKGRGNTKNGNRYLAWAFVEAANFAVRYNAQIKRYYQRKCARSNGIVAIKTVAHKLARACYYILRDRVPFDVNKAFA

SEQ ID NO: 479673 - protein, 350 aa, unidentified
MIIIGCDFHTRYQQIALVDDSTGELSERRLDHENGEAHTFYRSLPKPVRVGIEATGPMHWFQRLLAEHGHELWIGDSAKIRSSELRKQKTDERDARLILELLLANRFPRIWVPTAAERDLRQLLWHRHKLVRLRTMLGNQLHFLAMSQGLCRKKKLFTQKGRHELVGLALGPWASRRREELLKLLDQVEPSIAQLDRAVLEQANRREDAVRLMTHPGIGPVNALAFVLTIGPVSRFRRSKQVVSYLGLNPSEHSSGGRRRLGAISKQGNTLVRWLLIEAAHHTVRFDPELRQDYQRLRFRRGNAVAKVAIARKLAVRMFWMLRSGADYAQLVRMQGSPGATLMDASSSLG

SEQ ID NO: 479674 - protein, 371 aa, unidentified
MKKPSMFIGLDVHKNSIEIAIAEEGRTGEIRHYGKIDGSLVALDKVVRKLVSRGCELHFVYEAGPCGYDVYRHITAQGFDCVVVAPSKIPRKSGDRIKNDRRDAQMLARLHRAGELSPVFVPLTEDEAMRDLTRSREDAKSAEKKAKQHILAFLLRHGHRFSGRTPWSQAHKRWIAGIKMPHPAQQITLQEYVGALTEGTRRVERLTEQIQQLLPQWRMVSVAKAYQSLRGVSLIVAATTVAEIGDLKRFKSPVELMSYLGLVPSEHSSGETTKRGSITKAGNGHVRRVLVEASWAYRLPARVSRDLRRRQEGLSQAICDISWKAQLRLCARYKRMLAKGKSKQVIVTAIARELCAFMWAIAHEVEIPAMA

SEQ ID NO: 479675 - protein, 418 aa, unidentified
MNTFSSFEFTAFIGIDWADTKHDICIQPAGSEEREFDRIDHQPQHIEQWAHKVHQRFGGPIAVMIELSKGPIVSALQKYDFFVLFPINPLMLAKYRQAFKPSRAKDDPTDAELAVDLVLRHGDRFKPLRPQSIEMRTLVHLVEKRRRLVEDRRRFSNRLISTLKAHYPQAVEWFSHKDTFVFCAFITRWPTLKQVKRARRSTLERFFRKHRVRRPNLIEARIQAIQDATALTDDPAVINPCTLEALALAEQIRTTLVLIRQFDDAIAQLVPALPDYPLFASLPGAGIVFTPRLVAAFGEDRERFHNAAEVQQYGGVAPVTERSGKKSWVHWRWQCPTFVRQTFVEWAAKTIHRSFWASAYYHQQRQKGVSHQMAVRALAFKWIRILYRCWKSRTPYNETAYLQALQRRGSNLVPQQIA

SEQ ID NO: 479676 - protein, 438 aa, unidentified
MSNKVIFNLDELFISVGIDVGADFSWMSIALPNQQFVGKPYKILHNSIDSLTTAVSKIKEAEELYSLESRIFLESTGIYHYPLFCYLRDKGFNCSVINPIITKNSTNINIRKVHNDRFDSKKAALVGLKPDLKVSLMPSDLALNCRNLCREYYDLMDNRSAYVNKLQGELRMVFPQYLDIFSKVTINTSLTLLETYTSPSAFLKADKQEIIDIIKSTARFGLTYAQNKYNAIIQAATDANQFGYIIDSNIKRIRLYISFIRKYDEEINSILESLHELVDANEDSDFVKQIHLIETFKGAGFLSAVSIMGEIGDFSAFSKPKQLFAYFGLDPAVKQSGKFEGTKVQMSKRGSAIARRVIHTLTLQSISISRNREAKNPVLREYYLKKCDSKPKLVAMGAVSHKVCNMIFAILRDNKPFKIIAPQEHIKQYNSAKCDIAA

SEQ ID NO: 479677 - protein, 338 aa, unidentified
MTLYAAIDLHSNNGVLSVIDGHDAVRFEKRLPNELDAVRTALAPFRDELAALAVESTYNWYWLVDGLMADGIDVRLVNTTAVPQYAGLKHGDDHTDARHLAKLLRLGILPEGYIYPREQRGVRDLLRRRFQLVRQRVAIANGLQSAWSRRTGHRLPANALLRVSADAITGTFTDPNEQLAVITQLKLWRFLHREADQIERWVLQDIQGSPALTALQSTPGIGVVLGSTIVLETGPMERFASVGDYASYCRMVASTRLSNGKKKGTGNAKCGNRYLCWAWIEAANYAIRFNEDVRRWYQRKASKKPRVLALKATAHKLARAGYHLMRDGGAFDAKRAFG

SEQ ID NO: 479678 - protein, 343 aa, unidentified
MDVATIGLDLAKHWFQVHGIDAQGRVVIRRKLRRGEVVAFFAALPPCVIGMEACATAHHWSRELSALGHEVKLMPPAYVKAYVKRNKNDAADAEAICEAVTRPTMRFVPAKTADQQAVLMLHRARSLLVRQRTMLVNALRAHMAEFGIIAATGLRHVEDLAAEIAREQSRLPELARCILQTVVDQLRDTMARVQQIEIQLTRWHKDSPVSRLLATIPGIGVMGATAIAATVSDPSLFRSGRDFAAWLGMTPRQNSSGGKERLGRTSKRGDKYIRCLLITGATSVLRHMRTRTTKDAAWARGLLARRPPKVAAVALANKSARIAWAVMMRGEAYRSRSEIVQAA

SEQ ID NO: 479679 - protein, 411 aa, unidentified
MDRIYDNCCGIDVHKKLIVACFRKGNKQEIREFGATTRELLEMADWLKDGGCEMAAMESTASYWKPLYNILESSGLNAMVVNARHMKAVPGRKTDVRDAEWIADLLQHGLLQPSYIPDKEQRELRELVRYRKSLVGERTRELNRLQKMLEGANIKLSGTVSDINGKSARNILEYLLTGASVDGPKYDEMYEQKIIAHNLKATKEQIIDDLNGVMSPLQRRMMKELLAHLDELNIHIKNLNDEIDNFMKPEEKQASHAIQDVTGIGNTSAQAIISVIGTDMERFPTDRHISSWAGLCPGDNESARKRKSGKTRKGNSLLRTTLITCAHSAVKNKKSYFHAQFMRISSHRGKKRAYVAVAHSMLIAIYHILKDGVVFKDLGADYYNQFNKERKINAYLKKLKALGWKAPVVAA

SEQ ID NO: 479680 - protein, 334 aa, unidentified
MNRKDHLDYYWVGFDLAKLTFQAALWGHQTFPEMKAQTFDRTRKAMKQALAWFRAEAPQGARLAVVMEATATFGEEVACWLLDLDPTLRVAIVNPGQTSAFIKSLGLRNKTDDLDAKALAKYGFERNPIPWERPSPEMAVLKDLVRVRADLVRTRTGMKNRLSDHERSSKTATKAMKRLIQTLDRQIQALELAIKQHLAEHKPLQDQIKRFLSITGIGPVVATTVLVELGDLRRFLRSRQLTAFAGLSPRRRESGTSLHGKTRMCQQGSGRVRAELYMAAGAAIQHNPDMKAAYESLLARGKTKRAAQGAIMRKLLVLMRAVLKADQDWVRRAA

SEQ ID NO: 479681 - protein, 421 aa, unidentified
MSNVTEFGKKVKDQEKKLMENVSWVVGIDIGKEKLSCALMDIKKALICRFDVEGSLAGYNELLNRVKKETKGSGKIIFALEPTGHYWMVLGQFFEDHNQSYVLIHPLVVARSREVHRLSKGKTDSLDARLIGELACDRSITRTQIPEDYWATIRFYAREYMDREKEIAREKNRIVSYLETTLPGFIEIFPKPLCMSGRACLRFLANFREASKGDMKNFEMQIRKHLLGKRLMTSRVRRLYDMLQRGDVLGLRAGRPAMFFRIIHSLNRLEMYEGQKEAAKQAMLDMYEKSEYKEYLDSIWGTAPTVNALILGFMGDPVLYDSPASLVKLAGCDPVPNESGKFKGRASISHRGRSLLRKAGDRVSFLLEKRNSVFRAFFNHLMSRQKNKFTKRQARVACINKYFRIVWVLCHYRVPFNPALA

SEQ ID NO: 479682 - protein, 341 aa, unidentified
MQVATIGLDLATHVFQIHGIDAAEKVVVRKQLRRSQVMAFFEALPPCLIGMEACATAHYWARELTKLGHEVRLMPAKDVKAYVKRNKNDAADAEAICEAVRRPTMRFVRVKSAEQQGQLMQHRTRDLLMRQRTQVINALRAHMAELGIVAAQGREGTKALLAIIADDGDERMPVDARASLIVLAAQLQALQTLVGSIEKRIIAQHRASEASKRLATIPGIGVLGASAITATATDPNAFRSGRDFAAWVGLVPRQDSTGGKQKLGPISKQGDRYLRRILVVGAHAVLRRARQHPEKYPWLTQLLARRPFKVVAVALANKMARVAWALLAKGGSYRVPRLAAA

SEQ ID NO: 479683 - protein, 351 aa, unidentified
MQNVLAIDVAKGKSMISLISSCGEVLIKPYEINHSINDFTNLLNRIKKQKLDNFSVIMESTGIYHRPVERFFLENNFKVFVINALYSKMYKRNLRKTKTDKLDCISLSELFFTTDFREYIKPDDIYLNMNALSRQYHALDELCVNLKNRYKNLVYLCFPEYELIFKKKTIYSDLALSFIEKYPHADIISNTRIDTLQNFFKKNGFRHWKKKPATIKEYAINSYPSVSKDDEITSSLSQLARLINTYQKEIETIKYKIIFLGKKTKYFESINSIFGLGEFTASLIIAEIGDINRFKNIKELTAYCGLDPSIKQSGKSINIKGPISKSGNKYLRKILFVSILNILSVTRVCHI

SEQ ID NO: 479684 - protein, 348 aa, unidentified
MQISTIGIDLAKNVFQVHGVDASDKPVLKKQFRRGQVIEFFGKLPPCLVGMEACATSHQWARELKKLGHDVRLMPPSYVKAYVKRGKNDAADAAAICEAVRRPSMRYVPIKSTEQQSALMLHRTRDLLIRQRTQLINAIRAHLAELGLVAQKGREGLQQLMRTAADAHDEALPSDARFACQAIVAQLQAVQMQIAGLDKRMHQAHRANPASKRLETIPGFGVIVSTAVVATMTDPKAFKTGREFAAWIGLVPRQNSTGGKDRLGSISKQGDRYLRRLLVLGALSVVRRARTRPDKYPWAVAMLGRRPAKVVAVALANKMARIAWAILAKGETYRAPVHTSSGAIAASA

SEQ ID NO: 479685 - protein, 414 aa, unidentified
MEQIRDRVAALDVHRDSVAACARVPGPRGGVRLDKDRFATTTAGVAELAAWLAERGVTTVGMEATGVYWKAIYYPLEGLFEEVWLYNAHHVKNVPGRKTDMSDAEWLADVVAHGMVRPSFVPPPPIRALRELTRYRKTQVDARAAEIQRLEKLLQDAGIKLTSVASKVLTQSGRAMIEALIAGERDPRVLAELAKGKLRAKLPQLAQAMAGRFGSHHAVVARSILDHLDFLDHTIDTLTAQIVARTRSFAEQVELLAEVPGLDQATIQVILAETGGDMSRFPTPAQLASWAGLCPGNHESAGKRRNVATPPGNRWLRRALIEAARAAARTRGSYFAAQYRQIARRRGPNKAAVAVAHSLVVVIWMLLATGEPFHDLGEDWFQRRRDPQRESRRLVHQLEQLGYTVTLQPAEPAA

SEQ ID NO: 479686 - protein, 439 aa, unidentified
MAKPDKQKEAEFAAFVGIDWADQKHAWALQSEAGKDIEQGELDHTPEAVDLWAAELARRFGGRLIAVSLEQSRGSLVFMLTKYAHLVLFPIHPALSVNYRKGFRPSGAKSDPSDAGLLLDLLVRHREKLRRLDPDTEQTRTLQFLVEARRKLVNDKTRYANRLTAYLKLYFPQVLVWFSEVSSQIVGDFLDLWPTLTQLQRARPQTIRKFLVQHHSCRSDSIDRRLEEIRQAVPATHDAAVITANVAAATAMVHMIRELRQLIDAYDKQIEILVKQHPDFAIFDSLPGAGRALVPRLIAALGTQRDRYHSASELQCYSGIAPVLVSSGKQAWVHWRWACPKFVRQTFQEWAAHSIGFSPWAKTYYEQQRAKGKLRNAAIRSLAFKWIRILFRCWKARTPYQEDVYQQALATRTAARTNKPLELEWKSCAGFSKIARVTS

SEQ ID NO: 479687 - protein, 451 aa, unidentified
MDRERHPVGSCAMSARPSVMELTERPMATGVDVTNAFEWYLGIDWGAAEHWWCLLDARGEVVGTRAVRHDVTDVQAALGWVLQTTGAAPAMIAVGIESIRGTLVETIGERGFAVFAINPKQLDRCRDRFTAAGAKDDRRDAHVVADTLRTDQRVFRRIRNDDPITIHLREVCRLVEDLQGDELRLANRLREQLYRVDAAWLAFTPAADEPWLWSVLQETPHPDAWPRLSRRRVATVLHSHRIRRITSDEVMHGLRQPRLTSAAGVSDAVATRIAALVPQLALIRQQRLEAERQIDRLLGQLAQTESANGEPREHRDVEILRSLPGVGRIVAATMLTEAAAAVAARDYVMLRTFGGAAPVTTRSGKCTFVVRMRRACKRRVRQALYHWARTSVQHDPAAKAYYDRLRARGHHHARALRSVADRWLRILVAMLKAGTVYDPSRFAASLGGHLA

SEQ ID NO: 479688 - protein, 338 aa, unidentified
MEKYTNFVGVDLSKLTFDVAVILNGLKDNIRYRKFKKTEEGIQEFLEWLKQSGAVTDRQTLVCMEFTGLYNRMLLNFLEKTGVTIWVEMAAHIKQSLGLQRNKSDKLDAKRIATFAWRNQDETKVWNSVDKDAQKIKDMLAQRERLVDTRKRLLVPLEEMRQEGMVEEAAQLERYQKPVITQLDNSIIKIEQAIKEVVDNNEELKSKSELAQSVKGVGLVICWYIIAFTNGFEYLKSGKSLACYCGVVPFERTSGTSVRSKARVSHIANKKLKSLMHMGAMSAIKYDTELKEYYERKVKDGKNKMSVLNAVKNKLLLRIAAVLRENREYEENHVYKAA

SEQ ID NO: 479689 - protein, 418 aa, unidentified
MKNIKTKKLKTVNGKTLIVTVDVSKDKHSGYCRCPDGTEMKPFEFFNNGRGFGEFWNRISKTKKDHNLEEIVFGFESTGPYAEPLLQYLRKRAVRIVQVNPMHTKRLKELQGNSPNKTDYKDPKVIADIIELGHALTVVVPEGAAAELRRLTQARERSMQRRIVLLNQLHDLAYLLFPEFLQVMKDMKTKTAQYLLKHYPTPQCLVQYGLGGLTKTLKKVSRGKFGKGRAEALYEAAKTSVGIIEGQKSMVLEAKEILTHIEASEQFIDSIEKEMAHNLKQIPYSRFILSLKGIGEVTAAGLIGEVGDFSKFTTIAEIEKLAGLDLFEISSGKHKGTRRISKRGRSLMRKLLFFASINVVRKGGVLHEAYQRLLKGGKPKLKALIAIARKLLRIIFALVRNHSVYVIDYCKPQLKMAA

SEQ ID NO: 479690 - protein, 411 aa, unidentified
MNPVVGLDVAKGESQIQAFLDRKTPFKKSFKISHTVEGFKQLHQFLQSIEEKANSKPVLIMESTGHYHSPVMQFLDSLNYIYIVINPLISYRAKSSSLRKVKTDVIDAYHLCELYYKEELEPHKKRGAQLLNLRNLTRQHDHLTGISSQAKLHFLAILDQVFPEYRGVFGDLYSNVSLLTLLEFPSSEAVLQAGEDQLAKRIASLCTSRSKQWANERAKLLMTAAEKNPFQVNLYRSLIISLEMHIKMVLQYKEHLSNLKAEIDVLVKEIEEYTIIQSIPGIGKKIAATIISEIGEIDRFDNPKKLVAFTGVDPSVFESGKFTASRNRITKRGSSRLRHALFMAVRCAIRDNRKSKTTDEIIPRNKRMRQFYDKKREEGKPFRVTVIACVNKLLHWIYALLKSKTTFQDLA

SEQ ID NO: 479691 - protein, 345 aa, unidentified
MDKISVIGLDLAKNVFQVHGIDYDGEVVVRKQLTRSQLRRLFAKLAPCLIGMEACGGSHYWSRELTRLGHTVRMMAPVFVKAYLKSNKNDRNDAETICEAVQRPSMRFVQPKTPEQQAVLHLHHGRRLLVRQRIALSNHMRGVLSEYCIVLPQGAKAISQRLPELLEDADNAQPMLARHLLAELKEGHDQLIERIERIEVWIKAWYANNSVSQRLASIPGIGVLTATALAATVGEGQDFRNGRQLAAYLGLVPRQISSGGKERLLGISKRGDSYLRGLLIHGARAVIYHIQRRLKASQPGGNPWVEQLLLRCHPNEVAVALANKMARIAWVLMARNETWRAVHPV

SEQ ID NO: 479692 - protein, 345 aa, unidentified
MPIASGPTSSPDRLYVGVDIAAATFTAVWMESDAAPSRPITLDQTPQGFAALQMRLLGTGRAAADTLVVMEATGSYWVALATMLAQADFAVAVINPDQAHSFAKALLQRAKTDTIDARTLARLAATLQPAPWTPPPAIYTELQQRLAQRDALLDLRQQVRNQRHALGYLPVVVEAVRARMDELITTFDAQIAAIEREIAQVLPQDTAWAASAELLLSIAGVGLLTASWLLVATLNFTSCASPEAATAYAGLAPNPKESGTSVRGRERIRHGGNKRLRTALYLATLSAARYNPLIKAFYDRLRAAGKPKKVARCAAARKLLHLAWAVVRKGRAFDPLYRQQRQQAA

SEQ ID NO: 479693 - protein, 363 aa, unidentified
MHYIAFDAHKRYTLASVEQTDGQLVRELQIPHERGALRHFLQRCDPGSPVAVETTGNWYWIVDEIEGAGCAPRLVHARKAKLMLGMINKTDKLDARGLNRLQRTGTLPTVWIPPRELRDWRDLPRTRMVLVRQRTRLKNRIHAVLAKYAVSLPDVSDLFGRHGTRWLREHLAAQVPPQTAYAAQRVLEQIDTLDQQVAQLEARMDQLFTPTPELELLRTLPGVGLILGIVILLEVGDVRRFPRSAQLAAYAGTTPRVHASGGKTRYGPLRPDVNRYLKWAFVEAANIICRRRARAPQRHVTQLYERIARRRGHQTAIGAVARHLAEATYWILTKGEPYREPRPRLPQPTEVGIVHGGVSAPMP

SEQ ID NO: 479694 - protein, 318 aa, unidentified
MDSNMNQSTTIGIDTGKTLLDIHIRPVGLFFSVKNSEKGIKEALNIIKKYSPTRIVIEATGRLEMPFVLACAEDNLPIVRANPVHIKRFAGAVGRRAKNDRLDAELIAHYGEVIQPKTTQVKPTNMRLMSDLVVRRNQLLSMQTMEKNRIQILPKSLHATIKPILTAMKNQIAKIEEKLVALIEECQEYQSKSLILKSVPGIGNIAAASIISNVPELGYITNKQAASLIGVAPITKESGRYKGKRTTQGGRAQVRTVLYMAMMSAMQCNPVFKETYQRLVKAGKPKKVAIIACVRKMVVILNSMLRDGVIWNENMAKN

SEQ ID NO: 479695 - protein, 331 aa, unidentified
MEFQETIGIDVSKPFIDAAIHTTRKHRRFKNTVDGFCEMLLWVSKNSKVKRLNTLFAFEHTGLYSLPLSAFLSEKRLSYVLIPGLELKRSMGIVRGKDDRIDAKAIALYAYRRREEVTPYALPSKRLLELRKLLSLREKLVKQRMGFKSTNTEIKGFLTRKDHAMYFTVHEEMIKTLNQQIRAVERQLELTIRAEKHLRQMFDLIIGIKGVGAQTALFMIAFTNGFTLFPNFRKFASYAGIAPFPYQSGISIQGKSKVHCFANKKFKSLLSNCAAIAIKCNPEMRMYYQRRISEGKGKMSTLNIVRNKLLARIFAVVQRGTPYVNTMAYAS

SEQ ID NO: 479696 - protein, 413 aa, unidentified
MHIDKKFELLEKIEVFVGIDIAKNTHYASFLTKTGKILKTGLAVKNSREGFTILLNELEKHDQNVLIIGLEPTGHYWIALYEYFINLGYTIMLVNPYHTKLCKEQYDNHQSKNDPKDSVLIARMIREGKFTPHLGVDGPYANLRVLTIAREDVALDLKRATIKLKTLLDQYLPEYEKLFPTVSIKSSLAFLRTFGISGIQSSLCAEEKITLLRTKSHSAINHERATKIVQSLAQTVGSRKAIDAVECRLKSLLDRIALFERNIAELEQQIELQLERTNEYRYLKSIKGIAVVTAGTFLGQIGSLSNYRHPRQIEKASGLMLAAQSSGTHDGKPSISKRGRSLLRYILHRIAVLLVAHDKGFKKFYEHKTKVLKKEPLVALVAISIKFINVIFGMVKNKIEYDGSLLFKGLSDA

SEQ ID NO: 479697 - protein, 332 aa, unidentified
MGGHRGNSYLAVIDTDNNRIFKKKARNNLSEIVMLLAPFKEQIKGIVVESTYNWYWLVDGLMDNGYQLHLANPSAIKQYEGLKHCDDITDAFHLANLLRLGILPEGYIYPKQERPVRDLLRKRMHLVQHRTAMILSFQNLVARNLGGKMNVNTINKLIEEDLQDLFENEYLVLSAKASISTIHFMRSQIIHLEKAIHNAAKVRNEYKLLKTAPGIGKTLSLTIMLETGPIERFKKVGNYASYCRCVQSNRFSNGKSKGKGNRKNGNKYLSWAYVEAANLALWNYDYIKRYHQRKTAKTNNVVAIKAIAHKLARACYYIIRDQKEFDPLKAFA

SEQ ID NO: 479698 - protein, 337 aa, unidentified
MNTKLAWVSSRLLRQLTAETIVANITQKIILGIDVAKSELVIFNWINQQRTKLANDAKAIRSWLRSFHGPLCIAVEPTSHYHREVVDQAAALGHQVYLVNPRQLVHYREGISRRNKTDAEDAYLLARFVAREADELRAYQPLCAQSQKLWALLKRRAVIVAARKRLRQSLADVQVSAKALFTQFDRLLKRIDQRIKALLKDLGWGADIKRCLSIPGIGPLNAAALVATYHRGAFASSDAFIAFIGFDVRLRESGTYKGKAKLSKCGEAEIRRLLYCATKPARSHAAFDQYRQRQLAKGRSKIVSNVALARKLARIAFALIENGTSFNKTPNRTGYAP

SEQ ID NO: 479699 - protein, 375 aa, unidentified
MKEKVRFLGLDVHAETIAVAIADPDGEVRSLGTIANRAESIRKLVKKLGSVEQLRACYEAGPTGYVLYWQLTQLGVECAVIAPTLVPVKAGDRVKTDRRDAERLARSHRSGDLTAVWVPDEGSEALRDLVRAREAAKADQLRARHRLSKFLLRTGRRPETKIKLWTGVHMTWVRQLRFEHPAQESTRLDYLHEVEHMAERVLRLEQAITDAIRLASAQTQEVIRGLQALRGIAEISAVTIISELGELSRFENARQLMGYSGAVPSENSSGKRVQRGSITKAGNAHLRRIVVEAAWSYRLRPGIGPRLRKRQEDVPEEIKEIAWKAQIRLTKRYARLAAAGKDQRKIVTAVGRELLGFIWAIGIKAEAACKQKLAA

SEQ ID NO: 479700 - protein, 352 aa, unidentified
MTVTIVETRVQACAITGGVDTHADVHVAAALDSIGGLVGVEEFPATPAGYAQLLAWLGGFGTVCLVGVEGTGSYGAGLARHLAAAGIRVVEVDRADRQDRRRQGKSDPLDAVSAARAALSGRARGAPKGRDGQVEAIRALMVAKRSARAGRTQTINQARALIVTGPEDIRTRFARYATADLVAGLASLRPRPGSMVRYHTLLSLRELGRRAQFLDGQLERLDELIVALVTARAPGLLSLYGVGPDTAAKLLITAGDHPERLRSEAAWAHLCAAAPIPASSGKVKRHRLNPHGDRQANHALWQIVITRMSSHPPTRAYVARRSKDGLSTKEIIRCLKRYVAREVYPHLRPGLG

SEQ ID NO: 479701 - protein, 391 aa, unidentified
MVYVGIDVAKDKHDCYIVNSDGEVLADVFTISNDQDGFSQLFRRLQSVAPDLSNVKVGLEATGHYSYNILGFLLDKGLSPFVINPLHTNLFRKSTSLRRTKTDRVDARAIAAMMMSDVVLTSYTATSYHNEELKSLTRYRFEKVQERARLKQSVARLVNILFPELEKLVPTLHLQTVYTLLSELPGAKQIASCHLTHLKALLADASKGRYGRDKAIEIRDAAQRSIGSVMKMKSMELQHTIRLIRELDAEICEIEDAIKEIMDEMAPPILTIPGLGYRMGAMILAEIGDFSRFDSPDKILAYAGLSPSTYQSGKLANAYPHMEKRGSRYLRYALFNATKFVCNWDSSFAAYLARKRAEGKHYNVAISHAAKKLVRLIFALMKSGRPYCPAT

SEQ ID NO: 479702 - protein, 406 aa, unidentified
MRAIGLDVHRDFCEVAICEEGKVRSAGRVESSPEALGALAASLGPDDRVALEVTGGAWAIVAILEPQVAKVIVVSPGDTGIAQARAKTDRLDARTLARLLWAGELEPVWAPDELTRLLRRRLARREQLVRARSRAKNEIHAVLMRCLVGKPPFSDLFGKNGRRWLKGLELPVEEAETVEACMRHIEFLDTEVAEVERVVARYALSCSDARRLMSVPGVNVICAATFLAAVGDIGRFRTSRQLVGYLGLDPKVRQSGSSPAKGGPISKRGSGTVRWALVEAAWSVVHQPGPMRAYYQRLRARRGHQIAVVAVARKLAVLFWCLLTREEQYAHQQPSLTAKKLRLLEIRSGAPTMRGQRTGTFATREKMREAEQALALAAEASYVRMVRDWQAAAPKKVGASVTPGRA

SEQ ID NO: 479703 - protein, 371 aa, unidentified
MKSILSVGMDVHKNSFSLCAYDGYTGEIVSESTFASDVKLVIKFIETLKSQHENDVEIKCGYEAGCLGYSLYKSLTARGVDCVILAPTTMQVSAKNKMVKNDRMDALNIAKNLASGSYKAVYVPDEEAVEIKEYIRMIHDFKKELKRVKQEICAFVLRHGYQYDGKSKWTIRYMNWIRELEMSEIQRETLNEYIAEMENLNDKIDRFMNRIDEMYQSDRYNEKVSKLRCFKGIDTFAAMTIQVETADFERFPSAKAYASYTGLTTGEHSSGDKNNRIGITKQGNTVIRKTLVECAQSLVKGNVYAKKSQGLKSRQKVMDVNIIAYADKATERLKKKYQKLIERNVPRNKAIVAVARELACFIWGMETGNIH

SEQ ID NO: 479704 - protein, 381 aa, unidentified
MDHKQGIREQRAQVPVLYVAFELANSTWKLACSDGGKLRHVTVNAGDLAQVQGAILGAKRHFGMDDEVHTVSCYEAGRDGFWLHRYLHSCGIDNVVVDSASLEVNRRLRRAKTDRVDAGKLLNMLVRYHGGEKHLWRVVRVPNREDEDARNLHRELEALKSERTRHRNRIHGILIQQGLRINNPSKKKFVKELDSLRTWDGRELPAEMKMRLVRIHERLRMVEKQISSLGKEKTQRLQEENARMAQVAQLLRLPGIGPVSSWTFVMEFFGWRRFRNRREVAALAGLTPTPYDSGSRVREQGISKAGNRRVRTLAIEIAWAWLRYQPRSKLSRWFLERFADGGSRMRRIGIVALARRLLIDLWRFLEYGVVPEGAQIRPLAV

SEQ ID NO: 479705 - protein, 309 aa, unidentified
MSVSSFDSAWAVSGKASHKVYDYSDKGIAKLLSDTPATSHYVMEATGVYHSKLALTLHEAGRVVTVVNPLVIKRFCQMQLTRVKSDKADAEKIRQYGEQSNLTVWKPSADEIDALRQAHGWLDDLIRDRTRLLNRQEAHQHQAKPNNFVTRQMRGAYTRLTNQIVLCEGQLSVIVKKCFPELYEHLVSIPSIGKKTAIELIVITEAFSKFAEVKGLTAYTGISPTTYSSGSSIKGKGAIAKMGNGRIRQLLYLCSLTAMRSNKDCKALYERMKEAGKPGKVIQVAIAHKLLRQAFAVATKGVYYTEKTA

SEQ ID NO: 479706 - protein, 422 aa, unidentified
MEVIHSRCGGLDVHKETVVACVRLALEGKITREVRTFETTTSGLLLLLAWLTEMGCTHVAMEATGVYWKPIWNILSDGDFELVLANAAHIKNVPGRKTDVSDAAWIADLLAHGLIRSSFIPDQEIQELRELLRTRKQLGRQQSRHIQRLQKTLEGANIKLDSVITDIVGKSGRAMIRALIAGETDPVKLAALADGRIKASPQELREVLRGRVRDHHRFLLHLHLQHIEFADAAILDIDRNVAALITRMDQEVEAGRTFQTLIALLITIPGIDVLAARIILSEIGPDMNRFPTAGHLLSWAGLCPRNDESAGKRRSTRLRKGDRWLKTLLIQCAWAAKRKKGSYFNAQYYRLTGRRGPKKAVCAVAASLLTTIYHMLKDGTQFQDLGADHFDRRSKEVRAKRLINQLAKLGFDAKLTPLAEAA

SEQ ID NO: 479707 - protein, 337 aa, unidentified
MDSHKDTLAISGVDAAGRQQQAQVFPNTHQGHRRLIAWLRAQPGVVRVGIEGAGGYGRAVAIHLVQAGVVVVEVTPSLTVRERRRLRQRGKADPTDALAIARVVAREQDLPAVRGQDLAEDLRLLVDYREQLLGERTRIANRVHADLVALRPGYQHQLPELRSQRAAGLVRRLLAGQVGVRAELVCRRLDQLDRLDAEIRQLKRRIGQLVEATGTSLVQVHGVGPLVAARILGEVGDVRRFANRHKFAAANGTAPIPASSGRIQRHRLNRGGNRRLNRALYVVAITQARSDHPGRAYVAHKQRQGKTRREALRCLKRRISDAIYRQLLADLQPNLAP

SEQ ID NO: 479708 - protein, 418 aa, unidentified
MTATDTTASTLLVAIDISKHRHEVLIGAPGKKRRRRLTITNTLDDFRRLAAILMDYGLPVRIGFEATGNYHRPLAHHLGQAGFDLKLVSSVGLARTREALHNSWDKNDPKDAQVILRMLEIGAVQFFHDPLATGVADIQELSKTHEIVSRSKTELWHRILTHYLPLYFPEAERFHRSSRTDWFLAFLEKYPTPHMITAMSRETFIADAWQVAGRKVSKERLLSDIYSTAVGSVGLPVHPDSDAVRMFRLVLAEGRSLVRQRNEIEARAVELLSDHPDYQLLTTIPGIGPINALTILAEAGDLRRFRHHRQFLKFCGMDLATVQSGMFRGQSRISKYGNARLRRTFWMAGQVAVLKRTNSFRDKFERYIARDRHNAHLRRKAYTAIAAKMARTVHAVVKHGEPYRPFFEGVSPGGRTLV

SEQ ID NO: 479709 - protein, 432 aa, unidentified
MVRFDAGEGVVLEEDSQDGEIIARVAALDIGKAELVCCVRVPHEGKPGRRLQEVATYSTMTGSLLAMSDHLRSLGVGRVVMEATSDYWKSVFYLLEAQGHEVWLVNAKDVKHLPGRPKTDKLDAVWLCKVAERQMIRPSFVPPPEIRRLRDVSRYRIDLVGVRTAEKQRVEKLLEDAQIKLSVVASDIFGVSGREMMAALVGGQTNPKVLARLARGQLRAKIGALEEAFTGYFTDHHRFLLAKMLARIDALDADIAELDATLGELIAPYAPAVNKLDEIPGVGTTAARVIIAEVGVDMSRFPTPAHLASWARFAPGVKESAGKNKGKGTTGHGNRYLARVLGEAAVSAGKTNTFLGERYRRLARRRGKKRAIVALGRSILVIVWHLLSDPQARFHDLGPDFYDNHIGPERKKRNHIRQLEALGYKVTLEPTA

SEQ ID NO: 479710 - protein, 353 aa, unidentified
MAYGAIDLHKKESQVRILTDAGEVLDRRISTRRESFTQLFGDQPRMRVLLEASTESEWVACHLERLGHEAIVADPNYAPMYGGRSRRVKTDQRDVAALTTACVHGTYRPIHRRSPARRAIQAQLNVRDELVHTRGRAISMVRAMTRAEGLRIRSGSPETFLRRLAAVEVSPSLAATVEPLCQLMACVNDQLRMADLRVRDLVTQDPAIARLTTFPTIGPVTASAYVAALDDVRRFRRAGQVANYLGLVPREYSSGERQRRGHILHSAHPRVQALLVQAAWRIWLSRRDETAALRTWARLLARRRSTPIAIVALARRIARILFAMWRDEREYQGTRRAERATGRAPASMDAAVS

SEQ ID NO: 479711 - protein, 334 aa, unidentified
MALELLAIDLGKRSFHLYGIDTDGVILSRKVSRAKLAEVVGNLAPTAIAMEACASAHHWGRCWLAAGCVVRLINPRFVKPFVKGSKNDAVDAEAIFEAAMRPTMRFVPVKSRNQQDLQSLHRARDRLICQRTALINHTRGLLAEYGIVLPQGPWRFTAQAPAAIAGADLSDLARAIISELLDQLGDLDRRVKKLDATIVGLCRTNETCRRLAKLPGVGPVVATAIVAAVNDGRQFRSGREMAAWIGLVPRQYTTGGKPRLGGIGRRANHYLRRQLIHGARSVVSRLPKHDDPQSTWLNALVARRGFNRTIVALANKTARIAWALLSRKEEYAIA

SEQ ID NO: 479712 - protein, 375 aa, unidentified
MKDVQKFVGLDVSKDSIAVAIADSGRGEPRFHGTIQNKPEDIRKLMKKLGKPESLLVCYEAGSSGYGIYRFLLSMDIDCMVVAPSLIPKRSGDRVKTDKRDSIRLAQLLRAGELTSVWVPDEDHEALRDLIRARHDAREDLQSSRQRLVHFLLRHGIRPPQGVRNWSVKHREWLKRLTFERASQRIVFQEYLHAINEVEDRMKRIEAQIHEEALQSEHAPVIQALQTLRGVAEVTAVTLVAEIGQFSRFSNPRQLMSYAGLVPKEYSSGSSRWQGSITKTGNSQIRRSIVEVCWSYRHRPSLKGELLKRQEGQDPEAKRIAWKAQHRLHMKYHRISAKGKGGKVAVVAVARELLGFIWAIGCAIEDKQVSVSNVA

SEQ ID NO: 479713 - protein, 342 aa, unidentified
MKITTVGLDLAKNVFHAVCFDEHSKEVKKRMLRRNQLRIFFTQLPPCKVGMEACASSHYWGRELKALGHEVKLIPAQHVKPYLLGNKNDFNDARAIAEALTRPQIRGVAIKTTEQQDIQATHRMRSQCLRDRTALCNSVRGLLGEYGIVLSKGVHILRKSIHGLLEDAENGLSLVFRNLLARRYEQLVELDGHIDFFTHELEIQSRQDDACQRLQEIPGYGPIIASAFYSTVGNGECYSRGRDVAASIGLVPGQHSTGGKNVLLGISKRGDGYLRGLLIHGARAVVIHASKKKDRLSQWINRIVAERGKNKAAVAVANKMARIGWAILRHNAHYQATLKATC

SEQ ID NO: 479714 - protein, 438 aa, unidentified
MNSLYDINRFRQIKNELVKNHEFLLVGIDISKNSHVACIIDSLKYIYLKKFRFDNSADGIDLIIKTVKTIQQKNNKKETIFALEPTGNYHKPLANYLYGKGYMVCYVSSIAAKENRKTIDGRWRKNDPDDAYNIADLLGQGKIMFYDLEHQKQFNQLKPLLILRKKLQKRLCSIKAKIRNNVFAQCFPEIDFLYNQIDNPEVIEILKNFPSAEQIRNTSFKEFYSALSKTGRITIKKKQRIYNVWNRAVNSIGYPFNSAIKRESEFIIEDITLVKTQIKKIDKETIDTYGNSQDYKLLIGIPGFGPIYASIFLSIIKDIQKFAHPDQIIKLAGLDLEYCQSGNYHSKSRSSKKGNALLRYALCGVVNGALKHKDFKAIFEEQLQKKGDNKDNRRILKVKLAVKMIRIAYAVLSKKENFDIEKIKENSVKKPVFIEREG

SEQ ID NO: 479715 - protein, 426 aa, unidentified
MLWGMRRGHCIGRQTVNRSMASIGADVNRPMEPPMRKPKQRKPLNDLSRSLTTLDVNQTLIAVIEMGLKSWLVAGIVPGVERQPLKKLDTDEDALLKLLDRWRMEAEEAGHKIKRITVAFEAGRDGFWLARWLRERGIEAHVIHASSVAVSREHRRAKTDRLDTELLKRAFLGWLRGERDHCKTVAIPTIKEEDAKRPNRERDSLVGEQSRIVNRMKAALARLGIRNFNPKLKKAAERLGGLRTPEDEPIPPNTLAELHRDMERRRLVTDHIRQIEDARLERLKQAPKDGPNVMVRLLARVIGVGIETADMLVQEVLSRNLRDRRAVARYAGLTGSPDESGSKRREKGLARSGNARVRRGMIQLAWRFLNFQKDSALAKWFQARTANARGSRKKMIVALARKLLIALWHFVRDGVMPEGVILRPAQ

SEQ ID NO: 479716 - protein, 391 aa, unidentified
MLICGIDIGKFRHEACIIDETGRQLAKTLSFTNTTDGGERLLEYIKQNNPTNQTVVIGMECTGHYYLSLYCFLFDKGFQVNAINPIQSHAIRNLFLRKTKNDAKDSFLIAETIRIGRFSATPLADEDILSMRQLCRHRMDLVDYIADQKRKIIGVMDGVFPEYQHIFSDMFGKTSTELLNKAVTPEELLAMDTGKLCELLRTNSRGRFGEAKAEELRAAAKKSFGITIGLPTFSMQLRQLLEMIELLEEQLVELETEITQYLRKMDTYITTCPGIGEVLGAIILSEIGDISRFEQPKKLVAFVGVDPSVKQSGEFTGTQNKMSKRGSPHLRRALFLAANVAAFRDPVLSAYYQKNRAEGKHHYTAVGAVSRKLICIIYAVLRDNKPYVPNC

SEQ ID NO: 479717 - protein, 350 aa, unidentified
MTTLTRQITGGVDTHLDVHVAAALDERGGLLGVESFPTTPKGYGQLLAWLESFGEVDQLGVEGTGSYGAGLTRHLHRRGVKVVEVDRPNRLRRRRHGKSDPQDAISAARAAQGGDATGEAKTRDGNVEAMRVLRVARASARKGRGQALNQMRALTATGPDCIRAELRGLNVYRLLERASSYRPADKRDLVSINKLTLRMLARRALELEAEVSAIDAILEQLVVETAPALVAMTGVGTDVASALLVAAGDNPERLRNEASFAHLCGTSPIDASSGKHERHRLNRSGDRQANSALWHIVITRMVCDPRTRHYIERRMKEGLTKKEAVRCLKRYIAREVYNHLPIEDLALDSP

SEQ ID NO: 479718 - protein, 341 aa, unidentified
MAEYVGLDVSMKETALSIRRDGKRVWRGKCASDPKLIAEVIRRRAPGVARVVFEAGPLSVWFYHALTAEGLPAICIDARHAKAALDMAPNKTDAHDADGLAQLAEVGFFREVRVKGFDSMLGRTLVAARNRLVQITTELSNQIRGLMKTFGLVVPAGKGSRFEAHVRALLADQAGLAPILLPLLEAWRAMRLRAAELGRQLVASARRSEACQILMSVPGVGAVTATSFATAVEDPENFRRSRSVGAWLGLTTRRYQSGEVDYDGHISRRGNTHLRGLLYEAATVILTRTSAESSLRTWGLKLKERIGFKRAAVAVARKLAVVMHAMLRSGQLFDRTAGMAA

SEQ ID NO: 479719 - protein, 433 aa, unidentified
MNLNRLQVGIDFSQKKADFCLLSPDGQPLVSHQAFPNSLPGYQKARQLLLDSLQTQSFDGLDVSGEATSYYWLPYFWQMAHDSELSDCDLSLFLLNPRQVFWFKKSLPPDDKNDDVDPFYIAERTRTRRPTSSWDPQDDWMPLRFYTRLRFHLAQSLTREKNYYLIYLFLLHNTYQRIKPFSNPFGVTSQQVLGGERSLAELVALPDEALAEQLKAWSGGTLDDPLETARKLHQVAAESFSLPEPLALPVQRILDTTLNHINFIDKQIEQVEQWIAAEVQARRPEVLFLDTVPGVGLVLAAGITAEIGDLQRFFRTKKWSKKHKCYQVRTLREVEDAVAKMAGLWWPMNASGDFVSQDRPLAKTGNRYLRYYLTQAANGMRRQIPAYASFYGSKFREATRFKHKRALVLTARKSIGLFVGLLHRKEAYCHQEV

SEQ ID NO: 479720 - protein, 334 aa, unidentified
MKSDVVHIGVDVSKEKLDVYVPARKEGLLPETKEVDNSTEGFRELRNLARKAGATVCVEPTGGYELELVAFMHKFGVPVAYADALRVRQFAKAEGSISKNDTIDAALISRFADKIGVRVLEPADMDAVELRRKAKFRQTMMDSRTALVCRLETEIDADIRSMMKEQIRHLDKLIDKMERSCLDTVAKNEEMDTLRERFTDVGGVGDLTAISVLAGLPEIGKLTDEKLNRLVGISPEQRQSGTKEWQRRIWGGRKDVRNALYMAATASIQWNSILGGYYRKKRAEGRPHKWAMVPTMRKLLSLLNRIARDPNFNPKPEPESTKMNARVGRKKNAA

SEQ ID NO: 479721 - protein, 402 aa, unidentified
MNAVGIDVSKGKSMVAIMRPFGEIVSAPFEIKHTASGINSLVELINSVEGESRIVMEHTGRYYEVLAHQLSEANLFVSAINPKLIKDFDNDSLRKVKSDKADAVKIARYALDKWQNLKQYNVMDELRNQLKTMNRQFGFYMKHKTAMKNNLIGILDQTYPGVNTYFDSPARSDGSQKWVDFASTYWHVDCVRKMSLNAFIDHYQNWCKRKKYNFSQSKAEEIYGKAKELVPVLPKDDITKLIIKQAVDQLNSASTTVESLRTLMNETASKLPEYPVVMAMKGVGTSLGPQLIAEIGDVSRFTHKSAITAFAGVDPGVNESGSYEQKSVPTSKRGSSDLRKTLFQVMDVLIKTHPEDDPVYQFLDKKRAQGKPYYVYMTAGANKFLRIYYGRVKEYLSSLPES

SEQ ID NO: 479722 - protein, 350 aa, unidentified
MIIIGVDFHPEFQQIALLNATTGEVEEKRLAHPDEAEKYYRALAGEGETVRIGMEASGHGRWFERLVAELQFDLWIGDAAEIRSRRGRKQKTDRQDAQHILKLMLKDDFPKIWVPSWENRDLRQLLWHRHRMVQARTRVMNQLQAVALNEGFHCKKKLWRERGRQQLESFALAPWASRRRRDLLELLDRLNPAIADLTQAIEREVENCPAAQRLKTHPGVGVLTALAFVLILGDAERFHCGKQVASYLGLVPLEDSSGKRRRLGHITKQGSSIVRFLLVEAAQVTVRSLPEWRSKYFHLMLRRGHKIAKVAMARRLAVQLFWMMRKQWDYEQLKKFGSHAGQPENRHGVQ

SEQ ID NO: 479723 - protein, 361 aa, unidentified
MNSHQYIGLDVHKKSIWYCAKNAEGKIVKEGRFEATKEGIEEWCKSQAAPWTGLMEATLFSHWIYDAMTPHAAEMRMGHPAAMKEALATKHKSDRNDARRFAELCRNGSVRTLYVMPGALRALRQQLRVRRLIRKQTTQVKNRMAALLMESGIVFSPRQLHTKRYYQNLVNNPATPPTLKALLRMLRQVQTNLVEVQRAIFRSLEQAPQLKDRLKLLQTIPGVGKITALTWALEIGDVRRFPSCADAVSYCGLVSADNESAGKNKSGPLSKIRNPELQHILIEISHLAPKLYWRFDELYRKKSQQVHGNAATVEVARKMVAYLMAVDRSGQPFRKQLAPGEPVAAASTPVELADAAGANQG

SEQ ID NO: 479724 - protein, 330 aa, unidentified
MSDPIEVQSVPIKKLQMIGVDVAKQKLDVSVDDNTALTIDNHEESFKNLLKIIPENGSACFVMEATGGYERKLVAFLQAREIAVAVVNPKRVRDYANAMGAYAKNDRIDANMIRHYAQTAYDKKRLQLRESLTEAARRRESLLRRRNQLVGQRSMEKQHLESATDKDTVRSIKRIMKQLDKEIEKIEAMIQTDINADEHLKKSMKQLLQVPGLGDVTVLTLLTQLPELGKLSNKEISALVGLAPYARDSGKKTGRRAIFGGRTQIRSTLYMATLSATRFNKPIRLFYQRLLAQGKLKKVALVACMRKLLTILNSMAKTGSEWNPDFANQA

SEQ ID NO: 479725 - protein, 352 aa, unidentified
MRFYTDQHHYYCGIDLHTQNMYVCILDQAGNILLHKNIPAAPQALLRIIEQYLSDIVITVECMFTWYWISDLCMKYNIPFVLGHALYMKAIHGSKTKNDKIDSHKIAVLLRGGMIPMAYVYPSEMRSTRDLLRRRMHFMYKRAELLAHIQNTRSQYDLPEFNKCISRKRNRTGITEHFEDMSVRKSIELNLTLLKQYDILLNDVELYLVRHTKEHRPNDLYLLRTIPGVGKILSLVMLYEIHDIYPFQRVQNFTSYARLIKPLKESAGKVKSGGKRKLGNAYLKWAFSEATLLLIREKQEIKDLHLRLKNKHGKARALAIISHKLGRAVYYMLKNKKAFDLQHFLQIKDRAA

SEQ ID NO: 479726 - protein, 364 aa, unidentified
MKVEKTETRFVGIDLGKRTYEMAIVGKGGKVTRNNGRTSVEGRQKLYKKLQQTDKVALEAGTLSFNMAKEIEAVVGCKVYVLNPYRLSIIYRSMKKTDKEDALKLAHIIEDFQEERLPTVPVPSDEEMERRKTIASLRRVKQSRNREINRLHALFVNQGITTVVRKDLAEGEDRKRMIKQLSGFDREEAEYIVEVLEQHDRRIELLEKKINKEAKEDELMQRLQSIPGVGPIVSYAFAAHVNAARFENSSQLSNYLGLVPSVYMSGDTVRYGSITKRGNSYLRALLVQASWALIRTKEEGKLKLRYKYMTVERAIGKKKTIVAIARRLAEMMYILARDGSSYKVMSFAPNNEVVSDISGVKFCA

SEQ ID NO: 479727 - protein, 386 aa, unidentified
MQKLNDLSRSLNLLEPDGTLIAVIEMSQSSWLVAGIVPGVERQPLKKLKVDEGTLLKLLHRWRKEAEKAGRRIKRICVALEAGRDGFWLARWLRARDIEAHVIHASSVAVSREHRRAKTDRLDTELLKRAFLGWLRGERDHCKMVAIPTIKDEDAKRPNRERESLVGEQNRIINRMKATLIRLGIRGFNPKLKKAAERLEGLRTAEGEPIPPNTLAELHRDMVRRRLVSDQIRQIEDARLERLKQAPGDGPHAMVRLLARVIGVGIETADMLVQEVLSRNMRDRRAVARYAGLTGSPDESGTKRREKGLARSGNARVRRGMIQLAWRFLMFQKDSALAQWFRSRTENAPGTRKPMIVALARKLLIALWRLVQEGVVPEGIVLRPAS

SEQ ID NO: 479728 - protein, 351 aa, unidentified
MSRSSFSAAIATLGIDLGKNSFHLVGQDERGAIVLRIKLSRTQLPQRLAHIPPCLIGMEACAGAHHIGRQLQALGHDVRLIPAQYIKPFLKGHKNDYRDAEAIAEAVQRPTMSFVAIKTPDQMDLLALHRVRSRLVSQRTGVTNQIRGLLLERGLTVRQGLAPLRQALPGILGSSSDALSPRLVRLITDLMEDWHRLDERIAHVSAEIEALAAQDEHCQRLMSVPGVGPIISSAMVAAIGTGAGCKQGRDFGAWLGLVPKQESTGDRTILGKISRRGNTYLRTLFVQAAHIVLVTRPHRARLGLWPWIETAGRRLHRNMLVIALANKLARIAWAVLARGHAYQPRSVSHAA

SEQ ID NO: 479729 - protein, 366 aa, unidentified
MKAAPAASAIELKNEKSAKAKRILVGADVHLRGYQVARKVDSGVIGVVENFRSLEALLLYVEKQCERAEQVVVVYEAGPLGYTLYRMLKARGVLCYVCAPDSSEQQRKRRKNNKIDARSLTSKLFNYLNGNQEALQLARVPTEAQEQLRLASRQHDQLVEERKRLGAKGNGLLLSQGFGSWSNWWRPKAWAQLSCIVPQWLLERLKIWVDVLKMLDEKICQAKVALARACSGPRPKGVGALSQMQLQSEVLDWSLYTNRRKIACLAGMVPSEWSTGDEQRRGSITKVGVPAIRRIIVEMVWRMILFQPQYKAVQKWQEVLRGTNPALKKKAVVAIGRQLMVDLWRLQTGRVTAQELNLVMIGDEGV

SEQ ID NO: 479730 - protein, 420 aa, unidentified
MVYLERGYNLKELPWSKTVSNSFLFKEACMILVGVDVAKDKHDCYIMTSEGEVLFKSFTIANNMEGFNQLYEKILSVIDNFDNVKIGLEATGHYSYNILGYLLDKGLTPYVINPLHSNLYRKSLSLRKTKTDKVDSRIIASMLMSDVSLKPYSNTLYHNEELKSLTRYRFTKVQERAKLKISISRLVTILFPELEKLVPTLQMNSIYALLYEFPSAHAISKAHLTRLTNLLNTTSKGHYTKDKAVLIREAAKNSIGSNMPAKSLELKHTIKLIKELTSEINEIEEEIKIIMNKINSPILTIPGIGLSTGAQILAEIGDFKNFSSPDKLLAFAGLSPSTYQSGNMYSSNAKMEKRGSKYLRFALFNAAIYVSYWEPTFSQCLKKKRVEGKHYYVAISHVVKKLVRLIFHLEKTNERYSTVV

SEQ ID NO: 479731 - protein, 345 aa, unidentified
MVVLGADLHKRSHTIVVIDESGRQVGEKTIPATDAGHLELRRWAGQWPERTWGLEDCRHLSRRLDAELVRAGESVVRVSPKLMAGTRRSGREPGKSDPIDALAVARAVLREPGLPVATLDGPDRELRLLVDHREDLVAERTRHEQRLRWFLVELAIAEPAPRSLGRAVVQASLAVALAGRTESVARFARDLLARIVELSATIGRLEREIETLVRAHAPALVALPGCGALTAAKIIGEAAGISRFRSKEAFARHNGSAPVPVWSGNVVRHRLNRGGNRQLNVALHRIAITQIRLAGPGKAYLDHRMASGDSRTEAIRALRRRLSDEVFRRLRADEAAGSTGLALAA

SEQ ID NO: 479732 - protein, 365 aa, unidentified
MWEAPVLSQRTSVGLDVHARSVVGCGLDGVTGELFERRLTPDHREILEWIGQLPRPVGVTYEAGPTGFGLARALEAAGIVCVVAAPSKLIRPPGDRVKTDARDAVLLARLLHLGEITAVTVPSVIQESARDLVRAREDCRADLMRTRHRLSKLLLRQGIVYYGGKPWTGTHERWLRQQCFDAYGQRLAYEEAFDAMLVTRDRRDRLDAAIITMAATSEFSAVVTRLGCLRGVSTLTGFALATEIGDWRRFTGRTIGAYLGLVPTESSSGATRIQGGLTKTGNGHARRLLVEAAWHHRKPYRPSVLLRRRWAAASPAARARGQQANRRLHARWDRFEDRKKRPVVANAAIARELAGWCWSLAVLDD

SEQ ID NO: 479733 - protein, 339 aa, unidentified
MASTYCGLDVSDKSTHICVVDGEGKVIWRGVCATDPQALAAALAKRCPDVGRVVLETGALSAFLYHGLIERNVPVVCVCARHAKGVLSTRVNKSDSHDAEGLAQLARTGWYKAVHIKDSATHLDRAQLKVRDQLIKSHRAMAGQLRGLLKLFGLRLGKVTTPGKRAERLVALLRQKPELRPIVSPLIEAMASLEKQIRLSTRGLEARATADPVCQRLMSVPGVGPIVAFRFKSSIEDPARFECGQAVGAYAGLTPRRSQSGERDVTGHISKAGDPMLRTALYEAANSLLSRVKRPCALQTWGKALAATKGAKRARVAVARKLAILLHNLWRTDTGFQWA

SEQ ID NO: 479734 - protein, 384 aa, unidentified
MKVTRIGPDIAKQIFELHGVDQRGRAVLRKTLKRERMLEYFTQLEPCEVALEACGGAHYWHRELSKLGHTVRLVPANKVKPYVDGNKNNAHDAAAICEASSRPSMRFVEPKTVAQQDLQALHRVREVAVHHCTLLANHMRGLLLEYGVTVGRGYPALHRALPELLGDDEQRLSALLKQLLAQQWRMLKLHQKQVQTYDRRINCIARGETSCSALLKIEGIGPITATALVAAAGKGHQFKNGRHFSAYLGLVPGHSNTGNKTVMLPITRRGNRYLRTLLIHGARSALYAERNKDNPRSLWLQRLKARRGYNVAAVALANKNARIAWAVLRFGETYQPARAHRPERCATPSPRLQRQPQSRLTLKPQGASSQVRNSASSRPALIKP

SEQ ID NO: 479735 - protein, 344 aa, unidentified
MHYKLISIDLAKTVFQVAAFRDDNTIAFNKRVKRAQLLDTLRQCEPTRVVMEACYSANYWGREIAKLGHDTRLVSARVVKAMLVGNKNDSNDAVAIGEAAQRPRVQLLRVKGLHQQDIQSLLRARELLIKERTALINQTRGFLAEYGIIVAQGLAQLQQALPALLEDAENGLTTTIRSLLKRWHERWLQQNQELETLTHELIALISHDEVFKVLQSIPGVGPIVAAAIMASVNEITDFRNGRQFAAWLGLTPTQYSSGLVNRLGSISKRGNEGLRRLLIHGARAVLNWCEKKEDGLSKWLQQLKARKHSCKVTVALANKLARIVWAVLTTRQEFDITKACQAMK

SEQ ID NO: 479736 - protein, 386 aa, unidentified
MMVIGVDPHKSTHTATAVDPQTNRAVASVCIQASLADYRRMLTWARQFDQRRWAVENAEGLGRHLSSWLLARGEQVVDVPSTATARVRQLSRGGGRKNDQIDAAAAACVAALQGDGRPLEAEGVTDALALLDESRMNLAQSRVRLVNQLHALLRELIAGGAPRDLSATSAATLLRHIRPAGDVERVRKQIAAGLVTQIRAVDTLLKSNAHQISELVAASGSTLTGTVGIGAITAGRLIGRTGRAGRFPSPASFANYAGAAPVEIASADKARHRLSRGGDRQLNAALHTVAITQIRTPGSRGHAYYNAKIAQGKTAREARRCLKRRLADHIWRTMITDERRMATSPGGHPGAALTSSAAGSTPTTSSSDKSLPGPARADSTTLRSTA

SEQ ID NO: 479737 - protein, 338 aa, unidentified
MTIIRIGLDTSKHVFQVHGVDEAEQPVLRRQVRRSEMEKLFAKLPPTRIGIEACGASHHWARVLRGLGHEVVLMPPQYIKPYVKRRSKNDAIDAAAICEAMSRPEMRFVPVKSAERQAGLMVLRVRELLVKQRTALINAIRGHAAEFGVTAAKGPVRVAELLQRVDLEESGVPAPARELLGLLAGQLDAVEARLKTLEGQLMAVHKENQASQCLATIPGVGPIGAVSFALRVPDPKAFRSGRHFAAWLGLTPREHSTGGRRRLGRISREGDDTLRRLLVLGATAVIRVAKPGKASPWLLQLLARRPKKLAAVALANKMARIIRAMLVSGEVYRRPYPA

SEQ ID NO: 479738 - protein, 306 aa, unidentified
MLAELVDHVIGVDPDRDTITVTAVDARTSGVLGTDRFPATRSGYSDAMSWADAHSSGSERAWVIEGTASYGRGLTMALQSSDELVIDFDRPMRKASKDGAKTDALDAIRAAREALGRDKLNAPRASDGLREAIRVHTVARAAAVRARTAAVNELKAFIVTASEDLRSELRGLSTVKIVGRCSRFRATSSRPIAERCTRNAMRSLARRIQFLDAEIADHDVVLKELLDEAAPQLIAERGVGYVTAAAFYLAWSHPGRCRSEAAYARLAGAAPIEVTSGQNQDRHRLCRGGDRQLNRALHLVAVTRLR

SEQ ID NO: 479739 - protein, 362 aa, unidentified
MEFFCGLDVAIEETAVCVVDDRGEVHLTVKVASEPEALFAALKPFVARLRRVGHEAGSLSPWLHPELLKLGLPVICLETQHVRAAMSAQRNKTDEKDALGIAHIMRTGWFRAAHVKTESCYRMRLLLTHRRNLKRKFLDLENAVRHSLKSFGIKLGGTSRGKFDQAVREAVADDPLTAELMDAMLTARAALWKEYCRLHDLVVKMVAQSELCRRFLAIPGVGPVTALSFMTAIDDPTRFRRSRDVAAYFGLTSRRWQSGTSIDVKGRISKAGDADVRRALYEAASGLMTRFKGKDKVKSWGQQIAKRSCHRKAVVAVARKLAVIMHAMWSDGTFYVGDSTETETDAARRAQVKVRKHLGAHA

SEQ ID NO: 479740 - protein, 312 aa, unidentified
MPCFVGIEVAKAQWDMALRPSGERWAVPNDARGVATRVDRVQTLPPTRMVLEAPGGLERAVTSAWATAGLPVVVVHPRQVRDCARATGQLATTDALEARALAHCADGIRPTPRPLPDAQTQALRALLGRRQPLLGMRTAAQNRLTGTKARLAKDIEAPMTWRNADIATLDDDLETMLRASPRWRANDDVLQRAKGIGPVCAPTLRLALPALGTRTRQQIAALVGVAPLHGDRGTMRGRRTMWGGRAHGRTVFSMGTLVATRSNPQIKVFSERLLAAGKGKKVALTACMHKLLTILNAMLKHRTPWQPQEVQN

SEQ ID NO: 479741 - protein, 416 aa, unidentified
MTRCSTGSLEVGLSVATQHSPAERKGHTVAMMVIGVDPHKSTHTATAVDPHTNRPVASIRIQASLADYRRMLSWARQFEQRRWAVENAEGLGRHLSSWLLARGEHVVDVPSTATARVRQLSRGGGRKNDQVDAAAAACVAALQGDGRPLEAEGITDGLALLDESRMNLAQSRVRLVNQLHALLRDLLAGGAPTDLTANTAAALLRQIRPAGDVERVRKQIAAGLVAQIHSVDALLKANAQQISNLVAASGSTLTDTVGIGAITAGRLIGRTGRAGRFPNSASFASYAGAAPIEVASADKARHRLSRSGDRQLNAALHTIAITQIRTPGSRGHTYYTAKITEGKTAREARRCLKRRLADHIWRTMITDERRVTASPGGHPGATQKSSAAGSTPTTSSSDKSLPGPTNSDSTTTRPAA

SEQ ID NO: 479742 - protein, 339 aa, unidentified
MKQVSTIGLDLAKKVFQVHGVDEQGEVLIRRALRRDRVVAFFAKLPACLIGMEACATAHHWARELRQLGHTVKLIPPAYAKAYVRRNKNDPADAAAICEAVSRPSMRFVPVKTEQQQAAAGIHKVREMLLKQRTMLMNHLRGLMAEFGIVVGEGPQHIPALLGVLADPQDERIPALLRDGLRLVADSLRGLEARLAVIDKQIVALGRDNATYRYLITAPGYGPILSSAMAAIVVDPTVFRSGRDFAASLGLVPRQDGTGGKVKLGPISKRGNGYLRRLLVNGATSVLGSKRAKHDPWLAKLLATKPRKLAAVALANKMARVGWALMVRQESFRSMPAAA

SEQ ID NO: 479743 - protein, 408 aa, unidentified
MNTLYVGIDVSSKSNVVYLMLPNGDKHSNFSVANSHEGSTQLVKRILSALTSHSLDTVLIGLEATSVYGDNLVYFLREDATLAPFNRKIHVLNPKQVKKFHDAYNDLPKNDYVDSFVIADCLRFARINKEVYMGDYRYKALQNLTRARFFAVQNLVKEKQRFMNVLFKKYSTMTQEKVFSDTFSTTALAVYDEFESAEALANMDLHELTDFIIEKGKNRFPDPDAVAKAIQKAARNSYRLPKTVNDSVNQVLSISITSMKALESQIKEFDKAIKAQMELLPNVLISIPGIGPVYSAGIMAEIGDINRFNSQAALAKYAGLAWKQHQSGGFESEVIRLIPSGNRFLKYYLCEAAFSLVRCDKEYSDFYHLKYKEVNRCQHKRALALTARKFVRLVFRLLKDNRLYCPAK

SEQ ID NO: 479744 - protein, 311 aa, unidentified
MAQHKLFVGSDISKDLIDVAIWPTGESRQVRNDRDGWLELIGWLRPLAVEAIGIEASGGYERGLLRALLDASLPARLANPLRVRQFARACGIMAKNDRLDAVAIARFIAIVPPHAVERSHAVEALAELVTARHQLTDELARAKNQTEHGRQPVVSRLAKRRILRLKADILLLDKAIAQAVAADAQLAYKNSLLRTVPGVGPVFAHSLLALMPELGSLTNRQAASLLGVAPFDFESGAFKGERKIFGGRRNLRDVAYMAAMVACSCNPIFKAFSDRLRAAGKRPKVAIVAVMRKLITTLNAMLRDNQPWRYA

SEQ ID NO: 479745 - protein, 391 aa, unidentified
MGIWVGVDIGKEIHFALALDDTGVELLAREFPNTEEAIERLRRDVRGLGEPVFAVDMTEGPVALLLAVLVGAGEDVRYVNGLSVNRSRLMLAGESKTDRRDALTIAENLRLRGRALPRFGTGDDMMQALRLLMRRRADLVADRTRAINRLRDTLLSYFPGLEHALDFTSKGPLLLVSRYNTPDGIRRSGLSRIERHLRSVGAHKAGELAARAVTAAKAQSVRIAGQDTASAIVSELAAEVLRLTDQLAETDERVSEAFFSLPQAEIITSMPGFGPRLGAELLVEIGEVSRFPTAGHLAAYAGIAPVSRDSGKSTGNRMRARGGNKRLKKVMYHAAFVSIRCDDRARAFYDRKRSEGKRHHQAIIALARRRTDVMYAMLVHGTLYASESAAA

SEQ ID NO: 479746 - protein, 358 aa, unidentified
MAVTGGTRRIVGGVDTHKDLHVAAVVDEQDRVIGTRSFATTRQGYRQMLAWMRSFGELQRIGIESTGSYGAGLLRFMQQAKVAVLEVTTPDKLDRRRRGKNDDLDAQNAAHAAFAGQRTVTPRSRDGMIESLRILMACRKTAVSARRVALQMIHNTIVCAPDGLRDQLRSLTRMQLVRTLASWRPDLTAYRDLDSAYRIGLKSLARRYLELHDEIADLDVMIAAIVDELAANLVARNSIGHIGAAQLLLTAGDNPERLRSEASFASLCGVSPVPASSGKTVRHRLNRGGDRAANSALHIIAIGRLRTDQRTKDYVARRIAEGHSKLDAIRALKRYLAREVFTLITQRRKEINATRIAA

SEQ ID NO: 479747 - protein, 402 aa, unidentified
MQVDDIDVFIGIDVGKSEHWATALTTAGECLHDRPLPNDEARLREVYEHLGEHGRLLVVVDQPATIGALAVAVAQDMGITVGYLPGLSMRRIADLSPGSAKTDQRDAAVIASAARTMPHTLRSITSSDEDAAALSMLTGFDLDLARQVNQVSNRIRGLYTQIHPALEGVLGPWLEHDSVLEVIATWPTPAALRKAGRARIDAKLKANGCRRHAAWAQAIVEALSKQTVTVAGTDAAGVVLPHLARQLIALHTQRADIAAQVEALVEAHPLYPVLTSMPGVEVRTAAVFLAGTLGKTFTTGAHLASYAGLAPVTRRSGSSIRGEHVSHGGNKRLKRAMFLSAFASLRTDPVSRTYYERKRAQGKRHNQAILALAHRRILTLHAMIRNGTLYNPQPAQPLTTTA

SEQ ID NO: 479748 - protein, 448 aa, unidentified
MDVWQLDVEDEQEVLARVAAIDVAKATGMVCTRVPHENTPGRRVTKVWQVSATTNAIMELADHLVCAGIERVVVESTSDYWRPFFYLIEARGVRVWLVNARDVKNVPGRPKTDKLDAIWLAKLNERGMLRPSFVPPAPIRQLRDYTRLRLDLTTERSRHAQRLEKLLEDALIKISTVATDIMGVSGRAMIEALIAGQRDPHALADLAKGRMRVKHDALVQALTGQFDDHHGELAQILLDQVDALSAQIERLTARIDQLIAAIPAAQGVDADGTTGPHAGTGPDAPVLSAIARLDEVPGIGARAAQIIIAEIGLDMNQFPTAGHLASWAKLCPRANQSGAKNRSGATGKGNRYLKGVLGEVAAAAAKTNTFLGHRYRRLVKRCGKLKALVALARSILVIIWHLLSDPASRFHDLGPDFYDNRLGPERTRRNHIRQLEALGYKVTLEPAA

SEQ ID NO: 479749 - protein, 410 aa, unidentified
MRRDKYIYIGLDLHKFQHTAVILDCWNEKLGEMTFQNKPAIFPSLLEYVNRYLTEDLTPIFGLEDVGGYGRDLALYLLEQGYIVKFVNSSLSNAERNSYAMTQKNDSWDAQCVARVLIRDLPYLPEATPSDIHWIIAQLVGRRNALVKTQTSLKNQLHMQLNYHYPSYKDFFSEVDGKTALAFWESYPSPSHLEGETVEDLRKFLLEVSNNACSTRKAEQILTLVQADGEVKREYQTSRDFIIQSIVRDISFKKREIKKVDRELKVTIQKLGMQLETMPGIDTVTSSALIAEIGDIHRFANSDKLARYAGIAPIKMGSGGKETMKKTKQGNRKLYDVFYNLAVQQVQVSKGNKIPRNPVFYAYYNQKQSEGKSKSQALLCIMRRLVRIVYGMMKNKTAYILPRMPETKAS

SEQ ID NO: 479750 - protein, 388 aa, unidentified
MSKSTATTSAIQISEERETLMLAMELGETGWLLGFASAYGQKPLRRKIASRDRKALLREIEWAKAKLGLKAEPRVVSCYEAGRDGFWLHRFLVAQGVESLIVDSASIEVNRKKRRAKTDRIDLVALLDLLARHLAGSAKRVWSVVRVPSVEDEDRRHLHRELKLVKKDRTRVSHRMKGLLANHGLTLELRGDLESQLGAMRQWDGNPLSPGLRGRLERYLAEYRYFTKRIEDLEAERRRILREERGPVLEKVLQLYSLRAVGINSAWLYGTEFFGWRDFKNGKQVGSMSGLTPTPFDSGTRNREQGIGKDGSRWIRGGAIELAWGWLRFQPESELSKWYQRRFGSGSKRLRKIGIVALARKLLIALWRFLETGVIPEGALLKTDLRLR

SEQ ID NO: 479751 - protein, 344 aa, unidentified
MDHFAGLDVSVKETSVCIVDDTGRIVREVKVASEPEDLLRVLANPIYQFKRIGLEAGPLSQWLFSALAEAGLPVICVETRHMRAVLKAQINKTDRNDARGMAQMMRAGLYRPVHVKTLRSQKLRMLLTHRKLLQSKAIAIDNDLRGTLRNFGLKVGVVRTVKFETRIRELVANFPDIAAMVEPLLVVRRTLREQFCVLHRRLLAIVRDDEVCRRLMTTPGVGPVVSLTYRATVDVPARFRKSKSVGAVFGLTCAKYQSGEVEWSGRISRCGDEMMRVMLYEAAQAMLRSNKWSWLKAWAMQIARRRGMKKAIVALARRLAVIMHRIWVDGTEFRWTREQASAAA

SEQ ID NO: 479752 - protein, 451 aa, unidentified
MDPGSLEHLRLSPRAITGPGARFLEFLFTGPHADDATQEEEMELLHRRCCGLDVHKETVVACLRLVSDGKVTTEVRTFQTTTADLLRLSEWLAANDCTHVAMEATGVYWKPVWHILDDGEFELVLANAAHVKNVPGRKTDVNDAMWLAELLAHGLIRASFVPDAQTQEMRNLLRTRKQLVREQSSHVLRVQKTLEDANIKLDSVLSDLMGKSGRAMIEALITGETNPAKLASLADRRVKASPEEFREALRGRVTKHHRFLLRLHLNQIDALDAATVTVDAQVEANLGPFRTAVDLIISIPGIKNLGAHVIVSEIGIDMSRFPSDAHLISWAGICPRNDESAGKRRSNRLRKGAPWLKTTLVQCSWAAIKKKNSYLQAQYYRIKARRGPKKAIMAVAASILTAIYHMLKDGTMYQDLGCNHFDRRSADKQKHRLVKRLADLGYAVEIKPITA

SEQ ID NO: 479753 - protein, 331 aa, unidentified
MEQRKTIIGIDVSKKTLDVFIKTIEVHIQISNDSEGFKKLLALLKVNKLKPEDCLFVLEFTGGYEYRLVQFCQAKMFSYVRISGLALKRSMGMVRGKSDKIDAKRIAEYGDEKQSKLEAETGSLANIVRLKRLLSQREDFVADRKAYDHRYKELQYMMDLPDSDSILKRFKKTVADFQKHIEKTEDEIVKLIKANDAFQLNFELLTSIKGIGQINAWTMIAYTENFTSFQNGRQFGAYIGVVPYDFTSGTSIKAKSRTSKMANQQIKALLQMAARAAVLHNKELNLYYERRIALGKHHMAVMNEIKFKLVNIMFAVVKKQKPYVDKYKIAA

SEQ ID NO: 479754 - protein, 469 aa, unidentified
MSVGKTGSDKKTKRKRKRMSIDSYPVLEPNAGGIDVGAREIYVSVPPDRDEESVRIFATFTEDLERMADWLIRAGVTTVAMESTGVYWIPVFEILEQRGIRPCLVDARHLKNVPGRRTDWHECQWLRFLHSVGLLRAAFRPESEICAVRALMRHRSELVQMAAQHVQHMQKALTQMNLQIHHVISDLTGVTGLAIVDAIIAGERDAKKLAELRDFCIKADEETIRKSLVGNWRAEHLFTLKQSRQLYQTYQQQIADCDEEIQRLTTAFSSRVDPSEKPLPPDRKHNKVGRKRNNNIDPKSCFDMRTETYRLFGVDVTQIPGIGNMALSLFTELGRDLSKWPTSRHFASWLALCTDNDISGGRVLWQATRKLKNRAGQLFRMAANSLHHSPTYLGNYLRRMKAKLGAPAGITATAHKIAIVFYTLVTKQIEYDESVWAEREEERQKRFEAKIKRQVKKLGFQLVPIQQNV

SEQ ID NO: 479755 - protein, 348 aa, unidentified
MAIVIGCDMHTRFQQLAVVETATGEVLEELRLENEPLDGVRQFYARWPKTSTVAVEAMGYLGWFAELMAETGHQLVLGDAARLRAMVVRKQKTDRNDALHLATVFCRGDFPRVWMPGPAEWETRHLLKHRHTLVKMRTQAKLAVQALALGRGIRLRQGLFTRAGRARLLALALPPNETARRDESLALVDELGRRVRALDQALEERAQASARATLLRTHPGVGPVTALAWVAMIGDVARFRSSGQLVSYVGLNPGEHSSGGRQKMGRISKQGNPFLRRTLVEAGARAAQLEPALKRFYARKAVARSRSQARVAVARKLAVRLYWMDKRSESYSVMWGDAHADLPALVLA

SEQ ID NO: 479756 - protein, 363 aa, unidentified
MLYLGIDQHSKQITVCVRDEAGDVVRRRQVSTRPEKIQAFFEQLTQMDSDFMAIVEVCGFNDWLIDTLKEVKCGEIVLVHPNKPSKRKTDRLDANKLSESLWTNRERFKNGERLNGLRRVYIASKDVLDSRQLTATRKRLGELLTRVKNRIHRILHRHNLMWEYPTKTFPTKAGRKWLAEVSLPRIDRMEMDILLDQWNLFDEQIAQLQGEIEARAQYHQPGEIISDAELLATAPGLSHYSGLALASRIGPIERFARPASLSNFFGITPGCRNSGNAKHRPGSITKEGSSIARFHLGQMVVHVLKQDEFIRKWYRKIKARRGSKIARVAVMRRMTTVIWHMLTHKQPYCFGGLPPRPGIASRL

SEQ ID NO: 479757 - protein, 408 aa, unidentified
MQVLYPRCAGLDVHKNSVVARIRCVSAPQADETRTFATTTGALIELQEWLSAHGVTHVAMEATGIYWKPVWHMLEGHFELVLANAQHIRNVPGRKTDVSDAAWIADLLAHGLIRSSFVPPAPIQELRDLTRTRKQLVREIAQHASRIQKVLEDANLKLGSVLTDVLGKSGRAILTALIAGETDPAKLADLAQGTARKKRSELIQALHGRIRAHHRGLLKVHLELIVALEQALTDIDAAVGKKLAPIQHSARLLTTMPGISDITAHVVVAEIGVDMTRFPTDAHLLSWATFCPRNDESAGKRRSTRVRKGATWLKPTLVSAAWAAVRVKGSYLQAQFQRLSARRGAKKAILAVAASMLTAIYHMLKNGVEYRDLGAQHFSRRDRSKAIHRLLRRLNDLGCEIQVTAQTA

SEQ ID NO: 479758 - protein, 356 aa, unidentified
MERYIGLDVHAASSTLAVVSQAGKRLQTAVVETNGRALVEAIRRIPGHKHLCFEEGAQSGWLYEVLSPHVQEIVVAGITRKRGQKNDRFDAQGLAEKLRTGTLEKRIFKAPRQFVMLRELARIHMALARDLVRAQARLKSVYRSRGISTPGRAVYGHAGRGSWQRQLPASSRKTAARLYEQIDFLTDLKKQAEQDLIRESRKQPIACVLETAPGLGPIRVARLLPIVVTPYRFRTRQQFWSYCGLGIVMRSSSDWVRTADGGWVRAQVQQTRGLTRQHNHVLKDIFKGAATTVVTLAPEDPIYVRYQQLLAAGTKPNLAKLTLARKIAATVLAMWKKEERYNPDKIRLSRNADCEA

SEQ ID NO: 479759 - protein, 403 aa, unidentified
MNMNAVGIDVSKGKSMVAILRSYGEIISKPFEVKHTVSGIRSLIEQIQSIDGESRIVMEHTGRYYEPLVRELSKADLFVSAINPKLIKDFGDNSLRKVKSDKADAVKIARYTLDSWTELRQYSLMDEIRNQLKTMNRQFDFYMKHKTAMKNNLIGILDQTYPGANTYFDSPAREDGSQKWVDFSATYWHVDCVRKLSLNAFIDHYQKWCKRRKYNFSRSKAVEIYEASKELVSILPKDDLTKLIIKQAVEQLNTASQTVEQLRTMMNEAASKLPEYPVVMAMKGVGKSLGPQLMAEIGDVSRFTHKGAITAFAGVDPGVNESGSYEQKSVPASKRGSSTLRKTLFQVMDVLIKTKPQDDPVYLFMDKKRAQGKPYYVYMTAGANKFLRIYYGRVKEYLSSLPE

SEQ ID NO: 479760 - protein, 356 aa, unidentified
MNKISKLSFEGQQIYVGMDVHKKSWSISILTDKFEHKTFTQPPEVDTLVKYLKRNFPGASYKSVYKAGYCGFWIHDRLQESGVQCLVVNPADVPTKDKERTKKTDRVDCRKLARSLRSREIEGIYVPSRPKVEDRSLIRTRQSMVKKQTRCKNQITSILHFYGIQIPEELANRTWSKRFINWIEEIRMQRASGNFALKVHLEDLNNMRKLSADITRSIRTLSTSDEYRQNVRLLKTVPGISTLTAMILLTELYDITRFTNFDKLCSYVGLIPDTDSSGETERKTGITNRRNGQLRGMLIECSWVAVRKDPSLLMTFNALSKKMSKTNAIVRIARKLLNRIRYVLKNKKEYVSAVVQ

SEQ ID NO: 479761 - protein, 331 aa, unidentified
MGHKYVGLDVHQSSTVAAVHDEQGKSVMESILATEAEGIRDFLKGLRGTIHVTFEEGTQAAWLYEIVKPVVAEVMVCNPRRNKLLAVGNKADRVDAQKLAELLRCGQLKPVYHGTPGVRLLKELVHSYDSLVSDTTRVMNRVKAIYRGRAIGCAGRDVYYQRNRAQWLEKLTEPGVRQRAVFLYRQLDTLRGLRREAKKGMLKESGRHPAYATLKQIPVLGPIRIAQILAKVASPHRFRTKRQFWAYCGLAVITRSSADYQFREGKAEKRKRPPMTRGLNPNFNHRLKYVFKSAALDGIHQAPFEGYYGRLLVKGIRPELARLTLARRSRR

SEQ ID NO: 479762 - protein, 448 aa, unidentified
MAKRKLKMEIINPNAAGIDIGSRSHFVAINQDHSDVREFGVYAEDMQKLVKWLLENDVQTVAMESTGSYWQNLFTELQNSSIEVILTNGKFTKNIQGKKTDVLDCMWIQKLHTLGLLRGSFLPDLQTEHLRTLVRHRGNLIDTTSKACKRMAQNMRLMNLRLDVVVKDIVGLTGLRIINAICNGQTSGEELAKLRHGNCKKSEQEIARALQSNARQDYLFVLKQELQKYQDAQRLILECDIEIKKLLDGFINQDDVKKSLYIDKKAHKRINKNTPKNIDLNLISYQYFDGVDLYAIEGFSHGTVLTLMSELGENGILKFQNAPHFTSWLRLAPNNKISGGRILSSRTPKGSNRLKIALRQAANSIGNLKDTHLSNFFNRIAYRKGRAVAVSATARKLATILWNMLYKNQQYNPPTVYEYLDQKRKRKVIELQKQIANLDTRMRGIKPA

SEQ ID NO: 479763 - protein, 315 aa, unidentified
MHIQQSFMVGIDVSKAHLDVAVEGKRAVVRFDNDAPGCAALATAVAGAELVVVEATGGYEMAIVRTLMAAGIPVAVVNPRQVRDFARASGRLAKTDQVDARVTLHFARAMRPAQIPHIDDGRIALAALVTRRRQLIDMAVAEKNRLEHAPEAVAALIGETLAALKAQLARVDAAIALAIEAEPDMAARRNLLLTVPGIGEVGAAVLIAELPELGAIDDKKLAALVGVAPMAHDSGTWRGQRHVAGGRATVRCALYMATLSAIRCNPAIKTFHKRLRDAGKPPKVAIVAAMRKLIIMINTILKRRTPWNQPQQHGC

SEQ ID NO: 479764 - protein, 388 aa, unidentified
MQNIVHRPEGRAAIRTDLGAIFVSLELSRATWLITSLSPGAGEKMSKHVVQGGDIVSLLRRLAHLQEKARGRRRKEFPLVVIQEAGLDGFWIHRVLEHEGIESHIVDSASIMTSRRRRRPKTDRIDGEALVRALLAYHRGEPRVCAMVRVPTPEAEDRRRVSRELKTLTAERVGHVNRIKGLLFAQGVSGYAPLRRDRRARLEELRTGDGRLLPYHLKRQIGRELDRLELLLEQMNAVAAERDALLVPAEEQAVPTPAKMLLGLRGIGPDFASVLWQEGLFRNFDNRRQVAAYAGLAPTPWQSGAVDHEQGVSKSGNPRLRTTMLQLAWLWLRHQPSSALSQWFHQRVGDNGRIRKVMITALARKLLVALWKYVTAGVVIEGATMKTA

SEQ ID NO: 479765 - protein, 318 aa, unidentified
MNSHHKTELTEPVRYVGLDVSKARLDYVIEAGPKATVPNTAQGIATLVQRLREVPGVRVVCEATGGYERALLEAMWQEQIGICRVQPGRVRHYAKAEGLRAKSDEIDRQLICRYARSMHPRLEKPVLAECVVLRELLDYRRHLSEQLVVVRNRQEVAGATLQALLAAQQMQLETAMAQAEQAIQSHLRAHESLQAKARRLQQMQGVGPVLAATLLAYLPELGQESDKRIAALVGVVPDPNQSGQSDKPRHISGGRSEVRTVLYMAAVTAAQHNPVLSAFYQRLRAAGKPPKLCLTAVMRKMITVLNRMLRDPHFSLDS

SEQ ID NO: 479766 - protein, 318 aa, unidentified
MLESSVFVGIDVAKAHLDIALRPTAEGWRVANDDAGITPLVARLQALQPALIVLEATGGLEVPVTAALSAVGLPVVVVNPRQARDFAKATGRLAKTDALDAHGLAHFAEAVRPVPRPLPDAQTQALSAQLARRRQLLDMLTAEKNRLHSAPRTIQGDIQAHITWLERRLAALNDDLGRAVRASPVWRAQDDLLQSTPGVGPVLSHTLVADLPELGTLSRQQIAALVGVAPLNRDSGTLRGKRTVWGGRAHVRAVLYMSTLVAVRYNPVLRTFYERLRRAGKASKVALTACMRKLLTILNAMVKHRTPWQQNYASALDN

SEQ ID NO: 479767 - protein, 468 aa, unidentified
MKNAIGIDPDSGGFVCALVKAGSGQHVTRRFSVTREDLQQFLRWVKVEGTPIVAIEGSHGQSRPIEKALREAGVVFHSFKPADTDKFRKAVLGQNKNNERDAESVARYALALDAQGKLEQYRRVWFADMELQLLTRRYASITAQMTAEVNRLWKLLRFASPDLYLSLGGKNEENEQRGKVLKNQGILTLLISRPDIGEWKNLSEQDMLEAMGGGEYKGRRQLIRQLAQVAGSFPSLSERMAFMIKSSAHQVESFKREQTELVQMLDASSQANAAVQLLKEHRGVGTITATAMVAEIIDIRRFASDDNLASYSGLGMREYATGSMSTMVHSRLYNRRLKDAFMTGARNVVLYDAGSHVAGYYRNLVKAGMRPLEATKRVARALVRVLFRELTALVNPKPSDQELEESKEGESGMANGITRGDQGHQSNIPPSSLASTETITVEKVKIRRIRGEGRKPVQRRRTAVGKNA

SEQ ID NO: 479768 - protein, 411 aa, unidentified
MVKENFIYVGIDLHKETHTAVMIDCYNQKLGEITFPNRPADFPKLVTKVKKCNTDAKEVVYGLENAYGYGRPLAVWLIDKGYFVKDVNTAISHRQAKHRGAMYRKSDSDDAEAIALATLNMLDKLPDACPNDAYWSLGQLVHRRDNIMKQRTRLVNQLHEQLCIAYPSYKSFFNDISRPTALYFWEHYPSRKYLRGKSVEDLRKELVPVSHNRCSTKNCEKILDAAASDKVKNNAYQDARDMVTLSIVSNLQHYDSQLAEVDKMLEQMYKMLGCTLTTIPGVNVITAVKILAEIGDIKRFSNANKLAQFAGIAPLHLSSSGKGKDVATKQGNRRLQATIYFLAIQMVQVSSKGTPRNPVVRAYYEKRKAEGKTSQQALICISRRLISIIYGMLKNGTEYRMPVEENAGENR

SEQ ID NO: 479769 - protein, 454 aa, unidentified
MTLPNPVKPRRQPQLSAVHTHAAGIDIGAEWHVVAVPPVCDAEPVRSFQSFTGDLHRLADWLVACGVETVAMESTGVYWIPLYEILAARGLQVLLANARTVKHVPGRKTDVNDAQWLQQLHTYGLLRGSFHPPAEIAALRAYLRQRERLLDYAAQHVQHMQKALTQMNLKLQHVVSDITGQTGMQIIRAILAGTHDPQVLANFRDRRCKRSAADIAQALEGHYRPEHLFALQQAVALYDTYQTQIAACDQQIEAALAPLTAPEPPAEPLPPPTSKTRQKNTLAFDVRAALYGIVGVDLTQIHGLGSALALKLVAECGTDLSAWPTAKHFVSWLCLSPGNKISGGKLLSARTRRTSNRATSLLRLAAVTVGKTDSALGAFYRRLAMRVGKAKAITATARKLAMLFYNTLRHGRDYRDPGASAYENRHRERVLHHLERRARQLGYVLEPAPVAGVS

SEQ ID NO: 479770 - protein, 337 aa, unidentified
MKVTLIGIDLAKSVFQVCGVNQAGKPVFNRQVRRNKLLQTLLNYPEASVAMEACSGSNYWGRELRKHGFKVFLIPPQHVKPFVKGNKNDRNDAFAITEAARRPRMQFVEPRTLEQTDLLVLHKVIDRKVQARTALTNQIRGLLNEYGIVVSPGKERLLKALPELLGDGDNGLTAAAREVLNALLDEWHAANQQIQAHEAKLKRTAKQLEPARRLMAVKGVAEKTATAMVGFVGEGKAFKSGRHFAANLGLVPSEHSSGGRQKLGGITRRGNNYLRRLLVQGAWSVIRYADRSTDRLSRWAANVMERRGKHKAVVAVANKLARILWAMLYHRTEYRPG

SEQ ID NO: 479771 - protein, 351 aa, unidentified
MIAINRDIIIANIGVDIGKNAFHICAMNAKGTIVLRERLTRAALPKRLANIPPCLIGMEACAGAHHIGRKLASLGHDVRLIPAKYVKPFLKGHKNDYRDAEAIAEAVQRPTMRFVPFKSDEQLDLQALHRVRSRLVGQRTAVINQIRAFLLEHGIPVRQGPGALRQALPSILAQRTDILSPPITHLIEGLIDDWRRFDQRIAEVTGEIEQLAKQSENCKTLMSVPGIGPITASAMVAAIGDGAAFSKGRDFAAWLGLVPKQISTGDRTILGGISRRGNSYLRTLFIQGARSILQRSEGWEKKSFGRWLIAASKRLHKNVLAVALANKLARIAWSVLYHARGYNAAPTPKAA

SEQ ID NO: 479772 - protein, 333 aa, unidentified
MSKFKHFLGIDVSKEYFDAVVILDGNKEKSIHRQFVNDYKGIKSLCKWLKEQGSTFENTLVCLEHTGMYGKLIIKYLMIEKFSLWVEMSLKIIRSIGVQRGKNDKVDAHRIAFYAMKNVEEAVIYNAPRMEINKMRNLLSLREKLVAAKASLLRNVKELKAFDLEVARLSEKLQKSTIKGIDLDLKNIEKQLDKTINDDENISRIFTLVTSVIGIGKVTALFLICFTNEFTMYTTPRQLACYAGVVPFEHTSGKSIRSKPKVHYVANKKLKKQLHMCALSAITSDPELQNYFNRKVKEGKNKMLIINNVRNKLVHRVCACVRENKMFEKRQVA

SEQ ID NO: 479773 - protein, 358 aa, unidentified
MKTKVKTLNFEGQKIYVGIDVHLKRWTVAIFLENTFYRKFSQNASALELGRYLRKHFPKGEYYSVYESGFCGYSVHRELESEGIHNIIVNAADVPTTDKERKQKDDSRDSMKLAKSLRSGELTGIYIPKISTVEFRGLVRFRSTTVKEIRRNKTRIKSYLYSNGISIPQELDSASKYWSGRFTQWLSTVQLSTDAGNMVLKETLENVLHLRTQLLKINRTLRSMAKNGQYSTKLKLLMGIPGIGLISAATFLSELEDITRFRNLDTFCSYVGLVPSTYSSGETEIIRGITPRANNHLRNVTIECSWIAVRQDPALLLKFSELSQRMKKNNAIVRIAKKLLNRIRYVMKNETEYVCAVV

SEQ ID NO: 479774 - protein, 368 aa, unidentified
MKNVTTYVGIDAHKKDLFMAMVIGSQATPVTWTTPNEPKAVRRLVRKLEREAPGPVRVFYEAGPCGYALQRQVTTSRVSCDVVAPALIPRKPGERVKTNRRDARKLVELGRAGLLTAVQPPTPEDEAVRDLARARDDAREDLQRCRHRLGKLLLRRGLHYHGRNWTRGHRDWIESLTWTQAAERAVVDDYLLAIDHTESRLIELDTQLATIAETEPYREPVGWLRCFRGIDTLTAMLILAELHDFRRFASAPALMAYLGLVPGEDSSGEKHRRGRITRTGNALVRRLLVEVAWHYQHRPGTGVALTRRRKGQPARVIAIADKAQQRLCRRFRKLAAEHKPAPKIAVAIARELAGFVWAALQPVAAPAK

SEQ ID NO: 479775 - protein, 387 aa, unidentified
MLSRVDNTETETSILTDLRAIFVSLELSRTTWLVTSLSPGTREKMSKHSVPAGDIGGLLVRLRSLQERVRARRKQLPPLVVIQEAGLEGFWIHRVLTENGIESHVVDPASVATSRRRRRAKTDKLDGDTLVRTLLAYKRGEPRVCAMVRPPTHEEEDRRRLSRERRVLLKERVQHSNRIKGLLFGQGVTGYEPLGRDRRQRLVGLQTGDGRPLPPHLKAQIDRELDRLEMVIEQIKAIEDELRHAIVAADTVTPVPRMLIELKGIGNEFATVLWTECLYRRFDNRRQVAAYAGLAPTPWQSGSIDREQGVSKAGNPRLRAMLLQLAWLWLRHQPDSVLSRWFLDRVKANGGRLKKPTIVALARKLLVALWKYVTSGVVIEGAIVRAA

SEQ ID NO: 479776 - protein, 478 aa, unidentified
MAEGEDRQGLGSCEPVEESGQLSNEQEPVTKITNSRMHISVTFCQYLERRAEEKMNSRVQIACGLDVHRSKIVGSIVTSGGTQETRTFTTTIEDTLALKDWILTHECERVAMEATGIYWYPIYNLLEEHITVQVANPLFIKGIPGRKTDQLDAEWIATLCLNGLVKPSFVPGLQVRNRRDLVRTLQRLIQTRTRHKNRVHKVMVRAGIRIGAHLSDLFGPSGLRILHGLLDGQAIDTILKNLKNAKINKKRDELANSICGTLDENDVYLIRLELDAIGSINHLIDDLKQRISHLMTPVMDELTILMTIPGIGYDSAVNILAEIGDVRQFPSGKHLVSWAGLAPGLNESAGKQGPGHITKRGSKSLRTFLIEPAQSIAGMMRNNHLKRFFSRMRGKLGFKPAIIALARKLLMLVHHLLVNHEAYFEENFPPKKPAKIVLPSFLSMSPDQILDLLSKAVAELSDVDRAGFVRKLNRIGTV

SEQ ID NO: 479777 - protein, 408 aa, unidentified
MNPLFVGIDVSSRNNVVYLMKPDGSKHSSFSVQNNLGGAKLLSEKIVSALHSMQLIDVVIGLEATSIYGDSLVYALREDGSLGRFRRKIHVLNPKQVKKFKEAYPDLPKNDFVDAFVIADHLRFGRIAKEVYMDDYRYQALRTLTRARFDVIQNLTREKQRFANYLFLKCSGMAQDKDIQNTSATTIALMEHFETVDDLANADLDELTAFIAETGRGRFANPNAVAKVIQTAARGSYRLPKTVNDTVNQAISVSIASMRALKEQVKVLDKAIEQQFEIIPNTLISIPGIGKVYSAGMIAEIGDIHRFDSQASVAKFAGLVWLKNQSGEFEAEHSQMIKSGNRYLRYYLLEAANSVRRCDSEFRRYYDLKFKEVNKYQHKRALALTARKLIRLVFRLLKDNRLYSPPEG

SEQ ID NO: 479778 - protein, 316 aa, unidentified
METNNVVGVDIGKHWLDVWISPSGEYRRLSNTAEGRISLVDWLLGIQPSCVALEASGVYEQLVTQILAEAGLPVSRLNPRQVRDFAKATGQLAKTDRMDAKILAAFAQTLKPASTVIAGKERQELGALVGRRRQLVDMASEEKTRLKSTLDAAMASSIKSHIAWLVQEITVLETSILKYVKQNPVLSAPYQQLLAVKGIGAVTAAVLLAELPELGRLDHNKIVSLVGLAPHNVDSGLLRGQRHIRGGRKDVRCVLYMAALSALHSHDRLTAFYKRLRFNGKPAKVAIVAVMRKLLVYLNAILRDFYAESENHSQLV

SEQ ID NO: 479779 - protein, 372 aa, unidentified
MNHTTFVGMDVHQKEIVIAMLKEKENEPRKEKILNSTEAITKFIKSFSEEENPFFCYEAGPCGYGIYRQLEKLGKSCLVAAPSLIPRQTGNRVKTDKKDAEKLARYLRSGDLTPVWVPSRQEETLRELSRAREDAMYDLSRKRRRLSSLLLRHGLRPSEKVRAWTKKYWVWLDRLQVGDGSFQMIISQRIIDIREAEAEVKHFEAEIAQAVAGSVFEPMVDALMGMKGIDLVSAVGLLAEIGDPTRFKNPKQLMSYAGLTPSEHSSGEGIWRGPITKCGNKHLRWLAIECAWHYRHQPKLGVKLKKRQERCSEKVKAISWKAQKRLHQKYWHLLYRGKPKQVAVVATARELLGFLWSVAQQVRIEQNLLKRI

SEQ ID NO: 479780 - protein, 469 aa, unidentified
MKAKHRRCCGIDVHKNSVTVCVLPPVGQPHLGIKRRKFRTFTADLRQLRGWLKNCQVTDVAMESTGQYWRPLWNVLEGEFAQLILVNPQHIKGLNGYKTDPKDALWIAGLLEGGKLRNSWVPPRPIRELRDLTRQRVNVLEDLNRAKNRIEQLCQTGNVKVSSVATDLFGVSGRRMLKAIVEGKRDPGWMADYARGTLRGKRKDLERALEGTFTDDQRWLLDKELRQVEWLEAQVLTLEQEIERRVTPFEEEIRRLVTIPGVERKTAWTIVAEIGVDMSVFPDARHLASWAGLCPGNRESAGKRMSGRTRKANRYVKRAMCQAAWAAARTKNTFLSAFYRRMSVRKGSPKAVMALAHHLITVVYQMLSRAEVYIELGGDYYDRRNKPRVVARLLNRLSRLGYFAELRPIGPSPIPDNSAPPQAAEGSRNEVTTSKKRGRPCKCSERGIICKHITSVTLNALIQQPSSGA

SEQ ID NO: 479781 - protein, 411 aa, unidentified
MRLFVGDDWAEDHHDVELMNEQGRVLARKRLPEGVAGMARLHELTGEQLGEDADDAEVIIGTETDRGPWVAALVAAGYTVYGVNPLQASRYRERHGVSGAKSDAGDSHMLADMVRTDSHQLRAVAGDSPGAGAVKVVARTHKTLIWERTRQVQRLRHQLREYFPAALAAFEDLDAPDVLELLARAPDPARAAKLTRAQISAALKRARRRDIPGKATVIMAALRGAQLGQPPAITAAYAAAVRSLIAVITTLNEQVKILQGQVGEHFGQHPEAEIYLSQPGPGPVVGARVLGEFGDDPHRYASGKARKNYAGTSPITRASGKKKVVMARFIRNDRLIDALMAQALSALGSSPGARAFYDAQRAAGVEHNAALRKLANRLVGILHGCLKTRTLYDEATAWPHREKTPQSDIAA

SEQ ID NO: 479782 - protein, 416 aa, unidentified
MNAVGIDVSSRKSTVAVLRPLGEVVCLPFDVTHDIAGLASLVEKLKALDGETRVVMEHTGRYYEAVEKALHEAGLFVCAVNPLLIKEYGANSLRRVKTDKADAVKIARYALDNWADLRDFTPMDAIRYDLKTLNRQFQLASKQRTASANNLIALLEQSFPGIRKCFDSPVRSDGTQKWVDFAHSFWHVDCVRKQPFPAFCERYRKWCKRHAYLFKQSNAEEVYALAKRAVVLTPKSKVVKVLVQEAANQLISISRSVEVYRAEMDRLAAMLPEYPVVMAMYGVGKSYGPQLMAEIGDVRRFERKQALVAFAGIDPMPNQSGDKNVRSNKSSKRGSPYLRKTLFNVIRTYLQCAPQDEPVFQFLNRKRAEGKPFYVYMLAAANKFLRRYYAKLRDFFASLDTLQPVAPIPATLKASL

SEQ ID NO: 479783 - protein, 363 aa, unidentified
MPALAGLRTKHEGRGTTVFAGVDSHKDTLAAAVIDSTGRVLDRVQVANREDGFARLLDLVSAHRVERVGIEGSGGYGWPAALWLLEHGVAVVEVPPALTARERSSRPGQGKTDPGDAVAIARITAREDSLPAVRAMSGVAADLRILTDYRDQLVAERTATANRVHVDLLWLHPGYQDRLQHLTTRTDLRAAEALLGDDTSVRATITRGRLRRMVELNDQIEELKTQIDALVAASGSSLTQIYGVGPLVAATILGRVGDARRYPTRHHFATANGTAPIPASSGRTVRHRLNRCGDRQLNRVLYVMAITQLRGDTEGRAYYQRKRAEGKTSREALRCLKRRLSDLIYRTLRADQAHADQTEAAAA

SEQ ID NO: 479784 - protein, 355 aa, unidentified
MNRIYIGVDFHARQQTICYLTTEGGEIQLHELKHQHKQEVRAFYAQFQGRVIVGLEASGYSPWFERLLEELGCEVWLGHATEIRRRARWRQKNDRRDAELILDLMLHDEFPRLYLPPLQSREVLRMLRYRQKLVKIRTMGKNSLQALALQSGLAKGSHLFSKAGLQELRTAVMSPAMQWQREQWLQLLEPLNQRLLETMFWLKQQSQDDQRIIRLRTHPGIGLLTSLCLVHSLEPVTRFRNQRKVVAYAGLEPLERSSAERIRFLGISKAGSRILRYLLVEAAHVAVRKDEELKRFYQRLAARRGRAKAKTAAARKLLIRAYIMLRDEIDYAEFRRRAVAARLARKSHRPEGLSS

SEQ ID NO: 479785 - protein, 409 aa, unidentified
MRRIRKKRSASHIVGCAPKCAEPHAETPESVLTAANQRRQTVEEFISSFVGLDVHKDSIAIAVAEDGREAPRFVGTVGYEIKQLLKALHSTGKPESQLVVYEAGPCGYGLVRQLRSRGYCCEVVAASKLSRRPGDRIKTDRRDALTLARLARSGDLVRVAVPDERDEAIRDLSRAREDALRARLKCRQQLKALLLRHGRRYTGRSSWNPAHERFLSTISFSQPAQDIAFAEYRLAVREGHDRVERLTQALRTQTEQWRMKGLVAALSSLRGIDFIAAVTLVAEIGDFRRFSHPSELMGFLGLVPSEYSTGERQRQGDITKTGNSHARRVLVEAAWNYRFQARLSRLMHIRQDGQPKAIRDIAWRAQLRLCHRFRRLRSRKLHQNKICVAIARELAGFIWAIAQQVTVAA

SEQ ID NO: 479786 - protein, 322 aa, unidentified
METIVASPGIGIDVGKHELVTCIRRLDGVTEPPATFTNSSIGLKKFVVHLVDRGVAKTTPIILESTGPYHWPAARYLADHGYLSKVVNPLHTKHIARYSIRKRKTDKIDAAQLAFLASQQYGYTFVETKEMAQKKALIRHYWKLKLTAGNLFIHERYLKQHRGITAASVTKYILERCETLKARIVKDFGIGNDVKYLDSIPGITPFLAITILAELEPLDRFQRIEQIVAFAGLDPAVSQTGGKPGIHGKLTKRGSRTLRHVLFLAALGSFRCAWRPLYDSYRKRGLKHTETLCIISRKILRTAVALLKKRRIFDSNFITKFH

SEQ ID NO: 479787 - protein, 399 aa, unidentified
MRTDRPDIFLGLDVGKTDHWACALTDSGQVLWNKTLPNNEQKLTDIYTNLSAKGSVLVVVDQPATIGALAIALAQHMGIEVAYLPGLTMRRIADLYPGEAKTDEKDAFIIADAARSLPHTLRQLTKTDQDEAGLAMLTGFDLDLSRQVNQVSNRIRGLFTQIHPELERVLGPRLEHDAILEVLATWPTPQALRKAGRARMDAKLKKHGARRHAAWTEDILTALAKQSVIVTGTEAAGLVIPHLARQLVSLHAQRANVASEVEKIVAPHPLYLVLRSMPGIGLRTAAVIIAELAGKTFTSSAALASYAGLAPTTRQSGSSIKSERVSHSGNKRLKRALFLSAFAVIRTDPVSRAYYDRKRAQGKRHNQAIIALAHRRLTVLYAMLRDGTLYDVPDTALAA

SEQ ID NO: 479788 - protein, 423 aa, unidentified
MMKLKYSICCGLDVHKNVIVATIVTTNKDGISEYLQKSFSTINSDIQRFHNWLIENNCYHVCMESTGKYWIPIFNYLENDIDVCLTHPKYVKAIKGKKTDKKDSKWIADLYKFDLVRCSFIPPKDFRQLRELSRYRFKLVCMKSSEKNRIQNCMTISNVGIASVLSDPFGKTATEIISYLLEHTADSMDEKAVRKLIKKGAKAKSDEIIEAIKGYNIETDQAKKLELAQGHLEYLDDMITQTEVELYVRIKPYYEFVEFVSTMPGMTELSSTIVLAETGVDMDIFDDAKHLCSWCGLSPANNESAGKKKSVRIAKAGDYLKPMMVQCALAAIKSKKQPYFAIKYGRIKKRRGHKKAIIAIARMMMVCIYHMVSEKKPFTPTDYEELMNPQNHVERVVLNENNVFAYLESLGYDSSKLVKRNDN

SEQ ID NO: 479789 - protein, 402 aa, unidentified
MNCVGIDVSKGKSMIAVMRPFGEVVVSPFEVRHTASELSELARLLKNLDGETRVVMESTGNYHAPVAWLLHGAGLYVSVVNAMLVHDYGNNSLRRGKTDKKDAVKLANYGLDHWLTLPRYVPEEDTRLMLKTCYRQYQQYSKVQTMLKNNLISLLDTAFPDANRLFTSPPRTDGSEKWVDFVATFWHCECVCGLSKKAFTAKYQKWCRKHGYNFSQDKALDIYASACGRFGVMPKTNTAKLLVEQTISQLQTTSAALAALKQEMQSLAASLPEYPVVMGMFGVGPTLGPQLIAEIGDVRRFHSKKALVAFAGIDAPPYQSGQIDVRGRSISKRGSASLRRTLFLVMGVLLQCAPMDEPVYQFMNKKRSEGKPYRVYMMASANKFLRIYYASVKAYLDSLEHD

SEQ ID NO: 479790 - protein, 358 aa, unidentified
MSMNHDQSPCRVVIGVDTHKYVHVAVALDELGTVRGDTAVPADRSGYERLLAWASDMGKIAAFGIEGTGSYGAGLASLVRRRGHKVIEVARMDRRDRRLRGKNDLLDAHNAARVVLAGTATAIPKTADGVVEMLRQVKVAKDTAVKARTAAMITLRALIVNVAPELRESLQGLPKMALIERCAGLRPGQVDTPLAASKHALRSLARRWRELSAEVKEHEALLERLTREVAPQLVDAFGIGPDTAAEVLIVAGDNPQRIRSEAAWAKLCGVAPLPASSGTTTRHRLNRGGHRQANAALYRTVIVRMQHHEATLAYVARRTTEGRTKAEIIRCLKRFLAREIWALMRPLREGSTALSEAA

SEQ ID NO: 479791 - protein, 402 aa, unidentified
MLNIISGGIFLCPCTLLELTFPSTKHDCCIISAADQQIVSKFTVKNDKDGFEHLLTTLNSLSNPEDIKIGFESTAHYALNLELFLENAHHSFMEVNPVLIKEYKKSTTLRRTKTDSVDCESIARWLMTVEYKPHSKGFYHSYSLKSLTRLRDRLIRQRSFYLVKITNVLDHTFPEFKPFFNERLSKTAIYLLENYGSAEKMAHMNSASYDKLRCASRGKFSIQQFLRLKELAANTVGVNNSIFDIELNSLLTLYNSLCKEIKTLEAEITKLIEEVHPHYMSIPGIGPISAAVIYAEYGDISNFSNPGQMLAFAGIEPGINDSGTESHGGRMVKHGSSQLRYVLLNACLPLIRFDITFATYYAKKRAEGKKHRVAITHVAKKLIRVIYALERQDVDFNVQKLR

SEQ ID NO: 479792 - protein, 336 aa, unidentified
MENNCFIGIDVSKNKLDICVLQGKEVLQEDVIDNNPSAIHRFLVDMAEKRGLDLCSCLVCAEHTGNYTYPLTLACRDLGCRLWLENPAQLKYSSGVHRGKNDRVDARRIALYASRFNDKAMLYHELTPELERVKQLRQERSLYRSDLSKYKGQLSDQKNFMESTVYKAKANRLKHVIKELEKMIDVVEREITGIIDSCDVLKRQMKIITSVEGIGRETALCFIVETAAFTRFTDSRKFACHAGIAPFQYTSGSSVRSRNRVSRRANKQVKTLLLSIHSSFALSITRKKKSELKVYYKRKVEEGKNKMTVINAIRAKLVARVFAVIRKNDIYSINFT

SEQ ID NO: 479793 - protein, 408 aa, unidentified
MNAVGIDVSKGKSMVAALRPMGEVALLPQEFLHTAPGLDQMAHAILALGEDTRVVMEATGRYHEPVAAALSAYGIYVCILNPLYIKQSGAGSIRKVKTDKADSLKIAKYGLDNWVDLREHTAMDTIRQQLKLCSRQYNIYMKTEVSLQNNLISLTDKTFPGVNELFSSPARADGHQKWIDFVMTFWHCDCVFRISEKAFTARYEKWCKRKGYHFRAEKAAEIYAQSCELFVTLPKDDNTKLLITTAAQQLLAGEMTLAALRAEMTRLAQQLPEYDTVRAMYGVGETTAAQLMAEIGDVRRFPRRSSIVAFAGVDPAITQSGKHEVQSTATTKRGSPHLRKTLYQIVCTYLRKSPEDEPVYQFLDKKRGEGKPYFVYMTAAQNKFLRIYYARVKECLEAFDTQQNTVQD

SEQ ID NO: 479794 - protein, 378 aa, unidentified
MKTPGDIPFTAFIGIDWADAEHDICIQAAGNKRREFSRLSHKVEAIDEWAQSLYRRFGGPIAVALELSKGPVVYALQKYDFFVIFPVNPSSLAKYRETFTPSGAKDDPTDAEFALDLILRHAEHFAPLKSQSVEMRTLMSLVEQRRCLVNDRVRATNRLRNTLKQYYPQPLEWFDRIDTPLFCAFIERWPTLVQVKRARRTTLQSFFHQHNMRRAHVLEARLTSIKAASALTLDEAVIIPHRLQALVLVDLLRVTLAAIKRFDEEIAELAPQHPDYELFSPLPGAGPSLAPRLLVAFGEQRDRFKNAAELQKYAGIAPVTERSGKKHWVHWRWRSVQPFCGRPLSSGPHKLLTNPTGLAYIIDNSETKVATITLRFAH

SEQ ID NO: 479795 - protein, 487 aa, unidentified
MAKQKKSTFERLRSGTMNRQQRRDLARRLAANDPGLTIVHPHAGGIDVGNESHFVAVPPDRDPNSVQEFGCWTADLKRMAAWLSACRIDTVAMQATGVYSIPLYDILTGHGIRVVLVNAQHTKNVPGRKSDVQECQWLMKLHTYGLLRDSFRLEEKMEGVRTIWRLRDRHVKDASRAVQHMQKALTKMNIQLANVISDITGVSGQAIITEILRGERDPWKLADLKHELVRASREEVARSLEGNWRADLLFELRQAVDSYHFAHQQMRECDRKLKSFLASLPTRTLERPNRSGDAPPATTPQQRKARKKPKTRRNEPTIDLKAELKRICGVDLTSIDGIDVITAQTILSEAGTDMSGFQTENHFASWLGLAPSKDISGGKIIGLGKRKVQNRVAMAFRMAATTLLNSKTYLGSRYRHLRQQLPSHASAIKAMARYLAVLVYRLLTHGEAWVDRGAATFERRRTERELASLHSRAFAKGFKLVPITPAN

SEQ ID NO: 479796 - protein, 336 aa, unidentified
MIGLDIAKHVFQVHGADAGGHVLFRKRLTRAKLLGFLAAQAPCVIAMEACAGAHYWAREVSKLGHCVRLIAPAYVKPFVKRQKNDAADAEAICEAAQRPSMRFVPVKTEEQQANGIVFRARDLLVRQRTQCVNALRGHLFEYGYTFPQGITHVATLVALVEDPRSSLPESVRIILKLLVDTFTALEAQITALDAEIKQRSKADPTARRLMTIPGVGPIASTAITALVPAAEGFPAGRDFAAWLGLTPLQKSTGGKQKLGAVSKRGERTIRRLLIIGASAVVQQASRRGAPKGSWLAQMLARKPKMLVTVALANKMARIVWALLVKGGIYRAPVAAA

SEQ ID NO: 479797 - protein, 369 aa, unidentified
MTIVAHSHPFVIGVDTHAKTHTYAVVQTTSGQLLGTEEFPTTPQGIARAMSWSGRLTGGDAATLWAIEGIATYGARLARAAAESGYAVVEAPRMNAKTRHGVGKSDPLDARAIATAVLPVEEDRLCRPRADDGTRQALRVLVAARDQMASEKTMNINALIALLRANELGIDARKPLIMDQIGQVSRWHHRTEPLALATARHEAIRLAHRILDLHHALGENYARLTELITASPAAPLLEETGVGAYTAAVILTAWSHPGRVRNEAAFASLAGVNPIPASSGNTTRHRLNRGGDRRLNRALHFVAITRMSRDPATKAYVAKRVGEGRTRSEIRRCIKRYVARHLYRTLNVLYDDALGTVHASDSALAPTIG

SEQ ID NO: 479798 - protein, 376 aa, unidentified
MTKLRFLGLDVHAETIAVAVAEPGGDVRSIGTIPNRLESVRKMIGKLGPVEELRACYEAGPTGYVLYWQLTALGVECQVVAPTLVPTKAGDRVKTDRRDAEKLARCHRAGDLTAVWVPDAAHEALRDLVRAREAGKKDQLRARHRLSKFLLRHGCRHPKGMTAWTKKHLQWVKSNVHFDQPALEAALQDYFHEVEHAAARIERLEKSLDDAIGKAPEQIRAVIEALQALRGVAQLTAATIVSEIGSFSRFDPRKLMGYSGLVASEHSSGNRLKRGGITKTGNAHLRRVVVEAAWSYQRRPWIGGYLLRRQRNLNLSDEIKEIAWKAQYRLHKRYTRLTAGGKNKNQTVTAVGRELLGFIWDIAVRTERAWEQTKAA

SEQ ID NO: 479799 - protein, 400 aa, unidentified
MRAVFGIDVSKASSEVAILVNSEKVHGYSMPNDAIGFSRLLKDLNTVSNPEIIFEATGVYSRRLQAFLEENGYAYTRLNPLEAKKQLDSLRVRKTDKIDAEKLAESQFILNRKPTYGQEEVYQNLRDLSRFYQNLTEDMVRTKNRLHKTLQVTFPELEQLLAAPTGEQYWNLVSSFPSKDFVLDLSPSELAEVIRQSTSKRISEKRVTLLSDKLTELAKQSYCAVKKTSPMIEEVKYYAQELLRLTERRQVILDEMVNLAQPLPEYEILLSIPGIAETTATSIIGELGDVRRFHSANQINAFIGIDLRHYESGNFLAQEHITKRGNPYARKILFKCIHNIAAASHTNPCHIADFYEKRKRQSQTTSTKPHTIAAVHRLIRTMYYLITHNKLYDYTATQSH

SEQ ID NO: 479800 - protein, 363 aa, unidentified
MRTLKVTKPDFTGQHIYVGIDISNKSWKTSIMTQDLEHSTFSQPPQTDLLVGYIHRNFPGAQVHCTYEAGYNGFWAYEQLRAAGFDCIVVNPADVPTKHREKSFKTDRVDARKLARALRSGELDPVYVPSRLAQEDRSLVRVRMRLVNKQTRCKNQIKGLLGYYGIIIPDDLAQSHWSKRFVTWIEQLQLQNQSGTRALAILVEELLFLRQSLARVTTDIRALAQDDRYRDTVRWLVSIPGISTLTAMILVTELVDIHRFRNLDHLASYCGLVPGEHSSGETEIITGISSRRNVLLRTILIECAWMAARKDPALLACFSIFSKRMPKNKAIVKIARKLLNRIRYVLIHHTQYQLALSGTVPNN

SEQ ID NO: 479801 - protein, 382 aa, unidentified
MTQAASRRKHSVGIERLYVAFELGWTSWKLGFCTRVDDKAWVATIDARDIGALKKTIVKARVRFGASPTCPIVSCYEAGRDGFWLDRLLKQMGVTNVVVDSASIQVSRRARRVKTDRLDAEALLKMLVRHVSGEPKVWHVVHVPTPEQEDARHLQREIRTLTKEQTRIVNRARGLLASQGVAVKMGRRGLIGSLESLRIWDGSPLPAGMKLRIEQELSRHTVVHEQLLALEAERNRGIREGATSTAVISRRLMELKAIGPATAETLTREVFFRDFKNRRQLGSYSGLTPSPYQSGEMSHDSGISHAGNRHFRGISVDLAWDWLRYQPQSALARWYQRRFGSGGPRMRKIGIVALARKLLIALWRYAQTGILPEGARRKALAV

SEQ ID NO: 479802 - protein, 403 aa, unidentified
MAATKTVGVDWAAEAHEVCISEEGQVAERFSASHDEEGIAELVRRLHRAGVARVAIERPDGILVERLLDAGLTVLAIHPNQIKAARPRFAVAHGKSDRFDAYVLAELARTDAHRFRVLVPDGEETKALKALTRAREDLVGVRVELANQLRAQLQAFWPGALIFADIDSPISLAFLKRCPSPADAKGLGPKRLAGLLARHRYSGRRTPEELLERMRSAPVGLAGELETEARRAVVVGLVGALGPIVAEISELTSQIRGALAAHPDRVIFAPLFRDAKTAISPATLIAELGDCRERYPTEAAMAADAGMSPVALESGKLRVASFRRACDKRLRAAVARLADSTRHWHPWAQEVYRRARVRGQDHPHAIRTLGRAWIRVLWRCWQDRVPYDPTRHRNFNRLQTTGG

SEQ ID NO: 479803 - protein, 414 aa, unidentified
MEVQMNKVCGVDVHKKFLVATILCRDGTKQTRRFKITPDELSKFRTWIVENNCEQVAVESTGVYWIPVFNALEGSVGLILANAYKIKNTSRPKNDLTDSEWMAELCLNGMIVPSRIFLKDDRDLRSLTRARERYVNDLTREKNRIHKLLDSCNIQLSSILSNIFGKTGRHILNGLLEGKDIDKIIEGIPVKRLMKKADQIREAIKNGLDVTKIHFIRGSLELMAAIQKRIDELESEIRKRVVLQRENIAILMSVPGIGFISAVTILAEIGDYRDFEKPEKLAAWCGLVPSVYQSADKLFTGSITKHGSRHLRWILVEVAQVVARCGSPSLRKFFLRVKAKKGYNVAIVALARKILCILHHLLLNRELYHDEGEKKKAKVDLNGQEPYASISIEDMIKFMIEAGYEVKKKPRVGG

SEQ ID NO: 479804 - protein, 477 aa, unidentified
MLPLSTRFRLVPPCWLPRAAAGIRKCEQEGRCPVEQITEDDEIVARVAALDVGKATLVACVRVPGEDKPGRLQEVRTFATTTAALLELRDWLVCLGVTLCVMEATSTYWKPPFYLLEDAVGCWVVNARDVKNVPGRAKTDKLDAIWLCKLAERGMLRPSFVPPPWQRELRDLCRYRRTLVQERTREKQRAEKLLEDTQIKLSSVISDIFGKSGRDMLEALISGQRNPAVLAELARGSMRGKKSVLQEALTGQFRDHHGWLLRMMLDRVDALTAQIDALTGRIDEVLAPFAHQVAQLDEIPGVGKTGAQELIAEIGVDMTRFPTSGHLVSWARFAPRARQSAGKAEPGTTGKGSPGSRPDQDLPGLPLPPARPQARQAARHRRDRKIHPGHRLPAAVRPRRPVCRPGPGLARPHRAAAPQASAHRRAGTTVRQEGHPPGGRRLTLPAFTPAPLTLRRGATACPLTDRFSIQMTCIGPY

SEQ ID NO: 479805 - protein, 352 aa, unidentified
MARDNFINKLDSTQPVFVGLDVHKTKWSVCIIHQDEVIESHTIPGDYKSLHSILKKYSSLNVLSVYEAGFLGFYLHRHLENDGVKNIVVSPNKIPSEVGNYVKTDKRDAKKLAFSLSKNLLTGIFIPSEELFDLRQILRTREKIVRSKRAIINRIKMLLHLHEVKISSAGLTKSTIKIIQKLNLPSNVLLSLNLYLEQFELLVSQANKLESRANKIAQESAYSNSYKILNTIPGVGTITASLLCFEIGDFSRLSSGKKLASYIGITPREFSSGEHVYKGRITGQGNSFLRSCLIEASWYLIGKDPAMKSFYNKIKSNSGSGKKAIVAVARKLINRIHSIVINNQCYTIGEIG

SEQ ID NO: 479806 - protein, 388 aa, unidentified
MNRIIKIGMDVHSTNYTLCAMEPTIGAEDRVFGEIQVAPDYKEILLFIESLKMKLGFLDDYSIECGYEAGCLGYTLYHQLTNAGIKCVILAPTTMLSTKGKRIKTDKRDAHLIAQCLCYGGYHTVYIPTKEDDAVKEYIRMRDDHKQILKSLKQQINAFALRHGHQYTGTKWTIKHIIWLRKLELDPMYRETLDEYMASYEEQEAKIERYDKRIEEIAAEERYQKNARKLGCFLGISTHTALSLIVETGDFIRFAKGNIYAAYLGLTPGEHSSSTSVNRLGLSKAGNTHLRCLLVEAARSICKGAVGHKSKRLRARQIGQSAEVIAYADKANTRLRSKYYRMIRHGKAKNVAVAAVARELACFIWGMMSGNISTVSGADTSVPAVSQG

SEQ ID NO: 479807 - protein, 353 aa, unidentified
MSSDKYIALDVHQATTVTSVLNAAGREVDQSVIATKSQPIRSYLEGFSGPLHVTLEEGTYAAWLYDLLEGRVAELVVCDPRHNALLKEGSKTDRNDARKLADLLRAGMLRPVYHGRHSLRPLQELVHSYEALVEDTTRAMNRIKALYRGRGIDCAGRGVYTQKQRASWLEKLPAGASRLRGELLHEQLDHTRSLRRKARLALLKESRKHLISARLREVPGLGPLRVARLIAWIQTPHRFRTRRQFWTYCGLGLVIFDSSEYRLIQGRVVRRAQPVKIRGLNRNHQPRLKEIFKSAALSAIRQPGPFKEYYDCRVQQGRDPALLRLSVARKLAALVLSLWKKGGRYRAQDVKQA

SEQ ID NO: 479808 - protein, 391 aa, unidentified
MSMYFVGIDISKYKHDCCIISAADQQIVSKFTVKNDKDGFEHLLTTLNSLSNPEDIKIGFESTAHYALNLELFLENAHHSFMEVNPVLIKEYKKSTTLRRTKTDSVDCESIARWLMTVEYKPHSKGFYHSYSLKSLTRLRDRLIRQRSFYLIKITNVLDHTFPEFKPFFNERLSKTAIYLLENYGSAEKMAHMNSASYDKLRCASRGKFSIQQFLRLKELASNTVGVNNSIFDIELNSLLTLYNSLCKEIKTLEAEITKLIEEVHPHYMSIPGIGPISAAVIYAEYGDISNFSNPGQMLAFAGIEPGINDSGTESHGGRMVKHGSSQLRYVLLNACLPLIRFDITFATYYAKKRAEGKKHRVAITHVAKKLIRVIYALERQDVDFNVQKLR

SEQ ID NO: 479809 - protein, 370 aa, unidentified
MAQSTPLFVGLDVHKDSITVAHAAGGRSDPPVFVGAIGTRQADLDRLIRRLQGKTPELRFVYEAGPSGYGLYRYLIGKGLTCEVVAPSLIPRRPGDKVKTDRRDAVDLARLSRSGDLTAVYVPTVEDEAIRDLCRARDAARVTLKDAKLRLKAFLLRVGLHYVGRADWNAAHKRYLAKVVCPTPAQQIVFQEGVRAVDEQVDRLQRIEAELQDLAPHWRRYPLVEALQALRGVQWVVALTVVAELGDLTRFDNPRQLAAFVGLVPSEYSSGTARRQGGITKAGNGRARRVLVEAAWAYRHPAKVSLHIQQRIDQLPKALQDLGWKAQVRLCKRFRRLVARGKHPNVVVTAIARELIAFMWAIARAMPTRA

SEQ ID NO: 479810 - protein, 373 aa, unidentified
MQFIGIDLHTNKFTCSYRDENTPPDAKKGERTETFDLNDWGISTFIETLEVESYVLVEATITTFAFVRLIQPFVKEVFVANTYELKQISQGRNNTDKIDANILSRTIKMQVVSKEHLISSVFIPSEDIQELRSLFSTYRLQKKQTTQIKNRIHSLLKEQLYGFTQEEIFDKKSREKIRNLKTKVASLSFQLNYLFDQLEFIEAQVELLKKQILLQAAPYIKEIEILTSMKGISVFIAAAIIADIATVDRFKNSKHFTSYLRSAPGVSSSNTSEKKCGTNKKGRKLASTLITQTLIHVLSASHRLSRWYENQVDVEHKKPGIVRTGLRRKVFTEIYKMLVKGEYHYAREEQKHKAKMSQYRNFLKKEKILLEIA

SEQ ID NO: 479811 - protein, 370 aa, unidentified
MQHVIGCDVHKRYSVFVAIDHRGRLSKPDRVEHERAAFRAYLQTLPPASEIAVEATGHWYWIVDEMEQAGHRPHLANPHEAKKRMGKPNKHDALDAGGLAILLRNGTLPESWIPSRDLRDVRELLRTRMALRDLRTSLKHRIHAAIDRYGLHNDAISDLFGRAGREFLLHQLTGLPPETYAMLLTELAAMDDLEPRITAIEQRIAEVIVPTPEVQLLLTLPGVGPILAPLLWLEIGDVERFPRAENLASYAGLVPRVYSSGGHTVLGHTNPYVNRYLRWGFVEAATCAARLHAYRRSHIGLLYQRLLPARGYGRAIVAVARHLAEASYWMLRKRQTYRPPQTGAPADRSSSAGWKPKADFVQDRVSARHV

SEQ ID NO: 479812 - protein, 345 aa, unidentified
MTRYIAFDVHAESTTCVVLSSAGKRLREEVVETSAGALISFLKTISGRKQLVLEEGTQSAWLHEMLSPFVDELVVAIPEKSTGTKNDSRDSWRLAEQLRVGAIQRTVFKRPQELAVLRAAVKTHRVLTSDLVRVKNRLRAVFRSRGISVSQDIYQPSVRSERLSLLPPHLRYQAEMLGKQLDLLEAEAHLREEAKGISGVETVATVPGFGLIRAATLVAVTITPNRFRTTRQFWSYAGLALVTRSSSDWVRSERGWQRAEVNQTRGLNMNRHPWLKSVFKGAATTVAAMPKHPLHADYQRLLQQGTKPNRAKLTIARRLASAALAVWRKQEAYDPNKHKSLIVAA

SEQ ID NO: 479813 - protein, 356 aa, unidentified
MPMLAELVDGVIGVDTHRDTLTAAAVTNLGGVLAQTTTSADAAGYQRLLGFACVQVPGRRLWAVEGAGSFGAGLTAVLQQSGEQVVEVARPKRSASRSGAKSDALDAVRAAHQALGHDRPAIPRRRGEREALRALLTTSRSATLARVAAIGQLKALIVGAPEELRAELRGRCTSSQIDYCASLRARPTRSLEHRATVRALRLTAQRVQFLAAEADQLQAELTVLIQAVVPWLLEVPGVGPLSAAQVLVSWSHAGRFRSEAAFAALAGTHPIPASSGQVTRYRLNRGGDRQLNRALHTILLLRLRIDPDTRTYMARRTAQGKSRRDAKRCLRRVIARQLFRLLERYDQPGVEILQAA

SEQ ID NO: 479814 - protein, 387 aa, unidentified
MQKPHDNSKASPAAFMQDNTLIAVIELSLSNWLVAGLIPGVSREPLKKLEPNPEDLLKLLHGWRDEAIKAGRPITRIAVAYETGRDSFWLARWLRERGIDAHVIHATSVAVSREHRRAKTDRLDTAMLKRGFLGWLRGERGHCTVAIVPTMEEEDAKRPHREREGLVHEQTRVVNRMKSALIQFGVRNFNPKLRKASVKLETVRTPEGKSLPPNTIAALRRDMERLRIIKEQIKAIEQARLQQLEQKPEALANRMVYLLVRIYGLGLETAGLLVHELLSRTLRDRKAVARYAGLTGSPDESGSKRREKGLSRSGNARVRKIMIQLAWRMVKFQPDSALVQWFKQRTENAKGSRKPMIVALARKLIIALWRYANDGVIPEGFRLHSAA

SEQ ID NO: 479815 - protein, 353 aa, unidentified
MDKITRIGVDLAKNIIQVHGVDSMERVVVRKAISRQKFLEWFANLEPCLVAMEACSAAHYWGRKLRALGHEVRLIAPQFAAPYRKGGKHVKNDRLDAEAICEAAGRPHMRFVAVKTADQQNVLVLHRMRDGFVEERTALVNRLRGELVEFGVFLPQGIDAFRAHFVEALEDGATELNGVARTALLRGWEHLQALDQQIAWCDAQVATHVKHDSNAQRVMAVIGIGPLTASATVATVGDARLFKNGRQFAAWVGTVPKQKSSGGKTRLGRITKQGNTYLRTLLFQGARSAVTSAHRRTDRLSRWIVQLQARVGWYRTLVAVANKHARILWAILAKGERFDPSYVSTPSTPGQPR

SEQ ID NO: 479816 - protein, 387 aa, unidentified
MIYVGIDIAKNKHFAAILSADGDVLRNPFGFSNTAEGFSLLLDTFSGFDQRELLIGMESTAHYGENLLSYLFQRNYRVCVINPVQTAALRKTEIRKTKTDKTDALLIAKSLIVNKHRVYAARDEELLELKTLCRFYRNVLQSKTRLKTQLVAYMDVLFPEFANFFAGGIHLKTSYALLKLYSAPADIAALHLTSLTTLLKNASRGRFTKLEAIALKSLAKSSVGVKNASMSIQVTQTIAQIEFLEKQLLELKSRIEVIMKRLDSVILTVPGISYLIGGAILGEIGDISRFSKPAKLLAYAGLDPTVSQSGQFQARRTRMSKRGSSLLRYALIEAAWGLTNNNATFAAYYDSKRAQGLSHFAALGHVAHKLVRVLFKLLKHNIPFELV

SEQ ID NO: 479817 - protein, 334 aa, unidentified
MKKRYFMGIDIAKASFDFCLLSSHGAVLWRGHLSNDASGIKQFLAELKTGRWKVSLIHFALESTGVYGKALINALHQAGLALSVLNPAQVKFFAISVLRRIKNDRVDAQIIARFCLERKPLATRPLRPIEEQLKLLVHERESRVSEQTRERNRAKNDPFQIQLPWLISRQRQQRLNQLQKELTQLDDAINKLIASDQFLKAQSQLLCSIPGIAQTTAAKLLSELAAKEFHSARQLAAYAGLTPSQFLSGGSCYGKTHLSKIGNAFLRKALYLPAAVARRWCKALKPWVILLEKRKLSDLAIRGAIMRKLLHIAFGVLKHQKIFDPSLVGRPKAV

SEQ ID NO: 479818 - protein, 319 aa, unidentified
MAQNDLIVVGIDVAKHKVDACIRRFTLRQTFPNTAQGHRKLVAWLRKYQVGKAVMEASGGYEREWRNVLHDAGIEVRIVDPRRVRNFALSAGRLAKNDPIDAEMIAWFAETFSQAPGQIPDAARDELAALAKARTALVDVKIRLQAQDEHAAPEPARKAYTRVLKSLAAEIDKLEAAISAKVKATPEFAQRAEIIESVPGLAQVTSAILIAGMPELGQVSDKIAAALIGVAPYDDDSGKRRGERYIKGGRRWVRNGIYMPCLGAATQCNPVLKAFYQRLLAKGNEPKVALVACMRKLIIILNTMLARRQKWNPGSHAMG

SEQ ID NO: 479819 - protein, 470 aa, unidentified
MGQSHSNSRQGRKPRRAKVPVPPELQHVNFDAAGIDIGSEEHYVAVPCGRDPEGRDVRPFGAFTGELCALADWLEDCGVRTVAMESTGVYWIPLFELLEQRGFEVKLVNPRHLKNVPGRKTDVLDCQWLQQLHTYGLLQGSFRPDGEICVLRSYLRQRETLVEYRSSHIQHIQKALDQMNLKLHKVVSHITGVTGMSIVRAILKGERDPRALATLRNHRCHNPEVVIAKALEGNWREEHLFALEQAVELFDAYTQKIEACDARIEAHLGTLEDRSGGKEPPKPQRRPGTNTSAPGFDAHSHLYRVTGVDLTRIDGIAETTALTVIGEIGLDMTLWPSEKHFASWLGLCPGNKISGGKRLSGRTKPCANRAATALRVAAQSLYHSHSALGAFSRRLKARLGASKAITATAHKLARIVYRMLRYGQEYVDVGQDYYEQRYRDRQLKGLERKAKELGYNLSKIQDLQQSVAAE

SEQ ID NO: 479820 - protein, 387 aa, unidentified
MMKNKGRVVGLDVHPDSFAEAVVEGRDPASAVVSSTSTRVELERLEEWALRHTSTEDTLVLEASGNAFAVAARLRAIGREVEILDSHRAGKVGKVYCANDRVDAVKIARIYLSALSPIVWQPDQKTLERREIFSAYQAVVKESTRAKQQLRSMLNEHCVRLEKGFRLCHPQAIARLLKLREWTPARRMLLQQLHGSLVAARARRTLLRRHMAQEIVAEEALLRLTRLCGINLITLYGVVAAVGDVRRFTQSKKLVAYLGLNPSVSQSGNFQGSGALKRHGRGALRALLIQSGKKLLEVNNPLQKWGLAVAARRGRNKAAVAVARKLCVALWHVMMGHAIGTLERLDTLQTKLSKFATEIGPAALIAFGYHNKADFVEKKLYVLRSYP

SEQ ID NO: 479821 - protein, 374 aa, unidentified
MGHHSEAFIGIDTAKLRNAVAIAEAGRRGEVRYLGEVDTSEAATRKLVAGLAGKYRKLAFCYEAGPTGYGLQRLIEGLGHTCIVAAPSLIPKRAGDRVKTNRRDAEGLARLLRAGELTPVWVPDGRHEAMRELTRAREAARVDLTRKRQQVSSMLLRLGRHYPGIKTWNARHRSWLGNLRLDYPEQRFALEEMLHAERQAGERIGRLEQAIREALADWTLAPIVPALMAMRGLDLVAAVTLLAEIGDLSRFENPRQLMAYVGLVPGERSTGESIKRGSITKAGNGRARRVLVEAAWAYRHPPRVGYEKQVHVAAAPRRAREIAWKAQVRLCKRFRTLSRKGKKSTVVATAIARELAAFVWAIAREVGMTPGRAA

SEQ ID NO: 479822 - protein, 355 aa, unidentified
MSQEKYIGMDVHQATISVAVMDAGGKLIMECLLETKAATIVEFIGGLHGTLSLTFEEGTSAAWLHDLLKPHVSRLVVCDPRKNALLKDGNKSDRIDARKLAELLRGNQLHPVYHGEHEVRTLKELGRSYLTLTQDVTRVMNRIKALYRSWAIPCAGTTVYVPRHRAEGLAKIAEPGVRVRAERLYQQLDLLQPVRLEARRELLAESHQHSAVRLLRQIPSIGPIRSALLVAWLQTPHRFRTKRQLWAYSGFAVETHDSGEYRSVRGKLQRNRERMTVRGLNGNHNRDLKNLFKSAAVSASTRPGPLRDFYVARVEKGMRPTMARLTLARKIAAITLTIWKKGTEFDAQQLHRQAA

SEQ ID NO: 479823 - protein, 344 aa, unidentified
MGEVITIGLDIAKSVFQVHGVDGAGVVVIRKRISRAKVLVFFADLQPCLIGIEACPSAHHWGRELEALGHTVRLMPPSYVKAYLKRSKNDANDAAAICEAVTRPSMRFVALKTKEQQASLMLHRTRQMLVRQRTMLINAMRGHLAELGIVSAKGRNGTGELLRIITDGADGRIPPMARGILGVLARQYSAIGAELGSIQKSILAWHRSCEASRRLEEIPGIGPIVATALVAEIGDWKAFGSGRNLAAWIGLVPKQHTTGGKDRLGGITKQGNRYLRWLLVTGAMAVIRYAQKHGTHKRPWLGRLMERRPTKVAAVALANKIARVAWAIMVHGDRYKEPELQAAA

SEQ ID NO: 479824 - protein, 325 aa, unidentified
MFPCLTLDVTVLQECENTEKTAYFKIENSKKSIAQFVKKTLGKYDSKRLLFCFEDTGIYSLHLAYYFSDNQLSYWQVPAIEIKRSKGISRGKDDKIDSKDIAFYAYSHMHKFRPTGMPDTSIQQLRLLFTEREKVLKSLSSFKKTSENRDFVLKDVFLTVEAVNKSVITKLNRALKSIEEKMRVIIASDAKLNQQHELITSIPGIGTQTAIYIIIATKGFAAFDDWRKLACYAGVAPFPYQSGTSIRGRNKVHHLADKKLKSLLNMCAIVAIRHDKELKNYYERKVNEGKNKMLVINNVRCKLLARVFAVINRNSPFINTFKFAS

SEQ ID NO: 479825 - protein, 311 aa, unidentified
MNNTIGIDISKDTLDAHRLADGQHKQFLNGKTGHAQLVKWIGKQSDPLIIFEATGAYHRQLERVLGTHIIPFVKVNPKQARRFAQACGKLAKTDRVDCEMLAKMGAALQLMPKPFTAENLYDLKELLSARRALIKDRTAAKARKATVINALIKQQLEKRLRQIKNDIAKIDALMLDVAREDQYMSERLDILFSIPGIGVITALMILVDMPEIGALNNKQVASLAGLAPMSQSSGKWIGKARIQGGRPNLRNAIFMPALVAIRHNADLKTKYDQLVTAGKEKKVAITAVMRKLLVLANALLRDNRKWAEKAA

SEQ ID NO: 479826 - protein, 419 aa, unidentified
MVNVGVDLHKTQFTVCVRSRDEKGKVENTFSKYPTTDEGYATFLNEAAQYQKRGEEVRVGVESTGNTRYFKSRMEAAGVGVIVINPSKLKVINESVKKTDKHDAATIAEFLEYDMLPEAHLCSRESEQLRRLLKVRTTMVKTIVVMKNQIHALFTAEGMDDVKAGTLQSKKGRQRVLDTLNQCKNGLVVQPLFDMIEGIEENVNSIEKQLRALTKDDRIVRLLLTIPGCGEICAWTIRAYIDDINRFSSAKKLAAYAGLVPWVQNSNETNRHGKITKRGPKELRTALVQIVMGLRRMKEKTLAWRLMQRYEAMKASKGSGKSIIAAARKMATIIWHMLSKGVEFDLSLMLDKKLEKKSEAMSRSARLVEAAVVEKSDEPVSKKASVAVIEKTDKSVLKKTGSETKKKSGVARKKIKKAG

SEQ ID NO: 479827 - protein, 341 aa, unidentified
MTAIGIDTHKDSLAACAVDDLGGVLGEATFANDPAGHVDLAAWAARVAPGARLGFEGSSTFGAAAARTIERLGYTVCEVPPQLSRRERGRTRRAGKSDPGDALAIARVTAREADLPPIRRVDPTTELGLLLAARTDLVAEATRIRNRLHADLVVLVPGYGATAANLVWERHLVTIARALRRLPGVHAELARDRLVELRRLQARSQALAGRIGRLMAGHPLLGLPGVGPLTAAALVARTGDPARFRSPDAFAMLAGVAPIPASSGQTRRMRLNRGGDRQLNRALHVIATVQARCYPPATAYVARKIAEGKNRRDAIRCLKRQLVRTIFGLLVEGSQPVTAAA

SEQ ID NO: 479828 - protein, 375 aa, unidentified
MIATTRPEMSVSEPTLYVAFELGKKDWKLAMTAGFGIQPWLRTVASKDWPAVERAIAQGRARFGLPRPARVVSCYEAGRDGFWIHRALTALGIANCVVDSASIEVNRRSRRAKTDRLDALKLVTMLVRVWCGERRVWHEVRVPTVAAEAARQVSRERTALTQDQTRLVNQMRGWLATWGTGLPARRRGPWWTTVRDWAGAALPPEVQARLARAEARLQGLEAQLAELDAQQQAAVTAAPAPAALGQLVQLKGVATTSASVLLDEGLVWRAFRNRRQIGGLLGFAPTPYNSGESTREQGISRAGNKRLQAISIQLAWNWVRWQPLSALTQWYQATFGTGKRARRIGIVAVARKLVIALWRYVTTGVVPAGAIVKVA

SEQ ID NO: 479829 - protein, 345 aa, unidentified
MKKTIVGVDLAKKVIQVCMVQGNQIVSNDEMSHEQFSSWLAMAKPAIIVFESCVTSNYWKQVAKEKGHDARIISAKLVSQVRQNQKTDKNDALAIVQASQLVDIKFINGKRFEQQELQSIMRMRELAVKHKIALRNQIEALLLEFNIRISSRNGGLGGTVQGVLEDAENGFCMPFRQALNATWKLYLQTIEDISKKDKLLAQAIQLHPKCEKLLALEGVSTINAINLYIAIGCEDAGTFKTGRDASACIGLTPLQHSSGGKTKLGSIGKSTKNIALRSYLVNGAMSVIHSVNRREPRTKKEKWLKQLLERKSKKCAAVALANKTVRTAFALLTQGTEYKAEPLQA

SEQ ID NO: 479830 - protein, 448 aa, unidentified
MEILYSHVAGIDVHKKQVTVTARTPDPRRPMARVEKTRTFRTFYADLLAMASWLVELGVTRVAMESTGPYWWPVYAALREVGKAGVTIDVVNAAHVKAVPGRKTDVKDAQWLARLLEVGLLRGSFLPPDDIREIRDLTRYQTKLTEERSREKQRLLKVLEAAGIKLDVVASDTFGVSGRAMLDALVAGERDPVVLAGLARGVLRNKTGDLRLALAGRFTVHHGQMIGFHLQRLDHLDEMIKAVKQKIGHAGTAGTSRRPAVAPAGLVAPFTAPIQLLSSIPGIGDRVATVIISEIGVDMSRFPSAKHLAAWAGLAPGNNESGGRRRRARHRKGNTHVQSILIEAALAASRTRTRLGARFHRLHRRFGGRANNTAGKKAAFAVAHTLIKVIWAVLTTGQPYTDLGHDFYTRRVNPEQHTRRLIAQLEALCGKKIILADPDPEDGSGAAT

SEQ ID NO: 479831 - protein, 414 aa, unidentified
MDVLVERCAGLDVHRDSVVATVRVPGKGKSRRRREQQTRTFGTTIARLEQLADWLASFEVTLVAMESTGVYWRPVFHVLERRFECWLINAQHLHNVPGRKSDVIDSVWCCELVEHGLVRPSFVPPPEIRRLRDLTRLRATQTEERGRAIQRLEKVLQDAGIKLSSVASKTYSVSARAMLEALLAGVSDPCQLAELAKARLRTKIPELQEALQNRFELAHHGVLVAGLLAHIDALDHGIATLDARIELALAPQAELIDLLCTIPGVGRSTAQVLIAECGLDMSVFPTAGHFVSWAAICPGTNQSGRRRRSGKTRRGDSWLRSALTEAARGAARSKNTYLASHYWQIRGRRGDAKAIGATRHDILIAYYHIVGDRVPYRELGPDWLARRYSPEHRTRRLVKQLEALGHKVTLEAAA

SEQ ID NO: 479832 - protein, 407 aa, unidentified
MGAATRGELSSLLQKEPMELAMKCNDLSRSLVAFDQNSTLVAVVELSLNSWVVAGVVPGLGRDPVKKQSADCNALLKLLHRWRDEAIKAGGEIKRMVVAFEAGRDGFWLARWLRDQGIEVYVIHPTSVAVSREPRRAKSDRLDTQMLKRAVLGWLRGEPKHCSMVEIPTLAQEDAKRPNREHEHLVGERTRIVNRMKATMARHGIRGFKLNLRKARKQFAELRMPEGEPLPPNTLAELERDLARLQQVRDQINTIEKQRLKRLRQAPQEGPHPMILLLAKVLGVGIETADMLVNEALWRNLRDDRAIGRYAGMTGSPDESGSKRREKGLARAGNARVRRGMVQLAWRWLMFQKESALTKWFRARTAGGPRDVRKTMIVALARKLLIALWRYVTSGEVPAGAKLRPAV

SEQ ID NO: 479833 - protein, 349 aa, unidentified
MNYYIGLDAHASTCTAVVVDEKGEQKLRETFKTTESNLIEFISKIPGETHLTFEECTLAQWLYVTLIEHVDHLLVCNPVYVAKKQGAKTDYRDALHLAQELRTGHLKSVYHDESHWIDLRVLTNNYLALVDDIVRAKNRLKAVFRAEVVDTSTEKFYQDKDRAKDLKNPNARFVAEALYDQIFSLEKLKFEYRERFRRNLKKYRPIRNLTTVPGIDLIRASIITAVVCTPQRFKNKHQLWGYSMLVRHIQVSGGRIYGNKRVHGRKELRDIFLGAAESALRTETSLREYYDTLRARGLTHKEAKIALARKIASICLCLLKNNDTFKNDHDEQQLERTKLRKELNLEQRV

SEQ ID NO: 479834 - protein, 388 aa, unidentified
MFHVGIDISKFKHDCFIATDAGVKVNAFSFENNFDGFQMLKENMSSLGDQDLIKIGFESTGHYGINLKSFLSKLGYTYLEFNPQLTSQFSKATTLRRTKTDKIDAKLIATMLGHFDYKTYHTSFYHINELKELVRQREAFLEMRSKQLVRLTNVLDKSFPEFKGFFNNILGKTPIYILKTYKNKERISSLTTSHFETLRKISMGKFSYPKFSKLKNLAKTSIGTSSKTYDLLIVTIINHYLELTKTIENLDQEIETLYHKTDSLIHTIPGIGIIAAATIYAEIGDIHRFSNPGQLTAYAGLDVKISQSGTTERFGKIVKRGSSLLRKKVYMYSLHSLRFIPQMHDYYHLKKSQNKHHKVVLTHISRKLFRIIFFIETNKVPFDLNKVV

SEQ ID NO: 479835 - protein, 305 aa, unidentified
MKKTSTVRVNKNTIFKGHKLTIGVDLGDRWSCYCVLDEAGEILLEQRVAMTPEAMKQTFSKIPRSLIAMETGTHSPWVSRLLTELGHEVLVAHAQKVQLITKSNRKDDRHDARTLARLARIDPELLGPVRHRSAQAQIHLTVIRARAELVRARTGLVNAARGLVKSYGQRLPKCGTQQVSRELAAELNAELREVLEPLLKEIESLNERIKEYEVRMEKIAQESYPQVELLKQVKGVGTQIALTYVLTLEDPHRFPKSRDVGCFLGLRPGRRDSGESQPQMRISKEGDRYLRTMLVQGAHYILGPF

SEQ ID NO: 479836 - protein, 347 aa, unidentified
MDKVTVIGMDLGDKNHKAVVLVADGTEIERAEVKNTPEQVQEFLARHPGALLAIETGTHCRWISRLAVGLGHEVLVGNARKLRMIWNSSRKNDWNDAEMLAKLARADRSLLVPVKLRDDESQELLRLVKARDILVKHRAGIVNMIRGFCKAEGGRLDGCTTEAFVRQEFDVPKVLRDVTKPLFAVLRELSKKVALFDKILVQNLEKKHREAAASVMAINGVGPVTAAAFIATVGNPTTFGKPRDAGAYFGLVPRQDQSGQSDRQLRITKEGNTQVRALLVNCANYIMGPFGKDCDLRRHGLRIAERGGKNARKRAKVAVARKLAVVMLALLQNQKEYCPLMGDVSMA

SEQ ID NO: 479837 - protein, 342 aa, unidentified
MKNMMIGVDLAKNVFQVHGALRTGEVRFRKKLTRTQFPVFMAQQEPCLVIFEACGGANYWAHEMTAIGHEVKLIAPQYVRPFVKRQKNDAADAEAIVIAARQPEMRFVAPKTVEQQSRAAVFRGRERLVHQRTADVNALRALLHEHGHVFPQGTRNLGCMKALVEDEATDLHVLIREECTDLLAQIAEKTARIIERTAKLKALAAQSDRARRLQTMPGVGPLTAVAVEAFGPDMAQFKTGRDFAAWLGLVPKQHSSGGKERLGRMTKAGQADIRRLLIIGAMSRLGWLGQRTILEGSWLSRMLQRKPKILVAIALANKMARQIWAMLTKNENYKDPALAVAA

SEQ ID NO: 479838 - protein, 382 aa, unidentified
MQASTVDTPTAGHCGTIFVTIELSQKTWLVTLHSPDRDRISRHKLEGGDHAGLLALIESIRVRAALKLGAAPKVVSCYEAGYDGFWLHRLLMAAGITNFVFDPASIAVEQRSRRAKTDRIDGELLLRTLMAHLRGEPRVVRIVRVPSVAQEDARRASRERDRLVKEQTAHTNRIKALLRLAGMAVGYPRRGNWLHWLAQQRDWQGQPLSPHLLAEVTREHARLMLVREQLAALEQAQAAQAPPVPAAMAERRDLLQRLKSLGPAFATTLTNEVFYKDFRNRRQVGAYCGLTSSPWRSGGIDREQGISKAGNPRARLKAIELAWLWLRHQPESELSRWFRTRTANAGKRAKRIAIVALARKLIVALWRYLTTGLVPAGATMKA

SEQ ID NO: 479839 - protein, 368 aa, unidentified
MTSMTRDRRAVTAGPASPQLAGPVTGGVDTHGQTHHAAVIDMVGRHVGDREFGTTPAGYRALSLWLHSHGVPLDRVGVEGSGAYGAGLARHLRAEGVRLVEVDRPDRSTRRSKGKSDPIDAYAAARAALSGAATGAPKTRDGRVEAIRTLRLAKRSAIKARTQAMNQLHAALLTGPADLREQLRALTGQRLVGACARLRQPATGHALAALPDPIPAATKSTLRRLARRHQQLTDEIGDIDADLLPLVTLTAPALLALNGVGVEVAAQLLATAGDNPDRLSSEAAFAHLCGVAPLPASSGRTDRHRLNRGGDRAANSALHTITLCRMRWDLRTRAYVTRRTAQGLSKKEIIRCLKRYIARDVHTALLAH

SEQ ID NO: 479840 - protein, 403 aa, unidentified
MNNVAGIDVSKGKSMVSVLRPFGEVVAKPFSIGHTGSELKELADYLKSLDGETRVVMEHTGRYYEPVARFLHEEGIFVSAVNPKLIKDYGNNTLRKVKTDKADSRKIARYGIDNWAELRQHTPMDTIRMQLKTLNRQQSLYSKTKTMMKNNLIALLDQTYPGVNALFDSPVREDGSQKWVDFATTFWHVDCVRNMSLTAFAERYRKWCKRHGYNFSQSKAVEVHAGAQDLIAMLPRDALTKTMVRQAIDALNAISASMERLKAEMQALAAQLPEYPVVMAMHGVGDSLGPQLMAELGDVTRFTHRNAITAFAGVDPGADQSGTHEAKSTRVSKSGPPELRRALFLVMDCLLKTQPQDDPVYRFMDKKRAEGKPYLVYMTAGANKFLRIYYGRVKEYLAQLENS

SEQ ID NO: 479841 - protein, 364 aa, unidentified
MKKNIITRQSPRQASKASRGPIAIGMDLGDRTSRYCVLNEGGEVVGEGSVATTKQAMTEKFGGLGRTRIAMEVGTHSPWVSRLLTSLGHEAIVANARQVRLISHSTRKDDKLDARTLARLARIDPELLRPIRHRSERAQGHLLAIRVRASLVDARTGLVNAARGFAKASGERLPACDADSLGVETMSALPAGLQQRLRPLLEQIESLTVKIQEADQQLEQIARIEYPETKLLRQVSGVGVLIALTFVLTVEDSARFEKSRDVGCYVGLRPKRSESGQSRPELRITKEGDRYLRQMLVQGAHLILGRRGPDTDLKRWGLKLAARGGKNQKKRAVVAVARKLAILLHRLWVTAEVYQPLRRQPIAA

SEQ ID NO: 479842 - protein, 371 aa, unidentified
MEKSVLYVGLDVHKMSVDIAIAEPGSAGEIRYYGKIGGDLDSLDRISRKLKAKGAELRFAYEAGPCGYQIYRHLTAKGYQCLVAAPALIPRRPGDRLKNDRRDALTLARLFRAGELTPVKVPDADDEAMRDLLRAREDAKGVERRAKQHTAAFLLRQGHHFPGKTTWSRGYWRWLRQIAMPYPAQQIVLQEYLDAVQEAEARVQRLTAQIRELLPQWRWHPVVQGLMALRGVSLIVATTVLAEVGDLSRFTSPGELMAYLGLVPSEHSSGAQVRRGAITKTGNGHARRVLVEAAWAYRLKARVSRHLWRRLTGLPKPICDLAWKAQIRLCGRYRRLLARGKHQNTVITAIARELAGFIWAIGQQVEPVTMK

SEQ ID NO: 479843 - protein, 346 aa, unidentified
MYEIKRIAIDTSKSVFTLHAVDGGERAVWRGNLRRRELLNFFAKQPPVEVVLEACGGSHHWGRCLLALGHRVRLLPAQYVKPFVKRGKNDRNDAEAISVAAAQPSIGSVPVKSVEQQAAAMLLSVRELLVRQRTQLVNALRGHAAELGVVAPLGNKGLAALRREIAAADETAVPVPAKQAIVLLGHQADRLERQLAAIEVRLMQQHKANPLSRRLATIPGVGPISALSFSLRVDPRQFKSGRHLAAWLGLVPRERSTAGKQRLGAISRAGNERLRQLLVLGATAVIRYAKPRPAAPGRPAASSWLLQLLGRKPRKLAAVALANKMARILWAMMTSGEVYRLRPAAV

SEQ ID NO: 479844 - protein, 427 aa, unidentified
MSTLSGPSQEYAAWIGLDWADRNHAVSLRAEGSQELESFPLEQKPEALSAWITQLRQRFGGRPVALALEQSRGPLLFALMHIEFIVLYPVNPKTLARYRESLNPSGSKSDPGDAALLRELIEKHREHFVPWKPEDPDTRQIQLLSEYRRKLVNTRVRLTNQITDLLKNYYPQALALAGDLDSPMACDFLLRWPSLHKLQQTKPLQLEKFYLRHNSRSPERIQQRLTLFQQAQPLTTDVALIESMKRMMLALVRQLQTVLDSVGEFDQQIKSLYECHPEHDIFASFPGAGEVLGPRLLAAFGRDRDKYQKAHQMRNFSGIAPITRQSGKTRMVQARIACPKFLRQTFHEFALHSLGRCSWAQQLYLRLKDKGVAHQAAVRVVAYKWIAILFICWKNHTTYDEQHYLLAKQRRCLPRLNQKLELSVQKL

SEQ ID NO: 479845 - protein, 417 aa, unidentified
MKKHSNSAKKCEPSAKRAHSRVSVVQDVREVMTNLVAQLTRQLDEGSLPVVELQDEGRSAIRPNLDRLTVGVDLGDEWSNYCILGLGGETLTEGQFPMSRQEIAEFFQGLAISRVVVEVGTHSAWVQEVIAGLGHEVLVANARMMEGSKRRRRKNDRIDAGKLARLGRVDPKSLYPIRHRSSQVREDLLVLRARDALVASRTELINTVRALVKTMGARLSSCSSEAFAKRAETEIANELRETLQPLLRLIATLNGEIKSYDQKIEQLASKKYSQTKLLRQVTGVGPITALAYVLTLETPQRFARSRDVGPYLGLVPKQEDSGDSQPQLGISKAGDQMLRKLLVGSAHYILGPFGPDTDLRRFGMRLCERGGKNAKKRAAVAVARKLAVLLHRLWASGDVYEPLGHVSLAGTTQAAAA

SEQ ID NO: 479846 - protein, 387 aa, unidentified
MYFVGIDISKFKHDCAIIDELCDTVMPSWSFSNDREGFSHFKALLDSLEGEKKIGLESTGHYGQNLKQFLESNGFAFMEFNPLLVSRFVRSKSLRNTKTDSIDALSIAQYVMTVEYKPYPSSFYHLDKLKSLTRFRNSLVRQRSRQLVELTNVLDKLFPEFKPFFKDKFSVTALYILAHYQTPERIANMNARSYEALRKLSRGRFTLSNFIQLKALAKNTVGTQSDYLLDQMNILLELYSQLDSKVDELEAQIKECVRGIDPPCLSIPGVGELSAAMILSEFGDFSKFQNPSKMLAFAGLEPGYFQSGQSEYTGHMVKHGSSRLRYALMNCCLPLISNEPVFAAYYTKKRSEGKPHRVALTHVAKKLLRVIYTLQTKNIRYDPTMIH

SEQ ID NO: 479847 - protein, 350 aa, unidentified
MIIIGADYHPGFQQIAFVDTDTGELQERRLQHREEAEKFYRDLAAQGMKVRVGMEASGHARWFERLLSELQFELWIGDAAEIRTKRVRKQKTDRQDAQLILQLLLEDRFPQIWVPSWETRDLRQLLWHRHRMVQARTRIMNQLQAVALNEGLRCKKRLWRDAGREQLESFALAPWASRRRRDLLELLDRLTPTIAELTQAIEQEVEKCPEAQRLQTHPGVGALTALAFVLIIGRADRFQCGKQIASYLGLVPLEESSGQRRRLGHITKQGNSLLRFLLVEAAQVTVRSDQEWRSKYFHLAMRRGRKIAKVAMARRLAVRMYWMWRKGWNYEQMTKFSSHAGQPGNRDGVR

SEQ ID NO: 479848 - protein, 345 aa, unidentified
MEQISRIGMDTSKHIFQLHGVNAAEEPVLRKKLRRKEMFAFLEKLAPTVIAIEACGASHHCARLLQSFGHSVKLIAPQLVKPYLKRGKNDAADAEALCEAMSRPTMRFVPVKTAEQQAALMLVGVRDRLIRNRTQLSNAIRGYAGEFGLTAAKGKAHLDPLLERIQADESLPALARELFAAQAEEYAQLQAQIDQVDARLIAWHRADECSRRLIKIPGVGPIGAVLLKMKTPEPELFRSGRQFAAWIGLTPKDHSTAGKVRLGAITRAGDEALRSVLVVGATTVIQHAQRGGRPSPWLTELLKRKPPKLAAVALANKIARIAWKLMVTGENYAAKAAPATLPGAA

SEQ ID NO: 479849 - protein, 313 aa, unidentified
MYYIGIDVSKKALSVFDGKVSLEFENVAGLRPFYRYLNKHFKHFNNLVLIFEATGIYSTNLREFCNLHKIKAYILNPKQSHNFAKSLGVRSKTDKIDARVIWRYQSLIPTKRIQIPVIDQEVKMLTSYLTSYQFIQVQRTAVSNHLESITDKNLRKLLEKELLRKQQLETRLLGDIKYYIHEHPGLAKDYQRLMSISGIGEKLAFSLLFLFRHYQGTNRAQITALVGLDPIYKESGTSVKGKVKISKNGNRYIRKMLYLPTLSAIKNNQRIAVFYKRLLDNHKPKKVAVIAAMRKLLLVAHAVYRNKTEYVPG

SEQ ID NO: 479850 - protein, 351 aa, unidentified
MKEYIAFDSHKHYTLMEREDRQTARTVQLRVAHQPGAIRACLRNCESGTDVAVEATGNWYWIVSEIEQAGLKPQLVHPRKAKLMMGLINKTDKLDVHGLNRLQRNGTLPTVWIPPAELRDQRELTRTRLVLVAQRTRLKNRLQSSLAKYGLAVRDCSDAFGTVARSQWPELLAKLPEQTQWVSQQLLKQLDLLEEQIGQCEKRLNPLLKITPQIERLKSLPGVGLILGASIALEIGEVSRFASAEHLASYAGTTPRVHSSGDKLRFGRLRPDINRYLRWAFVEAANVVALHHQQRPERHVSHLYWRLKQRKGHAKAIGAVARHLAEATFHILSRQEDYVDPALRKGRSKPV

SEQ ID NO: 479851 - protein, 402 aa, unidentified
MLYVGIDWADTQHRVSIIDSQGVEKANFTIPHTREGLEHLKEKLIKLAQNPQSIACIIETKHGLLIQFLLEAGFAVYPVNPKVVDRRRKPSGAKSDPLDARILAELGRTDINLLRQLKPDSELIQELKVLTRDQDTLIRESTRLTNRLISCLKEYFPVALELFSKPTLPVTLDFLKQYPTLESAQIASVPELAAFLKSHKHPKPNQTASEIYQKLHSPQLKANPVVTRTKARLMLAILSQLEPLLEQIKEYDKEIERLFKLHSDSKFFASLPGAGLRLAPRLLAEWGDDRERFLNASVVQALAGTSPVLYQSGKYCFAKQRKSCVKPFRNVLHQFAYQTVMWVGWSREYYDKKRSEGKSHHEAIRALANIWVRIIFAMWKSYQPYDESIFLSAKAKHSLAAA

SEQ ID NO: 479852 - protein, 381 aa, unidentified
MTTAAAHHEQENTPEATLFVAFELSEKTWKLGFTTGHGQKPRERTVTARQQERVLDEIAQAKRRLGLPESATVVSCYEAGREGFWLHRLLQGHGITNHVVDSSSIEVNRRRRRAKSDGLDVRKLLSMLMRYHHGERQVWQVVKVPSVEAEDQRHLHRDLETLKQERASTMTRIEGLLSSQGLRVTSLTKLPDQLEALRLWDGSPIPPGLRRRVLRVYAHYTFLSEQIAAVEAERRALLQTSPEASIDKVRQLMQLKGIGINGAWLLVMEFFGWRAFKNRREVGGLAGFTPTPYQSGESAREQGITKAGNRHVRWMTTELAWSWLRFQPDSALSVWFRERFGGGGKRLRRIGIVAVARKLLIALWRFLETGVLPAGAVLKEG

SEQ ID NO: 479853 - protein, 357 aa, unidentified
MATQLTAQPKLYIGMDIHKKSWSIHMRTDLSDHKSITIPAKADILLNYVESNFSDYQVSLVYEAGCCGFGSARYFLSQGWEVTVVNPADVPTMDKQHYQKTDKIDCHNLSKQLKAGHLTGIYIPDKEQDLLKSLVRQKAEAARQLRNVKSQIKSLLLYHNYEVPLNIDNSNWTKEFIQWIKDLDWEFPSGKECMESKLRILDLFHHEALHIANQLRAYCRKHYKKDYYLLKSIPGIGGYLASAILAEIGDLRRFNTEAEFASYVGIIPTMRNSGGTTNISGVTPRCRALLRTYIIESAWVAYRLDPQMQQYYRKHIGKNPKSIIVKIARKLLNRMLSVIKNDTPYKLNTTVQNHEMK

SEQ ID NO: 479854 - protein, 315 aa, unidentified
MSDVPCFIGIDVAKAQLDIALRPSGERWAVPNDTSGVAMLVERLQTLHPTLIVLEATGGLERAATSALAAAGLPVVVVNPRQARDFARATGQLAKTDALDARALAHFADVIRPTPRPLPDAQTQELRALLGRRQQLIGMRTAEQNRLAGASERLTKDITAHITWLNVAIATLDDDLETMLRASPLWRANDDLLQSAKGIGPVSAHTFLLELPELGTLTRQQIAALVGVAPLNCDSGTLRGKRTIWGGRAHVRTVLYMSTLVATRFNPQIKVFYERLLAAGKVKKVALTACMHKFLTILNAMLKHRTPWQPQEVQS

SEQ ID NO: 479855 - protein, 331 aa, unidentified
MKNKLIVGIDVSKAVLDLFILKLEYHFVVENSPKGFASLLEICCNKLSCKREDLYFCFEHTGRYSRPLSVFLDQTGIMFSEVPPLDIKRSKGISRGKSDKADARDIARYAWRKKDELVPTKMNSPEVSILRQLLTLREKLIKHRTAYKNSIKDLKDCFFEGETFFIKQTQEELIEQLDIKINKIDKQIEAIIQSMPEWNINYKLIQTIRGIGPVISKYVIIYTENFTRFKNYRKFACYAGIAPFEYTSGSSIKGKTRVHPFANKQIKSLLNMGAMNAIKIKGEYRIYYKRRQQQGKNNMSTLNIIRNKLLARMFAVVKRQSPYLDLYRFAA

SEQ ID NO: 479856 - protein, 315 aa, unidentified
MFVGIDVAKDRLDVHVRPAGEAFTVARDGEGIEDLVGRLSKMVPALIVLEATGGFETIVAAGLGAAGLPVAVVNPRQIRDFARATARLAKTDALDAAVIAHFAEAVNPPARPLADEQSRLLGELMARRRQLIEMIGAESNRRRMLTVRRTLKTVDRVLATLKTQLQQIDDDIDSAVRGTPAWREAEDLLVSVPGIGPRIARTLIAELPELGRLGRREIASLTGVAPFNRDSGTLRGRRTIAGGRPVVRAALYMSILVSIRRKLPLALTYHRLRAAGKPAKVAIVACMRKLVTILNAILRDRNHGQTLDRHDGRSG

SEQ ID NO: 479857 - protein, 406 aa, unidentified
MRLYTGIDWSENKHDIVFMNQAGAAIARLTISHTAQGFLQFDAAREALGVAPADCMVGLETAHNLLIDFLWSRQYSQVYVIPPSVVKSNRGRQSSSGARTDQGDAFLLADILRTDRDRRHPWHPDSLLTRQIGAKVSYIGYLTRNIVRTSNRLRSLLLRYYPAALHVFSSLRTQIRLAFICAYSTPQAARALTFAEFEAFAAAQGYKQPARLRAYFAALQDPHPQPAPETVLIYQQEAVHLATFLLSLRQARNAAQRHLDALFAQHPDAPIFSSLPGAGDLLAPSLLAKFGDDRQRFPQPNGVQALAGTCPVTESSGKRKVVRFRRACDREFRDIAQKWARASLSKSVWANTYWRRIRPGCHSTSHAYRCLANRWLAIAWKLWQTRKPYDEEYHLQQCARHSRPRH

SEQ ID NO: 479858 - protein, 407 aa, unidentified
MNTGFAVVIGLDVGKTAHHACALDPEGNKLFDKPLPQDETKLRELFTQLQNHGEVLLVVDQPNTIGALPIAVARDTGCTVAYLPGLAMRKAADLYPGRSKTDARDAFIIADTARTMPHTLRQVDRDSEVLSALKVLAGFDEDLAHETTRALNRIRSLLTQIHPALERVFAGGKLSTGLVLDLLEKFGGPTGLRSAGRRKVLRFARAHSRRDPETLVEQIFTALSEQTVIVPATAAVELVIPRVAGQVKELKEQRATVAHEVEGMLEDFPLASVLMSMPGIGIKTAAQILLAIGDGSAFESASHLAAYAGIAPVTRRSGTSIRGEFPARSGNKRLKNALFYSAWVASNHDPISKAYYDRKRAEGKRHNAAVICLARRRCNVIYAMLRDGTYYQPPTTAPTPEPTALAA

SEQ ID NO: 479859 - protein, 417 aa, unidentified
MDTSNEHWMAVDWGNDSHAACVLDDAGKQIKSFAVEHSEDGLEEMIRTFRQSGRIGGVAVETNHGLVVHKLLQAGITVYPINPKLSDQWRKARSVSESKSDRTDAFILAENLRQMHEHLRPLELDDDLTRELAMLCRAESGFIQTRTAFVLHLQAVLKEYHPQALDWFDDWTKPTPWDFVERFSTPDELCQASRQELVGFLKTHRLGLRPKWREKLDSHDKDTTWPSDPPTTAAKSFEAKGLVKLLKCLEKTLKKYRKRIEELFACHPDAPIFDSLPGVGPKLGPRLLANFGTRRDRYESALALQELSGTVPVIRESGNHREVRMRKACQKRFRNTMHLTAFCSLQGSAWARSFYDRARGRGDSNALALRKLGAKWINIIYRMWQEGSAYDEGKYLTSLIRHDSPLIEHIKCGKQGG

SEQ ID NO: 479860 - protein, 351 aa, unidentified
MVIIGIDPHSATHVAAAVDEHGQLLGSIQVGASPQQLQRLVGWVGGFPRPRLVAVEGARGYGLALTRLLLGAGERVVDVAPTLTAAGRRRGRARGKDDQIDATAVARVARQEPGLPALSLDGLNADLKLLVDARDQLVVEASRVRNRLHALLLVLAPGYRTSTGALAKRPALRRAQRLVELAAPDDVVRARLALAAIVRLEALEAEFAQLERDVKIALTPRQPTRLLAICGVGALTAAKLLGETHSVDRFASAAAFAAHTGTAPIPVSSGNTQRHRLSRSGNRQLNRALFTIAMCQARWDPNARAYLARKRTEGKSPAEARRCLKRHLANVVYRAMVADAQALQATPTPTA

SEQ ID NO: 479861 - protein, 337 aa, unidentified
MPALIIGLDIAKHVFQLHGVDRSGKTVIQRKLRRAEVLKFFSKLEPSLVGIEACHGSHFWARELTSLGHTVRLLPTQYVKPFLVGGKNDANDAAAICSAVSRPDIHPVPIKSAEQQSLQSVHRMRERLIHERTAKSNQIRSMFAEEGFVFPVGLPLLRQGIVALVKDTDARITPLLRRLGSMYLEQLAALQQWVDELAAEIAEIFKRNEGCQRLATVPGIGPVVATALFSSVGDPLQFKNGRQFAAWLGLTPKQRSSGGKTKLGGITKHGDTYLRTLLVQGARAVMRFVHRHDDRHSRWIKAVMQRRHVSVAAIALANKTARIAWAILVSNDSFKMA

SEQ ID NO: 479862 - protein, 372 aa, unidentified
MSDNSVAYVAFDTAKMRHAVAIAEDGRTGEVRFLGETENTGAATIKLVKKLASRYRHLTFCYEAGPTGYELYRLIKRLGHDCIVVAPSLIPRKPGDRVKTNRRDALSLAKLLRAGELTAVWVPDARHEAMRDLTRVREAAVEDLTSKRQQVLSLLLRLGRHYVGKRNWTRMHMSWLASQRLEHAEQRIAFEEMLLAVREAQERVARLEQAIRAAMPDWSLADAVTALMAMRGFDLVSASAFLAEMGDLSRFPTARDLMGYLGLVPSEQSTGDRVRRAGITKAGNRRARRILVECSWSYRHPPRLGKEKLAKVAAVPRDVREIAWKAQHRLTARYRALTRNGKKPTVVVTAIARELSGFIWAINRAARPAMAG

SEQ ID NO: 479863 - protein, 458 aa, unidentified
MKIKSIYPARNSSQLREVLGKYSPGELLYAPIDVAKYNHKACAVNFFGDILTPAFEFSNNAHGVKFFISKITEAARNAKAKKIFIGLEATGHYHQNLTLHLKSLGYEVAVINPFDSWKERLNKSSKTDKIDLGSIAKSLISRKFSSSTVPEGVYYNLQRATRTRRKFVNRRTSSKNIITGLLDNLFPGLWDKEDTIFSDRWGKASLSVLEHYPTPQMVLRLGEKRLTRFLKKGTTKLGEKTARKIISAAKVALTRSPYEQTMDILALRSHLQAYRLYEEIIFHLEKEIAYLLVQTPGTYLLSVPGISVTYAAEVTAEIGDISRFAYANQIISLAGTCSKKDQTGEHDPQNLPISKKGNKFLRTVLNQAELSLNTWCPDFNAYYSRKVEEKKGRCGIARTATGNKFARLAFALMKHESLYHPHSFNTLVQDPGNYYLLSLWRNTEEVKGFLFREDPSSE

SEQ ID NO: 479864 - protein, 355 aa, unidentified
MSSEKYIGLDVHQATISAAVTDSQGKVIMESILETKASTLLEFFAGLRGSLFVTFEEGTWAAWLYDLLKPHVTEVLVCNPGKIPLHKQGNKSDQIDARKLAERLRLHDLKPVYHGENGIRMLRELARSYLTVVKDLSRVMNRLKALYRSWAIPCAGRDVYYRRHRSEWLDKIQEPGVRCRAERLYQQLDMLQHLRQQARRELLVESRKHTITAKLRQIPSLGPIRSALAVALMQTPNRFRSKRQLWTYSGLGLETRDSGEYYVVKGQVRRRKKQATIRGLNKDHNHDLKGLFKGAATRASVKPGPFQEFYQRSLAKGIKPTMVRLTLARKIAAITLTLWKKGEDFDINKLNSQAA

SEQ ID NO: 479865 - protein, 333 aa, unidentified
MLAAIAAYRARAAATGRSIERVIAVYEAGWSGFWLARWLMRHGVEVYVVQPSSVPVDRRIRRAKSDGIDSELLLRTLLAWLRGEPRVCSMVPVPDEADEDARRCVRERSELISERIGLTNRIGAILATLGVSDYNPLLRNRGRRLAELRTALGEPLPANAHAKLKRLLARLELVLTQIAELERERDAVVETEASDGASKMIQQLTALRGIGVQSATVLVREAFVRRFANGKALGSYAGLASSPYSSGGIDREQGIGKAGNRRVRTVMVELAWLWTRYQPGAAQVCWFRERVASTGRRVRKIMVVALARKLLIALWRFVIDGVLPEGAVLKPAA

SEQ ID NO: 479866 - protein, 392 aa, unidentified
MVISVGIDVSKDKHDCFVVSSEGKVLADVFTIPNTLDGFNLLLQKIQDCTNPQDKIKVGLEATGHYSYNLLGFLLNNGLTTYVLNPLRTNLYRKSLSLRKTKTDRVDARTIASMLLSDTGLKPYTNTAYHNEKLKSLTRYRFDKVKERAKLKSSVSRLVCILFPELEKLVPSLHIASVHALLEEFPGAKQISAAHLTRLKALLETASKGRYKRDMAVEIRYAARNSIGSWMPAKSLELQHTIRLIRELDSEISEIEEQIQSIMDELDSPITTIPGMGFRMAAMILAEAGDFSRFDSPDKLLAYAGMSPSTYQSGQLKNCYPHMEKRGSRYLRYALYNAAKYVCHWDPTFAAYLAKKRAEGKHYNVALSHATKKLVRLLFALEKSRQPYRSAA

SEQ ID NO: 479867 - protein, 336 aa, unidentified
MDYCGLDLGKTSSRLCVVDRDRNILREQDVATREKALRKAFGRKQKLRVVIEASNNAFWVAELLEELGHELRVVDPNRTKAIGASLIKTDKLDARWLAYLCAADLLATVRVPTREERIARMPVTARDGLIRARTRLINAVRGITTSEGIVVQQCKPERLLEMVEACQDQLPEGMYEALLPLLDGIDALNICVDTGTVALRERADTDPALQRLQTIPGVGPITASIYAGAIIDPSRFSSGRDVGAYLGLVPSLYQSGATMRRGRITKRGNRQARWALCMAGNAVLNCKKSTPLVDWAKGLEGRIGRKKAIIATARKLASVMWAVWSKEVEYDARLVA

SEQ ID NO: 479868 - protein, 350 aa, unidentified
MIIIGCDYHPGFQQVAFVDTETGELQERRLQHREEAEKFYRELAAQGMKVRVGMEASGHARWFERLLAELQFELWIGDAAEIRTKRVRKQKTDRQDAQLILKLMLEDRFPQIWVPSWENRDLRQLLWHRHRMVQARTRIMNQLQAVALNEGLRCKKRLWREAGREQLESFRLAPWASQRRRDLLELLDRLNPTIAKLTQAIEQEVEKYPEAQRLRTHPGVGSLTALAFVLILGRADRFQCGKQIASYLGLVPLEESSGNRRRLGHITKQGNSLLRFLLVEAAQVTVRSLPEWRSKYFHLAMRRGRKIAKVAMARRLAVQMYWMMRKRWDYEQLKKFSSHAGQLGHRDGVK

SEQ ID NO: 479869 - protein, 364 aa, unidentified
MDPPLKDGVIMRQHRISIFKKRRRSMKDIKILGVDIAKDVFQLCGIDEWGKVIYTRRVKRAQYVSTVASLKVGCVVMEACGGANHWYRTFMGMGIPTQLISPQHVKPYVKSNKNDRNDAQAIAEAASRASMRFVRGKTVEQQDVQALLKIRDRLVKSRTALINEIRGLLQEYGLTMARGAKRFYEELPLILASEAVGLTPRMKRVLNCLYTELLNRDEAIGDYEEELKAVAKANEDCQRVQSIPGVGYLTALSVYASVGDIHQFHRSRQLSAFIGLVPRQHSSGNKEVLLGISKRGNVMLRTLLIHGARALLRHVKNKTDKKSLWLKALIERRGMNRACVALANKNAPIIWALLTRQETYRCGA

SEQ ID NO: 479870 - protein, 364 aa, unidentified
MDKLTHIGLDVHKDTIAVATLRPGTITCDEHVIPNTPEALRILVSAHRDTADLRTCYEAGPTGYDTHRLLTELGVPCDVIAPALIPRRVGARVKTDRVDARNLAHLYRAGELTAIRVPSAEEEAVRDLIRTREDLKADRRISRQRIKAFLLRHGRRYAHPRSGWTGLYNAWVRSQTFEQPATQTAFDHLVAAHSTRNAQMIALDAEIVAAAELPGIADTVARLRCLRGIDTLSAVTLAAEACDFRRFTSAASFMAFTGLVPSEHSSGAKERRGSITKTGNAHIRRVLVEAAWSYRHRPAVGVKLAARHAGQPPAVVAYAWSAQCRLSARFHKLSAAKGVNKAAVAVARELAGFVWGISTGRIAV

SEQ ID NO: 479871 - protein, 346 aa, unidentified
MLYAGLDLSRKRLDVHILDEDGRTVEVTAVSPDAAGLRRLAAHVLHFGHEVYGAIESMTGARFVHDTLERYGWDVAIADAAKVKGIAPLAAKTDRIDARVLAELARRELVPEIWLPDPTVRAERERARFRLHLVHHRTALKNRIHATLMTFGHPVPVADLFGVGGRELLARLALPEPWSGTLATSLRMVDELGAEIDACEADLRRLGADHPSIPLLLTVPGIGPILAYTIASEIGDIGRFSSPKKLTGYTGLCPLVRQSGNRDVRGPLAKNGPKYLRWALIEAATHAARDAHYRDRYERTKRRLGRQRGAKVARIDIARKLAEAIWHILTKNEPFAPAGPTMLLVA

SEQ ID NO: 479872 - protein, 429 aa, unidentified
MIMGFTKPIEHFNLQRKKVITMNTLYVGIDVSSKSNVVYLMLPNGDKHSNFSVANSHEGSTLLVKKIYSALTSHSLDTVLIGLEATSVYGDNLVYFLREDATLAPFNRKIHVLNPKQVKKFHDTYNDLPKNDYVDSFVIADCLRFGRINKEVYMGDYRYKALQNLTRARFFAVQNLVKEKQRFMNVLFKKYSTMTQEKVFSDAFSTTALAVYDEFESAEALANMDLHELTDFIIEKGKNRFPDPVAVAKAIQKAARSSYRLPKTVNDSVNQVLSISITSMKALESQIKEFDKAIKALMELLPNVLISIPGIGPVYSAGIMAEIGDINRFDNQASLAKYAGLAWKQHQSGGFEAEVTRLIPSGNRFLKYYLCEAAFSLVRCDKEYSDFYHLKYKEVNRCQHKRALALTARKFVRLVFRLLKDNRLYCPAK

SEQ ID NO: 479873 - protein, 333 aa, unidentified
MNTAGIDVSHKTLVLSVSKGGKLGKAREFANTAPGHQALLKALKGANVERVCLEATGTYHLELALVLEAAGVALMVLNPKAAKRFAEALLTRHKTDPVDAGVLAQFAERMPFTPWQRPADEVLALRACARQITALQKTRTSARNRLHAMSQSHLTPAAVITSGEALIRQCDEQIAELRGWARTHIQAHGALADAFALLLSAKGIGEASAIELLGELLVLPEDMAAKQWVAMAGLDPRQVSSGSSVHKQPRLSKAGNRYLRQALFMPALSAARHDPHIRAFYRALIEQRGLKKLQAVCAVMRKLLHGLHAMLKHRQPFDAARLCPPRPTPAGAV

SEQ ID NO: 479874 - protein, 350 aa, unidentified
MNLHAIGIDLGKTTFHLVGLNQAGEVQVRKKFSRSQLLRFTANVQVHLIGMEACAGSHFLGKALREQGHTARLMPAQYVKPFVKTNKSDFIDAEAIAEAVSRPSMRFVPIKTDEQLDMQSLHRVRERWIMRRTSVVNQIRGLLLERGITVRTGRCHLDAALPGILEDGSTSLSGTVRFLLLELKQELEQLAGHIEQAETLIERAAQQSEACQRLDAIPGIGPLTATALIAAIGNGGAFRKGREFAAWVGLVPREHSTGGKQKLLGISKRGNSYLRKLFVQGARAVLRYRDKQCSGLKHWLTELSSRSHYNIVGVALANKLARMAWAVLASGDAYRPPVQAGTTGLQMTPV

SEQ ID NO: 479875 - protein, 465 aa, unidentified
MKPTRRPDGKKPASSPSLLERINPNAAGIDCGSETHFVAVPPDRDATPVRSFTTFTADLQRLADWLTACGVTSVAMESTGVYWIPLYEILEARGLAVVLVNARHVKNVPGRKTDVVDCQWLQELHSVGLLRGSFRPTAAIAALRAYLRHRETLVQSAATHVQRMQKALVQMNLQLAVVLSDITGVTGLRIVRDIVAGQTDPHALAQHRDPRCQASEAEITAALTGHYRPEHVFVLQQNLELFDTYHHQLAACDAAIEAHVHTLAAQAPAPAAALPAPRTKKKPRDHEPRFEIRTPLHHLTGVDLTQIDALGPYSALRLLGEIGTDMSRWPTEKHFTSWLTLAPHNQISGGRLLSSKTQPSANRAAGILRMAAMSLGRTGTALGAFYRRLAYRVGKAKAITATARKLAILVYRTLKDGLHYQDPGAAAYEAQHRTRVLRRLRQRAANLGFSLVNRDTGELLESAVS

SEQ ID NO: 479876 - protein, 427 aa, unidentified
MNEVMAGMDLHRNNVVCGLVDQDGRRVVEKRLPCELETIVQWLEPYRTRLKRMAIESTYNWYWLVDGLQEADFDVVLANPARIEQYSGLKHADDSSDAFFLAELLRLNILPTGHIYDRQLRPVRDLLRRRLLLVRQAAALKLSFKSLYARTTGQTLSLSRLQRLTPAEVPGLFAHGAEQLIAQEQLRLIGELGQSIARIELAVGREVKDWASYRWVQTIPGVGKILGLTIALETGPITRFASAGDYASYCRCVRSQRVSNGKVKGANNGKNGNRYLAWAWVEAAQFARRYYGPCRRFFDRKAGEVNGALASKALACKLAKAGWHLMREGVPFDWSRAFPGGVPGGEPERQVRAAGAPRTPPPPHRPALEKDPTSLTPLGSVSTRVSPGREDSQTAAPSAKTRSKTQAKAAKPPVSTESRTKIMKKRT

SEQ ID NO: 479877 - protein, 339 aa, unidentified
MKEVSTIGLDLAKKVFQVHGVDGVGGVVLRRALRRSQVLVWFAKLPRCLVGMEACATAHDWARELEKLGHEVRLIAPADAKAYVRRNTNDPADAAAICEAVGRPSMRFVAIKSTAQQAAAGIHRVRDLLMKQHTMLRNQLRGLMAEFGLVAAKGQRGLSALIAILVDPEDRRLPSPLREGLVAIVETLRGIDRKLEAIDRQLVQAGRENATYRHLITAPGYGPILASAMVAMVVDPGAFRRGDDFAAALGLVPRQEGTGGKTWLGPISKRGNGYLRRLLVNGATAVLKSKRAKEDPWLAKLLTSKPRKLVAVALANKMARIGWALMTRQEDFRGSLAVA

SEQ ID NO: 479878 - protein, 475 aa, unidentified
MICLVAASGDQGGSTPLERLVNQIRHRAEPAPFHQEQAMRRKKKNANKSVNLQGLPLVHPNAAGIDVGAKEHVVAVPGDRDPKPVRTFQAFTPDLHELAAWLKGCGIETVALESTGIYWISLYEVLEQYGFEIRVVNARHVKHVPGRTKTDVLDCQWIQKLHSFGLLNGSFRPDQQIRKLRTYMRLRDNLVVASTQAVHHMQKALFEMNVQLSNVISDIVGETGLHIIEAIIAGERDPKQLAALCSTRIKASRETVAKSLHGSWDEALLFALKAALETFGFSQTKIQECDCCIQQHLAQFESRAEQINSPQDLKTQLHRVCGVDLTKIPGIKEQSAQIIISEVGLDMTQWKTEKQFCSFLGLCPDNSISGGKVLHRATRKVYNRAADTLRLCAQSLTHSKSALGAKYRRLKARLGAPKAIVAMAHHLARLVYRMLRYGQNYVEQGIHQYELKFQLQRIKWLKKEAKSLNLQLVPA

SEQ ID NO: 479879 - protein, 366 aa, unidentified
MVGCDLHDASMLLKVAVDRQESQKLYFDNDPEGRQRMIAELKKRKKAAKADRICFAYEASGLGFTLYDELTEAGIPCFVLAPSRMERSVKQRRNKTDDKDAERLLKELRGHLLGGNELPAIWVPDPQTRDDRLVVRARLNVGQKRTGVKTQIRSLLKLHDVPGSSRTPGGRTKAYRVWLQDLSDCEKALPWGARIALKTLLAQLAALDQELARLDEAVRQMSEFPRYAEAVRELTKLTGVGILMAMVFLTEMGDLSRFPNREAIGAYLGLAPSADESGEQEDHKGHITGHGSGRVRYMLCQITWVRKRLDPATKERYERIAARNPKHKKIATVAMMRQLAVVLWHIGLEAQRRAGVFAKGTAAAAA

SEQ ID NO: 479880 - protein, 413 aa, unidentified
MDVVHPRCAGIDISKRDAKVCVRIQGRGSRRTAATVTTWGAMTNQVLALREHLLEQKVTCVVMEATSDYWRPFYYLLEEHLEVMLVNARDVKTVPGRKSDVSDAAWLADLGAHGLVKASFVPPEPIRVLRDLTRARTMITQERTREIQRLEKLLEDAGIKLSSVATDITGVSGRLMLEALIDGHDDPVQLSQLAKGRLRSKIPVLAEALIGHFTAHHAFMTRLFLDRIDAHTADIDKLSARIDEAMAPFRPARDLLISIPGFSTTVAEIFIAETGGDMRVFPTAGHLASWAGTAPGSNESAGRVKSAKTRPGNRYLKGALGTAALSVARSKGTYFSAKYRRIAVRRGPMKAVVAVEHAMLVAAWNMLTNGDFYRDPGADYFTRRVPTKTRARAIGQLESLGYRVILEPLSGSA

SEQ ID NO: 479881 - protein, 426 aa, unidentified
MAYRIAGIDVHKKMVAVAIADVEVVGTWQFERRQIGTSPSQLRALAEWLVDRKVDEVVMESTAQYWRPVWEALERGWQPRRPATDACPRAGALHLAQAQSNEGPRGRKRDFPDAERLVKRLVAQELTLSFVPCVTQRLWRTVARRKYQSTCNRVQLQNRLECLLEEMHLKLSSLVADLIGPSARRMLRAVASGETDPAAVASLGSRRLHATPDQLRDALGACTDLHPVYRRLLTLTLDELEVIERHIHQLDEELAQLLGVHQDAVERLAAVPGLGVDSAQQIITEVGPTAATFSTAKRLASWVGACPGHDESAGVNHSHRAPNGNRQMRRLLNQAANAAVKAKGSIFELVYRRLVGRLGHAQAIGAIAHRLCRLVWKILHDGVTYEERGPAVTKHRAQRRAAKMIRELRSLGYRVEPAPPPASALA

SEQ ID NO: 479882 - protein, 400 aa, unidentified
MHQTYTLGMDVAKRKVTYELLDAQRRTCATGTASLDQEGWQQLLKMLASRGHPAGILVVIEATGVLHLPWADALARGGYPVVVLNPLMSKRLYSTANAIRDNKTDRVDAHSLAEIGLERGDQLQRFQYQPQPMRFGLQRLETVRTAVRHALTNVKKTYASLLEVVFPELSALVSVQRQDVRALLAKAPTPAALSRLHQSTLHACFGAKTAAVLAAARASLTPTALAHATTPALQAVLETIEQLESRLRQIDAQMQALLAAAVNPRHIALARSLPGVGAKTAASILAHLPPDLLAGRSRKKVAARLQALMGNDPRVQESGQWTGTTRMSKRGNRALRIAFFQAAFCAIVHDEHLRAFYQRKRAEGKHHKVAISHVMRILARRLVAVLMSEKPYEVCCAPVT

SEQ ID NO: 479883 - protein, 407 aa, unidentified
MHFSVGIDVSKGKSTVCVLAETGEVVRTPYEITHTKKNLETLVTQITGYGANEDVRVILEATGAYSVPVQQYLQSKGIFVCCVNPLIMKEFIKADNNFRRVKTDSSDAVHIASYGLQRWYSLKETITCSEDAGIYRQMRELGRNYHSIQKPCTELIQHLDHIIDQVMPGIKKEFGGYNSVTGKDPLTDFVKVFWHYDYITSMGPKKFNERFRKWAKEKGYHLRKDKPGKVYQLAREGIPTLECNANTKLQVTQAAEAVLGIHKALYQILTQLRDIAITRPEYSVIRAMPGVGDTLAPLLVAEVGDPRKYHSGAALVAYMGIDVPPEESGQFKAKNKKITRKGSRYLRKLGYLVIDSLKAIKPEKDTAVYDCLMKKRQQGKPYKVAVVAAMNKFYRIYYARAMEAYSS

SEQ ID NO: 479884 - protein, 410 aa, unidentified
MEVLYAHCAGLDVHKDSVVACARHTIDGKVSREVRTFKTTTAELMALSAWLSEQGCTHIVMEATGVYWKPVWHILSDGEFALVLANAAHVKNVPGRKTDVNDAAWLADLMAHGLIRGSFVPDEPTQEMRNVLRMRKQFVRERTSHVQRLQKTLEDANIKLDSVIADITGLSGRRIIEALIGGETDPQALAALAHRRIKATSAELEAALRGRVTKHHRFALRLLLQHIDAIDAAITEIDREVDANIEPFRTAITILSTIPGVSQLSAEVIAAEIGVDMGRFPTEGHLISWAGLCPKNDESAGKRRSTRMRKGAPWLKTTLIQCAWAATRTKGTYLQAQFHRLRARRGAKKAIGAVAASILTAAYHMLSSGALYQDLGAGHFDGRAKTAQTNRLIARLRRLGYAVQITPVAA

SEQ ID NO: 479885 - protein, 343 aa, unidentified
MYYIGLDVHKKSISYCVKDAAGQVHREGKTGSTRRELDTWIKTLPEPRMIAMEATIFTGWIYDHLLPHAEKVKVAHPLMLRAIAAAKKKNDRIDARKIADLLRCDLLPECHMASTEIRDRRRTLRYRNLVLRQVVQMKNRVSGLLMESGVSYDKQRLHKMGYCTELFSTNEEISDSIRPLLQIGREPILRGQRLDRALISSLERDPLLSERLRRLRTIPGVGPITALTWALEIGDYTRFRSVKEAISYCGLCSAEKSSADKVMRTPISKQRNKHIQHVLVEAAKMAPRYSHELALVRDKEMQRGNKNRATLAVARKLVAYLLAVDRRKQDFVPAEALAGEEVA

SEQ ID NO: 479886 - protein, 403 aa, unidentified
MVFVGIDWAEAHHDICVVDEEGKVLAKRRVPEGLEGVGKLHALVAEHAEDPTRVVVGIETDRGLLVGSLVAAGYQVFAINPFASSRYRDRHATAGAKSDSGDARVLADLVRTDRHKHRPMAGDSNLAEAVQVLARAHQGLVWTRQRQANQLRNALREFYPGALAAFDDLDAPDAVAILERAPTPSRGRALSQAKIISALRQGGRERNLEAKAAQIQAQLRLPQLEAPTLLAEAYGHSVAATVAVVKQLNLQIAALEQELAASFEMHPDAEIYLSLPGLGLVLGARAMAEFGDDRTRFLNPKARKNYAGTAPITKASGTRKVVLARVARNRRLADACYQWAFSALTRSEGARHRYDVLRGRGQTHHQALRALANRLVGILHGCLTNRQAYSEHLAWSGSVEVAA

SEQ ID NO: 479887 - protein, 446 aa, unidentified
MRDTDDSGGMEEIEQAEELVARVAAIDIAKASGMVCVRMPHEDKPGKRVQRVFNTVATSGAILDLADHLICQGVTRVVMEATSTYWKPYFFLLESRGLECWLVNARDVKNVPGRPKTDRLDAVWLAKLTERGMLRPSFVPPKPVRELRDLTRARAVMTHERTRHKQRTEKLLEDAQIKLSTVISDIFGVSGRAMLEALIAGERSPKALADLAHGTIKASHATLAEALTGRFEEHHGFMCRMLLDTVDYLTVQIDKLTARITVRLAELSTAEDGEGPGQGTLMPITDTERLDEIPGVGPHTAQVILAEIGPDMSVFPTAGHLVSWAKLSPRTLQSGGKNTSGPTGKGNPWLRGALGEAAISAARTDTFLGARYRRIVKRRGHMKALVAVARSILVSVWHLMNDPTARYRDLGADFHTRNLDPNRKSRDLVRQLKALGHDVTLTPATA

SEQ ID NO: 479888 - protein, 320 aa, unidentified
MQTGLVITTFIGVDVSKATLVTCVHDSSTRCTLANQRGAIAAWLKSLPAGSAIGVEATSTYHELLADLAHSHGLLVYVLNPKDVHRYAKGVGIRAKTDRVDAALIARYIAHEHANLHLYRPASLEQRQLQRLLTRRAKLSRARISVQQSLQGLPGLKVPLRKLLERFDALITVIDARIQALVNACPQRQDACQRLRSIKGVGPVVGPALLNTLERFAFKHADSFVAYTGLDPRPDDSGQRTGRRRLSKHGPSELRRLLYTAAMAAVTSPAWKSLYQHYLDKQLSRTQALVIIARKIARTAWSVYTHNTTFDPQRLTSGLT

SEQ ID NO: 479889 - protein, 405 aa, unidentified
MKEADTMSIRQQLERAGGIDIHKEKATLCTYIAKEVEQVKDYGTYTCDLEQIRDDLLRDQIKEVIIESTGIYWIALCSVLTLAGIHVTVVNPKFIKNMPKEKTDKKDARWLCKLLVNGLVRNSFVASEEQRAFRDLCRMRTRYRNHIGQATNRIVKNLERRNIKLKSVVSNMHTVSAMAIVKAIAEGETDIEKMVSLCKTKLKKKKEQMRKALQGVITLHDRMVLKQLLGDIAHYENQQAAIDSEIKKHTEQVNQKLIADLQKVPGIGPQSTEIILAEIGSNVATFSNEDKLAAWVGLAPGNKESAGKAYYTGSRDGNVYLRTGMLQVAWSAVRTKNTYWRALYYHLTRRMHSSKAIVAIARKLIRIIYKIIKGTKTYTEYGADYFIQQLQQRLQKRKQTQTPTA

SEQ ID NO: 479890 - protein, 332 aa, unidentified
MIKMNLQDRVANGDRPNCGIDMSKQHADACWGSNELRISNDPEGRKELIARLLVDQVDLVVIEATGGYERELVCEMQQAGLTVARLNPRQARDFAKSLGYLAKTDRIDARALRDFADFLSRHRDRHKYITAPTDAARDELAALMTRRRQLVDMRVQELNRLDLAGKRARRSIQSVIRMLDKQIEGIDQDVQRHIDDHFDGQRNLLDSFKGVGPVMILTLLAALQELGKLNRRAIAKLVGVAPLADDSGPRKGKRRIFGGRSEVRSVTYMATIAAIRHNPVLRAHYHRLVAAGKPKKVAIVACMRKMLTILNAMMRDGTVWDMTKHATPAPTA

SEQ ID NO: 479891 - protein, 332 aa, unidentified
MQPEYFIGIDISKVTLDICVVTPKGDQIAAYKTANTESSIADILGVLATNHKATAQNICFCAEDMGLFGSFLSRVLAAGKYRICFESPLRIKKSIGIQRGKNDAVDGLRIARYACTNFNSLRFRTVPRQCIANLKELSTVRKRLLKTRKILSQSKKIEDYYLQGETEFTGSSLYSNTLLAIKNDLQAIEKRISGLVESDVKLARLVKIITSVPRIGTVTAVQIVIATNEFEWISCPKKFASYCGVAPFQLKSGTSLNARARVSSLANRDLKSLIHMAAIGFAKKGRTDFLAKYYMRKIAEGKRPMTVVNAIRNKLIHRIFSCIMADTLFVDI

SEQ ID NO: 479892 - protein, 456 aa, unidentified
MNQYFLGIDASKGYSDFVMLDAKKQTIIENFQIDDTFDGHARLYEVLHSFNKENAEATIYAAVESTGGYENNWFQSLLTFQASLPIKTAHLNPLGVSHNSKADLKRNNTDKISARNVAEYMIAHPEKVSYQHQDSLASLRKQWGFITMLTKQSTQLLNQLESLVYNANPEILTYCKDGSPQWVLKLLTSYPTALRLSRAKVKVLARIPYISVDRAKQLIATAKKSVASANDKVTEQLIVATVKQIVHLKKTIKTQSEILAKECQIPEVALLKTFNGIGDYSAIGLMLQIQSVSRFLTSKKISSFFGIHPEYKKSGDGIYKYRMSKKGRKEGRQILFIVAMSAIQTNPLIRDVYQQAVERGMEKMSAMGLCMHKILRIVYGMLKHNKAFDPQIDLKNRQKTSSRKNNVVQDEDRRYQDFDSNAPISRRQKMKRKERKQSQNVSNVEYGISEASVPVS

SEQ ID NO: 479893 - protein, 357 aa, unidentified
MPAHTKSAKSNAQIAVIGIDIGKNVFHLIGLDQRGAIVLKRKLSRGQLENFLANLAPCLIGMEACVGAHHLSRRLIALGHDARLMPAKYVKPFLKGHKNDYRDAEAIAEAVQRPTMRFVATKTVEQLDLQALHRVRARLVSERTAAVNEIRAFLLDRGIAVAQGIQRLRKALPEILAQHTDLLLPRIIRVIEALIADWRRLDARIEKIAREIGELAEKDAPCKRLMTIPGIGPLISSATVATIGGGDMFSKGRDFGAWLGMVPKQLSTGGRTILGRISKRGNSYLRMLFVQAARVVLIKRTCWERYGLKPWIEAAARRMHSNKLAIALANKLARIAWAVLRHGRDFEVRHADAPQHA

SEQ ID NO: 479894 - protein, 317 aa, unidentified
MVKTSTVVAGIDTAKDKLDVAICGQDLRWQVANSMRGWKQLRAELAKAGVERVGIEATGGYERGVLRHLQAAGFVVLVLQPIQVRAFARLHRQRAKNDTLDAALIAACAAAVERHETAPDQRLTTLADSLTFVEQIEEDIARFKTRLEHIGEPRLKRMVLTDIARLKARRLAQLRLIAKQLRAHHDLAVRLDLVMSVPGIGERTALALIIRMPELGRISREQVSALAGLAPFDDDSGKHRGQRHIAGGRGRLRRSLYAAALPAAFRWNKALISLYTRLTAAGKAHTVALVACSRKLLIYANTVVARGTPWLEKTVTT

SEQ ID NO: 479895 - protein, 347 aa, unidentified
MRFYTQQHAFYCGVDLHAKTMHVCVVNQAGETLVHRNLPTRPDLFLNAIGLYRQQLVVGVECMFAWYWLADLCARENIPFVLGHALYMKAIHGGKTKNDKIDSQKIALLLRGGMMPMAYAYPNAMRATRDLLRRRMLLMHVRSEALAHNTNTVTQYNLPQLTKKLSFAANRQGVAEQFPDESVRRAVQVDLSLIVHIDEQLQAVELYLVRHAKVDNPLTYQLLQTVPGIGKILALVLLYEIHDIGRFADVGKFASYCRLVRCAHESAGKKTLAKGKKIGNANLKWAFSEAACLMLRELPQAQSLVARKEKKFGKAKALSILAAKIGRGVYWMLKRKEAFDVNRFFNH

SEQ ID NO: 479896 - protein, 395 aa, unidentified
MEAPMTVAKDPGRCVTRFEPKRTLIAVIEMSQSSWLVAAIVPGLKRQPLKRLEVDEAGLLQQLERWREEATRAGHTVKRIAVAFEAGRDGFWLARWLRARGVEAHVIHPTSVAVCREHRRAKTDRLDTELLKRAFLGWLRGERGHCSMAVVPTLEEEDARRPTRERESLVAERTRVVNRMRACLARLGIRSFRPTLRRAPERLEELRTPEGDALPPNTRAELQRDMARLRLITDQIRELEIARAARIDHAPAQGANVMVLLLARVVGVGLETADMLVHEILSRGLRDRRAVARYAGLTGSPDESGARRREKGLAKAGNARVRRGMIQLAWRFLRFQEGSALAQWYRTRTAEARGGSRKTLIVALARKLLIALWRLATTGETPTGVTLRPTMVVAA

SEQ ID NO: 479897 - protein, 452 aa, unidentified
MEEQEISMEIVNPHAAGIDVGSRSHWVAVGQQEKDIREFGVFNRDLFDMADWLKEKNVRTVAMESTGTYWQNLYAVLISKGFHVILCNGKFTKNIKGKKTDVKDCQWIQKLHSLGLLSSSFLPDGKTEQLRTYCRHRANLLHSAASTSKKMQKYLRLLNLRLDIVVKDVCGLTGLAIIRAICEGENNPQKLAMLRHANCRKSEAEIAAALQSNGRKDYLFALQQELDTYDHLQKKIAECDVMINKMLNEIIDNDDNKKQHYIEPKTYKRINKNTPKDIDLNLKSFQMFEGSDLLAIEGMSYSTVLALMSEVGVEGIRRFSSAKQFASWLRLAPNNKVSGGKILSSKVPKGSNRLKIALRNAANAIGNLKDSTPLRDFFQRINFRKGRVSAISATARKLAVIIWNVVVKGISYQNPEGYLFLDQKRKLGIVKRIQKQIDKFALTHEDLQFANQ

SEQ ID NO: 479898 - protein, 337 aa, unidentified
MNAVGIDVSKGKSTVTIRRPGDVVLMPPCDIPHTQSGINDLIVYLQNLDGETKVCMEHTGRYYEPVASWLSDAGIFVSAVNPILIRDFGDGSLRTPKTDKADSKKIARYTLDRWAKLKQYGSMDKTRNQLKTMNRQSAFYMAQKTAMKNNLISLLDQTYPGANDFFNSPARSNGSQKWVDFVHTYWHVDCVRSKSLNAFTEHYQSWCRRRGYNFSADKAEKIHHLSSDLIAVFPKDDITKMLIRQAVALLNTASETEKSLRLKMNELASTLPEYPIVMDMDGVGPTLGPQLIAEIGDVTRFTHREALTAFAGVDPGRNDSGQHVQKSVRTSKKGSPY

SEQ ID NO: 479899 - protein, 359 aa, unidentified
MHKATVCVAIAESGRGGEVREVGVFENRPDVLRKMVARLGKHRRRLNFCYEAGPCGYGLHRLLTGLGHDCVVVAPSLIPMKAGDRVKTDRRDALMLAKLHRAGELTPIWIPDAAHEAMRDLVRARATAVRALSKARQHLQGFLLRHDRIYHGARAWTLAYRRWLTTVRFDHPAQQIVLQDYINAVEDAESRRDRLTRQIEELMPSWSMAPVAAALQAMRGVALVVAVTVVAEVGDFRRFTNARQLMAYLGLVPSEHSSGSTVRRAGITKAGNALARRVLIEGAWTYRMSARVSRKLHDRLEPLSAAIRDIAWKAQVRLCARYRRLAAIGKPKVVVTTAIAREMVGFIWAIARVAQPELI

SEQ ID NO: 479900 - protein, 393 aa, unidentified
MYLVGIDIGKLKHSFCLLEKETGEILVEPVFFKNNRDGFNALLSSFKHLPQKDILIGMEDTGHYNLALLKFLLDRNYQVALINPVATNLTRKMQGGISKNDKLDTLTICDVLSSNQRVKSYRISKYSSFDLYEQKQLTREHHNLKEEENQLSNRLQKCIDVVFPEFNSLFKSKYGIVYMNILKEFGSADAIAHADIRTLRKCFDTGRGKHISLTAEELKEAARNSIGFPSSSEATQIKHLVARIELIKEQIAEIDKKIEEFSIQNNSPILSIPGISHFSGTSILAELGDIHNYSKPSQIIKFAGVAPLTYESSQFTAQHTAITKKGCKYLRKTLYQIITPVIQYNPVFRKFYLLKIAQGKGHRCAQGHCVRKLMRVIYHLLSTGTQFDPALLR

SEQ ID NO: 479901 - protein, 356 aa, unidentified
MQVFKQSVGVDISKSDFVAYFEVRLSNQRIKKIGQRKFDNTACGAKKFVQWLVKRSIKDVLLEVVMEATGRYHEVLAYHLYDCHYRVCIVLPNRVKYFARSLNQFSKTDPIDAAVIARYGLCQSLEAWEPPSEGMRRLRELSRERQDFVKMKTQALNRLHAMRSSAKLANSTIGRLEMQLTFFEQQIAVIEAEMDQLSNQDQHLAYQVKQLTSIPNIGITSAYTILAETAGFQLFSNRNQLIKYAGLDVVKNQSGSSIEGMSRISKRGNAHLRAALYMPAVSALTKPSVFRDTYQRHLDCHKNKSKALMAVQRKLLLVAFGVHQSQQMYTEEKHRARALKQVGEHKGSPTVAHLVN

SEQ ID NO: 479902 - protein, 387 aa, unidentified
MSKKIVAPAYVAAMERAEADPALARFWVGLDIGFKSTAVCVVDVDGAVVHQVSMKSHATEIGRYLRRNFKSHVTLIGMETGGLSPHLAGKLREQGFQVAVLDALQVHRVLSVKRNKTDTNDARGIAEITRSGRDYLTEVYVKSNLCFEVRASLIMRDRLVKQRRETEAMIRGLVRVYGGRIEPGSDSPATFRERAIDQLCLIADAESVDLRPRIIPLLDLCERFYIEAGRIERELDLLAASNPVCKRFMEIPGIGTITALSFYSAIEDPTRFRHVDDVAAYLGLTPRVYQSGESLTHGGISKMGNQLTRTHLVGAATVMLANTKSFSTLKDWGMKLSKRVGFNKAKVALARKLAIVMFSLWRDGTHFMAKAADVGPHRDLMQARATA

SEQ ID NO: 479903 - protein, 405 aa, unidentified
MIEPEQVNVWLGMDVGKAEHFHTTLDDDGEQLAAAAVGNDEAAIRAVIRAGKELGRPGVVIDQPGSIAALVLAVAREEGVPVAYIPGLVMRRAAQLYPGAAKTDPRDSFVLADTARTHRRRVHWLADSDDLLAQLRVLVGFDNDLAVDVNRTANRLRDALTSVAPALERVLGDRLDHPAARAVLARWPTPTAMRAAGPALRRLCRKHAPRAGDRLTDDITAALAAQTVTVPAEATLGRVIAELADELERLYSRRARLAGEIEEVFLAHPFAQLLISMPGIGTKTGATILTEIGDGSAFPTAAHLAAYAGISPVTRQSGTSVRGETRARHGNHRLKNALFLAAFCSLRSPDSKAYYARKRAEGKRHNAAIMCLARRRCDVLHAILRTGLPYNPNHPGKPRVTPTTP

SEQ ID NO: 479904 - protein, 337 aa, unidentified
MQITTIGVDLAKHVFQLHGIGPDGRVVLRQKLRRSQMMMFFAKLPPCLIGMEACATAHHWGRELTALGHDVRLMPAHYVKAYIKRGKNDVADAEAICEAVTRPTMRFVAIKTREQQAVLVVHRTRELLVRQRTQAVNALRGLLAEFGICEPQGIWHVGRLRAHLEGETIPEPGRRTLMLLVDQLDGLERLLVQVEAEIRAWHRANSVSQRLAKIPGVGPLIASAIVATVADASAFRSGREFAAWLGLVPRQRSTGGKQRLGRITHQGDAYIRRLLIVGAQSALQRSKEIKQNAWVQGLLGRCARLKVAVALANKTARIAWALMARGGVYHQAVLPAA

SEQ ID NO: 479905 - protein, 347 aa, unidentified
MAIVEVTRPIVGGVDTHLDVHVAAAIDPIGGLLGVESFPTTPAGYHALASWLGAFGPIDRVGVEGTGTYGAGLARHLAASGITVIEVDRANRQERRRNGKSDELDAIEAARAALSRRAKGHAKGGTGNVEALRALLVAKRSARSIRIRSTGQLRHLVITAPDDLRVRLTGLTSKALVAQASVLRARPGSDPVRHATKTAIITLARRVQAINAEIAVLDRHIDTLVRATAPGLAAVYGVGADTAAILLVAAGDNATRIHSEAAWAHLCGVAPIPAGSGKTNGRHRLNPGGNRQANHALWRIVLTRLGQGEPRTVAYMQRRLAAGRTKPEIIRALKRYVAREIYQQLPG

SEQ ID NO: 479906 - protein, 421 aa, unidentified
MPNIEIGVDSMVKENFIYVGIDLHKETHTAVMIDCYNQKLGEITFPNRPAAFPKLVTKVKKCNTDGKEVVYGLENAYGYGRALAVWLIDKGYLVKDVNTAISHRQAKHRGAMYRKSDSDDAKAIALATLNMLDKLPDACPNDAYWSLGQLVHRRDNIMKQRTRLVNQLHEQLCIAYPSYKSFFNDISRPTALYFWEHYPSRKYLRGKSVEDLRKELVPVSHNKCSTKTCEKILDAVASDKVKNNAYQDARDMVTLSIVSDLQHYDSQLAEVDKMLEQMYKMLGCTLTTIPGVNVITAVKILAEIGDIKRFSNANKLAQFAGIAPLHLSSSGKGKDVATKQGNRRLQVTIYFLAIQMVQLSSKGTPRNPVVRAYYEKRKAEGKTSQQALICISRRLISIIYGMLKNGTEYRMPVVENAGENV

SEQ ID NO: 479907 - protein, 320 aa, unidentified
MSALSVTVGIDVAKAHVDVCVLGTHSDVQRFANDVDGHCALAAALQSMDVGLVVMEATGGYEAALACALQAVGLHVAVVNPRHARDFARSMGRLAKTDAVDARMLAELAAVLMRRDDLARFLRPVADERQQWLAALVTRRRQLLTMLNSERQRLQITPRKLHPSIEAIVAAIKAQLDDLERQMVGHVREHFGELDGLLQSTNGIGPVASATLIAQLPELGRLNRREIAALAGVAPVANDSGNRKGRRRVQGGRFEIRRVLYMATLTAARYNPVIRAFYERLKAAGKLPKVALVACMRKLLTMLNAMVRTGKPWDASLHSA

SEQ ID NO: 479908 - protein, 411 aa, unidentified
MNNTLFVGIDISKRSNVATFMNCEGKVVGRLTFSNNGSGADRLVAKILSYYEKEDFEAIRIGLENTSVYSKNLVWFLYEHEALNEHKLSIMPLNAIMVANYKKSFLDMDKDDITDSFAIADFIRIRPGLLPFKLDDRQEALKIMTRSRYNYVQALSRMKSQFLTRLFLSFSEMEAGKPFYSIFSKTSLSLLEEEFTLDELAEKPIPELVEFLQEKGGGKFQNPEEIAKVLKKAASSSYRVPAMVRESLNRTMASDMEIMRILENEIHNCDKNIEKLMKSVPVILVSIPGIGPVLAAGIMSEIGDISRFQKQESLGKMAGFKWKRNQSGKKESEDKAAVLSGNKKLRYYLVEAANRVRIHDPVFEAYYRKKYAESKTHAHKRALILTARKLVRVIFYLLKENKLYKPDVGIS

SEQ ID NO: 479909 - protein, 426 aa, unidentified
MKVITALPDSATGTFDVACDVGSTRLNLLCTALSRPGAPAEWDIANRTSSILETLAHIFGLATERGARQLRIIVEPTGVYHRLLLELSAQMGFETCLVDASHVVKMRAILFGDRGKTDRRDPHAIEAVAGQRAAMIDRRLGEPWRLLRQWNKLYSDAESQMIDAKSRIHRMLHLLFPDFAFGTDFLYGPSGRAIFRCFGLNPHRIAMQSPARLRERLLKTSRIQRASVDRLLAYARASVANVKPARVVELLEHEMALAWEDLELQEARRLKARTQLETLYDEIQVEDPRLPSAQHGVISKTALARLFAEVGPFGDYQSWRQVLRMGGLNLCERKSGKYVGLTKISRAGRSSIRVILNQIALPLVKRDRLFGPYYHQKIGVQKMSGKKAMTAVARKIVKMIWGWYHSAAAFDPARVFRCESDYRRAA

SEQ ID NO: 479910 - protein, 377 aa, unidentified
MKRIIRIGMDVHSTNYTLCAMEPILGEDDRIFATVDVTPDYKNILMFIENLKMKLGADNQYDIQCGYEAGCLGYSLYNQLTAANVKCVILAPTTMLTPQGVRVKTDARDARMIAQCLSYGGYHAVYVPTEDDDSVKEYIRMRDDHKTALKKIKQQISAFCLRHGHHYAQSKWTVAHWKWLKQLELPALYREVLNEYMTSYEEQNAKIERFDQRIEELASQEKYAEKVKKLGCFLGIQTHTALSLIVETGDFARFVKGNIYAAYLGLAPGEDSSGPKANRTGLSKAGNSHLRQMLIESAGGICKGTIGHKSKALKARQNGNTVEVIAYADKANTRLRSRYYKFIRHGKVRNVAVAAIARELACFVWGMMTDNIEMKAV

SEQ ID NO: 479911 - protein, 343 aa, unidentified
MQITTIGLDLAKHWFQVHGVDANGHVVVRRRLRRSGVIAYFRSLEPCLVGMEACATAHYWARELSALGHTVKLMPPAYVKAYVKRNKNDATDAEAICEAVARPSMRFVPVKGAEQQSVLMLHRARSLLVRQRTMLVNALRAHMAEFGIIAPQGRRHVEILRQTIAHQQERLPELARSILQTIADQLNDTMERVREIEVRLVRLHRQNPISQLLATVPGVGIMSASAIAATTSNPTLFRSGREFAAWLGMTPRQNSSGGKDRLGRTSKRGDKYIRSLLIAGAVAVLRHARNRPTRDGEWVRALLARKPAKVAAVGLANKTARIVWTVMMRADGYRAREILGQPA

SEQ ID NO: 479912 - protein, 394 aa, unidentified
MKLIGIDIGKNKHFFCVMDQQTGEIISQPVSFSNDKEGFDFLIQKINSYPKDSVLIGMEDTGHYHFALLKYLLNLQYTVALINPKTTDFNRKMQGGITKNDKLDTINICDVLDTPERKKQYRISKVNSFDLYEQKQLTRHHHNLKEEENVYKNRLQKCIDIVFPEFNKLFNSKYSTVYMNILKTFGSAENIANTDIRTIRKCFEIEGRGNRISLTPERLKECARSSIGISSSAEVIQIKHLTAQIELIEEQLTEIDKKIEEFSIQNNSPILSIPGISHFSGTSILAELGDISNYSKPSQIIKFAGVAPLHYESSQFNAQHTSITKKGSKYLRKTLYQIILPVIKHNPVFNKYYQLKISQGKGHRCAQGHCVRKLLRIIYHLLKTNQQFDHQLLR

SEQ ID NO: 479913 - protein, 414 aa, unidentified
MKESITFEQVVERGCGIDIHKKVLVATIKGMGIKEETRTFSGFTASIEEMRDWLKANMITHIAMESTGVYWKPVFNILEEDFEIILVNARHIKNVPGRKTDKKDSKWIAKLLLSGLLQGSFIPPKPIRELRDLTRYRRKIVGQISSEKNRLQKILEDANIKLSSVVSDMSGATATKIIAAMINGEEDIEKLSRLRHGKMLTSKEDLKAALKGKLTEHHKFMLTTIKESIEEKEQLINKLDKRIEEHLKTNELALDVELLQTIPGVGKDAAPGILAEIGNNMDQFPNEQHLASWAGMSPGNNESAGKKKSSRITHGDKYLKTLLVQCAWAATRTKNTYLRSKYDSLVLRRGKKRALIAVGHKILIASYFILRDKVTYKELGSEFLQDRNKEKRINRHLKLLKELGVEIEVIEKVA

SEQ ID NO: 479914 - protein, 343 aa, unidentified
MKIFALGIDLGKTVFHLVGLDERGQVVVRKRCSRTQLLAFTANVQVQLIGMEACSGAHFLGRALRAQGHEVRLMPAQYVKPYVQTNKSDYIDAEAIAEAVQRPRMRFVPIKTEEQLDLQALHRVRERWVMRRTAVVNQVRSLLLERGLTVPKGRRYLEQALPRILEDAELKLSGSFRVLLAQLRLELEQLAGRIEKMDRVIEQEAREHEACQRLTTIPGVGPVTATALIGAIGNGSAFRKGRDLSTWMGIVPGEYTTGGKQKLLGISKRGNKYLRRLFVQGARSVLQQRDKQAPGLSQWLAQLLASKHQNVVVVALANKLVRIAWAVLSKNEAYRSPVLAEST

SEQ ID NO: 479915 - protein, 349 aa, unidentified
MQHYAGIDVSLELLSVCIVDAKGKIVKEAKVGSDPDTLVAFLRGLDLAIERIGLEAGPLSQWLHAGLTIAGFEAVLLETRHVKAALSAMTVKTDRKDARGIAQLIRMGWFRAVHCKSAGSQEVRALLVARKLLLSKLLDVEFSIRGILRGFGLKMGMVTRKRFEARVRELYAGHAMLEQICSAMLTARSALQTEYAKLHKALLVIVRKDEVCRRLMTTPGVGPLVAITFKTGVDDPSRIHKSKAVGALFGLTPKKYQSGETDVTGGITRAGDEMVRTALYEAASVLLSRVTRFSALKRWGMDVAKRRGTKRAKVALARKIGVILHRMWVDMTSFRWTKGAPTTMRLARV

SEQ ID NO: 479916 - protein, 344 aa, unidentified
MSEYVGLDVSLEGTSVCILDDSGRVMLERTVVTDPESIARLIRAKARRVNRVGLETGQLSVWLCHELRRLDVPVVCMDARQAHAALSVRPVKTDQNDARGLAEMVRMGWYREVKVKTLSAHEQRGLLMARQRLIVVRRQIEGQVRGLLKTFGLVVGTGVGGSFVRRVKQLADRRPSLSGAIHSLLHVLAAAAREIVILDKQIAAIARANIPANRLMTVPGVGPLTALAYVSTIDDPTRFRRSADVGAYLGLTPRRYQSGEIDRQGRISKQGDRFLRTLLYEAANVLMTRVKRWSPLKAWGHRLSKRIGPKKAKIAVARKLAIILHCIWTDGTEFWWTRAEATMT

SEQ ID NO: 479917 - protein, 397 aa, unidentified
MYIVGIDIAKRKHEAAVIDGEGTVIIKPFSFTNNCSGYNRLLAMLTKAKLPLDEVSFAMEATGHYWLALFTRLQKEGFRVQVINPVQTNSIRSFYIRQAKTDPRDALLIAEVIRFGHFSESTLHPENIYELRELCRGRHAIVSMQADVKRKVVALLDQVFPEYETAFTNLFGDTSMAILQTCPTPKELSEMPLEELCHLIEVSSHKRFRMAKAQELQALARNSFGFAMAGDVFSTMIRLYAKHLVFLKQQVQEMDRKIAEIMDTLDTLITTITGIGPTLGAYILSEIGDISRFSSAAKLAAYAGIDPTMRQSGEYNGVRNRMSKRGSPYLRHAIWLAASSAVLHDPALKLYFQKKRDEGKPYMASVGHACRKMVSIIYAVMRDNKAYTPYIPNEISA

SEQ ID NO: 479918 - protein, 357 aa, unidentified
MDNCITTSTSVTIGIDLGDRYAFFCELAEDGEILEEGRIATTRTAFKKRFERIPQTWIVMEVGSQSPWISKLLSSFGHEVIVANPRKLRLIYRNDSKSDRIDAQYLARLGRIDPKLLSPIQHRSLDTIVDLNVIRNRDLLVRTRTKLIMHVRSVVKAIGGHVSRFQTGSFAERARPMIPSELQETLCPMLDLITALDDQIELCDQRIDLLAETKCPETELLRQVPGVGTVTALAFMLTIEDPYRFKSSRAVGSYLGLRPRQAELGDKRPQLGITKAGSPLLRKLLVQCAHVILQDRNPDSDLKRWGRAIMERGGKNARKRAAVAVARKLAVLLHRLWINGEVYEPLHNSEQVVQAVN

SEQ ID NO: 479919 - protein, 391 aa, unidentified
MINIGIDVGKFKHCATVLDDSTGEVLIKPFFLTNNRKGFDLLYSKTKQFIHRKHSVGMEDTGHYMINLTNYLLDKKFTVKYINPRATCLRRKGLGISAKNDRKDALLIAEMLSEKRFWRSISVRSIENSKFRDITRLYHQLQEQQNQDMNRLQRALDIVFPEVNSLSWTRYSKAYMKFLSTYPSASSIALEDIRILRKALKTEGRGRQCKVTAEEIRELAKNSVGEDNISIDLEVTSIIAIINTREEQIRMLEKKIEEFSHKLNSPIISIPGISHISGMTILAEIGDINQFQNTGNLISFAGMDPLVYQSGKYDAAHMPISKHGSRYMRKALYQAVFTVCKYSPTFHAYYTKKRNQGKSHRCAQGHCARKLLRVIYKLLSTNSLYNQNHIQ

SEQ ID NO: 479920 - protein, 419 aa, unidentified
MTIQQSTPPQAALVAIDIAKNRHEILIEPGPGMRRRRLSVLNSRAEHDRLVATLHALGKPVVVGFEPTGNYHRVLAHRLITEGFQTRLISSMALARTREALHNGWDKNDPKDAQVILHMLQIGASTVYNDPGCDRLNDLQELSKTHDMVSRAKTELWHRLLTHYLPLYFPEIEKFHGNSRSDWFLALLEQFPTPGSVTALSKEAFATAAWDLVGRKVSKTRLLADIYETARSSTALPVQLDSPAIAMFRMVLAEGRSLLRQRDQIEAQAEVLLANDPDAARLRQLPGIGPINALTILAEAGDLRRFGHHRQFLKFCGFDLATHQSGMFRGQTKLSKFGNARLRRSFWLAAQVAIRQRDNSFRERYGRYIARDPENKHLRRKALTAVAAKMARVAHAIVRSGADYRPFFDRPVPGGRTSL

SEQ ID NO: 479921 - protein, 443 aa, unidentified
MSRKKRTHLRGTRGQAFADQIRGIPLERILCVSLDIHKYFHVVMIHTLLGEIVTPTFEIDIFQTGFDQLGQAIDAAVAHTHAQIVLLGMEPSSHYFENLARHLLARPQPVTLINSFAVKQNRDQQMMQREKDDEIDTAAIGDLLRRGEGSPFRPAQGVYLQLQQLERVRLGKVKIRTMLQNQILGHLDRIFPGLVILGDAATERYTPLFKMDFWKCQTLQHLIRVCPDPRQLTALSPQGVVTAFHTHGYRMGRVAAAKLIAYAQKVLLPEAELIAIRTELLQHDLALLEEVERHIAELEDRLVALVADTPYHVWTKLKGLAAVQVASLAAAIGDPAHYQYAGQVFRRAGLVCGRDDSGTRQRKGKGKHVVKVGDVYLRRALMNALTTLILHQPVLRAYYTQLKKSKPNGVARVATARRALGILWATLRDQRPATLVLKRGATL

SEQ ID NO: 479922 - protein, 355 aa, unidentified
MAVTIVEEARPVTCRAAVTGGVDTHADTHVAAALDPVGGLLGVAEFPATAAGYARLLGWLGGFGTVCLVGIEGTGSYGAGLARHITAAGIRVVEVDRSDRQDRRRQGKSDPLDAVSAARAAQSGRARGAPKGRDGAVEAIRTLMVARRSAAGERTRTINQARALVLTGPDDLRTRFARHTPAALITGLASLRPRTGDVAGHATRIALRELGRRAQFLDGQLQRLDELIVPLVTAHAPGLLALYGVGPHTAALLLITAGDHPGRLRSEAAWAHLCAAAPIPASSGKVTRHRLNPGGDRQANHALWRIVFTRLGSDPATRAYAERRTAEGKSKAEIIRCLKRYVAREVYRHLRPAAG

SEQ ID NO: 479923 - protein, 470 aa, unidentified
MGAQSAKPALTESGGGQASVGSQLFVGVDVGRHQHQVAAITRVRMEDGSWERGPVRAFAVNAAGFRELLAWLEGWGLEPEQVRVGCEPTGGWYSRTVVACLETYGYQVDWLQNWAVHERRQLVLGKQTKTDALDARLIARLLYEQERLGSSRAFLHPSPPGTESLRMLVRNRFKLVNFRTRYRLQLGAVQDVLFPELKQFFRASSTGRTARLVLERFPTPADLAAATLEQLSAVVVEEARALTLRPRLPELQSLAANSAGLTGDEQMLRIQAWLLHQLGMLEDEIAATEKTIVEALAAWPDQRSLEILRSFPHMSELRAAVLLSAIGDVKAFRSDRQLRKHLGWYPEVAESGTSVHRHRLGEKGNRLARREVWLWVLSLLRSDCQIGTFRAYYQRLRKRGVGGKVAVGHTASKLISLLFFCLRHGQPYDPERHARELGLGEALKRSEVRPLSTLRPAESPLLPGHADASP

SEQ ID NO: 479924 - protein, 352 aa, unidentified
MDATTVAIDLAKDVFEVAVATRTGRIVARKRLRRRPFERFLEELAPGTEVVMEACGTAHYWGRRCQARDLPVRLLPTQYVRPYVRRNKTDRTDTEALLEAARCGGVPPVGIKSAEQQTLQGLHRVRAQWQTTRTARINLVRALLREQGLPIPLGARTLLARVASLLEDAETPLSDRLRSTVALLVEEIHALEGRLATIDAQLAEVARTDPIAIRLQQIPGVGVLTATAMVAAVPHIHAFRRGRAFASWLGLTPRESSSGRRRYLGGISKRGDVYLRCLLAHGARSVLWTSRRRIQAGRIPPTPFQQWAVTLAARRGQNKAVIGVANKLARMIWAVWHHDVDFRQPLRGADAA

SEQ ID NO: 479925 - protein, 409 aa, unidentified
MRYYLGVDWADQEHAVWGIDEAGQKVTARTVPHTADGLSEWGRELDEWRGQGIELWAAIERPEGRVVDVLLDHGVVVYPINPKALDRARDRFRQSGAKSDPFDARVLADFLRTDHPHLTALHPSSEAAQELKYLTEDCQRLIRQQTRLVNQLTATLKAYYPRALEAAELTTALAREFLQAYPTPEAVARLTERQWRQWAKAHRLSDARTAELWTVLQQPQLPVPAHVVRAKAQMMLALVAALAPVVEAVATYRRAVEDFFARMPVAHWARTLPVGEHGITVPTLWARLGDAPARWTSFRHLQAQAGTVPVTKRSGKQQVVTFRFACDKQLRYVVDQVAFLSLRSSEWARAYYDAQRARGHRHRHALRALGAKWLKIIFVMWQRQVPYDEQHHLATMARQALRHPEKKIA

SEQ ID NO: 479926 - protein, 356 aa, unidentified
MINHNRLDFTGQCIYIGLDVHKKSWSVSIFSKYGEYKTFSQPPEVDKLVHYLSHYFPGALYYAVYEAGFCGFWIHDRLREKGIQCLVVNPADIPTKNKERTTKRDRIDCRKLARSLRNGEIEGIYVPCRSKLEDRTLIRTRQSMVRKQTRCKNQIKAILFFYGVVIPEEKEMGHWSRRFIQWIEQIQMERASGDIALKAHLEELSHLRQLIANLNRAIVRLARTEEYRPPVNLLKSVPGISTLTAMILLSELGEVTRFPSLDELSCYVGLIPDTQGSGEKEHVGGITQRRHSQLRWLLIEASWVAVRKDPALLMVFQEYCKRMRKTKAIIKIARKLLNRIRYVLKNQAEYVPCVIQ

SEQ ID NO: 479927 - protein, 362 aa, unidentified
MDKYIGLDVHATSCTAGVIDARGKRLGHHVLETNGQVLVEFFKAVSGTRHVCLEEGTQAGWLVEILSPHVERIVTVRVSESRGAKSDKRDAFGLAEQLRTGAIEMGVYKQVGPFATLRQLVKAHQMIVQDSVRVQSRIKAVFRSRGVSVVGKAVYSPDKRDEYLRQLPASSRAAALLLFEQYDALRPVRAHAEKQLVTESHKHAVTKPLETCPGLGEIRVAQLVSIVVAPERFRTRAQFWSYCGLGIVMRSSSDWTQAPTGGWVRAPVQQTRGLNRNHNRLLKHVFKGAATSVIQQHPDSPLHADYDRLLAAGTKPNLAKLTLARKLAAITLALWKRKEEYDPHKTSKPSELVSSSAPATVV

SEQ ID NO: 479928 - protein, 315 aa, unidentified
MSNPTFVGIDVSKARLDVAVVPSGESFSVPNDDGGIEALVIRIRELDAALVLLEATGGLERRALARLVTAGSRAMAVNPRNVRDFARALGKLAKTERLDAVILARFAEAARPEWRPMADEQTQQLQEHLTRRRQLVEMITAEKNRLLSVEHRGIRRQIKATIEWLEKQLNINEYDLDQAIKETPVWREKADLLKSVPGVGRVTVSTMLALLPELGTLTRKQIAALVGVAPFNRDSGTLRGRRAVWGGRATVRAVLYMAALVGTRFNPAIRAMYLRLIAAGKRKKVAVVACARKLLTILTAILRTRTAWRSIEVAP

SEQ ID NO: 479929 - protein, 357 aa, unidentified
MLGMGDSAPRKGADAMTFVGCDLHTRMQQVAVLDTGTGEVSEHRLPHEGTAVEEFYAALPRPVTVGIESTGYAVWFHTLMQRLGHPLLVGDAAKIRAMVVRKTKTDRRDALHILDLLHHDRLPAIWVPDPATRDLRALLTHRMRLVRIRTMVKNGLQAIALNSRLACGSKLLRQAGVAQLQALALPPHTARRRDQSLELLAGLTTQIRELDDAITTAALGHPDAPRLITHPGVGALTALTTIVVLGPVSRFHDSKHVVSYVGLAPALHASADKYHLGRITKQGSPLLRFVLGQAAAHAARMDPDLKRTYGALVHRRGRPKAKVAVARKLLVRLFIMLRDRIDYDEFRRRGRTALAAA

SEQ ID NO: 479930 - protein, 310 aa, unidentified
MDAVFVGIDVSKDRLDVHVLPSGEAFAVARNGEGLTTLNERLAKLAVMTVAVEATGGFETVVAGSLASAALPVVVVNPAQVRAFAQALGKRAKTDPIDAAVIARFAEATRPEVRTLPDEQTQILADLIARRRQIVQMIVAERQRGKRATVKRIRRSIDRLILALEKELSELDQELDETIKGSPAWRHNEDLLQSVPGVGPIIARTMLAEMPELGKLDRRQIAALAGLAPWTRQSGKWKGKSFIGGGRASVRTVLFLGALAAARHNPVLRAFRQRLIDAGKPKIVAAIAVARKLLTILNAVLRDQKPCRVA

SEQ ID NO: 479931 - protein, 343 aa, unidentified
MQAVTTIGLDIAKSVFQVHGVDAAGKVLIRRKLKRRYVLAFFQKLPPCLVGIEACATSHHWSRELKALGHTVRLMPPAYVKPYVKRQKNDAADAEAICEAVTRTNMRFVETKTPEQQSCLMLHRTRQLFIRQQTSVINAIRAHMAEFGIVAPVGRRGVEQLLAVSTDANDKRVPEVARGCVAALGVQLRMLKAQILEFDRRIMAWHRSNETSRRLDAIPGIGPALATALVASVANPKAFRSGRHFSAWIGLVPKQHSSGGKDKLGSISKQGDRYLRSLFTTGALAVIRYAKMHGTKHRPWLTALLARRPTKVAAIALANKIARMAWAMMARGERYREPVALAA

SEQ ID NO: 479932 - protein, 314 aa, unidentified
MKGAVHMQITTIGLDIAKNVFQVHGIDGAEKVIVRKQLRRGQVMAFFEALAPCVVGMEACATSHYWARELTKLGHEVRLMPAKDVKAYVKRNKNDAADAEAICEAVRRPTMRFVRIKSAEQQGQLMLHRARDLLMRQRTQVINALRAHLAEFGITAAQGREGIKELLAIVAQEEGSRLPSDAHASLTVLAAQLQAVQTMIGSLEKRIVAQHRSNEASKRLETIPGIGVIGATTIAAVVPDPRVFRSGRDFAAWIGIVPRQDSTGGKQKLGPISKQGDQYLRRILIVGAHAVLRRARQQPEKYPWLTQLLARRPF

SEQ ID NO: 479933 - protein, 340 aa, unidentified
MEKRYIGIDLHRNRFTCCIRLESDRTYITEWALEDLPRFVRKLRLSDEIAVEITSNTRLFHDAVAPHVARVAVVDTNQFRVISQSVKKTDPNDARLLSLYLSKGLLPEVRMKSKELAHLASLTQTRDILVKQRSALKNKVNNILSARGLNLAREALSSEKKLREVLELPFDEVVRIELRVIVDQIRSLSASIAELDKTIGEEGSKLEGNKGLVSIKGIGKVTSAILLSVIGDVNDFADEGHLASYFGIVPRVSNSNETERSGRIHKRGSKLGRTALVQSALVAANYSPYLKRFYEQVKARRGAGKAIIALARKFLGILYRTLKNKWVFEDFPNFVLAEGQ

SEQ ID NO: 479934 - protein, 392 aa, unidentified
MYIVGIDIGKNHHEASIVSPEGKQIGHSLRFATTHKGADSLMSFIFNNIGNSSCIFGMEATGHYWYPIYSFLKARGYTIYVINPIQSDSLRKMYIRQTKNDSIDSFLIAEVIRFGQFTTTSMADENILAMRQLCRYRDSVISSRTEIKLRISTIMEQIFPEYEKQFSSLWLSTSMGILEKYLTPENIENAPIDELFEIIKDKSHNKLTMKKAISIREAAADTFGIRIAQDAFSFQLKQLIDRMNFLDKQIEALDCQILEYYEKFDCYLHTIPGIGMIAAATILAEIGDINRFKSSSALVAFAGIDPTVRQSGEFSSTHNHMSKRGSPYLRHAIFLAATTCSFHISPLNAYYKKKRDQGKHHLTATGAVARKLTTVIYAVLRDSKPYEPKSFC

SEQ ID NO: 479935 - protein, 344 aa, unidentified
MKITRVGLDIAKQVFQVHGVDERGKTRVGKQLARAKVLEFFAQLPPCLIGIEACSSAHYWGREFTKLGHTVKLMAAQFVIPYRQRGKNDANDAEAICEAVGRPNMRFVAIKSEEQQSVLMVHRARTLVVANRTAQANQIRGLLGEFGLVVPKGVARLRRELPGILEDAENGLPALARQVLAGLLEQFHELHARVAAYDRQIRALAEASEPARRLMKVEAIGPQTATALVASMGDPHVYKSGRGYAASLGITPRQHSSGGKERLGQITRQGDRYLRTLLVHGARAYLRVVDKKTDAKSAWARRLKERRHVNVAAVALAAKHARIAWAILAHGTEYRPAGLEVVAA

SEQ ID NO: 479936 - protein, 338 aa, unidentified
MGLYCGIDLHSTNSYVTVMDESDRVVAERRLANDLEVIVGFLAPYRDAMEGVAVESTYNWYWLVDGLMAAGYRVHLANPAAMQQYSGLKCAGDRSDARWLAHMMRLKVLPEGYIYPVAERGLRDLLRKRHRLVQQRTRLYLSMATAVERTSGRRLGGNAIDRLGEADIGAFGLPADVALAARAELRVLGCLRGEIAGLEKAIVARLRPTPVYRLLLEVPGIGKILGMTIALETGDIGRFAAVGNYASYCRCVEAKRVSNGKRKGSGNAKNGNRWLAWAYVEAAHFAVRNDDRARRYHQRKKAKTNAMVAGKAVANKLARACYHVMKDGTAFDSERCFG

SEQ ID NO: 479937 - protein, 405 aa, unidentified
MNAVGIDVSKGKSTVTIRRPGDVVLMPPCDIPHTQSAINALIEQIKSLDGETKACMEHTGRYYEPVANWLSDAGIFVSAVNPILIRDFGDDSLRTPKTDKADSKKIARYALDRWTKLKQYGSMDKTRNQLKTMNRQFGFYMDQKTAMKNNLISLLDQTYPGANDFFDSPARSDGSQKWVDFVYTYWHVDCVRSKSLQAFTEHYKKWCKRNGYNFSASKAENIYQSSSDLIAVFPKDDSTKTLIRQAVTMLNTASQTVEALRIKMDQTAATLPEYPVVMAMNGVGPSLGPQLMAEIGDVTRFTHRGALTAFAGVDPGKNDSGKYNQKSVPTSKKGSPSLRKTLFQIMDGLIKRSPVDDPVYAFMDKKRSEGKPYYVYMTAGANKFLRIYYGRVREYLASLEESKES

SEQ ID NO: 479938 - protein, 426 aa, unidentified
MAKVEHTSDARVLVGIDICKHRHEVLIAVPGKTRRRRMTITNSTDDFMRLIAILRDYGLPVRIGFEATGNYHRVLMYHLGVAGFDLKLVSSVALALTREALHNSWDKNDPKDAQVILHMLQIGAVQIFQDPMVAGTNDIQELSKTHDAVSRSKTELWHRILTHYLPLYFLEADRFHRSSRTDWFLAFLEMFPSPHMISAMTKEEFIQAAWEVVGRKVEKSLLLSDIYETAKVSAGLPVAPDSDAVRMFRMMLAEGRSLILQRNAIEDRAVELLGERPDYQLLRTIPGIGPINALTILAETGDLRRFHHHRQFLKFCGMDLATVQSGMFRGRSKISKYGNARLRRTLWLAGQTAVLKKANSFRDKFERYIAQDRHNPDLRRKAYTAIAAKMARTIHAVIKSGEPYRPFFEGTSPGGRISLSQGRGGA

SEQ ID NO: 479939 - protein, 368 aa, unidentified
MDEAITAFAGLDVHGESTAIGFAEAGRSAARFVGTVGPKFAELSKALAKLGDCSKLLVVYEAGPCGYALARELKRAGYRCEVVAPSKVPRRPGDRVKTDRRDALTLAGLARAAELTFVSIPDERDEAIRDLSRTRIDAVRARLKARQQLKALLLRHARRYTGKTSWNAAHERYLAKVTFDHRAQDVAFVEYRQAVSEAHARVERLSEALTQELEHWRMCALVRALMTLRGVDQLVATTLVAELGELKRFAHPRELMGYLGLVPSEYSSGDKRRLGAITKTGNSQVRRVLIEAAWNYRFPPRITVPLEKRQEQQPAAVRAIAWRAQLRLNHRYRHLTARGVQHNKVCVAIARELAGFVWSIGQQISVPT

SEQ ID NO: 479940 - protein, 419 aa, unidentified
MNRIETKKLRIVNAKTLIVAVDISKTTDVGYCRCPSGKDIKPFEFRNNVDGFKTLWDRICWMKMSHHLEEVVVGFESTGAYGEPLVHYLRQKPVKLVQVNPMHTKRIKELQGNSPGKTDRKDPRVIADIIALGHALSVVVPEGAAAELRRLTLARERSLGRRTALYNQLQDLVSLLFPEFLQVIKDVKSKTAHYLLRHYPTPQDIMKCGVAPLSSILKRVSRGKLGSTQAQALYEAAAESVGLREGTQGIVLEIEEILSCLEACNRFIDKLEAEMLPHLEQIPYHDSLLSVKGIGVITVAGLVGEVGDFRHFHTLREVMKLAGLDLFEISSGNHTGNRHISKRGRPLLRKLLYFAAINTVRKGGVMHISYQRYLERGMPKMKALIAIARKLLRVLFALVRDHSQYVENYSKKEALKLAA

SEQ ID NO: 479941 - protein, 419 aa, unidentified
MSFKILKNNCCGLDVHKTWIYACIGITDSFKRTEYKQARFSSFTKGLQELCLWLAKYNCIDVCMESTGKYWIPVFNVLEKNNIFVTLSHPKYTKPQKGNKTDRKDAKWICDLYMCGMVKPSFIPPADIRQLRDLVRYRFKLTCMITGEKNRAHNCLTVSNLKLDDVFSDIFGKSSRSITEQILQHQGEVFDVAPFVDSRCKTPIEEIQAAVDGAISHEQAVKLRQCLKHIDELEMHKAEIEREIFRLSQKYESVLDLIRTIPGFDKNPLTAIQVLSEIGADMSVFPTAKNLVSWAGCCPRNDQSSRKIKSTRISRAGSYFKPVLVQIANALIKSKKHPEFTTRYRRIKARRGHKKAIIAICRMILTAIWHILTDLKPYTPEGFLESRPVNKEKVLTISQALNLIKQRGYIIKDDVGPVT

SEQ ID NO: 479942 - protein, 341 aa, unidentified
MNIKRVGIDLAKQVFQIHGVDGQEKVVLRKQLRRAQLLDYFKKLPPCLIGMEACGGAHYWARELQKLGHTVKLMAPQFVKPYVKTNKNDANDAEAICEAVARPTMRFVAIKTIAQQDIQAVHRIRSELVQQRTAKVNQIRGLLAEYGIVIGRRVDVLQHALPLILEDAENSLTADFRVLLDGLQQDLTMLNGRVDDLDKTIKTLAGSNTDAKRLQQIPGIGPITATALICAIGDGKQFKRGRDMAAWLGLTPRQHSSGGKDRLLGISKRGDAYLRTLLIHGARAVLKVAGQKDDPRSRWLQNLCSRRNKNIAAVALANKNARIAWALLSKKTDFLPEGEPA

SEQ ID NO: 479943 - protein, 392 aa, unidentified
MYIVGIDIGKNHHEASIVSPEGKQIGRSLRFATTHKGADSLMSFIFKNIGNSPCVFGMEATGHYWYPIYSFLKAKGYTIYVINPIQSDSLRKMYIRQTKNDSIDSFFIAEVIRFGQFGTTSMADENILAMRQLCRYRDSVISSRTEIKLRIGTIMEQIFPEYEKQFSSLWMSTSMGILEKYLTPENIENAPIDELFEIIKDKSHNRLTKAKAISIKEAAADTFGIKIAQDAFSFQLKQLIDRMNFLDKQIEALDIEIMKYYEQFDCYLHTIPGIGMIAAATILAEIGDINRFKSSSALVAFAGIDPTVRQSGEFSSTHNHMSKRGSPYLRHAIFLAATTCSFHNSPLNAYYKKKREQGKHHLTATGAVARKLTTIIYAVFRDGKPYEPKKFC

SEQ ID NO: 479944 - protein, 420 aa, unidentified
MDEITEEPAALVERIAALDIGKAALTACVRVPHEDKPGARRQQVRTYAALTPALLELRDWLTCQGVTRVVMEATSAYWKPPFYLLEDGIECWVVNARDVKNVPGRPKTDRLDAVWLAKLAERGMLRPSFIPCRPQRQLRDLTRYRRTLTQERTREKQRAEKLLEDAQVKLSSVISDIFGASGRAMLAALISGQRNPHELACLARGSMRAKTSVLQEALTGHFTDHHAFMLTMMLARVDALTAQIDTLTTRIEEAIAPYAAQVAQLDDIPGIGVIAAQDLIAEIGTDMSRFPTPGHLVSWAKFAPRARQSSGRSKAASTGKGNPWLGGTLGEAAISAARTRTFLASRYKRIVRRRGKKRALVAVGNSILTIIWHLLSDPAARFTDLGPDWHDRLAPLRRKRQLIAELERISGKKVTLHDAA

SEQ ID NO: 479945 - protein, 344 aa, unidentified
MGHYVGVDVGLRSSSLCIIDEQGKVCLEREVASEIDEIADAIRGFSEHVDGVALETGNLTPWLTAGLRAEGFRVVVMEARQVKTTLSSLRNKTDRNDARGIAQILRTGWYREVHVKSLESQRLKTLLAARKALLRRRIDLENEVRGLLKVYGFKLPAQIYHARFEDMARQAVMADPALDEALGPLLDARGHLYRAFLEIDKRVRSIAHDDPICQLLMSAPGIGFVAALTFKAAVDDPKRFRRSKTVAAHFGLTPRRYQSGEKDSPGHISKAGDVEVRSALFLAANTIMNGRGKPSSLRSFGARLARKKGRKRAMVAVARKLAVVLHAMWTDGTLFCNVEKEVIA

SEQ ID NO: 479946 - protein, 320 aa, unidentified
MTIIGFDVSKDELVGARVSRRAAIQESYTLPNTREAIASFLEEARAAHPRLIVGSEATAEYHRPLALACLARGIPFRLVNPLVTKQLTRVTIRKQKTDATDAFLIAKAVLQGAGTLVTADSFAPGKVLNRTAVKLSHIAGALLRIERHLRDTHADAPVVETLVALREQAEAAIREAHRAARASLDPGCSALLRSIPGIGPTLATAFLAELMPIERFRTQKAVVAYAGLDPRVKQSGVSMKRNTHLTKRGSPVLRRCAYLAASIAQRHDPELKRYYEKKRLEGKRYREATIANARHILYRIYAVWKRGTPYVKKELSTART

SEQ ID NO: 479947 - protein, 357 aa, unidentified
MTNQQLERHVVGGVDTHKLTHHAAVLDAATGKLLDNQEFPASRGGYVRMLGWLEGHGSVAKVGVEGTGSYGAGLQRHLQGNGITVIEVARPNRQDRRARGKSDPIDAINAARAVLSETATTTPKDRDGFVEAVRLIRATRRSAVKSRRAAIGQMHGLLWCAPEPLRERLGTYHRAALVSRCARLRLPATAELDDAAATARRMLRRLARRVEHLDEEIADADTELRTILTAHAPHLMAATGVGTEAAGQILVTAGENSDRLHSEAALARLCGVAPIPASSGSTTRHRLHRGGDRDANSAIHMIVINRLRWHAPTRAYVAKRTADGKTKKEIIRCLKRAVVREIYHALQTDLEITLDTA

SEQ ID NO: 479948 - protein, 312 aa, unidentified
MQNASIGIDIAKNSFDLVVYETGEHNSYTMSDKDIAKALNLIKSTKPKIVVMEATGGYETKITAKLIVAEIPMAVVNPRKIRDFARATGRTAKTDKIDAEAIAHYAAVLKPPQTKSSSLAMLELKELVRRRRQLVELRKIEKNHAEASAVNYVQKSISSVVKTLDLQIAKIDQLIADYINSMTELQIRKKILTSIPGISDTTAQMLVCDLPELGHINRRQLSSLVGVAPMNRDSGILRGKRMICGGRKAVRTALYMPALAAIRCNTTIREFYMRLVNAGKPKKVAIIAVIRKLLTIINSMVKHGTFWSQNLA

SEQ ID NO: 479949 - protein, 369 aa, unidentified
MGEYSEGFVAFDVAKTKHAVAVADGGRGSEVRFVGEIASSPAAVERLIGKLAGRYDKLHFCYEAGPTGYGLYRQIEALGHPCLVVAPALIPKRPGERVKTNRRDAVTLARLHRAGELSGVWVPDAVHEAVRDLVRAREAAVDDRRRKRQQLLSFLLRHGRVYGGGGHWTLAHRRWLAKQSFAHPAQQIVFQEAIDAIGDADQRLHRLEQQLAVIVPSWSMAPVVEAYQAMRGASFIVAVTFAAEIGDVRRFDNPRQLMSFLGLVPAESSTGETVRRKGLTLTGNRRARRVLVEAAWTYRYPARVGETLRARLDGLPKTVRDIAWKGQVRLCARYRRLSSTGKKLPVVVAAIAREMAAFLWAIGRAVAPA

SEQ ID NO: 479950 - protein, 338 aa, unidentified
MAQVSTIGLDLAKNVFQVHGLDPQGKVLVRRPLRRTEVLPFFAKLAPCLIGMEACGTAHHWARELTKLGHTVKLMPPAYVKPYVKRGKTDAADAEAIAEAVQRPTMRFVAIKTTDQQAVLMLHKVRDLLVRQRTMLINALRGHLAEFGIVAAQGAVGVRSAIAQFRADQASLPELARSAIRHLIGQIEAVAEDVKKAETEILAWCRADAASRRLLTIPGIGLITASAIAAAVPDPTLFRSGRQFAAWLGLTPRSQSSGGKERLGRISKQGDGTIRRLLVVGATAVIRVARQDNPGRAWAKRLLERKPARVVSVALANKTAQIAWAVMMRGEVYRAPAV

SEQ ID NO: 479951 - protein, 457 aa, unidentified
MNKNETKQLNRRQKVVRIPLINQDAAGIDVGDTMHAVAVPKGRDKESVKTFGAFTCDLQLIVQWLKQCNIKTVAMESTGIYWKNLYCVLVQNGFEVYLVNAAHPRNVTGRKTDESDAQWIQRLHSCGLLSSSFLPEDKIETLRSLVRHRRSMTEDSTTYILRMQKALEMMNLKIHTVISDITGKTGTAIVEAIIAGERNPIMFLPLVDSRIKADQETICKSLEGNWRQEHLFLLKQNYTLYQFVQQQIILCEQEIETVLQQIAAMQQEGIIEVLPPATTDSAKPSKKKKTKNQPVFNTKAYLSLIHKIDVTQIFGISETSALEILAETGTNLSKFATENHFVSWLNLCPNNKISGGKLLSSNRLKKKPNAAAQAFRMSANSLKLSQHGDYFRRMRSKGGHKYAIVATARKLAIIYYRMVRFKQPFKPFDFDTYKEKYRTTKIARLEKALLKLKTQAA

SEQ ID NO: 479952 - protein, 415 aa, unidentified
MKIVFPTCCGVDVHKSFLVATIIKTPQDSLQPSYQKKRFSTFNSDLNRFAGWLHTNNCLDVCMESTGKYWVPVFNILEKRGIHVVIANPKWVKAVKGNKDDTKDSKWIGDLFRIGLVKSSFIPARNIRILRELTRYRYKLVSMRSGEKNRFQNAFTVCNVALDSVVSDMFGKSATAITVYLTSDEEFNAEHCVSLLQRSLKKKADAVLESIEGFEIAAEQKTRIAIVRDHLHFIDTLIKRVDACIDTMVQQYEDYITLLCTIPGIDRNSAITIISEIGVDMEQFASSKRLCCWAGLTPGNNESAGKKKSVRISRAGVYLKPALVQVAHAAVKDKDSPYYGFKYERISKRRGKKRAIIAIARMILTAVYSMLSTGEVWNPVDLYKVDMPEHLKEQQLAKTVKQAIRLLESQGLKVG

SEQ ID NO: 479953 - protein, 418 aa, unidentified
MTRGDDSRIIRIVHPICCGLDVHKESVSACVIFPDDKGEEQCDVKVFGTFTDDLMRLRDWLAAHNCPVVAMESTGVYWRPVHNVLEDSVQVVLVNARDMHNVPGRKTDIGDSRWIAGLLRHGLLKSSFIPPQDVRQWRDLTRLRKKYVHTVGDYRKRTHKLFESANIKIDSVVSDLFGVTGRNLMQLLVADRKLTLSDIQTCVRGKLKGKEAELFRSIQGFFTDHHRFVLKMILETIATLEAQIEALDLQIRCAMKEHETLLDRMKQAPGIADVASREILAEIGPTLDSFRKDTALVAWSGLCPGNNESAGKRKSGKSPVRKHHLKTIMIEVAWAAIKKKDSYFKDKYYRLKARRGAKRAIAAIAHRILLGIYHVIKDGVDFRDLGGDYLTLRNKSQKVFHLRKQALAMGFDLVPQTV

SEQ ID NO: 479954 - protein, 397 aa, unidentified
MNQNTLRIGIDVGSARHRVAVGLPDGTLIDEFDVDHHSAGFNRFFHRIAALEARHPFPITVAMEGYNGWARPLDGLIRQKGWALYNVNNLKLARYKEIFPAPAKTDAIDARRILELFQLSAHIPVGRNALQAVKATPAVNDTLKRLTRRRKQLVLERGRIANRIQADLHAVCPELVALTGDVTNVWFLNFLTCRDALEKLAKLQKRSVLAIPAIGKKYAALIQNWQRTACFAPEVDIVSEMILQDARRIQALGLDIKTLDRNIKETATNSALAQTLQSIPGFGDTTTAELAGEIGTLDRFESEAGLAVYTGMAALDNSSGKKTSTRIPRQVNTRAKAAMMVAIARHIPHVPSSKAYYDKKRAEGKKHNQAIRALGRQMIRVIWTLVKHKREYEIREK

SEQ ID NO: 479955 - protein, 324 aa, unidentified
MNKYNEIFGVDISKDVFDVYGSKSGHNQFKNAASGFMFFLKNLPKKSLVVMEATGYYHYSLAQFLFKQGVLVSVVNPLSVKRFIQMKLAKVKTDKSDAKAICEYGQINQVPLYSALSDVQSECLQLFRLLDSYLKKRTMTKNKLHGEDVLGIPSKHVYRSLKRNRKHLDTEIESIETKLLSLVKQDQQTQLTLLKSIPGLGVKTALFLIVITDGFTKFETAAQLCSYVGITPTIRQSGSSVRGRSSISKVGNKKLRNLLFLCSFSACKHNKSCREIYERIVNKGKSKKLALIAVSNKLLKQAFAIAKSGNPYDETFVSVLMANG

SEQ ID NO: 479956 - protein, 315 aa, unidentified
MTKPLLPLNVGVDVGKSQLDLYLLERDRALTVPNDEHAIASLVRRLRRYRLERIVIEATGRLEQPFVRAALAAGLPVVVVSPLKVRRFADAIGLLAKTDAIDARLIARFAAAVKPVARPASDANAQTIKDLVVRRRQLVALRTMEKNRRQVMPQELKTGIDRIIKTLDRELKRLEQLVDHAVEQHAPSRHKRELLTSMPGIGNSIAATLLGDLPELGSLNRREIASLTGVAPFNRDSGKLRGKRRIRGGRAHSRTALYLSAMVATRFNPDIKRFYERLVSAGKHKKVALTACIRKIVTALNAMLRDNVPWQPSIA

SEQ ID NO: 479957 - protein, 413 aa, unidentified
METMVERCAGLDVHKDTVVACVRRPGPKGQREVELREFGTKTGELLDLRDWLVEQGVTLVGMEATGVYWKPVYYVLEDALECWLLNARHLRNVPGRKTDMQDAAWIAQLVEHGLVRPSFVPPKPIRELRNLTRYRKAQIEERTRESQRLDKILQDAGIKLSSVVSDLRGKTSRDILNALVAGEMDGPQLAELARGQLRKKRPELGAALRGRFSGHHALLVGEILAKLDYLDELVGRISDEVGRAIAPFAEQVQLLDTIPGVDRRMAEALIAEIGVDMSRFGSSARLASWAGLCPGQHESAGRSRGGTTRKGSKWLRTHLTQATKSAARTKGSYLAAQYARLRGRRGHAKATIAVAHSILVAAYHILDRMEPYHDLGEDWFVRRHSPEQHARRLVHQLALLGYQVDVRELEEVA

SEQ ID NO: 479958 - protein, 307 aa, unidentified
MKFDFDNIDNPLSFLLKITFSSVRPRSRFQVVVSKSRLFFHKSFLMNKYTETFGIDISKDVFDCHGSKQGHLQFKNTEKGFVKFLKQLTEDSLIVMEATGYYHYRLAQFLYKKGQIVSVVNPLSIKRFIQMKLAKVKTDKSDAKAICDYGIINEVPLYNALTDVQSECLQLFRWLDNLIKKRTATKNKIHGEEVLGIPSKFVFRSLNKTKKFLDKEVLGIEQKLLSLVKQDHQVQLTLLRSIPGIGLKTALFLIVVTDGFKKFETASQLCSYVGITPTIRESGSSVRGRSRISKVGNKKLRNLLFMC

SEQ ID NO: 479959 - protein, 371 aa, unidentified
MKSIIYIGMDVHKKTYSLCALLKETGEIIGETKIPADVSLIIKFIENAKKSVDSDDVQIKTGYEAGCLGYSLYWQLAAKGIECDILAPSTMHRSAKNKVVKNDRRDAKNIAANLANGTYKSVYVPTDEDVEIKEYIRMMHDFKIELKKVKQHINAFLLRFGHHYPGKSKWIPAHIKWLKELELSDIYREILDEYLSQLEILSEKIERFKYRLEELSQKETYNEKIGQLRCIKGIDTTAAMTMHAETSDFDRFPTANAFASYCGLTPGEDSSGESYHRLGITKQGNSMIRTTMVEAAQVLVRGTIGKKGKKVKSKQKDQDVKVIDYADKAVVRLQKKYHRMIFRGVKRNIAITGVARELACFVWGIETGHIS

SEQ ID NO: 479960 - protein, 457 aa, unidentified
MRTTIKDCASNTNEANEQIAVWVGLDWADKEHSVSVFEVASGKSDRYTLKHTAEALQEWLSRLRTQYQGSKVAVVLEQSRGPVLYALMSCEFIVLYPVNPQSLANYRKTFQTSGSKNDPVDAELLQEMVRKHPDRFRAWVAEDADTRSLQLLVEGRRKLVNQTTRLTNRLISHLKNYYPQALEWAGELNTRQACDFLMRWPTLQSLQQARPATLKKFYLSHGRPRTATLNERLKQISQAVALTDDRAVVLAGSMMVKALVAQIQPLIIAVEKYDDEIHRLFQQHPDREVFESFTGAGPVLAPRLLAAMGADRDRWHTAAEIQQLSGVAPVTEQSGRQHWVHRRWACPKFLLQTFHEFAKQTIVWCDWAKAYYEQQRERGAGHHAAVRSLAFKWIRIIFTCWKNRVRYDEDLYVRSLERRGSKLAARTQLVRQERELRRTKRGGQPVENMSLSSQIPS

SEQ ID NO: 479961 - protein, 335 aa, unidentified
MAILFVGIDLAKNVFALHGVDEHGKAALVRASVLRSRLHQLVAALPPCTIGMEACSGAHHWARLFMQHGHTVRLMAPKFVAPYRMSGKRGKNDAADAQAICEAVQRPNMRFVPVKSQDEQARLCVHRVRQGLVEQRTATINRIRGLLSEFGIVLAQKAATVRREAAARLEDLPGWANTAVGDSLSELHRLDDRIAEYDYHVVVMAREDERSRALMQLQGIGSTTASALVSTIGNARDFKNGRQLAAWLGLVPGQYSSGGKTRLGSITKAGDGYLRTLLVLGAKAVLAAARNKEDRLSRWAMALEVRRGYWKAVIAIAAKNARMAWAVLPRARTSS

SEQ ID NO: 479962 - protein, 370 aa, unidentified
MAQCIKTQFVGLDVHKDTIVIAVAELGRQAARVVATVAHEGKALRKVLDKLGPRAQVACCYEAGPTGYGLARALLAAGWSCDVIAPSLIPKRHGERIKTDRRDAVKLAENHRAGQLVAVFIPDEQTEAIRDLERAREDAKKAERVVRHQLSKFLLRTGRRYPGKTTWNDAHHAWIAKQTFAAPAQQYVLSDGLAAVEGATLRARQLTTRLREVTVGWSQEPLVKALQAMRGVEFVTAVTLVAEVGDFRRFATAEDFMGYVGLIPSEQTSGNHRRQGPITKTGNAHVRHVLVESAWHYRRQPRMSKALRDRSAGVSPRVCAIAWKAQKRLHSRLSKLIGRGKNKAEAVTAVARELAGFVWAISREEKLLVS

SEQ ID NO: 479963 - protein, 369 aa, unidentified
MKDDIRVCREMTNSVSNEFSLFPKSTLGIDLGDRFCHCCALDYRGEVVERFRFEATKAGLAKAFENRPPCRVVLEVGTHSPWVSRALGALGHEVIVANAREVQSITKSDRKNDANDAEQLARLGRADPKLLHPIAHRQEDTQRDRALLTVRDKFVQVRASLIVQARGIAKALGERLPKSTTPAMAKRVREEGFANLFPGMSSLLEVVELLSEQIRELDSEIEKVSKERYPETELVRQVKGVGPITSLAYVLTIEDPARFARSRSVGVYLGMRPRQRDSGDRNPHLSINKAGDPYLRNLLVECAQYILSRGPDSDLRRFGERIVERGGPGARQRAVVAIARKLAVLLHSLWRTAEVYDPLRQAQVTEATA

SEQ ID NO: 479964 - protein, 320 aa, unidentified
METEKVYVGIDVSKDTLDVAVHASEQRWRFANSDKGITEALACLEELSPVLVVMEATGGFEYPLAAALAVAGRPVVVVNPRQVRDFARATGRLAKTDAIDARVLAHYAAAMHPPTRPLLDTQGQELKAILARRRQLIEMLTAERNRLHSARSKAVKANIQAHIAWLEKEMTHIDHDLGHSIRETPVWQEKDDLLKSVPGVGPVLSTTLLADLPELGLLNRREIAALVGVAPFNRDSGHIRGQRAVWGGRAVVRSALYMATLVATRYNPIIRDFYRHLLSAGKPKKLALTACMRKLLTILNAMLKHKTPWHYPISEMLKTP

SEQ ID NO: 479965 - protein, 343 aa, unidentified
MKLTRVGVDLAKNIFQLHGVDRAGRPVWCKRLKRNRWIREIEQYVEPGVEIGMEACGGAHHWARLLQSKGYRVRLIAPQFVKPYVKSNKTDANDAQAVCEAMSRPSMRYVAVKTIEQQDIQAVHRVRASLISERGAKANQLRGLAYEYGLVAPREIAALRLAVPAWLEDASNGLTVRLRALLSGLYADLRALDERVRELDKEIRAIGRENEAVGRVQQLRGIGPLIASALVAMIGDARQFKNGRHVAVALGLTPRQHSSGSKERILGISKRGDSYVRTLLIHGARSALRTAAGKDDRMSRWALALAKRSHVNVAVTALANKMARVAWAMLKHGTDYEPNGLAA

SEQ ID NO: 479966 - protein, 368 aa, unidentified
MTFVGIDLHTTCITVTFLRTGSIKKAMEITKKSFPLDELGMKAFIQRLSSEMYAAVEATANSFWFYELISPYVKEFFVLDTHKMRLDGNKTDKIDSEKIARCISYCITTGEKEIPAVYIPTKEVQEMRSLFSTYRLTKKCATQLKNNFHGLVKQQGLNLKKGALNTKKGRKNCMETAAGTVFEVQARSLMRQIELLGQETEELQNAIINRGYMIFKEEINLLISIRGVSAFLAIAIMTDVATVDRFKTAKQFCSYLRTAPSIKGSNDTTHLGKVNKRSRVLACSLMTQSVIHLQGANAHFKDFYNRVKKGKSSGKARIAIIRKTQVAIFHMLKKKELFRGHDEILYASKKKRLEEALGKQNRSEKKPA

SEQ ID NO: 479967 - protein, 421 aa, unidentified
MTDDIEWYVGFDWASETHCACLMDRAGRVVGKREVAHAGADLAELCDWLIRKTGAEPGRIGVAIETPHGPVVETFLERGFAVFAINPKQLDRFRDRFTVAGAKDDSRDAQVLGDSLRTDSRAFRRLVIDDPVRIELREWSRIEDELKRERTRLANRVRDQLWRYYPQMLQLSNDLAEDWLLALWRRVPTPAKAAKASEATIQRILKAHRIRRIEAPEVVRILRQTPLKVAAGASEAASAHIRSLAERIGLINQQLKTAERKLEQLLTRLEQAAQDQAGQDQAGQMSEQRDVTILRSMPGIGRTNLATLLAEGSEPLGRRDYHVLRTLSGVAPVTRRSGKAWMVLRRLACNRRLRNALYHWARVATQHDPVSRQRYAALRGRGHSHGRALRSVGDRLLYVACTLLRRQVLFDPDHNSLEAAA

SEQ ID NO: 479968 - protein, 426 aa, unidentified
MFTESEDEEQIIERVAALDIGKAELVCCVRMPAPPGKKRRLQEVTTHTTMVGSLSELANRLVGLGVQRVVMEATSDYWRAPFYLFAAHGLDPWLVNAKDVHHLPGRPKTDRLDAVWLCKVAERQMLRPSFVPEAGIRRLRDLTRYRVDLVGVRTAEKNRVEKLLEDACIKLSVVASDIFGVSGREMLDAIIAGERDPKVLAEKARSRLRLKMAELEEAFAGLQLGTFDDHHRFLLTRMLARIDQTDRDIAALDEQIEAHLVPFADAVARLDEIPGIGPRAAAAIVAEIGTDMTQFPTPDHLASWARFTPGIKSSAGKTKGNGSTGHGNRYLARAICEAAIATRHTQTFLGVRYRRLVRRRGKKKAMVAVGRSILTVIWHLLNDPDIPFRELGPQHYDTHVSTKARQRSHIKGLEALGYKVILQPAA

SEQ ID NO: 479969 - protein, 482 aa, unidentified
MKKRNIFQNRSQQLLALFEKAGNRLKMMCVPIDYAKKDHIVMFCNGYGDILRKPFSAKNTLEGVKYLIDQVMRSCRQRHIKKEYVFFGGEDVNSYAENFANALRAKGFLVANVNAHDAKKQRETLQASTDRIDLMGIATMLLNLRAKCSPAQDGIYRNLRTLVRHRKKLVVTKTGVKNRVHTQVDRLFPGFLNEKNTGINPFSQSSLVLMQDRFSAQQIRRRKQATLIKILKRCATPDAENVAAKLHSYAAQVITTPDEYAATLQLSLQHHIKLYRCLKENIDQLLSEIALVLAQTQAAFLTSIRGVGIVLAAGVSSEIGNPFGQKPLNNLTSYCAIIPRVKQSGGIEGHTHTGRVSKRSNHLLKDYVVQSAFHIGLRGPQPLLLDYKRREAAGQHADFGMGRRFLRMAMCLMRSSQVYLPPKLRSPKAQMQERAGYYLTMWPLLRDKWKKAHAHQLAFAKDQPLGQWRQMVQELYEIKLKL

SEQ ID NO: 479970 - protein, 387 aa, unidentified
MPQPNDLSRSLVTLEQDSTLIAVIEMGQSSWLVAGIVPGIERQPLKKLTADQDGLLQLLHRWRKEAAQAGHTIKRIAIAYEAGRDGFWLARWLRAREIEVYVIHPSSVPVSREHRRAKTDRLDTELLKRAFLGWLRGEPKHCSMAAIPTVEDEDAKRPSRERESLVGECTRIVNRVKANLARLGIRGFRPRLAHAPKRLDTLRTPEGTTLPANTLAEMQRDMAHLRFVKQQIKEIETTRTKRLQQASEGGRDAMVRLLARVVGIGIETADLLVQEAFSRKLRDRKAVARYAGLTGAPDESGQKRRERGLAKAGNARVRHAMIELAWGHLLHQPDSALAEWYRRRTVHARSGTRKTMIVALARKLLIALWRLVTTGEAPAGLLLRPAV

SEQ ID NO: 479971 - protein, 410 aa, unidentified
MRIIALDVHRTFAQMAVLEDGKIRNAGKIDLEHNRLLQFAKRLKFDDEIIIEATGNTSAIVRLLSPFVGRVIIANPILVRAIAWAKVKTDKIDAAVLAKLHASGFLPEVWMPDEETETRRRVVAERTQLVSQMTRLKNRIQSVLHANLIPPYKGVLFSKRGRAWLEAQPLAEDQRRVVLRHAGELDRLGSELAEVDKSLAQKALEEPRVKRLMTITGVNATVAMSVLAAIGDIHRFSSPEKLVSYFGLNPRVRQSGDKPAYHGRITKQGRAHARSMLVEAAWVISGVPGPLRAFFIRIRDKRGKHVAAVATARKLAVIVWHMLTKDEDYTWDRPALSQWKLRKLELKAGHPSRRGGKQKGSAAAYSNKSVRDSERETIGNAEEEYRRFVATWKQQSPKGRSGATKEVRRS

SEQ ID NO: 479972 - protein, 466 aa, unidentified
MNKPQGGNLQPPKAKSKRRRRNKGMCLEDRPVLEPNAAGIDVGAREMFVAVPPGRDENPVRVFATFTEDLERLTDWLEQCGVTTVALESTGVYWIPLFEILEQRGIRPCLVNARHMKNVPGRRTDWHECQWLQFLHSVGLLRAAFRPGQDICAVRTILRHRNELVSAASQHVQHMHKALTQMNLQIHHVISDITGVTGLAIVEAILAGQRDGAELAKLRDPHIKADAETIRKSLEGNWRPEHLFTLGQSRDLYRIYQQQIVNCDLEIEKMLQEFAPRTDPVERPLPPDRKRNRAGSKRRKKNGHPHPEFDLRTQTYKLFGVDVTQIPGLEENALPLFSEVGRDMSQWPSAAHFVSWLALCPDNDISGGKLLWRGARRVKNRAGHLFRMAAYSLHHSLTPLGNYLRRMKAKLGPKAATMATAHKIAVIFYTMVKNQVEYDETTWRARDAQKEKRFEAKLKRQARPHN

SEQ ID NO: 479973 - protein, 342 aa, unidentified
MQVTTIGLDIAKNVFQVHGVDANEKVVVRKQLRRGQVLAFFAALAPCLIGMEACATAHYWARELTKLGHKVRLMPAKDVKAYVKRNKNDAADAEAICEAVRRPTMRFVQIKSAEQQGQLMQHRTRDLLMRQRTQLINALRAHLAELGIVAAQGREGIQELLAIVADHKDQRIPIDARASLMLLAAQLQAVQTVIGLIEKRIMAQHRSNEASKRLETIPGIGVIGATAIAATVADPSVFRSGRDFAAWIGLVPRQDSTGGKQKLGPISKQGDQYLRRILVVGAHAVLRRAKQNPEKYPWLTQLLARRPFKLVAVALANKMARTAWALLAHGGTYRAPELAATA

SEQ ID NO: 479974 - protein, 376 aa, unidentified
MKRIVYIGMDVHSTNFTFCSLEPKLGGEDKVFGCMQSEADVKNVLKYIEGLKKELGDDVEFLCGYEAGCLGFSLYHQLKKQGVECVILAPSTMMASKGKRIKTDARDAKRIAQCLAYGTYHSVHIPSSDDDAVKEYIRMRDDHKIALKKLKQQINALCLRNGRQYTGTKWTLSHLRWLREIDWQEAVLKETLQEYLMTFEQMTNKLEALDRRIEELAQGEKYKERVKKLVCLLGVKTRTALASIVEVGDFCRFEKGSTYAAYLGLTPGESSSGDTVHRGGLSKAGNAHLRTLYIEAAQGICKGRIGHKSKELKARQSGSSQEVIAYADQANERLRRKYYRLIQREKRRNVAVAAIARELACFIWGLMTNHTERRVA

SEQ ID NO: 479975 - protein, 416 aa, unidentified
MSDENKVASIDVHKKVLMVVVGSREGDAIGPKGELERRRFGTTTIDLHGLSLWLQERGVKEAVMESTAEYWKPVWAELEPYMRLHLAQAFSNRAPKGRKHDFRDAERLLRRHVAGELILSFVPEPEQRAWRTLTRMKTRLARQRVRLQSQVECLLEEMRIKLSCVLSDLFGASGLRILRALAEGETDPKKLAALGDDRLKCTKEQLLDALTGNVQAMHLELLTLYLQQLRLVDEQMEKLHRLIAQALKPHQEAVARLAEVPGFGPDSAQQVIAEVGVQASTFPSAGHLASWVGTCPGQEESAEENYSSRSAKGNKYMRRVLTEAAQAAVKAKGSHFQVVFRRLLPRLGYKQALWAIAHRLCRMVWKILHEAVHYVEQGAYRDPRARKQRARALAQALRRLGYDVQITPKEPATVQA

SEQ ID NO: 479976 - protein, 420 aa, unidentified
MKPLSDDEFTAFIGIDWADTKHDICLQAAHSDRREFDRIEHKVDHIEQWAISMRQRFGGPIAVALELAKGPLVYALQKYDFFVLFPINPATLARYREAFKPSRAKDDPTDAEHALDLLVRHRERLTALKPQSAAMRTLLHLVEQRRRLVGDKTRFTNRLGYALKQYFPQALDWFEHTDTIVFCDFMTRWPTLAQVKRARAASVKAFLWSHNVRFINVIDERIRAIKAAKPLTQDAAVITAYRLQALVLVDQLRVTLQAIDRFDAQIADVAPTLPDYTLFKALPGAGAHLTPRLLVAFGEQRERFASAADLQKYSGVAPVTERSGSKCWIHWRWQCPTFLRQTFVEWAAQTINKSFWAGAFYRQQRDKGCSHQVAVRALAFKWLRILHRCWQTRTPYDESTYLNALKKRGSPLLNQLVAQT

SEQ ID NO: 479977 - protein, 389 aa, unidentified
MIYVGIDVAAEKHACCILAESGKVLKQFTFSNDMPGFEKFHKALLTPSETKIGLESTGVYGNNLAEFLRRNGYETHIFNPLLVKKSIQATTLRKTKTDKSDAKHIAQYTKEHSQPNLEPSYHISELKSLSRGRFSLVRERSKVKAQAKGLLVQLFPEFSQAFSDVFGAAASAVLKQLPSARMISQCPVDVLTNLLRTASHGRLGKVKAELLIDLAEHSVGIQSMALELQMQMLLQQIDLFTLQINRYEAAIKSEMETIQSPITTIPGIGCVLGAAILSEIGDIRRFTTPAKLQAYAGVDPSVGESGTSVSTPGRMVKHGSHYLRWALCQAARCVSLYDPIFAAYMKAKRDEGKHYCVACSHVAKKLTRVIYSILKNNTAYSLTYSQIGA

SEQ ID NO: 479978 - protein, 321 aa, unidentified
MLVARAVGIDVSKAWLDVAIRPTGMIERHPNTSAGHAALVARLTTLASDERPELVVVEATGGHERQVGNALTVAGWAVAVVNPRQVRDFARCLGRLAKTDRIDAPVLARYGEQIGPEPRPRPDAHTQEVQGLVARRRQLVEMLTMEKNRLHQAPPRTQPSLRRHLEFLETELAEVEQQLADEIAATPAWQEIATRLQTVKGIGPVTATLLILELPELGRLDRKQIAALVGVAPFNRDSGTMRGKRFCSGGRASVRTGLYMATRAAIRSNPPIRALYTRLIAAGKLDKVALVACIRRLLTILNVMIRSQSDWDPARFQPAAA

SEQ ID NO: 479979 - protein, 404 aa, unidentified
MLYVGIDIAKEKHEACVIDQEGNTLLKSFTFPNSAAGANALLARVSKLNAQSDSVTIGMEATGHYWLALYTHLKDNEQTVFVINPVQSDALRNLYIRQTKTDTVDAFIIAEVLRFGRFTQTQLAEPDMLALRNLCRYRMSLIDMISDIKRKVMAVMEQIFPEYESLFSKVFGKASSELLSTCTTPDEMMRLSTDNLAKLLNQASKNRLGTKRATTKAQQIQQAAANSFGIKIAADVMAFQVRQELEQIKLMESHIDQLDQQIALLYRRFDCTLDSMPGLGPVLAAIVLSEIGDISRFSAPEKLVAFAGIDPSVRQSGNFTGNQNRMSKRGSPFLRRAIWLAAFVAAFSDPVFSAFYQKKRAEGKDHMTAIGAVSRKYLYTVFSLLNSGQLYVPHPPHVNSSSGA

SEQ ID NO: 479980 - protein, 402 aa, unidentified
MNCVGIDVSKGKSMIAVMRPFGEVVVSPFEVRHTANELSELAGLLKSLDGETRVVMESTGNYHAPVAWLLHDAGLHVSVVNAMLVHDYGNNSLRRAKTDKKDAVKLANYGLDHWLTLPRYIPEEDTRLMLKICYRQYQQYSKVQTMLKNNLISLLDTTFPDANRLFTSPPRADGSEKWVDFVATFWHCECVCGRSEKAFTTQYQKWCRKHGYNFSQDKALDIYASACGRFGVMPKTNTAKLLVEQAISQLQTTSSALAALKQEMQSLAASLPEYPVVMGMFGVGPTLGPQLLAEIGDVRRFHSKKALVAFAGIDAPPYQSGQIDVRSRSISKRGSASLRRTLFLVMSVILQCAPIDEPVYQFMDKKRSEGKPYRVYMMASANKFLRIYYASVKAYLESLEHD

SEQ ID NO: 479981 - protein, 388 aa, unidentified
MIYVGIDIAKLNHFAAAISSDGEVLIEPFKFTNDYDGFSLLISKLVPLDQNSIVIGLESTAHYGDNLVRYLITMGFNVCVINPIKTSTMRKNNIRKTKTDKVDTFIIAKTLMMEDSLRFVTLEDLDFIELKELGRFHQKTIKQRTRLKIQLTSYVDQVFPELQYFFKSGIHQNSVYALLKEAPTPNQIASMHMTHLAHLLEDNSHGHFKKDTARELRVLAKKSVGINDSSLGLQITQTIAQIELLDHQLFCTELQMCDLESHIKSVLFTIPGIGIVNGGIILGEIGNIHRFSAPNKVLAYAGLDPTVYQSGNFQAKRTRMSKRGSKVLRYALMNATHNVVKNNKTFKEYYDSKRAEGRSHYNALGHCAGKLVRVIYKMLTDNVEFNLE

SEQ ID NO: 479982 - protein, 423 aa, unidentified
MQVMHQRTAGLDVHKAMIVACVRIMVGTKFTRECRTFDTSTSGLQALLAWLVASGCTHVAMEATGVYWKPVWNILSDGAFELIVANAAHIKNVPGRKTDVNDAMWIADLVAFGLIRASFVPEQELQELRSYMRARKQLVREQTSHIQRIQKTLEEANIKLDSLISDVMGLSGRRMIEAIIAGEGDPIRLAELADRRIKAPRDQLVEALRGRVTDYHRFMLQLHLEQCDALEAAITKIDQVVDAAIARMDEEVEAGQATFRSLIWLLCTIPGVSTLSATTILAEIGRDMSRFPSAGHLVAWAGLCPGHNESAGKRKSSRLRKGAPWLKTMLVQCAWAARRKKDSYYKAQFYRLRAKRGEKKAICAVAASILTAIYHMLKDGTQHRDLGADHFDGRSTEFKAKRLVAQLKKLGFQVQLQPSAEAA

SEQ ID NO: 479983 - protein, 330 aa, unidentified
MQTSPIIYIGLDVSKDELVVAYFVAGKWKKCKICNTLDDISAWLTKLDVSGKHFVLEATGPYSERLIYTLSTAGVPFSVVNPAQSRAMSKALLKTNKTDDQDAQTLSLLGQKMDLITYKMPDRTQKKRKEAFSALASLQKQEQQLKNQLHAFEYRVNPNPIAVKALQDVLASTQEAIQTLEKELNPEQDDEEAIRLIHQIETIKGVGKSTAKIFVTLFGNFQHFKNAKAFARFIGLSPTEFTSGTSVRGRSSISKKGNSKARSQLFNCARSAIQHNLSCKELYQRIMQKGKNGKVALTAVMHKLARLIYGVVRSGTNYNPEFALIKTKNC

SEQ ID NO: 479984 - protein, 328 aa, unidentified
MRGARYVGVDVSADEITVAIEGRAERVTLANDVEGHERLIRLLTRRGKPARVCLEATGIYHLDLALALHRARAIEVMVVNPTAARDFGRALLQRSKTDRVDAGVLLEFAQRMPFESWQPPAPEILDLRAIVRRIGALTVTRTQERNRLHATGRCAELTDAIAWDIEAHLEHLAQSLERLQEQALVVVHSDPELARRFERLLSVRGIATISALRILAELAVLPADMTPRQWVAHAGLDPRALDSGTSLHKPARISKKGNSHLRAALYMPAMVAAREEPQVRSFYHKRIAGGLKPIQALVAVERKLLHSIHGMWSSNRDFDGEKFCARSA

SEQ ID NO: 479985 - protein, 390 aa, unidentified
MEPPSMQTPNDLSQSGIVLKHDSTLIAVIEMSLSSWLVAGMVPSVERQPLKKLAIDENALLKLLHRWREEAEKAGRKIERIAVAFEAGRDGFWLARWLRARGIEAHVIHASSVAVSREHRRAKTDRLDTELLKRAFLGWLRGERDHCKMVAIPTIEDEDAKRPNREREGLVGEQTRIINRMKAALSRLGIRGFNPKMKKAAQRLEDLRTPEDEPIPPNTLAELRRDMERRRLISEQIRQIENARLERIEHAPRHGPHAMVRVLARVIGVGIETADMLVQEALSRNMRDRRAVARYAGLTGSPDESGTRRREKGLARSGNARVRRGMIQLAWRFLMFQKDSALARWFRARTENARGARKTMIVALARKLLIALWRLVREGVVPDGVVLRPV

SEQ ID NO: 479986 - protein, 433 aa, unidentified
MDEVTDEPLYRDRVCGIDIGKAQMVATIRVPSDSNPARRASETRSFATTRRGVLALADWCRSWQVPAVVMEATGDYWKGPFYRLEAEGFECVLADPRQVRNLPGRPKRDPSDSRWLSACFERGAVRGCFVATPEFRVIRLHTRYRRDLIEERTREKNRAGKLLESAAIKVSSVVTDLHGVTGRDIMDHLIAGERNPKVLAQLARGRARRKLTELEHALEGAEFFTSYHAALLTAMLQRIDRVTAEIGSLTEVIESLLAPYEEQLAQAESMPGWARRPAQDAIAGTGVDMTRFPAGAHLVSWGSRAPLDHQSGARKGRAKTKKGNRYLAGVLGETAVAAGRTQTREGARYRRLARRTGKNKAQVAVGNTQLKVLHKLLSNPGMRHQDPGPDYYDRQRGLRRQIHHHVTKLESLGFEVTLARTPEPDPASHTQTA

SEQ ID NO: 479987 - protein, 378 aa, unidentified
MNVAETALHGKDTGAAGQLYMAVELSDKKWLLVLSDGARGPSRYTVDAGDKRAVLDAIAKAKARCGLVGEVVVRSCYEAGRDGFWLHRWLLAQGIDNLVVDSASIEVNRRARRAKTDRLDGGKLLTMLMRYRGGERRVWSVVRVPTPQEEDARRAHRELEQLRQERTAHTNRIRSLLVLHNLRVKHVGGRDWGKWWAHHLPELPAALRAGIEREMTRLVLVKAQIKTLEAQQCTEVATGMQPQVAQLSRVRGVGLGGAWVLVKELFGWRRFHNRRQVAGCIGLAPTPYSSGDSQTEQGIAKAGNKRARWILVELGWSWLRYQPESDLSTWFNHRFAHGGKRMRRIGIVALARRLAIALWRYLEHGVIPAGAKLKPSAG

SEQ ID NO: 479988 - protein, 336 aa, unidentified
MNKKVTLKQCLGIDVSMKKIDCCLSFYTEDLKIKVVATSSFENNSNGFIKLREWLNRKQDNGLALHVNMEATGTYHEEAAYFLAGVGYRLSVIQPTKGKQYAKSLDEKNKTDKIDAVMLARMGLERELMPWSRPNEQLRCLKRMSRERIGLIRDRNALTNQLHALNHSFDAFRDSVERLKDRIALATKQLGEIEAQMRVLAESDPELSRRTKHAITIPGVNFVTAITVIAETDGFANVGNRRQLVSYVGLDVVMKESGTLSWRPHISKRGNAYIRAGLYMAAVSSIIHNKTLKLYFNRLKDNGKPGKTGIVALERKLLILIYTLYKNEKDFIPDYQ

SEQ ID NO: 479989 - protein, 336 aa, unidentified
MNIKRIGLDLAKQVFQLHAVDHQERVVLRKTLRRARMLTFFTRLEPCLIGIEACGSSHYWARELTRLGHTVRIIPPQFVKPYLKGNKNDANDAEAICEAVSRPGMRYVAIKSEAQQSMQAEHRVRARLIHDRTALSNEIRGMLGEFGFVLPAGLSALRKALPEILSQQEKWDNRFIRLLSELTEELQALDERLNRYDRRLNQLAQEDERIRRLQEIGGIGPVTASALVAAVGDAKQFKSGREMAAWLGLVPRQHSSGGKTKMGHISKRGDSYLRTLLIHGARAVLNVCDHKEDRRSRWLQSVAERRNRNIATVAMANKNARIAWSVLSRGEEYRVM

SEQ ID NO: 479990 - protein, 422 aa, unidentified
MNAQEADVYSIYVGIDWADKKHDVCICPKDSDTREFDVIPHRAEVIEAWVKDLHQQYGGRIAIAVELSKGPIVSALQKYDFIDLFPVNPSTLAKYREAFQPSKAKDDPTDAELAVDMLLRHPEHFKVLKPQSPEMRALATMVEQRRRLVNEQGRITNRLRSALKQYYPQVLEWFEHIDTPLFCAFVKRWPTLTQARRARANTLKQFFHEHHMYREDVVKRRRKAINAASPLTLDEAVIVPYRMQVLVLVEQLELMFKAIDQFDGAIAKLSSQHSDYALFQALPGAGPSLTPRLMVAFGEQRERFSSAADVQKLSGIAPVTERSGQKHWVHWRLQCPTFMRQTFVEWAAQTINKSYWAGAYYRQQRDKGSTYQAAVRSLAFKWIRILYRCWQTGVAYDESRYLKALERRGSPLVKKREVLETA

SEQ ID NO: 479991 - protein, 343 aa, unidentified
MQTVTTIGLDIAKSVFQVHGVDAEGNAILRRQLKRRYVLAFFQKLPPCLVGIEACASSHHWSRELQALGHTVRLMPPAYVKPYVKRHKNDATDAEAICEAVTRPNMRFVSTKTPEQQSCLTLHRTRHLFIRQQTSVINAIRAHLAEFGIVAPVGRQGVEQLLGVVSDASDKRLPDVARACVAALGAQLQRLKVQILEFDRMIRAWHRSSEASRRLDDIPGVGPALATALVASIADPKAFRSGRDFSAWIGLVPKQNSSGGKDKLGNISKRGDRYLRGLFTAGALAVIRCAKIHGTKHRPWLTALLARRPTKVAAIALANKIARMAWAMMAKGERYKEPAALAA

SEQ ID NO: 479992 - protein, 339 aa, unidentified
MQLYAGLDLHSRNTYIGIMDKEFKRVFNKRISNKLPLVLATLEPFQDQLKGIVVESTFNWYWLIDGLMDAGYDCVHLANPSAIKQYEGIKHTDDQHDAFFLAQMLILGILPEGYIYPKENRPVRDLARKRLFLVRHKTSHILSLQSLIARCSAKRVSANEIRKFTVADLQQLLGDEHIVLSAQANLDTIMFLKQQIRQLEKAITKKIKLNKAFQHLLTVPGIGLILAMTIMLEVGDIGRFPQVGNFASYSRTVSSQRLSDGKSKGHGNRKNGNRYLSWAFTEAAHLSRRYNEDFRSYYNRKVAHANTSLATKALSNKLARICYYIMRDQVPFRKELLSH

SEQ ID NO: 479993 - protein, 388 aa, unidentified
MIYVGIDVAKLNHFASAISSDGEELIKPFKFTNDADGFQLLSSHLDSLPDDSFIIGLESTAHYGDNLVRFLVNEGHKVCVINPIQTSTLRKNNIRKTKTDKVDTYIIAKALMLQQFHRFITVSDINLMDLKALGRFRQKSLKQRTRLKIQLKTYVDETFPELQYFFKSGLHQRAVYALLKEAPSARDVASMHLTHLAHLLEVASHGHFKKETASQLRVLARKSVGSPDSALSIQVVHAIEQIELLDSQIDHVEAEMTDIMKYLDSVIMSIPGIGYINGGMILGEIGDIRRFPGPKQLLAFAGLDPSVYQSGNFQAKRTRMSKRGSKVLRYALVNAAHNVVKNNSTFKAYYDAKMAEGRTHYNALGHCAGKLVRIIFKMLTDNVEFNLA

SEQ ID NO: 479994 - protein, 417 aa, unidentified
MTDLVPPTVFERYVAVDLHKDYVVVGGVNARLEVVLTPRRIELEAWPRWAQANLRKTDALVVESTSNAWDFYDGVAPLVGQAVVANPRLVKLIASGRVKTDKVDTLALAKLLATGFIPTVWVPPLEVREARGLLAHRRRLVRNRTMVTNRLQSVLQRHNLPAPAGEPFSAANRPWWDTLPVSSTEQLRVRQDLATLAHLAQQITELDTEVVRLSTQAPWADHVPYVIQLPGFSVLLTMTVLAAIGDVTRFESAKKLVGYAGLGASVHASGATHRTGGITKTGRRELRWALVEAAWSAVRYHPYWKAEFERLARRMADNKAIVAIARKLLVAIWHVLTEQVADRHADEKMVATKLMRWSWKLTDEQRGGLTSRQFIRLQLMRLQLGEDLTHLKYGNMPRRIASAEEVLAVRPELRDQG

SEQ ID NO: 479995 - protein, 338 aa, unidentified
MKLYGAIDLHSNNNVTVLIDEQDKVVYEKRLPNDLGLIAQQLSAYQSSLEGIVIESTYNWYWLVDGLMDKGHQIHLANTAAIQQYEGLKHTDDTSDARWLAHILRLGILPEGYIYPKEERAVRDLLRKRGQLVRQRTANLLSIQNLITRNTGSSMNSNRIKTLEPEQVDELLADGDRALAVKANVAMVQCANGQIEILERTVRDRVKLRPEFCFLKTVPGIGQTLALTIMLETGDIGRFAGVGNYASYCRCVGSQKLSNGKKKGKGNTKNGNKYLSWAFVEAANFAIRFSSRINSFYQRKKAKSHGVVAIKAVAHKLCRACYYIMKNRVAFDVTKAFA

SEQ ID NO: 479996 - protein, 403 aa, unidentified
MNVNCVGIDVSKGKSMIAVMRPLGEMVIPPFEVGHTDAELCKLSRRLGDLDGETRVVMEATGNYHLPVASFLYDSGFYVSVVNAMLVHGYGNNSLRRAKTDKKDAIKLANYGLDHWLALPRYIPEDEVRLMLKTTYRQYQQCAKVQTMLKNNLISLLDTAFPDANRLFASPARADGSEKWVDFVAAFPHCECVCGLSERAFTAKYQKWCKKHGYNFSQDKALDIYASACGHFSVMPKTGTAKLLVEQAVSQLRAASTALVALRNEMQSLAASLPEYPVVMGMFGVGPALGPQLMAEIGDVRRFHSKKALVAFAGIDAPPYQSGQMEVRSRSISKRGSSALRRTLFLVMSVILQRSPTDNPVYQFMDKKRAEGKPYLVYMMASANKFLRIYYATVKQHLDSLEA

SEQ ID NO: 479997 - protein, 499 aa, unidentified
MPSRRKGKNTMTTAGKQPSKKEGFDPQRSALKRKARGSCCFEGKGKRRKSKLSVINPDAAGVDVGAQAHYVAVPEDRAAVSVRSFGTCTAQLDEIVQWLKDCGIKTVAMESTGVYWIPLFQKLEEAGFEVLLVDARQAKHVPGRKSDVQDCRWMQQLHSYGLLRAAFRPEDGICRLRTFQRHRKNLVECAGMWIQRMEKALNEMNLQLHHVLSDITGQSGLAILDAIVAGERDPSKLASLAHYRVKKSQAQIEAALRGDYRPELLFVLRQSLENYRQMQQQILQCDLSVEKQLAAMSHQSKPSEHLESKAQAEDSAHCRPGKEKPKNGLESTLAAHLKRILGVDLTTLPGLNVLASLTLLSEIGTNMTKWRNHKAFVSWLGLSPNNKISGQRVLSSRTRKVVNRAATTLRLAAMLVGKTDTALGSFYRRKRAQLGAPKAITATARKLACLIYHLIKNGQAYKEPDLRTYELKYQEQILQSLRKRAKSMGFDLVELPKAA

SEQ ID NO: 479998 - protein, 433 aa, unidentified
MLKLNYMSTLFVGIDVSSKTNAVYAMDFEENKYISSSFGNNQPGADQLVNMIAECMQKHKNLDTVLIVLESTSVYSVHISNFLSTSEVLMPYKPYVFCVNPKATSNYRKSYIGMEKTDPTDAYLIADFGRVGRTKKLEPWRGGQFISLKRLTRHRMHLSECITREKTYMVSNLYLKFSELQLLEGDDKPFGSLYGATSSAVLTEFLSPQEIIDMPEEELLTFLAGKSRNRISDLSKTSELLRKAARDSYRLDKCMYEPLSISLASSFNCIHAYQKEIKLIEQAIEKCINGMNPNALLILQSIPGIGPIWASGILSEIGDITVFHSSDALAKYAGLYWPKGDSGDFTSEDNKMSKAGNPYLRCYLGEAANSVRKHIPEYADFYARKYAEVTKHQHKRALALTSRKLVRLVFGLLAKNQLYTGEKLDTEYNIESN

SEQ ID NO: 479999 - protein, 402 aa, unidentified
MRVGIDAHKMKCTTVMFDGDSVTGSFDFQTTRQGVYEFMEKVPEGSITVIESSTTGKVLSRMLSGKYEVHMVAPPERKVSIKTDRRDAERIVMEDMLNYLRRCYIPSQYIENIRFVVTQQIQIGRRIARVKNQVHALLEMNMIQHELDDMADIFGVKGLNKLSKIQLPRHDMIALARYLEELKMYVSHHRQLDTEIARIAASDNDVQLLMTIPGINCFTAVAIKSRIGDDVSRFATKKHLCSYAGVVPKANNSGEYISEHNHVKQGDIVLKYALTCAVRGAVLANKNSSIKLFYRKISKKGVSPQKAQIAAARKMACTVWKVLSSKQPYTEQDDHMTKRKMKIMSSKAMRIIPTSVMPSKVSELVRNLADDIDILGKYHEDSGYIIGKDLSNKNRLKEDILR

SEQ ID NO: 480000 - protein, 344 aa, unidentified
MTIVEERTAITAGVDTHSEVHVAAALDPVGGLLGTREFPATAAGYAGLLGWLAKFGDVALAGVEGTGSYGAGLARHLAKRGVRVVEAGRADRQDRRRQGKSDPLDAVSAARAALSGRASGQPKGRDGAVEAIRALMVAKRSARNERTPANGQARALILTGPDELRARFAGLRAAALAEAVAALRPRPGDAAEYSLRVALRELGRRVQFLEDQTGRLDDLIVPLVTARAPGLLGLYGIGPDTAALLLIAAGDQPERLRSEAAWAHMCAVAPIPASSGKTRRHRLNRGGNREASHALWRIVITRMSAHPETRAYVQRRTAEGLPEKEIIRCLKRYVAREVCPYLRG

SEQ ID NO: 480001 - protein, 335 aa, unidentified
MKEITTVGVDLAKVVFTVHAVDAVGRVVLRKTVRREKLMELIAGLAPCLIGMEACGGAHEWARRFEACGHRVGIMMARFVAPYRKSSKNDGNDAEAICEAVARPTMRFVPVKSAEQQAVLSLHRVRQGFIEQRTATINRIRGLLAEFGMVLPQRADQVRRAAVVAAEDLPVLARAAIADLREHLAYLDHWIDRYEQQLVALAKQHEPARRLQQVSGVGPLTASAITASIASGHEFANGRQFAAWLGLVPRQYSTGGKTKLGRITKRGDAYLRTLLMLGARAVLQTAAQKTDRLSRWALALRARRGYHRAIIAVAAKNARIIWALLSKNREFALPA

SEQ ID NO: 480002 - protein, 351 aa, unidentified
MSQKLDTSIAVIGIDIGKNSFHVVGHDRRGAIVLRQKWSRRQVEARLANMPRCLIGMEACVGAHHLSRKLTSLGHDARLMPAKYVRPYSRGQKNDFRDAEAITEAVQRPTMKFVATKTAEQLDLQALHRVRERLVSQRTGITNQIRAFLLERGVAVRQGLRFLRAELPRILATPSDALSPRMLRVIEDLAGDWRRLDERIEGLSSEIEILARRDAGCERLMSVPGIGPIISSAMVAAIGTGDGFTKGRDFAAWLGLVPKQISTGDRTILGKISKRGNRYLRVLFVQAAWVVLIKPKSWQRHGLKPWLEAAKKRLHHNVLAIALANKLARIAWSVLAHSRTFEARRFDEVAA

SEQ ID NO: 480003 - protein, 412 aa, unidentified
MKRIRERVAGLDVHRDTVVACCQVKHPDRSIEVTKQSFATTAKGLGELAAWLSDAGVDTVAMEATGVYWKPVYYCLEGLFDELWLCNAQHVKNVPGRKTDLSDAEWLADVAAHGMVRPSFVPPPEIRELRDVTRYRKTQVEARAKEIQRLEKTLQDAGIKLSSVASKVWSKSSREMIEAMIEGERDPKVLAQMAKSRLRAKIPQLEEAFSGRFGSHHALVCRQVIEHIDFLDRSIATLTADVTDRMCPFESAITILCSIPGVSRTTAEVMIAEMGVDMTRFPTSGHLCAWAGVAPASHESAGKRQPVGTRHGSTWLQRALVEAARGASRTKGTYLSAQYSRLARRRGSNKATIAVAHTILDVSWHLLTNGALYDDPGARFFELRHDPALEAKRLQRRIEALGFEVIIGPAAA

SEQ ID NO: 480004 - protein, 349 aa, unidentified
MSSVSSEPVVVIGGVDTHADVHVVAACDRLGAVLGTASFATTAAGYRSLLRFLRSFGQLQAVGVEGTGSYGSGLARHLAEHAVMVVEVSRPNRQVRRAHGKSDIVDAIAAARAVISGQARVTPKSHNGTVEALRALQTVHRSARKGRTQALNQLHALVLTAPDPIRDQLRQLPNRQLVSTCAGYRPADNDDLIAVTKTALRELAGRIRDLEAQLARLERRRRRLVTTTAPALLAIYGVGPDTATTLLLAAGDNPDRLGSDRSFAALLGASPIQASSGKTQRHRLNRGGDRHGNSALWTIVITRMANQPATRAYVERRTKEGMSSPEIIRCLKRYVAREVFNALPRETLT

SEQ ID NO: 480005 - protein, 361 aa, unidentified
MRHYVGLDVSMKETFICIVDETGKIFHQGKSKTDPDLIAEYLKKLQLSLDKVGIESGSLSHWLVEELRQLEIPALCIDARKMATVLAIQINKTDKNDARGIADAMRCNLYREVTQKSQNAIELGTLLGSRRLVVQQKVQLTNAVRGFLKTYGLRLGPCGDKTFCQKVKEKLSDKYALARKGIEGLLNCFEKICKELKKLILEVEELARKDEDVKRLMTIPGVGAITAVSYKMEIDDPRRFKNSRAVGAYLGMSPKQYSSGETKRQGRISKCGSSEVRFLLNEAATVLLTRSQRWSKLKAWGLKIHRKHGFKKAAMAVGRKLAVIMHRVLIDKTDFIYGEPKEEKLKAQDKEIGAIGLARAM

SEQ ID NO: 480006 - protein, 370 aa, unidentified
MKKNSTRTQSPKRAAARNTGPITIGLDLGDKTSRYSVVGDHGELVSEGSVATTRKAMAQRFGGLKRCRIAMEVGTHSPWLSRMLTGLGFEVIVANARQVQLISASSRKNDRMDAHLLARLARVDPELLRPIRHRSERAQANLMTIRVRAELVEARTRLVNAARGFTKALGERLPACDTDSLGMEKLEALPPALREGLQPLLEQIEALTAQIKKLEGKIEQIARIEYPETQLLTQVHGVGTLIALTFVLTVEDRERFQKSRDVGCYLGLRPKQSESGQSQPQLRITKEGDRYLRTLLVQGAHLILNRRGPDTDLKRWGLKLAQRGGKNAKKRAIVAVARKLAVLLHRLWVCGEVYEPLRNSRPAATSNQAA

SEQ ID NO: 480007 - protein, 348 aa, unidentified
METIVRIGLDTSKSVFQLHGVDGMEQPVLRRKLRRSQVLEFFRRLPPAFVAMEACGASHYWARELRSLGHEVAMIPPQYVKPYVQRGKSDAADAEAICEAASRPKLRKNFVPIKSPEQQGAQMLTRVRSQFIGRRTQLANSIRGYAAEFGFTAPKGLSRLHQLLIDIRADETVPDLALELVESLAAELARVDDQIAKLDKKLMHLHRSSETSRRLAAIPGIGPIGATLLSIKVVDAGGFKSARNFAAWLGLTPKNHSTAGKNRLGVITRAGDGMLRTVLVAGATAVIADVRRREGRSWPWLKDMIARKPPKLVAIALANKLARIAWKLMVSGEHYRPAGSVIPMPTPA

SEQ ID NO: 480008 - protein, 408 aa, unidentified
MNTLYVGIDVSSKSNVVYLMLPNGDKHSNFSVANSHEGSTLLVKKIYSALTSHSLDTVLIGLEATSVYGDNLVYFLREDATLAPFNRKIHVLNPKQVKKFHDTYNDLPKNDYVDSFVIADCLRFGRINKEVYMGEYRYKALQNLTRARFFAVQNLVKEKQRFMNVLFKKYSTMTQEKVFSDAFSTTALAVYDEFESAEALANMDLHELTDFIIEKGKNRFPDPDAVAKAIQKAARSSYRLPKTVNDSVNQVLSISITSMKALESQIKEFDKAIKALMELLPNVLISIPGIGPVYSAGIMAEIGDINRFDNQASLAKYAGLAWKQHQSGGFEAEVTRLIPSGNRFLKYYLCEAAFSLVRCDKEYSDFYHLKYKEVNRYQHKRALALTARKFVRLVFRLLKDNRLYCPAK

SEQ ID NO: 480009 - protein, 341 aa, unidentified
MQTTKYFIGFDISADDFSASCITSPDNLVFSTQKFSNNIDGTNEFLALLSKNNIKQSDVIICMEATGVYSENISYFLASKGFTISIEAPHKIKNKTKDSPRKNDFIDALSITEYAYRYSDKLPIWKPNNEIIEQIQVLLTTREHLSVQMIANVNALKTLKHKYYQTPLANQIYEQTISKLKEHIKQIDQEIKTLIDKDDSFKNNISLAKSVPGVGLLLAANLLVLTKGFKEQLDYKHIASYSGICPYEQISGTSLHKPPRSRMCGPAKIRKLLYLAALSVRTHNQNFKKYFLRKVAEGKNKRLVLNNIENKLLKIICAVINSGTAYTENFKSINPELLKTA

SEQ ID NO: 480010 - protein, 430 aa, unidentified
MKSNTQNAKIEAITEKTLVLGIDVGSETHYARAFDYRGIEYSKKPFKFSNTEAGFVTFKEWILDLKDRHEKEKVVPGMEPTGHYWFNLGKFLQDNEMKPVLVNPHHVKKSKELDDNNPTKNDRKDPKVIAGLVREGRYMIPYLPDGVYADLRTASNIRFQLQAELTRIQNRISRWFNIYFPEYKTVYGKPDAKSGMLILKAAPLPEDILTLGIDGVNQIWRDAKLRAVGKARAKTLIEAAEHSVGSKEGAVSARMEIRMLLEDYESRNMRLQEVMVLIEELVKGIPMAEKLLEIKGVGIRTVSGFLAEVGDISRFNNPKELQKLAGLALVENSSGKHKGGTTISRRGRKRLRYLLFEAAMSLVAKNPEFRELHNYYTTRRRNPLKKMQSLMAVATKLIRVFYAMLTKGVDYDPKKMVSDIRRPEAYLQAA

SEQ ID NO: 480011 - protein, 341 aa, unidentified
MNIKTLGIDIGKSTFHLVGLDEHDQPALKKKLSRAPLMRFMANLPPCLVGMEACPGSQHLARRFSEHGHRVRLMPAQFVKPYVKSNKNDFLDAEAMVEAVTRPSMRFVPVKTPAQQDLQALHRVRSGFVAQRTAGINQLRAFLLEYGLTIAQGIPAVRRALPEMLEDANNGLSDRMRGLLHALWQSLLELEAKVKALTVEIDTLAQQDEACRRLLTIPGVGPLTATALVAAIGDGKQFRRGRDLAAWLGLVPRQHSTGGKPRLLGISKRGNTYVRTLFIHGARAVLQRGAQRTDRLGPWLRGLRRRTHHNVATVALANKLARIAWAVLVHGTPYQPEITAR

SEQ ID NO: 480012 - protein, 388 aa, unidentified
MNVEADKSEPFTAIRTDLGAIFVSLELSRSSWLITSLSPGGGEKMSKHSVPGGDFAGLMERFAQLQEKARLRTGQSFRIIVVQEAGLDGFWIHRALQNEGIESHVVDAASIATSRRRRRAKTDKIDGETLVRVLLAYKRGEPRVCAMVKAPTPGEEDRRHLCRERKALTAERVRHVNRIKGLLFSQGISRYQPLRRDRRERLEELQTGEGRAFPQHLKALVNRELDRLELLLKQIKTVEAARDALLAVGQTAKPAPAAMLLGIRGIGPEFAAILWSEGLFRHFENRRQIAAYAGLAPTPWQSGAVDREQGVSKAGNPRLRTTLIQLAWLWLRNQPRSALSVWFHERVSRNGGRLRKTTIVALARKLLVALWKYVTAGVVIEGVRMKVA

SEQ ID NO: 480013 - protein, 410 aa, unidentified
MDLLYQRCCGLDVHKDTVVGCLRLVSDGNVTTEVRTFKTTTAALLQLSAWLAANNCTHVAMEATGVYWKPVWHILDDGEFELVLANPTHVKNVPGRKTDVNDAMWLAELLAHGLIRSSFVPDTQTQEMRSLLRTRKQLIREQSSHTLRVQKTLEDANIKLDSVLSDLMGQSGRAMIEALIAGETNPAKLASLANRRVRASHEELREALRGRVTKNHRFLLRLHLNQIDALDAAIATVDVQVEKMLGPFRTAVELIMSVPGIKNLSAQVIVSEIGTDMSRFPSDQHLISWAGICPRNDESAGKRRSNRLRKGAPWLKTTLVQCAWAAKNKKDSYLQAQFYRIKARRGPKKAIMAVAASILTAIYHMLKDGTVYQDLGRKHFDRRSHDQQKRSLVKRLADLGYTVEVKPLTP

SEQ ID NO: 480014 - protein, 375 aa, unidentified
MEPSKSRESCEILVTMKTTIKPDRSLVETKEEHIIKLGLDVHSEQITACRQEDALLPQPSQKMSWEKVLKWIKDQVSCGTKVFSCYEAGPCGYGLHRMLTAMGVTNIVVAPQRWDDQGKRVKTDKRDARELVARLDRYVRGNKNVFSVVRVPTEEEEQRRSMVRQRGRVLKELNRCILRGRGLLLAQGFRAPTGWWKPNPWLKFAVSLPDWLREEVGLWQSMACGYETELVALSRKVEELSKGQPIPKEVGLLTASLLESEILDWHRFKNRRQVASYTGLCPSENSSGGKRKQGSISKHGNPRVRCHLVEAVWRLQMWQPAYPPIRKLKEASGGRVRKRMAVAAARRLAIDLWRIKTGQCSAQELGLQLAGSQPN

SEQ ID NO: 480015 - protein, 375 aa, unidentified
MKEKLRFLGLDVHAETIAAAVAEPDGEVRSLGTIPNGVESVRKLVKKLGPVEKLRACYEAGPTGYVLYWQLAELGVKCEVIAPSLVPVKAGDRVKTDRRDAEKLARSYRSGDLTAVWVPDEGSEALRDLVRAREAAKQDQLRARHRLSKFLLRSGQRPPSGIRPWTRPYLIWVAQLRFTQMAQEATRIDYLHEVEHMRERVARLEQAIAEAVKLASPALQQVIHDLQALRGIADISAVTIAAELGQVSRFDSARQLMGYCGAVPSEDSSGKRTRRGSITKTGNAHLRRIVVEAAWSYHRPPCIWYGLRKRQQSISEEVKEIAWKAQHRLHKRYMRLAARGKDKRKIVTAVGRELLGFIWAIGTRAETTVRQRITA

SEQ ID NO: 480016 - protein, 319 aa, unidentified
MAQNDLVVAGIDVAKDKVDVCIRALSLRCTFASTAEGRRELASWLRRQKVGKAVMEASGGYERDWAKALRGAKIEVRIVDPKRVRSFAQSAGRLAKNDTIDAEMIAWFAETFDEARSQAYDATREQLHQMVNARQALKGMQAKLESQGEHALPAAVQRMHARILKTITVELVKFEAAIAAMIQATPRFTELAEIIESVPGIGRTTSAAIIAAMPELGQANNKIVAALLGVAPYDDDSGRRRGERHIKGGRRRTRNVFYMACLGAATQHNPVLKAFYDRLVAKGKEKKVALIACMRKLISILNIMIERRQKWDASRYALS

SEQ ID NO: 480017 - protein, 412 aa, unidentified
MTATNQFAAHVGLDWADKKHDVCVQFKNGERTFHVIEHTPEALDVWLTELHQKVKGRIAIAVELKKGPVVYALQKYPFITVFPVHALSLARYRQAFSPSGAKDDPQDAELALELMLRYPQKIKAIEPDNADIRLLQQLVEQRRQLVEDKRRFVNRIINTLKQYYPQPLEWFSHRGSLLLCELIIRWPSLQQLKRARRDTIRNFLNAKGGRAMALTEQRVASIDNAIPLTTDPSVIEANALMATALATQIKVVSEIIKTYDERIETLFDTLPDAGLFKSLPGMGPCMGPRMLAALGDNRDRFNSAEEIQNYAGIAPVTERSGQKSWVHWRWQCAKFVRQTFVEWAAKTVNSSYWAKLYYQGLREKGKSHQSAIRALAFKWIRIIYRCWKARTQYDEAKYLLALEARHSPLLKP

SEQ ID NO: 480018 - protein, 349 aa, unidentified
MTLYIGVDLHPHQQTIAWCDTRTGETGTADLENDPETVRQFYSTLPESATVGIEASARARWFENMLFETGHKLFVGNPVLIRKRATSRHKSDQRDAELILQLLLREEFPNIWRRPLESESILDMLRLRQSLVRQRTGIYNRLQALAHDVGLPKGRIRTKSFQKLLKGVLMDEVSSIRREQLFSLVEKLTEQIGELDEWLKKKADNDSSVQLLLSQKGVGNLTALATVHTLGDVSRFARLSKQIASFAGLDPVEKSSAGKTRFGSISKGGSRLLRHQLGLSAQIACRSDAKLKSFYKRLSRKKPKPVAKTAAARKLLVKLSIMLRDQITADEFDQRGRTVGNARLTTDLK

SEQ ID NO: 480019 - protein, 361 aa, unidentified
MHATTVAVDLAKSVFQIAVADDKWKVVEQLRLTRSQFERWFHNRDVGLVIMEACGSAHHWGRWLNGQGIEVKLLPAAYIRAYVKRNKTDAADACALLEAARCADIVPVRVKSVEQQALQGLHRIRSRWMGTRTSRINTLRGFCREFGLVVPQGARTGVEAMSRALADPNSAIPLLIRESMKLLIEEIRLLELRTAQLEKELTSLARQSPACTELLTIPGIGLLTATAMVAATGGSVSHFKDARHFASWFGLTPKEFSSGSSRKLGRISKKGDRYLRMLLTHGARAILRAAELARRSGKVLDGLRTWATEIQARTHHNKAACALANKLARVCYAVLRDHTPYGNPQPRQEKKLTRTAFAIAA

SEQ ID NO: 480020 - protein, 338 aa, unidentified
MRYFVGIDLHSDSNYTGVIDKKDSRIFGKKLPNELGVILKELKPFKKEIQGIVVESTYNWYWLVDGLQEAKYKVHLANPAAMQQYSGMKYTDDKWDSYWLAHMLRLGILPEGYIYPKEIRPVRDLLRKRTMLVRHRTAHVLSLQNMVNRNTGRKLKVNDAKKLSEEEISKQFEDGHLIMAVQSDKAVIDFFNEQIERIEKVVLKEVKLRYPYKELVTVPGIGEILGITIMLETGDINRFPTVSDYSSYCRCVSSKKVSNGKKKGEGNKKNGNKYLAWAYVEAANFMRRYSEPARSWHQRKASKTNQIVATKALSNKIAKACYFIIKDQKPFDPKKLFQ

SEQ ID NO: 480021 - protein, 316 aa, unidentified
MSATTCFVGIDVAKAQLDIALRPTDERWAVANDDLGIAALVARLQALLPTLIVLEATGGYQRAVVAALAAAQLPVAVVNPRQARDFAKATGQLAKTDALDARALAHFAEAVRPTPRPLPDAQADELRALLARRRQLVTMRTAEQNRLGSAPSRLQTDIQAHITWLNERLARLGDDLDTTLRASPVWREREELLRSVPGIGPVCTRTLLLDLPELGTLSRQRLAALVGVAPLNRDSGTRRGSRMIWGGRAHVRATLYMSTLVAVRYNAVLKVFYERLRAVGKPAKVALTACMRKLLTILNAMLKQHAPWQVQEVSNA

SEQ ID NO: 480022 - protein, 358 aa, unidentified
MQRNKISFKGQKIFVGIDVHAKNWEVAIAPEVGITKRHSQKPSAKELFDFLKKNYPDGDYLAVYESGFSGYSTYYALTEVGIDCMVIHAADVPTTQYEEVMKTDRVDAVKLARSLKAGLLKGNYVPEKQYIDDRSVVRIRKTIQKQLSGYKSRVKHLLHCHGVEFPERFSKKQTHWSRAFITWLKNDVLLMSDTRASLDLLIKQVEVLRGTLLEATRQLRKMSQTERYKHRHDLLRTIPGIGLIVTICILTEVCDVKRFHNENEFAAYLGLIPTSHSSGEKTVHGEKTFRGNKQLGPMIIEAAWITIGRDAGLGAQYFQYKQRMEPQEAIVRIARKLSNIIFSVLKNEKEYVPYQTGN

SEQ ID NO: 480023 - protein, 434 aa, unidentified
MKKHLPVLDPMAAFIDVGSEHMHVSVGGDVPVVFGTMTSQLHALRDWLLAQGVHSVAMEATGVYWLPVYGVLEAARLDVRMVNGRQTRNAPGRKTDMHDAQWGATLHMHGLLRAGFVPTADIRRLQDYLRLRADHVCQAASCVQLMQKALERMNIKFHDAISDLTGVSGMAVMRAIVAGERNPAALLALCDVQIRRAKAELVIESLRGTWSEEHVFALEQALQSWDHYQRLIIDCDRRIQSVLPPHDPTQPKLPKTVKRGGTNAPHIDMLREILAQMCGGRDLTMIPAHTQYSALQLIGETGTDLSKWPTEKHFTSWTGLAPGNHDSGKRKGRVKRTRNRAGKLFCMMATSLVRSKHIALGAFYRRLAMRRGGLVAMKALARKLAAWYWRVMVKGDDYVEKGIAHYEEQVRKQKERALHRLAKELGRQLVPQPA

SEQ ID NO: 480024 - protein, 361 aa, unidentified
MLYRTSIGLDVHARSIAATAFIPETGEIVQKAFPYDAGKVAEWAKGMPQPARCACESGPTGFDLKRKLDKAGVPCVVGAVSKMLRPSGDRVKTDRRDATFLARMLAVGNIVEVAMPTEAMEAARDLARAREDCRHDLMRARHLLSKFLLRKGIVYPGKTAWTKAHREWLGRLEFADPCERLVFGEYLESVRSLELRRARLDRAIEERAAGEDMAPAVSALRCVRGISTVTAFSIAAEIGDFSRFPDARSFMSFVGLVPSESSSGESVSRGSITRTGNIHVRTLLVEAAWQHARPLRPMSAAAMGDAAGVPADVAEAAARANRRLHSRAAHLRGRGKPASVVNAAIARELAGFVWALARMAE

SEQ ID NO: 480025 - protein, 410 aa, unidentified
MHYYVGIDIAKSFHVACVVNQDDKIVKKSLKFNNDESGFDELLLLLNSIDEVSTFTIGMEATGIFFENLYLYLSEKGFNVILLNPYQTNRFREMDSMKKVKNDNIDALMIAALIKSGRYSKAYVSKDTYQSIKSLYRHKNSLLEEMKKHKRQIYTLLAVVFPEMEQVIKDLFNVTGLALLEKYPTAKHYHHASVERILKTFRGIKGNNFNEQKAQKLLKLAKSSIYQGNGVDERAYVIKSHIRVIKLLQEELKELENEMLKLFHQAPQLDSNEEQEVMDIIDNLRTIPGVSDKTIFALISECGDLSRFKNNSHFIGYLGLYPTLEQSGNKLSYGPIAKRGAKLAKKALYQAAIAAIRHNEELHKLFKDKVSQGRAKKEAVVIVARKLAHIILAIYKNNVAYNPKRVFMAS

SEQ ID NO: 480026 - protein, 412 aa, unidentified
MDVIHPRCAGLDISKKDAKVCVRIASPGRRRATETVTTWGSTTNQILTLRGHLVAEQVSCVVMEATGDYWKPFYYLLEDLEGVEVMLVNAREAKNLPGRKTDVSDATWLAQLGAHGLVRASFVPPQPIRELRDLTRTRTAITRERSREVQRLEKLLEDAGIKLSSVATDIVGVSGRAMLQALTDGERDPVVLADLAQRRLRAKTPQLVEALTGRFTDHHAFLVRMHLGLIDQHTAAIDELTERIEVVIEPFRGFCDLICSIPGISTTSAQVITAETGADMSRFPTAGHLASWAGVCPGHHESAGRTKSTHTRPGNPYLKAVLGTAAMNAARNKNSHLGARYRRLAARRSKGKALVAVQHTILVAIWHMAHTGALYDDLGADHYTRIEPIRTKRRAIRQLEQLGYNVTLQPAS

SEQ ID NO: 480027 - protein, 416 aa, unidentified
MTKTLYVGIDVASRSNTAQWMDPTGQALGKPWTFPNTLPGAQALETRVAEVLRQGAYEHVKIGLEATAFYDWHLADALAASALLRPWHPEVYRLNALRVARFRKAADEPDKTDRVDAAVIADFLRVGRNLPAPHVSGDPYLPLKRLTRYRFHLVGTLVRETSHFLTHLFLQCSGLAQANPLGRPLGATGCALIEAFPSAEALATLPVEELVTFLVQQGKNRFPDPAQMAQRVQQAARESYRLRPELARSEHFILANLIRTIRALKASLKEINKAIAEELAAFPNTLTTLPGVGPVLAAGILAELGDIRRFASDDQVAKLAGLVWKRHQSGQFEAQDRRMITSANKYLRYYLVEAANALRMHDASYRAFYEAKYQEVPKHQHKRALVLTARKLVRLVYALLTRGQIYRPAAVQPAGR

SEQ ID NO: 480028 - protein, 404 aa, unidentified
MIFVGIDWSEGHHDACMVDADGRVLTKGRVTEGVEGVAKLHEMVAAHAGDPSEVVVGIELDRGLLVGALVAAGYAVHAVNPLSVDRYRDRHRTSGAKSDPGDAKVLADLVRTDRHLHRQVAGDSELADAVKVLARAHQSLIWSRQRQLNQLRNALREFYPAALEAFGTDLASVDALAVLEVAPTPAEGRSLSISRIAAALKRGGRRQRITERAQEVKDALRSSQLEAPDVLARAYGDVVRSTVRIVREMTAQIETLAGELEASFEEHPDAEILRSLPGLGSVLGARVLAEFGDDPVRYADPKARKNYAGTSPITKASGRSKVALARFARNRRLADALQMWAFCSLGCSSGARGYYDAHRAKGQTHQRALRSLANRWVGILHGCLRDRQRYSEHLAWPVAQGAAA

SEQ ID NO: 480029 - protein, 422 aa, unidentified
MLEQTHDEQEIIQRVAALDIGKAELVCCVRVPDPKGGSRRLEEVKTYSTMTRSLQLMAERLLDLGVTRVVMEATSDYWRSPFYLLEAHGFQTWLVNAKDVKHLPGRPKTDRLDAVWLCKVAERQMLRPSFVPPVPIRRLRDVTRYRIALVSDRNREKNRVEKLLEDAQIKLSVVASDIFGMSGRDMMAALIAGERNPQALAQLARSRMRGKIPQLEEAFVGYFTDHHRFLLAKMLTRIDALNADIDELETEIEAQLAPFAPAVARLDEIPGVGVTAAAVIIAEVGLDMTRFPTPAHLSSWARFAPGVKESAGRKKGNGSTGHGDPYLARVLGEAAVGASRTNTFLGERYRRIARRRGKKKAVVAVGRSILVIVWYLLSDPEVGYHDLGPGFYDSRINPERKKRNHIRELEALGYKVTLQPAA

SEQ ID NO: 480030 - protein, 350 aa, unidentified
MLIIGADYHPSFQQIAFCNQDTGECGERRLNHSDGEADRFYRDLKQRGISVRVGMEATGYSRWFERLLAELGFELWIGNAAEIKTKRVRKQKTDREDARLLRKLLLEDRFPRIWVPSPENRDLRQLLWHRHRLVQMRTRIANQLQALAMNEGKRCRKLWSAQGRAELEKLQLAPWASRRRQELLELLDRLHPTIEELTTAVEKEAGKRPDVLRLMTHPGVGPLTALAYVLIIGTPERFPCGKQLGSYVGMIPSEDSSAAKQRLGHISKQGNSLLRFLLVEAAQAAARSNDAWCRRFSRLAIRRHRSIAKVAMGRRLAIRLYWMWRNQCEYSPKMEFGSYVGQLGLGHGVK

SEQ ID NO: 480031 - protein, 367 aa, unidentified
MTEHKAMYMAMELSAKKWHLCFWAGSAKRKITVDAGNLEGTLETIKLAKRKLGLAADCQVYSCYEAGRDGFWIHRFLTNSGINNQVVDSASIEVNRRQRRQKTDRLDADKLVTMLFRYWELKERGVWKIVKVPSKEQEDDRQLHRDIERLKAERKQHNVRIRSLLVKFGIKVKQPHRCDLSELRDWCGEPLPEDIAGVLIMEQQRLKLVINQIKELEEARDQRIAEPRNDSDRKAEKLIRLKAVGPVSGWCLAKEFFGWREFQNRKQVGGLAGLTGTHYSSGDSTRDQGISKAGNPRVRHLMVELAWTWLRLQPQSELSKWYNERYANSTKRMRRVGIVALARKLLIALWKYVEKDEIPEGAVLNRV

SEQ ID NO: 480032 - protein, 434 aa, unidentified
MTQRLQVGIDLSLKYNEVYLVSDQGHTLAQRRFRHNWPGFQALVSCLKSTLQAGDYAGLDIAAEATGLLWFHLFYHLAHTADLADANRRLYLLNPRVVKAFKRALAERDKCDPKDAQVIAERLRFARPAYEVCLDEHYLPLQRLTRYRYHLAHDLGRQKLYARTVALYLKASEYAVAPAFSDPFGATSRHILSEYATLDEIAKLDVADLAAQLDAVGRHRFAVPQANAQRLMSVAQHSYPLAECLVAPVNMIVKSLLDHIRFLEGQLGQLDAAIADEVAHLPGAALLRSVPGLGLVYAAGLLAEIGDVHRFLAGDKRDREGRLRPKTRDDGQAALAKYAGLWWPRADSGDFQAEDRHLAKSGNVYLRYYFIEAANSLRQHNAEYSAYYQRKYAESAKHKHWRATVLTARKLVRLVFKLLIDQEPYRPAEARHKP

SEQ ID NO: 480033 - protein, 415 aa, unidentified
MNSLYRRIAGLDVHRMLYVLTVLIELDDGTLEKHQRSFGGFKRDRRALVAWLMELGVGMVVMESTGIYWKSIYAALEQAGIPAMVVNARHVKNVPGRKTDMADSEWLAQLGRFGLVKPSFIPPEDLRELRLVSRYRQKLAQALAGEKNRLHKLLDDAGIKLGAVVADIDGVSARAMIAGLIEGKPTESLLDLAKGTLRGKRDDLGLSLEGDLSPRHRFVLAQIHGHIQYLESTLAKVDAKLIDAMAPYAEHWQFLQTLPGIDQISAAMILVEIGTDLSVFGDAGHFASWAALCPGNHESAGKRKTGKTRKGNHAIRYLLCEVANAARRTNSAFRSQYQSLVGRIGHKKAIIALAHKMIRTIFILFTRRQAYRDPGIDYQALVVDRNAPRWIQALKKYGYWPTTTANPAPAPTPAH

SEQ ID NO: 480034 - protein, 371 aa, unidentified
MEEFSKTLYVGLDVHKESIAVAYAPEERGTEVVSLGAIGTRQCDIDKLIRKLQSKGAPLVFVYEAGPCGYWLYRYLTRQGLNCHVVAPSLIPRKPGDRVKTDRRDAVLLARLMRSGDLTSIYVPRVEDEAVRDLSRAREASLGVLKDAKLRLKSFLLRHGHHYSGRANWNAAHLRYLAKVVCPTPAQQIVFQEYVRTVTERTELLQRLEAELLEQAKPWRLYPVVEALQALRGVQFTVAITTIAELGDLTRFDNPRQLMSYLGLTPSEYSSGDRRRLGGITKAGNGHARRVLIEAAKAYRHRAKISEQIQARQQHLPAPIRDIAWRAQVRLCGRYRKLLARGKHPNTIAAAVARELAAFMWAIARTQAVSV

SEQ ID NO: 480035 - protein, 345 aa, unidentified
MELHTIGIDLGKTVFHLVGLNLRGEVAVRKKFSRIQLLRFTANIHVELIGMEACGGAHFLGRALREQGHEVRLIPAQYVKPYVKTNKSDYIDAEAIAEAVARPTMRFVPIKTDDQLDLQSLHRVRERWVMRRTAVINQIRGLLLERGITLRKGRHHVHVALPLILEDADANLSGAVRMLLAQLKLDLDQLAVRIDEADAVIQKTAYENEACRRLVAIPGIGPVTATALIAAIGNGGAFHKGREFAAWMGVVPGEHSTGGQQKLLGISKRGNSYLRRLFVQGARAVLQQRTKQSSGLSTWLAQLTSRTHRNVAAVALANKLARIAWAVLAKGEQYRPSVLADVAAA

SEQ ID NO: 480036 - protein, 419 aa, unidentified
MNKLNVGMDVSQKDAKVYILDQDGNEATKRFAVDNNPAGAETIASKILECCRKFSTDKVFIGLESTSVYGWHLQFYLADHLGLKPYDPMIISFNAKIIDAFKKSLGNLEKNDWIDAFTIAERLRFGRLPKTCPVDFRYLALQRLTRHRFHIVDNIVREKNYYLSNLFLKFSGLCQNEVFGSNFGATATDLFDEFLTLDDIAARPLDELVDFMAEHGKDLFSDPKATAVALKDAVRKSYRMNATVDNSLNFVIKSCLDNIQVLEKQKKAAEKAIAIEVAGFNNQYLCLTSVKGIGPTIAAGLISEIGGISRFEDDNALAKFSGLYWSEHQSADFTAEDTFVKRTGNEYLRYYFTQAADQLRKYNPEYSQFYSRKYKEARTHKHKRALVLTARKAVRLIFALLREEKLYKPPVRKGGIDEN

SEQ ID NO: 480037 - protein, 404 aa, unidentified
MWYAGIDWADDHHDAIVVDDGGRVVLTLRVSHTPAGLARLTTALEQICGATAKEQLVCIVETNRGLLITALLEAGFPVYPVNPKTVDRRRNAAGVKTDQIDAYLLAKTGRSDLADLRRLRPDSPLIQELKALTRDQDSLIQSQTRLLNQLTACLKAYYPIALELFSKLHQRSTIAFLRAYPTPEDARAASVEAIAAILKAAGHTRAAQAAATLHQQLHQPHLVADAVTTRTKARLLLALLAQLQPVMDQIAEYDQEIERLFLSHADSALFASLPRAGKRLAPRLLAEIGDERTRYADAAHLQALAGTAPVCFESGKYAKAHRRYACLKPLRNAMQHFAWQSTLQEPWARAYYQRKRTEGKSHSVAIRTLANVWLRIIYAMWRDRTPYVSATFEAAQQQKLRQAA

SEQ ID NO: 480038 - protein, 340 aa, unidentified
MRIIGCDLHTAKQTIAMLDRDTGEVSEQTLIHDGETVREFYAAIPKPAMVGIEATGSMGWFVRLMEELGVTCRVGHPAAIRTAEPRRQKHDRRDAQLLLRLLLEDRFPAIWMPTAAQRDLRALLLHRHQWVRMRTRVQHALQAIALGQGVRRGGTLWSIQGQAVLAALPLLPHATDRRDALQALYQQLDAHVERLDEQVGAIAQQQASATVLMTHPGVGPVTALATEVFLGDPSRFPNGKALASYVGLIPSEYSSGARQRLGHLTKQGNPFLRFLWGEAVLGAVRRDPELQRFFRRKLAQKGLGKARVAAARKLGIRLWIMLRDQITYNEFCRRRQRRPT

SEQ ID NO: 480039 - protein, 390 aa, unidentified
MIYAGIDVAKDKHDCIIVDSNGKILSQAFTVSNNRQGFDELFAKFKTHSKDLSKLKVGLEATGHYSDNLLEFLIANDLPTTVINPLHTNLYRKGLSLRKTKTDKVDAHSIVTMLRTECLQPYSQSSYHVRELKSLTRYRFSLVQDCAKLKSSYARLCVILFPELEKLVPSLHMASVYALLAELPNARAICECHLTRLTNLLSKASKGRYSKVKAIEIRNAAKNSIGSYSEVKSLELQQTIQLIRMMEKQIEQIEATINPIVDSLHSPIMTIPGIGYRMAAIIIAETGNFAYFNKAEKVLAFAGLEPSVYQSGQLTSTHAKMVKRGSKYLRYALFNAAKYVCHWDKGFRQYLKKKRSEGKPYNVAVSHAAKKLTRVIFHLVKTNQPFISQA

SEQ ID NO: 480040 - protein, 342 aa, unidentified
MEVDVLGIDLAKRVFQLHGASKTGIVLHRSKVSRPSFLEAVRRLNPKLVVMEACSSAHHWARVLQRQGFEVRLISPQYVAPFVKTNKNDRNDAEAIVEAASRPAMRFVSIKTVEQQDLQALHRLRQLLVHQRTAIINQVRGVLAERGIVVAQSPAAFHRAMPTVLAGQDDELSQFCRGLLVELLEHLKSVEEKIDSCDARVKAFMASSQACKRIGEIDGVGPLTATAIVAAVGDASEFRNGRHLAAWLGLVPRQYSSGGKSKLYGISKRGDTYLRTLLIHGARAVLRYVVGKTDAQSRWLQQLIERRGYNRAAVAVANKNARIIQALLSSERTYVRKAAVGS

SEQ ID NO: 480041 - protein, 345 aa, unidentified
MMVTLGTDAHKKSHTIVAVDDVGAEIASVTVAATPQGHMRLVKWAAQYEQRRWAIEDCRALSRRLEADLLRIGDQVVRVPPKLMAGVRRSARTRGKSDPIDALAVARAALREPGLPVARLDGPSREVRLLVDYRESLVKDRTATQNRLRWRLHELEPGYDPPSGSLNRYKTLDHIDQLLAAHSSMVAGLAQREVTRIRELTREANQLERDITQRVTDLVPSLLKIPGCGALSAAKLIGEAADIARFKSRDAYAMWAGVAPIPVWSANPQRFRLNRGGNRQTNAALHRIAITQLRIHPDAQAFIKRRLETGSTKREALRLLKRKLANVVYRTLLADTQQPALATAA

SEQ ID NO: 480042 - protein, 372 aa, unidentified
MNYNTVYVGMDVHKESFTLCSCKYEDEKASHYQRTPASYKNVLRYLAFLRTIYGEYTRFVCGYEAGCLGYSLYHQLENFNVECVILAPTTMLEQRSKRRIKTDKRDAEIIARSLAQHNYSPVHIPTETDNQTKEFIRMRDDHKAELKKIKQQILSFCLRQGYQYDGSGNWTAKHVKWLRSLKTEGLYKEILDEYLLTYTILTDKLNRLDQRIEELASKEEYKESVSKLTCFLGIKIHTALSVIVEVGDFQRFVSARKFAGYLGLVPGQHSSGDDRNGLGITKAGNTHVRRLLVESAQSYTRGKIGYKSRVLRSRQAGNSPQVINYADRANERLRRRYYKMVLKDGKKYNIAKTAIARELACFIWGMMTDNIY

SEQ ID NO: 480043 - protein, 341 aa, unidentified
MEEYIGFDVSMKETAVSIRRDGKRIWRGKCASDPRALADLVRKRAPHAKRVVFETGPLSVWFFHALQAEGVPAICIDARHAKAALDMAPNKTDANDADRLAHLAEVGFFREVRVKGFESMLSRTRMAARNRLVRISVELSNQIRGLMKTFGLIVPSAKEGKFDEHVCRLLDGRGDLAPIVMPILEAWRAIRVRAAELGRQLLADARQSQACQLLMSIPGVGAITATAFTSAIEDPANFRKSRSVGAWIGLTTQRYQSGEVDYDGHISRRGDAHLRGLLYEAATVIITRTSAESDLRSWGLKLREKIGFKRAAVAVARKLAVIMHAMLVSGELFQRKADIAI

SEQ ID NO: 480044 - protein, 347 aa, unidentified
MNQIIRIGMDTSKHFFQLHGVDAAEHPVLRRKLRRKEMLAFFAKLPPTMIGMEACGASHYWARELGQLGHTMKLIAPQHVKPYIKRNKNDGRDAEGLCEAMSRPTMQFVPAKTAEQQAALMLAGMRERLVAQRTQLSNAIRGYAAEFGLIAAKGLDKIEPLLADIAADEALPVLARELFAMHGREYAQLQAELKNIDARLKAWHRANADSRRLAQIPGIGPISATALVMKAPDPRAFPSGRHFAAWIGLTPKDHSTAGKTRLGKITRAGDERLRSVLVAGATAVIQQVRRGRGRSSPPWLLALLARKPPKLAAVALANKNARIAWKLMTTGESYDGARMPGVSALAA

SEQ ID NO: 480045 - protein, 351 aa, unidentified
MMIIGVDYHPSDQYIAFTDTETGECGERRLNHSDGEAEKFYRGLARREVSVRVGMEATGYSRWFERLLAELSIEVWIGDAAEIKTRRVRKQKTDRNDAQLLLKLLLENNFPKIWVPSPGNRDLRQLLWHRHRLVQMRTRVMNQLQALAMNEGQRRKKKLWSEQGRAQLEKLPLATWASRRRQDLLQLLDRMNPPIEELTAAIEQEAKKNPEALRLMTHPGVGSLTALAFVLIIGTPERFQCGKQIGSYVGLIPSEDSSAGHQRLGHITKQGSSLMRFLLGEAAQAATRCDSDWRRRYMHLAMRRQRNIAKMAMARRLAVRLYWMWRNGWEYSQWIKFGSYAGQLGTGHGVR

SEQ ID NO: 480046 - protein, 338 aa, unidentified
MKVKRIAIDISKHVFTLHGVDDQERPVLRRDLKRAEVETFFGKLDGTEVVMEACGGAHHWGRVLTRLGHQVRLIPAQYVRPFVRRAKNDRTDAEAINDAASRPGMPSVAVKTAQHQAELIILKHREILMAQRTQAINALRGHAAEFGVIAAKGTAQVQALLDKLAADPAIPAVACAMFVRIGEHAAELDRQIAAVDADLLARHKATPVSQMLAEVPGIGPITAITLALGVEPTAFASGRHFAAWLGLTPKEHSTGGKQRLGRISKAGNERLRSLLVVGAMAVIRHAKAGKPSVSAWLLALLARKPRKLAAVALANKIARVVWAMMARGEVYRRQPVAA

SEQ ID NO: 480047 - protein, 367 aa, unidentified
MHTHQGIHDLILRLQKVGSLTEKKPAIVLESTGHYHLGLVAVLQEHEYEVIILNPLIPQRARKSKLRKVKTDAEDAKHLAELYYKEELKSTPLKKNKQAELRFLSRQHEMITHAYVQTQLNFQSILDQFFPLYSNLFGQLFSKTALQVLRKYPTPEQVLLSDLEEITQTIHFSCNRYISWATQKREALVTAAKNSLKMNSSNQSQIVALRLMIDLLMEYQVHLSHLEREIQAIATTIEGYPLLCSIPGTGNKLAATIIAEIGDVNTFDHAKKLVAFAGIDPSVFSSGKFTASKNRITKRGSTRLRRALYLAVLCGIRGAARNTRIRTFYDKKRLEGKPHRVALIACSNKLLHIIFAMLTRSVPYCSS

SEQ ID NO: 480048 - protein, 355 aa, unidentified
MNGLRYIGLDVHQDTVSAAVLDGSGKLLMQSVFATRAVAILDFLHGIKGTLHVTFEEGVHSAWLYDLLQRRVARVVVCDPRKNKLLKSGNKGDLIDARKLAELLRNNSLSPVYHGGMSALEVQHRTRSYTMLTEDTTRVMNRLRAVFRSQAIRVHGRKLFRSDLRESHLAQLATPGLRQRAESLYRELDALHPLRLQAKREMLAECRKHPAMKWLRSVPFLGKVRTAVLIGRVQTPHRFRTKRQFWSYCGLALETHDSAEYRVVHGQVQRKSRPAQVRGLNWNHNHELKGLFKSAATMAAFRKGIFREFYSGLLAKGIRPEMARLTLARKIAAITLKIWKEGETFNAEHIKPQAA

SEQ ID NO: 480049 - protein, 341 aa, unidentified
MMIIGCDFHPRMQQVAYLDQETGECGERRLNHLQEAAEFYRSLRGRRVRIGMEATGNFRWFRRLMSELGHEVLLGDPSAIHASNPRKQKTDKRDARHLLTLLVEDRFPVVWQPSVENEDTRQLLLHRCRMVRFRTRVKNQLDSMAKNEGLLSRRVWCALRREQIEALPLLGWDVERRQDLLALLDELDKRIEPLDEAVRKTAEGNTEARLLMTHPGVGPVVSLAYVLTIGDWRRFPRGKQVGSYLGLIPIEESSSDKRRLGHISKQGNTLLRWLLVEAAAIAQRYDPSWHRQYVRLSMNKHHGVAKVAIAHKLAVRLYWMLRSGQDYEQVRERGSHAGQSV

SEQ ID NO: 480050 - protein, 410 aa, unidentified
MDVLHARCAGLDVHRDSVVACARLVTAEGTVYEVVTFGTMAADLERLAMWLAARGVSHVAMEATGVYWKPVWGALAAQVELILANAAHVKNVPGRKTDVNDATWLADLLAHGLIRASFVPGLPVQALRDLTRTRKQFTREKAAHAQRIDKLLQAANLRLGTVLADILGASGRAILAALAAGETDPERLADRVQTRIRASRRQVIEALRGRLAEHQRQLLQIHLDQIAAIDRALGALDAALEQSLDPFREAAARLTTIPGVGALAAAGIIAEIGCDMSRFATPAHLISWAGLCPANDESAGKRRSTRLRKGAPWLKTLLVQVAWSATRARAGYLPALFARLRARRGPKKAIIAVAAAILTAVYWMLRRGTSYQDLGTDYFERTDRERLATKLVRKLGQLGFTVNLAQQQAA

SEQ ID NO: 480051 - protein, 321 aa, unidentified
MAKHTTICAGIDTGKRKLDVAIDGSSEQLQVENTAEGHEALLTWLRQHRVKRIGIEASGGYEQPVVAELRRKGFVVVVFQPAQVRAYAKFHLQRAKNDKIDAAIIAACTAAVRKIHAAPDPRLLPFAEQLTMIDQIGEDIARLKNRIESCRNETINKLWQEDIARLEQRERAALKALVAAIRKHPDLAKRLALISSVDGIGLPTAVAILVRLPEIGQITREQAVALAGLAPYDDDSGDRSGVRHIEGGRKRLRRALYTASLAASFRWNPQLIQLYQRLTAAGKEHKPALVACARKMLIFANTVVARGTPWCGEPPGSLPAS

SEQ ID NO: 480052 - protein, 607 aa, unidentified
MSTIASLDRIGVGIDTARYGHRVSFLRPDRKPAAKPLTVMENRAGYQALQDRLNQLHEQHPTAHFHVRIDAAGQYAVNLELSLRSLKLPMTISVGEPKRNKDYQKAHFPKRTTDDTESQAMARFAVVELPNATPAPSTPMILLREVAGRLQSKVKQTTQAINRLHNLLARVFPELATLTEDMSAGWALKLLDKYPTAERIAQAQIASLEKIPYLSVEQAHAVHQAAKQSVASLRGDLAEALVRDHVNQLRLCQKAEQHLHQLLLEAFADLPASPHVQVLTITGIGEATAAALVAKIVDINRFATPNHLVSYFGVFPEESSSGVDKRGRPLPPGTLIMSPKGNDLVRFYLWNAARNAIQHNPAIRALYRRLRAKGKRGDVAFGHCMRKLLHLVYAVWKTDRPFDKEHFPWEGSSDTQPSATTPPSADAGTTPSANEKAVGHKRDLPAEEVVTTADSTLEPASPAVKPASQSAAPRPKVDFACVREHVTMEQVLQHLGYFASLRGRGRQRRGPCPVHSQPTAPERTFSVHLGKNAFQCFHAECAVKGNVLDLWAAIHRLPLYEAALDLAETFQVPRNREEEPVKGTSSPRTATAKTSAPAAATATDGAK

SEQ ID NO: 480053 - protein, 361 aa, unidentified
MASIALVRSDVIVGVDTHKDQHVAVVIDGLGGRLGELFVPATADGYAALLGWARNHGRVIAFGVEGTGSYGAGLASFLRRHATKVIEVNRPARQAERRLAGKNDTIDAEHAAREVLAGTATNIAKTADGAIEGIRLIKIARDGAVKARSKAMITLKAALVTGSDELRGELEALTDHKLIVACAAFPETLDDPADPSAAMRYLLGTLARRWLTLHDEVSAHFKLLDQATKTAAPDLVEAFGIGPDVAAEMLVTAGDNTDRIHSEAAFAKLCGVCPIPAGSGKTNGRHRLNRGGNRQANAALYRTVIVRMRWHEPTIAYVARRTAEGLSKKEIIRCLKRFVAREVFALLPEPAAPATVQGIAA

SEQ ID NO: 480054 - protein, 382 aa, unidentified
MKNVRFIGLDVHAESIAVAVAEPGARAEVRSLGTIPNRAESVGRLIRKLGNPAQLRVCYEAGPTGYVLYWQLSELGVRCEVVAPTLIPVKAGDRVKTDRRDAEKLARCYRAGDLTPVWVPDAAQEALRDLVRARLAAKRDQLRARNRLGKFLLRHGRRVPQGSTAWSTKHLGWIKRQSFEQAAQQATLVDYLHEVEHQAERIVRLERAIDTAIETLPEKMCAVIEALQCLRGIAKISAVSIMAEVGELSRFARARQLMGYSGAVSWEDSSGPRVHRGGISKSGNAHLRRIVIEAAWAYRHRPGLGATLLARQRDQSEEIKAMAWKAQHRLHARYAKLLAKGKAKQQVITAVGRELLGFIWAIGVASERSQSDTPRRLLKRAA

SEQ ID NO: 480055 - protein, 348 aa, unidentified
MPVVAEHFEHVVGIDTHARSHTYCIVETRTGVVVDTGTFPTSSAGLDRAISWIGRRSRGTTVLAAVEGTSSYGAGITAALTATGIEVAEIRPLSRPSRARTGKSDPIDAEAAARVVIGEDLRRLAQPRRTGDRAALRVLLAARSLLDQQRTANRNALTALLRSTNLAVDARKPLTDTQVAAIAGWRTGRDDATTRVFREEARRLAKTVVEQTRLLQDNHRHLAQLTEALAPGLQTIPGVGAVTGAILVTAYSHHGRVRSEAAFASLGGIAPLPASSGNTTRHRLSRSGDRQLNRAVDVVVRTRMSYDQPTRNYVTRRRSEGLSKREIRRCLKRYVCRSLYRELRRRMA

SEQ ID NO: 480056 - protein, 445 aa, unidentified
MSIPMIRYVGLDVHKRLVVACIVDQAGKVVHRERFALNRFALETFAKCVLTAGDHVALEATTNCWAVVDVLRPHVARVVVSNPMATQAIAQAKVKTDKVDAHVLAQLLRCDFLPEVWQPDEATRRLRELTARRSALVSQRTMMRNRIHSVLAMRLVAAPTRLFGIEGLEWLAKAELDDQARLLVDSDLRQLQFVQREIDALDAELARRGYASDPVKLLMTLPGVDVTTAEAMLAAWGDPTRFPDGDHAASYLGLVPSTKQSANQCYHGPITKRGNSQARWMLIEAAQHLDKHPGPLGCFFRRLLRKKNRNVAVVAAARKLAWIGWRLLVTGEPYRYADPRTATKKLARLRVKATGVRRKTGPAKGRKPAAKLAGGSRAIKALATAYQSEGLPQPWLLPPGERRMVKQAGCEEFVAGIGQTHVVSRTKREVTGSSSLLRSNGRGKH

SEQ ID NO: 480057 - protein, 366 aa, unidentified
MKENNTVATRRKQIFREKKLTIGMDLGDQSTYYCILDEAGEVIVEQKLPTTKQGMKQVFGRMPRSRVALETGAHSPWVSRQLTQLGHEVIVAHARNVRLIGESSRKDDRLDARMLARLARLDPRLLSPVQHRSAEAQAHLTVIRARAALVGARTALVNAARGLAKSYGERLRKCGTQQVSKDLAAGLSAELRAALEPLLAEVESLNQRIAEYDRRIEQIATEVHPEVALLKQVKGVGTLIALTYVLTIEDPHRFRRSRDVGCYLGLRPGRRNSGHSQPQLHISKEGDRYLRTLLVQGAHYILGPFGQDSDLRRWGWKLSERGGSNAKKRAIVAVARKLSVLLHRLWVSGEVYEPLRNHSAVVGAVA

SEQ ID NO: 480058 - protein, 326 aa, unidentified
MTHPVAASKAELPPASITIGIDVSKDHLDAARHPGGDTVRVANTRKGQTALLRWIGDIKAVAQVVFEPTGPYHRTLEERLAAVGIPQVKVNPRQARRFAEATGKLAKTDRVDALMLARYGALLDPVARPVRTDLQNRLAELVAARRSLMRDRTATLNRLKTLTISLLQRHARHRLRQIEAQVTSLDAATDALVAEDAHLSRRRDVLASIPGLGTVTAHALLADMPELGMIEEGQAAALAGLAPITRQSGTWRGRSFIQGGRATVRQALYMPAIVAMRFNPDLKRVYDRLIAKGKHAKIAITAIMRKLVVLANALLHKDRLWTPKAA

SEQ ID NO: 480059 - protein, 411 aa, unidentified
MVKENFIYVGIDLHKETHTAVMIDCYNQKLGEITFPNRPADFPKLVAKVKKCNTDGKTIVFGLENAYGYGRALAVWLIDKGYLVKDVNTAISHRQAKHRGAMYRKSDSDDAEAIALATLNMLDKLPDAYPNDAYWSLGQLVHRRDNIMKQRTRLVNQLHEQLCIAYPSYKQFFNDISRPTALYFWEHYPSRKYLKGKSVEDLRAELVPVSHNKCSTKTCEKILDAVASDKVKNNAYQDARDMVTLSIVSDLQHYDKQLAEVDKMLEQMYKMLGCTLTTIPGVNVITAVKILAEIGDIKRFSNANKLAQFAGIAPLHLSSSGKGKDVATKQGNRRLQATIYFLAIQMVQVSSKGTPRNSVVRAYYEKRKAEGKTSQQALICISRRLISIIYGMLKHGTEYRMPVVESAGENR

SEQ ID NO: 480060 - protein, 344 aa, unidentified
MNKYAGLDVSLEETAIAVVDESGRTVREGKVASEIEALDGWLRASGAAIVRLGLEAGPLSSWLYAGLRACGWPVVCIETRRLRAVTQAMPVKSDRKDAEAIAQVMRTSWYRAVHVKSDDSQRLRVLLRHRQILQAKRQDIENELRGTLKAFGLKLGKVGQAGFAARVTELVAGEPWLERLTQPMLAARAALRQSFAELHKLLLTIVREDTVCRRLMTAPGIGAVNALAYKTAIDDPTRFRHSADVGPHFGLTPRLYQSGETEYSGRISKCGDAMVRSLLFEAATALLHRVKAASPLKLWARRLAKKIGVRKATVALARRLAVIMHRMWVDGTDFNPELGRAAAH

SEQ ID NO: 480061 - protein, 369 aa, unidentified
MKSIAHVGMDVHKESISIYGLPEQGNEAIFEQRVVNDSLRVKKLFSKWSRSYDLRCCYEASGAGYVVQRWLSQIGVSCEVVAPSLIPRRPGDRIKTDRRDARKLARLYRAGELTPIRVPSEEDESLRSLVRCRETFAREARQSQQYILKFLRLRGIVWDGKSNWTKKHWEWLERLEFEGYDEIVWREYLNLAYYKLSRLSDLDTEIEKAAFSDGLKEQVSLLRCLRGIDTHSAMVILTEIGDFRRFSTPGQLMSYVGLVPSENSSGDIERRGRITKCGNARCRRVLVESAWKYAARPALGRALKLRQSGQPVEVIRQSWNAQHRLYKKFHSVAHRKERCKAAVAVARELVGFIWAIMTQQEAGTYAKAA

SEQ ID NO: 480062 - protein, 344 aa, unidentified
MEQYAGIDVSLESACICVVDANGRIVREAKVASEPDALIAWFRGLGVPMSRIGLEAGPLSQWLYAGMREAGLAVELLETRHVRDAFKAMPVKTDRNDARGIAQLMRLGWFRSVHCKSLPAQELRAVLTARKLVQEKRHDLEMSLRGILRGFALKVGHTTPRSFEGRVRELVDGHTTLLAVADALLLARATLGEQLGKLQKRLVSLARDDARARLLMTTPGVGVLVALTYVAAIDDPGRFRSSKAAGAYFGLTPKKYQSGETDVTGRISKIGDASVRTALYEAANVILTRPVKGSSLKSWAMRVARRAGMRKAKVALARKLAVVLHRMLADGTRFAAEKAAAAAA

SEQ ID NO: 480063 - protein, 428 aa, unidentified
MQRQCTTKPLYVAIDIGKNLHCFAGYAGLDLQPCGPAQTVPSNRTGYVIFSTWLSELLVTGCYGPVLVGLEPTGIYHEPWAYAIARDWGAQVNLRFVNPYHTKKERQQRQLGRRRKTDVLDTEAIAACLRDGLGGPARLPEGLTFRFTVWAATFRRIARERQRLQAQLLAQFDRLWPGALVNMSAFRKSHPALPEPQPLVRSRPLERQLIQLILTAAPNPHDWLNRSPNDIQTFVQGHGLRCGPVTTQRIHHVVHELLPLPPRLSAILAAQLQADWRRFQLLQQELDQCRQEAQELVPASPVAVLLTVPGINAFLAAAYLAYVIDIRRFQHADQIWSLAGFSPDEEQSGDSRYQGQISRRGNAGFRNVLYNIGLNTSLHCPAIARAKARALQHGKRAVGATIHAAHLANRLCFQMLRDQKPYEEERMR

SEQ ID NO: 480064 - protein, 435 aa, unidentified
MATTTGLHNVGDGNGATTTTNPKGRETLDNKIYRVFCGIDVGKTSHYAVALNRDGERLAGTEIHQDEASMRRMFSDLSRHGKLLVIVDQPRNIGALPVAVARDCGVDVAYLPGLRMRRIAELYPGNGKTDAKDAFIIADAARTLPDTLLPIGENNDLVEGFRMLAGFDADLAADENRLINRLRSVLLSVHPALERAIGAQLHRPIGPGLLAKFGGPVGFSAASRRDIEAQAEVLAPRLWSKVVDSIIGALAEQTVSVPGAAQADVVIKHLAGQLLDVRVARQDLAAHFEQALTEHPAGPILSSLPGVGVRTGVTMLVEITDIGRFRDAGALAVYAGVAPRTHRSGTSIKGEHRQHSGNSRLKRAMYLSAFAALKDPVSRTYYDRKRAEGKNHRAALICLARRRSNVLYAMLKTNECYRAVPRQSDGGTVIDRAVA

SEQ ID NO: 480065 - protein, 328 aa, unidentified
MSKRSFFVGVDVGKDELWVAIDGYRPRRFVHCTSGIRLMHQWAEEAAEGSPLHFCMEATGVYSLSVAYQLYTYPDTALSVVNPAQINAYAKAQLKRTKTDQVDARVILSFAQSQRLPIWSPESKSLRQLYQLVVQADAIRTDLRQWANRRHAQEYTPDVPEAVKKTQQAIVRSLTQQLAKVEEAIAILCRTDHELKEQVELLVTITGIAHLSAVKVLAYGGNALTQRNRKELTAHAGLASCHHQSGTSVRGKSHLAKQGDQRLRTALYMPTLVGIVHNPVLKQFYQHLLQMGKPKMVALVACMRKLLLIIRSMLINKKSFNPEIWPLT

SEQ ID NO: 480066 - protein, 443 aa, unidentified
MNPSPTAQTIKYVGLDVHAQTVAVAIAHAGGDVVSYGTVPAHSHSMDRLHKKLSEGGAQVRYVHEAGPTGFWLARHLRGKQISCEIVSPSLVPKKSGDRVKTDRRDALALARLYRAGELSFVHVPDEADEAMRDLVRTRLRAVEDLRRCRQRIKGFLLRYGRRYDGRSAWTAEHLNYLSRQKFDHPGQQIAFEELLNAVQDPAQRIERLTKAIEAQVQPWSRRPLVEALMCLRGLALINAVTWVAEIGDFTRFTHPSQLMSYIGITPSESSSGQKRRQGAITKTGNEACRRAIIEAAWQYRLPARVTPHIRQRHHGQPQAVIALAWKAQTRLCARYQDLIRHRKKTVVVVTAIGRELVGFLWAIAREIHTPGTAAAEALKRKTPDALKKETQTPVKPVAQAGRSHPLDARKKHEATPPAVGKQVLPAGARKASRKKKKNPAAC

SEQ ID NO: 480067 - protein, 314 aa, unidentified
MSEPMNVGIDVAKDTLDVCTSANEAFRCANDLDGIESLVKRLKALPVERVVLEATGGYEAPLVAGLAAAALPVIVINPRQVRDFAKASARLAKTDQIDAAVLVAFAQAIQPEVRPLKDEQTRALEAVLTRRRQLVGMLAMERQRLQIASAVVRKELRAHIVWLIKRIKDIDRDLTGLLRESPVWRERENLLGAVKGVGQQTILSLCASLPELGRLNRRQLAALVGVAPFNCDSGTLRGKRRCWGGRANVRAVLYMAALSAVRCNPVLRTFYQRLVAAGKPKKLALTACMRKLLSILNAMVRDNAAWDPNLHITA

SEQ ID NO: 480068 - protein, 360 aa, unidentified
MKFQRTSVGLDVHARSVFGCGLDGETGEVFSRRLSTDHREILDWVQGLPGPVAVTYEAGPTGFGLARFLLDSDVSCLVAAPSKLVRPCGDRVKTDARDAAHLARLLHLGEITAVCIPSLEREAARDLVRAREDCRADLMRARHRVLALLLRHNIVYTGGPAWTVTHLAWLRRQRFPAAPAQRAYDSAVDAMLACIDRRDGLDGAIAAMAIDSEFSAVVRRLGCLRGVSTLTAVGLAVEIGDWSRLTGRSIGAYLGLVPTEYSSGASRVQGSITRTGNAHARRLLIEAAWHHRRPYRPGVELRRRWQAASPSARLRGQQANQRLHTRWRGFDARAKRPAVANAAIARELAGWCWSLAVLEE

SEQ ID NO: 480069 - protein, 339 aa, unidentified
MELYAGLDLHSRNTYIGIMDKAFNRVFKKRVPNDLDQILQILNPFQDRLEGFVVESTFNWYWLIDGLMGAGYKGAHLANPAAIKQYDGLKYSDDQHDAFFLAKLLILGILPIGYIYPKEHRPVRDLARKRMFLVRQKTANILSLQSFIQRCCAMRISANDIRHLTVEVLERWLNEKFLVCTAQASLDTINFLKQKIKHLEKTIIQRVKLNKGFRQLLTVPGIGNILAMTIMLEVGDIIRFPKVGNFTSYCRCAPSQRLSDGKSKGRGNRKNGNRYLSWAFTEAVHLGRRHNEQFRQYYNRKVAQANTSLATKALGNKMARICYYIMRDQVPFREGLIAH

SEQ ID NO: 480070 - protein, 325 aa, unidentified
MRKVGQTGVRRSDVPCVVGIDVAKAQLDIALRPSGERWAVPHDASGVATLGDRVQPLHPTLMVLEATGGLERAATSALAAAGLPVVVVHPRQARACARATGPWATTEALEARALAHCADVIRPLPRPLPDAQTQELRALLGRRQPLIVLRTAEQHRLAGTSARLTQAIAAHMTWLKADIATLDDDLETRLRASPLWRENDDVLQSAKGIGPVCAPTLLLELPELGTLTRQHIAALVGVAPLHGDSGTLRGRRTMWGGRAPVRTVLSMGTLVATRFTPQITVFYERLVAAGKGKKVALTACLHKFLTILNAMLKHRTPWKPQEVQN

SEQ ID NO: 480071 - protein, 386 aa, unidentified
MTLFVGIDVSKYKHDLAILDDHGEILSKHFQFANTYQGFKKLKEHLETLEIPTSNLHIALEDTGHYADNLIAFLQKLGYPTFTYNPLLIKEFVKSLTLRKSKTDKKDALSIARKLLSDPTSERYIVEPRILELKELTRYQNRLIHERSKNKTLYVRTLDIVFPELARIVKNVHNQFVYELLSNYPTPQKVKRAHFNSLLKIKRLTADKAKQIQEASHLTIGNSSIALQLEITQLIEMIRIQTIQINKVQEQINILMAEIDSPITSITGIGQRLGAIILAEIKNIHNFRTPGQLQAFAGLEPSIYQSGTMDITGLMVKRGSSYLRYALIQAAKLLANYSLNFRAYIRLKISQGKHYNVAVSHVAKKLIRIIYYLLKTNQYFDESKLR

SEQ ID NO: 480072 - protein, 412 aa, unidentified
MEGETVIAGVDTHKDVHVLCLLDGLGRKIRSGSFRADPEGYDRLAEAIGDPGSCLVVGVEGTASYGAGLTRRLVELGYNVVEVLRPKRDKARPGEGKSDPLDAERAARKAASGRGCSVPKSQDGWVEAVRQLYVARRLAVATSTSCVACAKSMLTTAPGALRERFRGCERPKDLMPLLARRRKAGDALEESVLASLRSVATVWKEARSQVESCDARIRALLEANAPALLGIEGCGTTPAAALVVAAGDNPGRLKGEAAFSMLCGVSPIPASSGKTERHRLNRGGNRQANWALYEIAIKRMAYDERTKRYVAKRTSEGKSRREAIRCLKRYIAREVYRVLMDPNPDGAAPEGPELAKMRKAMRVTQKQAAAGLGMSAASLGHLEHGRRRSTKLERRYYELLCELKGALPQTAY

SEQ ID NO: 480073 - protein, 408 aa, unidentified
MIERCAGLDVHRDTVVATVRRPGPGGARRSQTRTFRTVTGQLQELSDWLASEKVTLVGMESTGVYWKPVYYVLEDRFPVWVINAEHLRNVPGRKTDVADSVWIAQLLEHGLVSPSFVPPRRIRLLRDLTRHGRRLTEERTRTIQRLEKVLQDAGIKLTSVASTILGKTGRAILAALLAGEEDPAVLAELARGRLRPKIPALREALTHRFRIEHHGLLIAQMLAHVDFLEDSIADTYRQVDVLLRPVAELVELVMTIPGVGRRVAEVLIAEVGLDMSAFPTAGHLASWAGICPGNNASGGKRRAGRTRHGSMWLRIALTEAAQAAARTHGTYLAAHHAQIRGRRGTQKAIGATRHDILLAYYHIVRDRVPYHDLGPDWNDRRRSTQQQARRLVRQLERLGLNVVIEPNG

SEQ ID NO: 480074 - protein, 441 aa, unidentified
MHFRDAEEPVAEPVWAAFIAVDWADQKHDWAMEVPGGNIRERGQVAHAPEALDAWVTQLRQRFGDRPIAVALEQSRGALLFTLSKYANLVLYPLHPRTTSCFREAMYPSGSKSDPLDADIQLDLLVKHRDRLQVWKPDTEETRLLQFLVEDRRRRVDQKTGLLNQLTGRLKLYFPQILRWFPSADSALAWRFLERWPDLQSAQKVSRQKLKAFLTRDARSCPADVDQFINRIREAMPATQDRAVVSSSTVFVQGLVCELQLLRATIQKYEKQIEAIVQQHPDFPIVSSFPGIGKALAPRLIAALGTQRERFPDAGSIQSYSGIAPVREASGKREWVHVRWACPKFVKQTFQEWAQHSMTRCAWARRHYDAQRARGKGHQTAVRSLAFKWIRVLFRCWKDRTPYDENRYTKSLGRRSATPNTDVRIMWKNVGGFSKPAAFSD

SEQ ID NO: 480075 - protein, 336 aa, unidentified
MSKRFVGIDVHKKLCVFTELDGVGNVIGKGSFRNEIVEVSDFANKLHGGVHLVLEPVLNYLWLLDQFEPYAGSVHVATPYKVRVIAESKCKTDSYDSRVLADLLRTNFLPESWVPPKELRSLRTTVRQRYHLVKTMVGFKNRVRYLLFTQGVHLRVSDISCVKAGEAISGLCLPDATRRSIVQCLETIEVLKGSIKELDDRLEEGSEGVVEIELLKTIPGIGQIWSVTIYAEVGDISRFSSRKAFASYTGLVPSVRCSGESCYRGGITRLGSKALRHALVEVAIRAIGEVPSLNRMYNRVLYRSNVQKARVAVARKLAVIIYAMLTKNEPFRLELA

SEQ ID NO: 480076 - protein, 360 aa, unidentified
MTESTPIVAFDQHAASVMAAVLLPGDRTPALHPLPPDVPSIRRFLERLGLPGVRCCYEAGPCGFDLQRSLQTAGIACDVIAPALIPRRAGDRVKTDRRDAAQLAVLYRAGALTAIHIPTEEEEAVRDLLRCREDICTDLLRAKHRLSKFLLRHGRRCPDGRAWSKRYFTWLTVQHWPLAALEQTFMSYRRAIDDIVARLRAVDTDLQAALTVASLAPRVARLRCFRGIDDLTALTIAVELGDATRFPAARQVMGFTGLVPSEYSSGATQKRGGITKTGNAHLRRVLVEAAWHYRHRPAVSHRLRIRQQAAPPAAIRVAWSAQHRLHARYRRLLARGKSPQLAVTAVARELSAFVWAALTP

SEQ ID NO: 480077 - protein, 507 aa, unidentified
MVAASTWVLAGPRLRECLEFSPSEPSLLGWLDNKPMKKHKRAKTKSKATKPLHDPQPDAAGVDIGANEIWAAVPPERTEKSVRRFGAFTQDLKELVKWFLACGVRSVAMESTGVYWIPLFQLLEEAGLKVCLVNARHVKNVPGRKSDVRDCQWLQYLHSVGLLRGSFRPHQAVCAARSIYRYRQNLLSMAGQHVQHMQAALDQMNIKLHHVIEDLTGVTGQAIIEAILGGQRDPLQLAKLRNKRIKAAESTIVKALEGDWRKEHLFVLAAAWNNWKQVQQQIQNCEQELLQYTRELEASTTIAQPTKTMPLKPELLSSSAVAAPQPAPRLRKKTSKNQPEGPWREELARFFGVDLTAIPGISVLTGLTLMTELGNDLSNFKSPHHFASWLCLCPDNETSASKVLRRSTRRSQNRIRQALRMAAYSLHHDKSYLGDKYRRLRAKLGAPKALTAMAHQFARIIWTLLTRRVPFDLSIFALQEEANQQRRLKRLHASARQMGYYLTPVAA

SEQ ID NO: 480078 - protein, 353 aa, unidentified
MNTSIQKEVILGVDTHLDKHVGVIIDGFGKYLGDLSIETNAAGYQQLLKWTQSFGCIQRAGIEGTGTYDAGLARFLSKQNIQVFEINRPDRSMRRFRGKSDQTDAESAARMVLSGNAYAIPKLQSGPTEAMRIVSVARRSAVKARTQTINQLRGLLISAPDDIRLKLWSPKPAECVKNCAYLRTLGESSWLITLATTLHLLAKRWLYLTEEIKELDKTLERLTSGAAKRLREQFGTGPQTAATLLAVAGDNPERLRNEAALASLCGVNPLEASSGKTVRHRLNRGGNREANNALWTIAMVRMRSDPRTRAYVERRTMEGKSLKEIHRCLKRYIIRELYPLILEDLKDATFKLT

SEQ ID NO: 480079 - protein, 392 aa, unidentified
MYIVGIDIGKNHHEASIVSPEGKQIGRSLRFATTHKGADSLMNFIFKNIGNSPCVFGMEATGHYWYPIYSFLKARGYTIYVINPIQSDSLRKMYIRQTKNDSIDSFLIAEVIRFGQFTTTSMADENILAMRQLCRYRDSVISSRTEIKLRISTIIEQIFPEYEKQFSSLWLSTSMGILEKYLTPENIENAPIDELFEIIKDKSHNRLTKAKAISIKGAAADTFGIKIAQDTFSFQLKQLIDRMNFLDKQIEALDIEIMKYYEQFDCYLHTILGIGIIGAATILAEIGDISRFKNSSALVAFAGIDPTVRQSGEFNSTHNHMSKRGSPYLRHAIFLAATTCSFHNSPLNAYYKKKRDQGKHHLTATGAVARKLTTVIYAVLRDSKPYEPKKFC

SEQ ID NO: 480080 - protein, 345 aa, unidentified
MGVTIVGIDLAKNVFRLHGCDEQGRAVLRKQLTRGQLLAYMAQLPACTVAMEACASAHYWARELEQLGHRVRLINPRFVKPYVKANKNDASDAEAICEAASRPSMRFVPVKTAAQLEVQALHRVRQQLVKSRTALINQVRGLLAEHGIVIPRGRAQLQRSLAQILEDADHRLSGLMREILSESSERLQFIEARLRRYELHIERLFRQDPRCRRLAEVEGVGPLIATALVAAVGNAAEFKHGRELAAYLGLVPRHRATGGRTIMLGISKRGDRYLRSLLIHGARAALWTMARRSEQRSAWAGRLKLRRGANVAAVALAHKNARVLWALLRSGEAYRAAPLSLQAAG

SEQ ID NO: 480081 - protein, 338 aa, unidentified
METYAGIDLHSSNNFVGVINDKDKILYGKRHSNRLDDVLRALDPFKDSLKGVVVESTFNWYWLVDGLQEQGFSVHLANPSAIQQYEGLKFTDDQWDSVWLAHMYRLGILPEGYIYPKEHRAVRDLLRRRLLFVRHSTSHILSLQSMISRNLGFKMSNNEIRKLKSEDIDGLFACPNLVFMANNSLSAIKFLKKISLDIEKKVKSQVKMRKEFEMLLTIPGIGNILGLTIMLEVGDIGRFAKVGDYSSYSRCVESKRLSNGKKKGENNKRNGNKYLAWAYVEAAQFARRYCVKAQSFYQSKEAKTKPVVAIKALSNKLSKASYYIMRDQVAFDEEKLFG

SEQ ID NO: 480082 - protein, 356 aa, unidentified
MTKVTASFENQTVYIGLDVHKRSWNAAIYLGEQYIRNIHQPPTPEALYQYLHHSYPEAKYVCAYECGKFGYWIQREFKELGVECLVVNPADIPSTHKDEVYKTDIRDARGIAQALSSGQLKSIYVPCEEQEADRHLVRQRKKIWRDLVRCKNRIKGFLDYKGIIVPSQYDNANWSRNFINWLIKLGFEHSSNRVTLNYLLTEMELLRKELLSISNTIRKLMRSKKYNKLYYLLRSVTGIGPLTAAALITEIGDMKRFTSFYHLNSFIGLMPMEHSSGERELKGRITVRKHRQLRSDLVEGAWTAKRSDPALALYYSEQIKKGKNGKAAIVKVARKLLSRIRYVWLSGEAYQTAIVK

SEQ ID NO: 480083 - protein, 346 aa, unidentified
MKYFAGLDVSLKEISMCVVDEEGRVVFRRSLPFCALAVRDALEEQEVAPQRIVHESGQISIWLQRQLEDLGLPAICIDARSAHKVLSAKLNKSDRSDAEGLAQLARIGWFTAVHVRSIDADRLRTIIGARDRFVRLRMEIEAHMRGILKTFGIRLTAIGNGRQRQRFRDQLSVARQSDPALAVIIDQVLPSHEAVCSAAAALEDEIAAIAKRHDLSRRLMTIPGVGPVVALSFLSLIENTERFPKTTNVGAFLGLTPRRYQSGEVDYSGRISKRGNAAMRRLLYEAASTLISRVKRYSPLKSWAVRLAARRGFKKATVATARKLAVLMLTLWKTGEEFHWTKEAAT

SEQ ID NO: 480084 - protein, 339 aa, unidentified
MALYAGMDLHSRNTYLGVLDHRFKRVFNKRVKNDLSLMLRTLEPFREELRGIVVESTYNWYWLVDGLMDAGYGAIHLANPCAIKQYEGLKYADDRHDAFWLAHLLLLDILPEGYIYPKEDRPVRDLLRKRSFLVKHRTSHILSLQSMIERHTAERLSSNEIKRLEVSDVEAIFHEEHLILSAGASVSTISFLSHQIRRIQKAVKNRMKLAKPFEYLRTVPGIGEILALTIMLEVGDIRRFATVGRFASYARCVPTARLSAGKSKGKGNRKNGNRYLSWAFVEASHFARRHSEKFRRYYQRKAAKTNTIIATKAISNKLARCCYYIMRDQVPFRDEAIFC

SEQ ID NO: 480085 - protein, 313 aa, unidentified
MTQIALHVGIDVAKDRLDVAILETGELFTLDNDEAGYAALIERLSDRSIAAIGLEASGGYEQAALKALWREGLPVRRINPHRLRQFARAAGINAKNDRIDARLIARFLAALPVHPTDLDPRLELMTELVTARRQLHAELSRVNNQLEHVRDTALKRLAKRRAARLGADILLLDKRIAQAIAADHSLAHRDRLLRSTPSVGPVLSATLIALLPELGRLSNRQIAALVGLAPYDHDSGKLKGKRSIWGGRESVRNVLYMAALSAGVHNPVFAAFRRRLRENGKLAKVAIVAVMRKLITTLNAMIRDDKPWNPAAV

SEQ ID NO: 480086 - protein, 388 aa, unidentified
MIYVGIDIAKLNHFAAAISSDGEIIIEPFKFTNDADGFQLLVSKLESFDKNSLIIGLESTAHYGDNLVRYLVTELYQVCVLNPIKTCQMRKNNVRKTKTDKVDTYVIAKTLMMQDNLRFVSFFDLDMMDLKALGRFRQKTIKQRTRLKIQLTTYVDQVFPEIQYFFKSGLHQHAVYALLKEAPSPKEIASMHMTHLANLLKVNSHGHFTKEQAKELRVLAQKSVGANDSAISIQITQTIQQIELLDSQLEKIEAEMTDIMKFNDSVIMTIPGIGYINGGMILGEIGDIHRFSNPNKLLAFAGLDPSVYQSGNFQAKTTRMSKRGSRVLRYALVNAAWNVVRNNATFKAYYDAKRAEGRSHYNALGHCSGKLVRVIWKMLTDNVEFNLK

SEQ ID NO: 480087 - protein, 481 aa, unidentified
MDSAKNIQPPGTKPTRAKGKSRGKRKGMCLEDRPLLELNAAGIDVGAREIFVAVPPDRDENPVRVFLTFTEDLQQLAAWLVKCRVTTAAMESTGVYWIPLYEMLEQYRVKPCLVDARHMKNVPGRRTDWHECQWIQYLHSVGLLRSAFRPDEDVCAVRALTRHRNDLVQLASQHIQHMHQSMTQMNLQLHHVISDLTGLTGMSIVEAIVAGERDAAVLAKLRDPHIKASEDTIRKSLVGNWRAEHLFTLKQSRDLYQTYQQQIGACEEEMEKLLQQFESRVDPNEKPLPPDRKRKRRNRKKGKKDGDRKPGFDLRTESYKLFGVDLTQIPGLETLPLPLFSEVGRDMRKWPSAGHFASWLLLCPDNDISGGRVLWKGMRKGNNRAGQMFRLAANSLHHNNTLLGAYLRRMKAKLGPAGGITATARKIAIIFYTMVNNQVEYDATLWAQRDTQREKRFEDKVKRQAQQLGYQLVPIEEKPAA

SEQ ID NO: 480088 - protein, 405 aa, unidentified
MDITPIHRRVIGLDVHQNKITACALIEQADGSVAVEQGEFGGFKRDRRALAAWVHGLAPDIVVMESTGIYWKSPYAALEKVGIAAWVVNARHVKNVPGRKTDISDAQWLATLARAGLVRASFIPPAEIRHLRLIARQRQKLGGMLAAEKNRLHKVLADAGIRLNVLLSDLHGQSARAMVKALLADEPIHAILERAGRLRASREDLFEALQPEELSAKHRFVLNEIMAHIEYLEATMARFEQQLLVGLAPWEPQMSLLETVPGIDRLGAAMLLVEIGTDMDSFGSAERLASWVGICPGNNESAGKRKSGRTRKGNAWVRRLLCEFAQAASRTRCALKDKFSALAIRKGHKRSIVALAHKMLRIVYAMLANTTPYQDRTVDYEALMVGRNAPRWLKMLAKHGYIATA

SEQ ID NO: 480089 - protein, 338 aa, unidentified
MNYVGIDHHRQYSHITWLDEKGEVVKSGRVANLRRELEGFLHGIGDVRAVIEAGRSSYTMVDVLADLGISTTVAHPKDVKAIAKAKIKTDERDSYKLAHLLRTGYIPEVHKRSRENRSSQRILRQRAFYVGKQTSVKNRLRALLAQQGEEIRCEVERVENLFTDKGMKLLKGLALPETEAKLVGALLRTYHHLEERINETNALVKELYEAMPSAQLIQTVPGFGIFLAVLVAVEIEDIGRFEDVSQFHAYAGVIPSTHSSGERSWHGKIIKEGNRWLRWAAVEAVWPALRADFDIRCFYDRLKRRKGANSAKVATARRLLTIIFRMLKENRPYIPYKR

SEQ ID NO: 480090 - protein, 398 aa, unidentified
MTESSDYESVQVFIGVDVGKDTHHAVAINRSGKRLFDKALPNDENKLRSLISDLKQHGQILLVVDQPATIGALPVAVARSEGVLVGYLPGLAMRRIADLHAGEAKTDARDAAIIAEAARTLPHALRTLKLADEQIAELSMLCGFDDDLAAQTTQASNRIRGLLTQIHPALERVLGPRLDHPAVLDLLQRYPSPEKLASLGEKKLAAQLCKLAPRLGKRLAADIAQALAEQTVVVPGTNAAAVVLPRLALQLITLRKQRDEVALAVEQRVLAHPLYPVLTSMPGVGVRTAARLLTEVACRAFASVAHLAAYAGLAPVTRRSGSSIRGEHPSRRGNKALKRALFLSAFAALRDPLSRAYYTRKMSQGKRHNQALIALARRRCDVLFAMMRDGAFYTPQAS

SEQ ID NO: 480091 - protein, 354 aa, unidentified
MIVIGVDPHKHTHTGAAVDSVSGKLAGDRTVRARREGHERLLAWARSLGAERLWALEDCRHVSVTLERFLLASGERVVRVPPKLMAGARRGSRERGKSDAIDALAVARAALREPQLPAARLEGESREIRLLVDHRDDLVAERTRIQQRLRWHLHELEPELELPAGCLDRRIWLERLARRLARREQTVQVRICRELVGRCRELSKRAAELERELALLVRAQAPQLLALPGCGTLTAAKLVGELAGVDRFRGDAQLAMHAGTAPLPASSGTKQRHRLNHSGNRQLNCALHRIAVNQGRRHPPAQAYLARKEAAGKSRKEALRCLKRHLARTVFRTLTRPQEAKMTTNRPVQVPALT

SEQ ID NO: 480092 - protein, 426 aa, unidentified
MFAANQSSQEPIAAFVGIDWADEKQDIALRATEPEAKVERTKIANQPEALSDWVLALRERFKQGKILICLEQSRGALMHFLMGYDCFELYPINPTQLENYRKAFKPSGAKDDPTDGELLCKYLSLHHQELRPWRPNDKQTRKLALLCQKRRQAVDARSALSNQLKSELKQYYPLALAVLDNDLTTVLAADFLLKWPNFASLKKASAHKLRGFFYGHQCRSEQKIEARIQRIQSAQPLTRDSAIIEAGTLTTQMLARQLQALAPFIRQYDQQIAELFSQHPDRALFDNLPGAGDALGPRLLSAFGSEHDRFDNVLEPLSFFGIAPVTERSGKTTFVHFRWACSKFLRQTFHEFAGCSVHFCAWAKAFYDQQRARGKDHHAAVRALAYKWIRILFRCWKTRQPYDPQRYLAALAQHGSPLARAVKNSP

SEQ ID NO: 480093 - protein, 320 aa, unidentified
MSDSSVMIGIDVASEHLDVVAIGAAIPLARYGNDPEGHSALAEALVAIEAALVVMEATGGYEAALACALQAAGLKVAVINPRQARDFARSMGRLAKTDRVDAQTLAELAATLARRPDAERFLRPLPDAVQQDLAALVTRRRQLLTMLLSERQRLRLAVAVVRPSVEAVIEMIRKQLDDIEAQMTDHVHRHYAELDTLLQSAGGIGPVASASLIADLPELGRLNRRQIAALVGVAPYAKDSGQHRGRRRIAGGRFELRRALYMATLTATRHNPAIRAFYERLLAAGKLKKVALIACMRKLLAILNAMAKTRTKFDPLHAHT

SEQ ID NO: 480094 - protein, 362 aa, unidentified
MVTPTPREGYALAGFISEAIAMNKVALVGIDLGKHSFHLHGQDGAGRAVFRKKLSRLQMMRLFGNLPACTVVMEACAGAHFTARELNKLGHVAKLIAPQFVRPFVKSNKNDFVDAEAICEAACRPSMRFVAPKTEAQQTLSVLHRMRDALVRERTQATNQAHGFLLEFGISLPKGLATMKRLPSTLSELSLPPQLMQLLMRLHQHFLYLDQQIKELEGQLETQVAEDDLSSRLLSMPGVGPITASLLAVEMGDGRQYASSRDFSASLGLVPRQYSTGGRTNLLGISKRGDKHLRRLLVQCARVYLMRLEHQRGALATWVRCLLIRRHSNVVACALANKLARIAWAIAVKHTRYETEPNGLTA

SEQ ID NO: 480095 - protein, 414 aa, unidentified
MSEIVNKSCGLDIHKHFFIATILSISGEKQQQRFARDDDGILALKNWVISEKCDVVACESTSDFWVPIYDSLIKHLPVIIGNARDMKAFTHKKTDKIDSEVIAQLALNKMIQASRVFPKDHREFRSYVRLRHKLVQKRTDIKNEAHAILAPEMFNLNDVLADIFGKNGISILSGITSGKSTDQIIESLSPNVRKKGILIREILDREISQSAAVRLQVCLDLIKHLDDEVKSLEREIFNYAYGEHKREMEILMSVPGIGELGAATLIAEIENFKDFSSGDKLASWLGVVPNVYQSADKSYNGKITKRGSKEARWILTQIAQAAARKKNNKLKEFFNRKKKSIGHAKAIIALARKITTIIWHLITNDEMYEDETGYQKGEIQKRKIVETEIFSVDERIKIISGIIAIMGKEEGEST

SEQ ID NO: 480096 - protein, 442 aa, unidentified
MARNRKQQLEIMHPHAAGIDVHSDAHVVCTGPGEVQSFGGFTVDLQAIAAHLRQHGVTTVAMESTGVYWIPLFDLLEAEGFAVQLVEPGQLSSCGARPKTDVLDCQWIQRLHSYGLLRGSFRPPAAVRALRSYWRQRMTLVRLAANHVQRMQKALEQMNIKLPEVLSNLTGVSGTRIVEAILAGERNPQTLAALADKKCHASRTTIALALEGTWWPEHLFELKQAHGRVRFYTEQLVECDRMIELELAKQPDRSQGQEMPKKKRAHGKRRSDLQFNATEPLFKALGVDLTAIDGIEIGTALVILAEIGVDVSRFPTEKHFGSWLGLSPQPKRSNKTAQTSAVRKGSGRVKHALRMCAQSVGRTMTPLGVFYRRIKSRIGGRGACTATAHKLARLVYRMLKFGTTYVTQGLAEYEARMQEQSKRRLEKLAKKLGYQLVASASC

SEQ ID NO: 480097 - protein, 345 aa, unidentified
MTNMNYIGLDVHKKTISYCVKDVSGRIQQEGKIGSTRRELDCWMKTLPQPWTVAMEATIFSGWIYDHLLPHATQIKVAHPLMLRAIAAAKKKNDQIDASKLADCLRCDFLPECHMMPRAIRDRRRTLRYRHLLVRQMVQMKNRVSGLLMETGVEYNKQRLHKVSYFRELLSANGEVPPSLRPLLKLSRETIERCQKTEYALVSSLQRDPVLADRIKRLRTVPGVGPITALTWALEIGDVSRFGSIKKAISYCGLCGDERSSADKAMRMPLSKQRNKHIQRALVEAAKLAPRQNHEMAVIYDQERQKGNSNRATLAVARKMVAYLLAVDRQQRDFVPAEERRSTAA

SEQ ID NO: 480098 - protein, 387 aa, unidentified
MLSVGIDVAKRSHEACVLDATGQVVCPSLKFPGTRDGVAKLVNLLQGQSSPATIALEASAHYWQGLYHHLAARGFPVVVVNPLQTEAYRSTGVRKVKNDRRDAFVIADFLRIGRVQANYVPKEVIVQLRELTRYRMDLEDQIGDAKRRILTVLDRVFPEYPDLFSDAFITSSRSLLKEAVSAADFASFDLEELTRLLHKASRGRLGREQAQALQEKARDSLGLAALGPVAHVKVKALLEQIELLERQVRDVAATITGLMARLPQHLITIKGIGPVLAATLLAEIGDVHRFPSLESLVAYAGIDPSIFESGEFVGRRQHMSKRGSPYLRRALWLAAHSTRQWNPDLDAYFRRKLAEDKPYKVAMGALCRKLLARVYVVLKEGRPYHVR

SEQ ID NO: 480099 - protein, 492 aa, unidentified
MVPDLVIATLVTLVRSMGHDPVEEITRRTVWPDSQPKGEDMDPKMGDNAGLSLDCIELNAAGIDVGATEVYVAVPPDRDPHPVRSFPTFTADLRQMAAWLVQCRITTVAMESTGVYWIPPYEILEQAGLRVCLVNSKHVKHVPGRKSDVQDCQWLQYLHSVGLLHASFRPDDKICAIRALSRHRASLIESATVHVQHMQKALTQMNLQIHHVLSDITGLSGTAILQAIVDGERDPSKLAALCNQRVRSDQQTVIKSLVGNYRSEHLFTLKQSLAAYKHYRELMAECDGEIERLTRQLNSKIDPPQKEPMPPADPRFRKRSKNQFHCDMSSELTRVLGVDLTTIPGISALTAHTLLSEIGSDLSRFPNAAAFASWLALCPANKKSGGKVLSSKTRQTNSRASRALRLAAQTLASSKSHLGSFYRSMRARLGGPQAITATAHKLARIVYHLLTTGQTYDESVFVMEDQKQAQRQEKRLRKQAESLGFQLVPIAA

SEQ ID NO: 480100 - protein, 318 aa, unidentified
MSDLIFIGIDVSRDTLQVASSIHPRTWQHPNNASGIEALCTELLGLSPALVVLEATGGYEFEAACALQAAGLAVAVVNPRQARDFARAMGALAKTDSLDAHSLAEFARVVHQHPQRERFVKPLADAQLQQLQALVLRRRQLVGMLTSERLRLRICHASTRPSIEFTIAFLKAQIEDIETECAGHVQAHHEALAQALGSVKGIGPATIATLVAELPELGTLTRQRIAALVGVAPLNHDSGLMRGKRAIYGGRSDVRKALYMATLVAVRHNAALRTFYQRLVGAGKPKKVALVAAMRKLLGVLNALAKSGQHWDDSFHMT

SEQ ID NO: 480101 - protein, 464 aa, unidentified
MGTLQRTCAGLDVHKDTVVACVRWLDDRDRVHSEVRTFGTTTPDLLQLLDWPRARQVPIVAMESTGVYWKPLFNLLEGAMEVLLVNPEHIKKVPGRKTDVKDCAWIAQLLQHGLLKASFVPGRPIRALRDLTRQRTQLTGEKASVANRIQKVLEDANVKLGSVASDVLGMSGRDMLRAIVAGQTDGSALANLARGRLRDKLPQLRKALTGRVTDHHRFLLRLHLDHLPHLEALIGQLDQRIHQEMEKGRPPEPPSGEGGASETVAANAAPAPATAVAPRGVPEQPQACQPPPPSDGPRLPLWSALWLLTTIPGISRRTAEVVVAEIGSDMSRFATGGQLASWGGLCPGNNESAGQRRSGRTVHGNRWLRTALVQAAWAASRAKKTYLAAQYRRVARRRGKKKALIAVAHTLLVMCYQVLKKGQPYQELGPDYLDQLEPGRRTRQVVRQLESLGHKVTLEPNAVA

SEQ ID NO: 480102 - protein, 367 aa, unidentified
MRRYHPDADAVATDVTVYIGIDVAAEELAVCVLGSDLEVLARVKLPYAEEAVSWLMDRLPGCSVHAVYEAGPTGYVLLRWLRRYGCRTAFMVAPSLVPVASGDRVKTDKRDALKLATLLATHNLKDAFVRDLTDEQYADRQVVRCRTQARQKRTTIQIQVKSLLLMHNIRLPREMKNWSKRTRAWLNQVETGHCSVGLALREQLRWWEEAHAAVKRLDQLCKGLAEEERFAADVKRLRTIPGIGLTTAMLLLTELPDLPARFENGEALARYTGLVPTEYSTGKTQGRRGHLPGDGNAEVRSALVQAAWRLIAKDAFQRERYERLRPRCGGKKAIVAVARHLAMTVYAMMRDQQNYGRQAKEELQAAA

SEQ ID NO: 480103 - protein, 350 aa, unidentified
MKERASASGGCWKVQASVSTRLGGPYVRSLRRKLETTRITNSPAELRRVIARAGKHPRVVLEATYGWYWAADTLAAAGAKVHLAHPLGVRGFRYRRVKNDEKDAADLADLLRLGRLPEAWIAPAEIRELRELTRYRIKLVRLRTSCKDQVHAVLAKLGIPVTCTDIFGVWGNTWLDGLELGQPYAGKVASLRTLAGELTAEITVLEAAIADLLARHDGYHAIRALPGIGPVLGAVLVAEIGDITRFATPARLCSWAGLTPRQRESDTKVSRGHITKQGSPLVRWALVEAIQHVPAGHPLRRRKEDILARRGAQAKNIAKIAAARQLLTWVFYAMRDGQVRALATATQKAA

SEQ ID NO: 480104 - protein, 316 aa, unidentified
MTQTIIAAGIDTSKAKLDVAVHGDRGHWQVDNSSAGWRRLASAFSKIGVTRVGIEASGGYERGVIGHLQEHGFAVLLLQPMQVKAFARAQLRRAKNDALDAALIAAYAAFVDQPKSAPDARLSELADQLTFVEQIEQDIARIKTRLEHVVAARLRRMMMADLTRLKARRSAELARISRQLRDHHDLGRRLDLVLSVPGIGERTALALIIRMPELGSISREQAAALAGLAPFDDDSGTHKGQRHIAGGRARLRRSLFAAALPAAFRWNKALIALYARLTRRGKAHNAALIACARKLLIYANTVLARGTPWVPSPTAA

SEQ ID NO: 480105 - protein, 408 aa, unidentified
MNMNAVGIDVSKRKSTVAVLRPGGKVVVKPFDVPHLSADFQSLEKLIRELDGETRIVMECTGRYYEPVARELSQAGFFVSAVNPQIIRNFQGQDNPLRKVKTDKADSVKIARYTLDSWANLKQYSLMDELRSQLKTMNRQFDFYMKHKTAMKNNLIGLIDQTYPGANTYFDSPAREDGSQKWVDFIGTYWHVDCVRKMSLSAFTDHYQKWCSRRKYNFSKSKAEEIYGKAKELIPVLPKDSFTKRIIKQAIDQLNAVSQTVEQLRALMNETASKLPEYPVVMAMKGVGPSLGPQLMAEIGDVTRFTHKGAITAFAGVDPGVNDSGDYSQKSVHASKHGSPVLRKTLFQIMEVLIKTKPDDAVYRFMDKKRSEGKPYYVYMTAGANKFLRIYYGRVREYLASLEESKES

SEQ ID NO: 480106 - protein, 347 aa, unidentified
MKKMLKQVTGIDVAQDELVCCQGRIYEDLSIELFANKSFPNTLKGIEALIKWVEKYGPAGRFVMEATGVYYEDLAYYLSDHNYQVSVVLPNKISNYMRTLEVKTITDNSCSEAIAQFGLQRNLENWQAPTGIYRTLRKTTRERYQVVEARTVAKNQLHAENAEAHPSPKAIARVKKLIAFLDKQEQEIKAELNTLISEDPEVKKIVMILCTIPGIGILSAAAVLGETNAFNLIRNKRQVTSYAGLDVREKQSGTSIKGKARISKKGNKYLRRAMHFPALAAIRHDERFKSIFVRLVSKHGIKMKAAVAVQRKLLELMFTLFKTQTAYDKDYYQRIKPVESRAMLLKN

SEQ ID NO: 480107 - protein, 455 aa, unidentified
MPASPHEVEVIDSDDEERVLGIAAAIDVAKASGMVCVRSPHPSIEGRRMSRVWEIDSMTNTILALGDDLVAMGVERVVLESTSDYWRPFFYLLEAAGLSVWLINARDVKQVPGRPKTDKLDAVWLAKLNERGMLRPSFVPPREIRVLRDYTRLRTELVEERSRHAQRLEKLLEDALIKLSSVASDLLGVSSRHMIEALIAGERDPEILADLARKRLQAKRPALIQALTGRFDDHHADLARVLLDQIDACTDKIDRLTGRIEQLVAELPDPPADHHDGGVVDAVPVGRDPQARRLTPVERLDEIPGIAPRAAQIIIAEIGLDMSRFPTPDHLVSWAKLAPQTVQSGPRTKAGKTGKGNRYLKGILGEVAITASKGDTFLGERYRRLVRRRGKQRALVAVARSILVIIWHLLNDPDARYIDLGSDYLARHVDPARKARDLVRQLHALGLDVTVVPAA

SEQ ID NO: 480108 - protein, 354 aa, unidentified
MHQPEQAAEVIIGVDTHKDTHTAVALNTLGARIGAITIPVSQNGYRQIEAWACSFGSVRAFGIECTGSYGAGLSRALQASGHRVLDINRADRSARRRHGKDDPLDAEAAARAVLSGQATTLAKSGTSSVEMIRHLKLARDSAVKARAQAMQMLKGLIVSAPAELREQLEGIRGKVTLVRHLAALRPGPMTSTTASAKVGLRALARRWLSLSKEIEGHDRELDALAAAHSPELITAPGIATGTAAEMLILVGDNPERIRSEAAFAKMCGACPVPASSGKTSRHRLNRGGNRQANAALHRVIVTRMRCHQATIDYVRRRTAEGKTKAEIMRCLKRYVAREVFTHLCKPRPPASGSA

SEQ ID NO: 480109 - protein, 355 aa, unidentified
MSQEKYIGMDVHQATISVAVMDGNGKLVMECLLETKAATILEFVQGLRGTLSLTFEEGTSAAWLHDLLKPHVSRLVVCDPRKNALLKEGNKSDRIDARKLAELLRTNQLKAVYHGEHGIRTLKELGRSYLTLSKDVTRTMNRIKSLYRSWAIPCAGTSVYAPRHRAEWLAKIVEPGVRIRAERLYQQLDGLQSIRQQARRELLQESHQHPAVELLRQIPSIGPIRSALLVALLQTPHRFRSKRQLWAYSGFAVETHDSGEYRYVRGKVQRNRERITVRGLNDNHNRDLKNLFKGAAISASTRPGPLHDFYVARVAQGMRPTMARLTLARKVAAITLTMWKKGVSFDPQQLSRQSV

SEQ ID NO: 480110 - protein, 349 aa, unidentified
MLIIGCDLHTRYQVIAMLDTQTGEVVTRRLEHENGEAQAFYAALPPAWIGIEATGYTPWFERLVAEFRHELWIGNPAEIRARAVRRQKTDTRDAEHLLDLLRMNRFPRIWVPTPEERDVRQLLKHRDKLVRMQTSVKNQLHFLAMSQGVCRKRKLWSRRGRAELEALGLGPWATERRKELLHLLDDLGPRLHQLDAAVQQEAERQPQAVRLMAQKGVGPVTALAFVLTVGPVERFPSSRKLVSYLGLNPGEDSSGGHQRLGHISKQGNQMLRWLLVEAGHGVAQFDAELRRKYQRLKFRRGGNVAKVALARHLAVRLYWILRQASSATPPVRMSSSPENRKVETTPSIL

SEQ ID NO: 480111 - protein, 355 aa, unidentified
MLIIGCDYHPGFQQIAYIDTETGELTERRLQHREEAEHFYQELKGRELAVRVGMEASGHARWFERVLRDLQFELWIGDAAAIRTKRVRKQKTDRQDAQLLLNLLLEDRFPRIWVPDAENRDLRQLLWHRHRLVQMRTRVMNQLHVVALNEGVRRKKALWRPAGRSELESLVLARWASRRRQDLLDLLDQLSPKIQELTRALEEEVAKRPVTRQLMSHPGVGPLTALAFELVIGVPERFQCGKQVASYAGLVPTEESSGDRRRLGHISKQGNLLLRYLLVEAAQVTVRSQPQWRSKFFHLAMRRGRKIAKIAMARKLAVHLYWMWRQGRNYGELEKLGSHAGEPGHRHGVQTPPTK

SEQ ID NO: 480112 - protein, 348 aa, unidentified
MNYIGTDIHISTLDFKVVGNLGKVKMAREVTTSAPNFLDFIKSVPAPRQVIIEEGPLAAWLLEICVKNGEHLIISDPKRNKWIGASGEKEDPIDAEKLAQLARGGYIKEIHHPLGQRRRFRELITAYHDTNKSIVRIKNKIKAKFLQNGIQCPGKTVYSSKQRAEWRQKLPQEPALLVIIDSLWQQLDQIQDNLESILAEAKLEANRYPEIELIDEIPGIGFIIAATIVAILENPHRFANKRKVWAYAGLGIVRKSSANKTYAEKLGKEFNRMLKCVVEEAAQAAINTETDNAFRRSYARMTIQKGIDPHHAMLTVSRDIIATVWAMWKKGEHYNPAIDRRVKTEVEV

SEQ ID NO: 480113 - protein, 340 aa, unidentified
MGEITTIGLDLAKHVFQVHGVDAEGARVLRKQLRRGQVLSFFSRLPRCVVGLEACGTAHYWARELVALGHEVRLMPAQYVKAYVKRNKNDAADAEAICEAVVRPTMRFVPVKTAEQQGALLLHRGRERLVRQRTALVNALRAHLAEFGVVAPQGLRNVGKLIAIVRDEGDTRLPALARAVLQVLATQIEQLEDAVTLLEKQLMAWHKNNPVSQRLATIPGIGPIIATAIASTVVEPSGFRSGREFAAWLGLVPRQNSTGGKPRLGGISKRGNRYLRRLLINGASANLLRSKATNADPWVIGLRRRRPSLVVAVALANKTARIAWAVMQRKENYQCVAAAA

SEQ ID NO: 480114 - protein, 369 aa, unidentified
MIVRIVTYNKERPMNDAKYIGLDVHQATISVAVLDSAGKFVMEAILETKAETILQFMRGLRGSLHVTFEEGTWAAWLHDLLKPHITRVLVSDPRKNDLGKNGNRNDRNDSRELAALLYRNQVKPVYHGEHGLRTLKELARSYLTLTRDLTRVMTRIKAIYRSWAIPCAGQQVYGASHRAGWLAKLSEAGVYRRAEFYYQQFDALAPLRQAARRELLAESRKHSAVELLRQIPSIGPIRAALLVALMQTPYRFRTKRQLWAYIGLALKTHTSGEYRFERGQLKRFKKTPAIRGLNRNHKNHDLKNIFKGAATWAASNCGPFQNFYQACLARGMKPHMARLTLARKIAAITLLVWKKGVDFDAEHLKQQAA

SEQ ID NO: 480115 - protein, 413 aa, unidentified
MDVLYRHCAGLDVHKETVVGCVRLVTADKIVTEVKTFATTTTGLLSLSEWLSANECRHVAMEATGIYWKPVWTILSDGEFELTLANPAHVKNVPGRKTDVNDATWLAELHAHGLIRASFVPEPGTQELRTLLRTRKQLVREKVSHTQRVQKTLEDANIKLDVVISNVIGLSGRRMIEAMIAGESDPAKLAALADRRIKASQETLREALRGRVRKHHRFLFRLHLQQIDALDAAIATIDQEVDAGISACFRAGVELLSSIPGVSTLSAEIILSEIATDMTRFPTAGHLVAWAGLCPGNDQSAGKRRSNRLRKGAPWLKTILVQCGWAAARVKRGYLPAQFHRLCARRGPKKAVCAVAASILTAIYHMLTSGTLYHDLGSEHFQRRAKHTRTKNLVKRLENLGFSVQLTPLPAAT

SEQ ID NO: 480116 - protein, 340 aa, unidentified
MIAVGVDTHKERHFAVVLNQLGELLGELVIEVCAAGYGELERWAAGLAPDAQQIVFGIEGAGSWGAGLCEHLQRCGCMVVEVERPRRRDRRAGKSDRIDALAAAKRVLVGEGTSTPRGRGILSVLRALLVAQRSATCERTRLLNEIHALHATAPVALRERVGEGSGKQLERRLGVMRARASAPVDERAVFAVMRDLAARSRALAVDARRYERELADVVGSLDATLLGEVGVGPISAAKLLVCDPARFTSEAAFARCNGTAPIPASSGKTVRHRLNRGGDRQVNNAIHTIALSRSLHHPETRAYLDRRIGEGKTKREAMRSLKRHLSRRLFQRLIEVPLTL

SEQ ID NO: 480117 - protein, 353 aa, unidentified
MSIAEDADLVVGADTHRDTRTAAICDFRGRVLSQLQASATPDGYASLLDWASAAAAGQRLAWAIEGTRHYGLGLVRHLASAGRQVAGIDGTRHVGKRRAGKSDPIDAVRAARELLARPRPGQLRADGDREALRLLMTDRDNAVQPGKTARTVLTSVIVTAPAGLREELRHLPAERRARACAALACPGGADRLTRVTYQTLTRLGQRIAALAAVAAGIEAQIAEIVEEMAPGLVTAEPGLGVLSAAQILLSWSHAGRIRSEQAFAMLSGTAPVPVSSGRTDRHRLSDRQPNRALHVIAVSRMRHHPPTLAYVQRRRAEGKTDKEIRRCIKRYLARHLYRALTRFERLGSVKLTV

SEQ ID NO: 480118 - protein, 346 aa, unidentified
MKKVLKQVVGVDVAQKELVTSLGRMYDDFSIELYSHRVFKNTEKGMLTLLDWVKKQTTEEAKIHYVMESTGVYHQKFAYYLDESFLDLSVVLPNKIANYIRTLEVKTITDKTCSEAIAQFGLERKLNLWHAPNKVYMELQQLTRERDQIVAERSAIKNQLHAETIQAKPNTNSVRRLKERIAFLNRQEKEIKGEIDVIIDNNEDVKKEIKNIISIPGIGKLTAVIVLAETNGFELIRNKKQLTSYAGLDVKEKQSGTSVRGKPRISKKGNRSLRKAMYLPSLSAVKYDENFKGQYVRIVSKHGIKKKGLIAVQRKMLELIYTLFKNKTVYDKNYESKKSSAKNLVA

SEQ ID NO: 480119 - protein, 341 aa, unidentified
MDDVTLVGIDLGKHSFHLHGQDAKGKALFRKKMSRKELIEFFATFHACTVVMEACAGSHHMARKLAEFGHTVRLISPQFVRPFVKSNKNDFVDAEAICEAASRPAMRFVTPKTESQQTLSVLHRVRESMVRERTRTVNQMHGFLLEFGISLPVGNTAVTRLPSVLAMHELPPRLVAILERLHQHFKYLEEQIGEIDRELARQLADDEVGQRLMSIPGVGPVTASALAAKMGDAKQYGCSRDFAASVGLVPRQFSTGGKTNLLGISRRGDKNVRRLLVLCARAYMRGLEKRTGRLADWVRAMLAQRHSNVVACALANKLARTAWAIVARRTTFDAGYATHPI

SEQ ID NO: 480120 - protein, 323 aa, unidentified
MSDPVVLGIDISKQKFDAALLIGGKLKHKSCKNSTEGFETLSQWLRKQGVDCLHACLEATGSYGDELALYLYDAGHTVSIVNPARIKGFAQSELLRTKNDKMDAGLIARFCLAMHPEPWEPPAPEIRALQALVRRADALIGMRTQEMNRLGTAPVTVKPSIREYIAYLDEQIEKIKQQIAGHIEGNPELKNKKDLLSSIPGIGPATIAVILAEINIFKRCDEVRKVVAFIGLAPKEKVSGTSIKGKPRLCKIGHARLRKALYMPALVSIRYNPVVIDFYRRLKSKGKNGKVIVCAIMRKRVHIIFGILKSGKPFDPNYKPHFA

SEQ ID NO: 480121 - protein, 348 aa, unidentified
MKNKSFVGIDISKNVIDVSIFREDTNIKMFPHEVFNNTRKGFGDMCSWLKKSRVVLSQALFGMEFTGCYSLDLEKFLTSKNYSFCMLSTRIVKHHPMGTIDKRDKNDSAKIADFLYRYDGTECAKPYKLPSKAMQQLKQLVNERKFLVEQRTNFMNRMQMFETKEDSAMYESYIKKLNHDIEKIDQEECELMSKEEDVFDTFQNLLTIPGIGFVNATNIIAITRNFTAFDTARQYARYVGVAPCCHTSGTSVKWRARPSAHCNGQVKADLSMAALRAVEYDVEMQMFYNRKLGGRKDSDTKRKALNAVKFKLIRRMFAIGKQKRKWEVLNTSDDRKNLHIEKSKASEL

SEQ ID NO: 480122 - protein, 407 aa, unidentified
MDVLHPKCAGLDVHQQTVVACARTGAGKAVTYDVRTFGTTTAELLALSDWLTAHGCTHVAMESSGVYWKPVWHVLEGHFELVLANARHIRNIPGRKSDVNDAPWIADVLAHGLIRGSFVPPEPIQELRDLTRTRQQLVREIAQHTLRIQKTLENANINLTAVLADVLGSSGRAILRALARGERDPERLAELASDRVKASRAELVAALHGRVTPHHRFMLTLHLTQIEALEAAVREVEARLGDALAPFRAALDRLITMPGVSETVARVIVAEIGFDMTRFPSAGHLVSWAGLCPRLHESAGKRLSNRTRSSNPWLTTTLVQAAWAAARKKDSYCRAQFLRIKSRRGPKKAVLAVAASMLTAAYYMLKHGVHYRDLGADHFDRRDKAKLAKRLIARLHDLGLTVEVRAA

SEQ ID NO: 480123 - protein, 410 aa, unidentified
MAERFVGIDVALREHRIAVLDRDGEAVGQSFTIAASTDGVATLLRTLDARDAPAAQTLIGLEASGHLWENLEAALVSAGYRVLVLNPLQTRRYRDVVRRKAKTDDIDAHVIAGLLRSGAAQASYVPDEQIQSLRELARLRARLMADRQDYLRQLIAQLDVVLPEHHAVLGDLLTARARGILAQFPTAQHLAHANPRAIRRAAAEAGARGFSLDDATGVRDRARRSLYSGKAAAARAHVVRTLVSQLERLTSAIDEVDCAATTLLPPSEPGTGPSDAELLQTIPGIGPQTAATLLGELGALTRFTDARALVAYVGFYPVINESGDRAAPPRLSRVGSRIARHSLYLAAVNAVRRSGEWRTIYLRKKAQGKTAKQALVVVAVKLLHAVYAMLKHRQPFNPSRLLVAPATIGS

SEQ ID NO: 480124 - protein, 332 aa, unidentified
MHGNAADVSIIVGVDTHKDIHVAVAIDALGRRLGELAAPATAAGYQQLHRWAQDYGPTDAFGIEGTGSYGAGLARYLHHRGVKVIEVNRPDRATRHRLGKSDPIDAESAARAVLAGTATGTPKHGEDRVEMIRVLKLVRDSAVKSQTQATNQVKAVLVTAPSELREALADLPRIALLERCAELRPGALATPLATAKHALRLLARRALTLRAEAKALRTELTALTAATSPALVELAGIGADSAAALLISAGDNPQRLRSEAAFAALCGTNPIPASSGKTNRYRLNRGGDRQANAALHRAIVTRMRWHEPTKAYVERRTAEGKTKPEIMRCLIG

SEQ ID NO: 480125 - protein, 367 aa, unidentified
MKKISIRAAAQSRNISQQKLTLGLDLGDRNSWYCVVDEAGQIQLEQRVRTNAKALQEVFAAMPRSRIALEIGTHSPWISRLLSELGHEVIVANARKVRLIGESRKKDDRLDAQTLARLARIDPELLYPVKHRSAQAQADLTLIRARAGLVRARTGLVNTARGLAKSYGERLRGCNVRNMNPEKAEGLSPELQAALEPLLNAIKSLSERIVEYNERIENLAQQSYPQVALLKQIKGVGTLIALTYMLTLEDPHRFRKSRDVGCYLGLQPGRRNSGQSEPQMHISKEGDPYLRTLLVQGAQHILGPFGIDCDLRRWGLKLAERGGKSGKKRAIVATARKLAVLLHHLWISGEVYEPLHNSRRTTVAAAA

SEQ ID NO: 480126 - protein, 349 aa, unidentified
MKKIVKQVLGIDVAQKELVVCLGRMYEDWTPELCSHKTFANSKKGFDELVKWVKKLAIEGTAVRYVMEATGVYHESLAYYLEAKGYEVSIVLPNKISNYIKTLEVKTITDKTASESIARFGLERKLDKWKRPKQIFKNLKQLTRERDQVVETRTLAKNQLHAEMAEAFPNPGTLHRVKALIKFLDKQVAEIIKELTELVKQDSQVKEAVELVCSIPGVGRLTAATVLAETNGFELIRNKRQLTSYAGLDVRDKQSGTSIKGKPRISKKGNRHLRKAMHLPALAAIRHEKKFKAVFVRLVSKHGIKMKAAVAVQRKLLEMIYTVYSKKTAYDKNYLNHTETEIEKKSSLA

SEQ ID NO: 480127 - protein, 396 aa, unidentified
MISVGIDVSKGKSTVCIMKPCGEILESPFDIGHTADELDSLISLIKSFDEETRVVMEDTGHYHLPVATYLSSHNIFVCCVNALRMKKFCSQSLRRAKTDKIDSIKIASFGITYWNELVKAYPSNVIYDELKFLARQYYQVTGMLVKSKVNFSNLLDQVMPKINDVLSNQGENHKLTEFVSRYIHFQNILDMGEMKFTSDYCKWAKKKGYRLNERKAAEILALAQNGIPTLPNSQSVKIAVSEAVKLIHSIEESRNTILAQMQDLCNTLPEYSVVKEMDCIGDTLAPRIIAEIGDVRRFKNKHSLIAYAGIDAPPYQSGAFHASERHISKRGNSYLRKTGYEIMQSLIKHKPADNAVYNFIQKKRSEGKCGKEAMIAGLNKFLRVYYGKVMEFYSEH

SEQ ID NO: 480128 - protein, 463 aa, unidentified
MKIPQSTIRLLTWRVGKILLNREVSIMKFNTQNEKIEAITETTLVLGIDVGSEAHYARAFDYRGIEYSKKPFKFSNTEAGFVTLKAWILDIKEKHGKDKVVPGMEPTGHYWFNLGKFLQDNEMKPVLVNPHHVKKSKELDDNHPTKNDRKDPKVIAGLVREGRYMIPYLPDGVYADLRTASNMRFQLQGELTRIQNRISRWFNIYFPEYKTVYGKPDAKSGMLILKKAPLPKDILTLGVEGVNQIWRDAKIRAVGKARAKTLVEAAEHSVGSKEGEVSARMELRMLLEDYESRNTRLQEVMALIEELIKQIPMAEKLLEIKGVGIRTVSGFLAEVGDISRFNNPKELQKLAGLALVENSSGKHKGETTISRRGRKRLRYLLFEVAMSLVAKNKEFGELHHYYTTRKLNPLKKMQSLMAVAAKLLRVFFAMLTKGVDYDPQKMISDIKRPAVYLQAAKTKQITI

SEQ ID NO: 480129 - protein, 452 aa, unidentified
MLKRTAGDRPELKLVNVGAAAIDIGSKMHMAAVDPACTDVPVRSFGTFTRDLHELADWFRACGVTSVAMESTGVYWIPVYEILEQRGFEVILVNARYAKNVPGRKTDVSDAAWLRQLHSYGLLRGSFRPDAEIATLRAYLRQRERLVEYAAVHIQHMQKALMEMNLQLHHVVSDITGATGMRIIRAIVAGERNPDVLATYRDVRCHSSIATIRAALVGNDRHEHVFALTQSLELYDVYQAKMLDCDRKLEVLIAALNNKGAKPVGKLSKPRIKTKQVNAPTFDVRTALLGVDLTEIHGLGPSLALKLIGECGTDLRAWPSAKHFTSWLCLAPGNKISGGKVLSSRTRRSSSRAAALLRLAATTVGRSDTALGAFYRRLASRAGKSKAVTATARKIAVLFYNTLRHGMSYKDPGAAHYEQQYRSRVLANLQRRAKSLGFVLQAIPEDANPAVS

SEQ ID NO: 480130 - protein, 346 aa, unidentified
MSVAEDADLIIGVDTHLDTHTAAICDARGRAVSQLQVAATTAGYEQLLAWVRSAAGDRQVAWAVEGTRHYGLGLARHLSSAGEQVSGIGCSRHAGKRRAGKSDPIDAVRAARELLARPHPEQMRADGDREALRLLMTGRDNAIQSAKTARTALAAILVTAPAPLRERLRPLPRERRAKECAALTCPAGTDRQTRVLHQTLIRLGQRITALAGEAAGLETQIAEIAGEMTPGLAAAEPGLGALSAAQILLSWSHAGRIHSEAAFGMLSGTAPVPVSSGRTDRHRLNRLGDRQLNRAIHVIAVNRMRCHPPTQAYVQRRSADGKTDKEIRRCIKRYLTRHLYRTLSKT

SEQ ID NO: 480131 - protein, 315 aa, unidentified
MTKQLCAVNVGVDVGKGQLDLYLLERDRALTVPNEEHAILTLIRVLGRYRIERIVIEATGRLEQPFVRAALAAGLPVVVVSPLKIRRFADAIGQLAKTDEIDARLIARFAAAVKPLARPAPDANAQIIKDLVVRRRQLVSLRTMEKNRRQVMPQELKAGIDRIIKTLDRELKRLEQLIDHAVDQHAPSRHKRELLTSMPGIGNSVAATLLGDLPELGSLNRREIASLTGVAPFNRDSGKLRGKRRIRGGRAHSRTALYLSAMVATRFNPDIKRFYERLVSAGKHKKVALTACIRKIVTALNAMLRDNSPWQPAMT

SEQ ID NO: 480132 - protein, 400 aa, unidentified
MFVGWDWASTTHDVTVIDDAGRIVDRWAPEHTELGLEATLARLTRHGRPEQLAVAIERPSGLVVDRLLAAGHPVIPIHPNAFHAARPRWGAAAAKSDPGDSFKLADYLRTDGHRLRRLRPLDAATRELQALSRLRDDHVAAKTAASNQLGALLDAHWPGAKQVFSRLGSQIALAFLDAYPTPESAARLGEARLAGFCRRHSYRGGRSPGELLGRLRSAPAAPVGLAPEVLAELVGAQVRLLRTLLATIAELDRALGAGLLGHAKAGLLAPLPRIGEVSLAQVVAEVGPILDRASTVEHATAECGAAPVTKASGKSKAVTFRWAANTKARNALATFAGNSRHSSPWAAKVYADARRRGKHHPHAVRILARAWLRVIWACWHNDTIYDPARHGAERRLAART

SEQ ID NO: 480133 - protein, 345 aa, unidentified
MTQYKRIGIDTSKAVFTLHGIDHNDKPVLRINLRRPQLVRFFRKLPPTEIVLEACGAAYHWARELSALGHQVRLIPPQYVKPFVKRGKNDRNDAGAICEAGGRPDMRFVPVKSIERQANGMMLKVRQRLLDQRTALTNALRGHAAEFGVIAARGLSRIEPLLAAIERETAIPAEAKEMFALLGEEIAHLDARVEQFDARLAAAHKANEMSQRLATIPGIGPVTGLTLALEIDPASFQSGRHLAAWAGLTPKEHSTGGRQRLGGISRAGHERLRALLVAGATSVINAAIRFGDHRVSEWLRGLLRRKPRKLAAVALANKMARIAWVVMTRGEVYRRPAGAASAVAA

SEQ ID NO: 480134 - protein, 365 aa, unidentified
MDNAHYTTIGMDVSDRKTQVCVMAKDGKSPKIVMETVIPTTKEGLAKFLSTQDRSAPVAFETGMHCRWMNEVAEGLGFKVYVANPCRLRMITESKTKNDVNDARMLARLALSDPGLLHPVKLRGPEHQRMLNLHEMRNLLVKQRTGVIVQMRAIAKAMGFRIPKCPTGSFHRLDTSPWPREFRDIAWPMLKNLGQLAVTIKTYERQIRELAQTPTFKAQVDRLMEIHYVGLYVATGFVAVTGGDMDRFEKPRDVGPWLGLTPRQDQSGDIDRQCHITKAGSPFMRRLLVESAQMILRDGSADTDLKARGRRMCARGAKIAKRKAVTAVARALAVLMVAMLKKPDAPYVPLSGRCEKELLAMRATA

SEQ ID NO: 480135 - protein, 351 aa, unidentified
MKSINKQVQGEELFVGIDLHKHRWHVTVRTADVEIFSSSIAGRWQELKKVLNRYNGCRIHAVYEAGYFGFWLFDHLTQYGVDCIVTPPSLIPQEHGNRVKTDRLDSGKLARLLAKGLLKGIWVPSTKERFHRQVIRRRRQLVGDRVRTQNRIKSELCFFGIDLPAPQGQWSQVYFANLQRIKFKNRWMQQSFNHLLEQYDFLCAQIDKQTQLLKQLAKLPLYRDRVKILCSIPGIGVLTAMEILLELQDFSRFRRAEQLAAYVGLTPSQYSSADKIRMGRITGAGKNAVRSALVESCWHLIRKDKAMRKKYEQIKARAGAKRAIVALSRKLILCIRRLLLDNRPYVYEPVI

SEQ ID NO: 480136 - protein, 425 aa, unidentified
MKSRLIKAQNQRVERISTSTLVVGIDIAKENHAAQAINFRGSVLTNRTITFANSRSGFEYLERSIRKLQQTHGMDDVIVGMESTGHYWFNIANWLVQQGIDVVLVNPMTTKRNKENRDNSPSKSDPKDALVIADAVSRGYYTAFSPKEEAFRRIRVLVQNREHWVIESGRIENRIHRWLDIRFPEYTQAFEDIFSTRSLATLRRFPAPSDLVSMTPEQMVDTWREYMSRPGGVRGMRKAAELLELARRSVGDPIALEEDKWELQHLLDEYQNVRRIIDEADEKIRKLLPVMPCADLIRSVGASIPATAAILAFGGDLRNLEHGKQLLRKAGLNLAERSSGKYKGQIKLTKRGNALLRKHLYFTVYHLLSHNHAFQTLHAHNLQVKRMSKMQSIMKLIGKLARMLVAMAREGQAFSPDKAQYPLTA

SEQ ID NO: 480137 - protein, 421 aa, unidentified
MQVQLSKCAAFIGIDWADRKHDVCLQVAGVDACERSVLEHRPTVIDAWARDLRKRFDGRPVAVCLELSQGPIVSALLEHDFFVIFPVHPSTLANYRGTFTPSGAKDDPTDAAVALEILRRHPDKLAPLRRESVDMRALRRLVESRRVLVQDRVRVTNRLIYALKAYFPQVLDWFRDKETDVFAAFLERWPSLPQAQRARHDTLIDFFHAHNVRRASTIEKRIRAIQSERPLTTDPAAIEPALLLVQILLPQLRALSAGVAAFDKEIARRCQVLPDYRLFANLPGAGKVFSPRLLVAFGEQRDRFANAAAFQKLTGIAPVTQRSGKSHWVHWRWACPIFLRQTFVEWSASSIPHSFWARAFYERHKAKGASHNAAIRALAFKWIRVLFRCWVDRVPYDESRYLAALQKRHSPILKFAAQAVS

SEQ ID NO: 480138 - protein, 430 aa, unidentified
MAKVNATTDARILVGIDISKNRHEVLIAIPGKTRRRRMTVLNVAADYQRLIETLRSFELPVAIGFEATGNYHRALVFALGAAGFELNLVSSVALARTREALHNSWDKNDPKDAQVILRMLEIGAVQVFHDPLVAGTCDIQELSKTYEMVARAKTELWHRILTHYLPLYFPEADRFHRSSRGDWFLAFLEAFPSPHLITAMEKDEFIAVAWPIVGRRVGKAALLADIYETSKTSVGLPVDPGSDALSMFRLVLRQGRSLIQQRNAIEARAAELLANHPDYRLLRTIPGIGPVNALAVLAEAGDLRRFRHHRQFLKFCGMDLATVQSGLFRGKSKISKYGNVRLRRVLWLASQAAVLKPANSFRDKFERYISQDRHNPDLRRKAYTAIAAKMARTIHAVIKSGEPYRPFFEGASPSGRTPFYRAVEAPSATS

SEQ ID NO: 480139 - protein, 406 aa, unidentified
MWFAGIDWADAHHEVVVIDEEGTRVGQLRVSHSADGVNQLMVWLREMGDIATCPEHLVCLIETTQGVLITALLEHGLPVYPVNPKLVDQSRRPSGAKTDAIDAAILARIGRRDWRELRRLQPDPPLIAELKTLTRDQDALIQTQTRLTNQLIACLKAYYPAALQWFDRVAQATTLTFLEAFPTPSDFRGATLAHLVALLRAGHYPVKAEVKAQQLWEQAQAPQLQAAAALTHAKTRYMLALVAQLRLVMQQVAAYDSEIARVFATHTDQQVFASLPGAGPRLAPRLLAEWGDDRARFSSAAQLQALAGTSPVLIQSGASRRTRMRNACNKSLRNVMYQLARQSLRHEAWAKRYVERKRQSGKTFTMAVRALANQWVRILYAVWQQRAVYDPQVFAQAQQAHGAATG

SEQ ID NO: 480140 - protein, 338 aa, unidentified
MAIVHVGIDLAKNVFAVHGVDESGKPALMRPCVTRARLRELIAGLPPCIVAMEACTGAHHWARLFAAHGHTVRLIAPKFVTPYRMSGARGKTDAADAAAICEAVQRPNMRFVPLKSVQQQSQLMVHRARQGFVQARTACINRIRGLLAEFGHVLPLKAETVRRQAAGLLEELPGWANTVIGDLLSELHRLDERVTQYDRHVAQIAREDERAQHLMRLPGIGTTTATAIVAMIGNGHEFKCGRQFAAWLGLTPGQYSSGGKTRLGRITKAGDGYLRSLLILGGRSVLALAKGRSDPISSWALALQQRRGYWKAVVAIAAKNARMAWAALSAGENFKMPA

SEQ ID NO: 480141 - protein, 410 aa, unidentified
MELLHPHCAGLDIHKETVVACVRHLRSGKVTTGIKTFKTTTEELIALSDWLATEGCTHIVMEATGVYWKPVWHILSDGEFDLVLANAGHVKNVPGRKTDVHDAVWLAELMAHGLVKASFVPDEPTQQMRDLLRTRKQFVRERSSHIQRIQKTLEDANIKLDLVVTDVLGLSGRRILQALIAGQTVPQALAALADRRIHATSSQLEAALRGRVTDHHRFMLKLHLDQIDAQNAAIARIDKEVDGNVEPFRVALEMLNGIPGVSSLSAEVIIAEIGVDMSRFETAGHLISWAGLCPRNDESAGKRRSNRMKKGAPWLKTTLVQCAWAAARTKDSYFHAQYHRLRSRRGPKKAIGAVASSLLTTAYHMLKSGTLYQDLGANHFNHRAKDKQALHLIHRLKNLGFNVQITPSSA

SEQ ID NO: 480142 - protein, 343 aa, unidentified
MEHFAGLDVSVKQTSVCIVDGTGRLVREVRVASEPETLLPVLKNPLYRFKRIGLEAGPMSQWLFSALAEADLPVICVETRHMRAVLQAQINKTDRNDARGIAQMMRAGLYRPVHVKTLRSQKLRMLLTHRKLLQSKAIAIENDLRATLRNFGLKVGVVGTMKFEARIRELVETLPDLAELVEPLLIVRRTLREQIGILHGRLLAIVRHDDVCRRLMTVPGVGPVVALTYRATVDVPARFRNSKAVGAVFGLTPSRYQSGEVNRTGAISRCGDEMMRAMLYEAAHTMLLRLAKWSWLKAWAMKIARQRGIKKAIVALARRLAVILHRIWVDGTEFRWTRETAAA

SEQ ID NO: 480143 - protein, 373 aa, unidentified
MPKYSTAFGMDVHLRSTTVCALDADTGEAVTRRFPGNPWGEIAGWMDGFPGPSLAAYESGYPGFAPQRELAGLGVECVVAAVSKIPRSAADSASKNDRNDAARMAKAILAHDISPVWVPSPEVEGIRDLAGAYDGATARLATAKQRLLAFLAKRGFVYGGTTPAGNPRKYWTYDFLRWLDKVRPEDDGGVRALAALRNEVEAAAEARADLLSEYRAAVDASPIAAEAAALQSIKGCAFALAAAFSAEVGDFTRFRSGRQVTAYFGLAPSQRSSGDSVRLGGISGAGNALVRKLAVEGSWCYAAARHQPKLMPRDTGVPLEIRMHGRKGSERLLRRREEMLARGMPAAKANAATAAELVRWLWALGMMCREGAE

SEQ ID NO: 480144 - protein, 429 aa, unidentified
MNYNTQNAKIASITEKTLIVGIDVGSETHYARAFNWRNYEYSKKPFAFSNDEAGFSSFKDWMDDIAEKHGMKVVIPGMEPTGHYWLNLGAYLQEQGMKPVHVNPHHVKKSKELDDNNPSKNDRKDPKTIAGLVNEGRFSYPYIPTGIYAEIRNLSNLRIQTQEEITRIKNRIARWFSIYFPEIKDVYRNPDAVSGLMVIKQAPLPCDIKELGVDGVNKIWRDARLKGAGIKRATTLVTAAEHSIGNTEAPRSARKEIRNLLNDYEIYKNRMDELMEEIKETLSEIPYIDKLMEINGIGIKTVSCVIAEVGDIGRFDNPKQVQKLAGYAIVADSSGKHNGEGRISHRGRKRLRYALYEAAISVIGKNKEFKEIHSYYRTREKNPLKKMQSVIAVACKLIRIFYTILTKGVDYDGQRMLADIVRPEMQLAA

SEQ ID NO: 480145 - protein, 316 aa, unidentified
MTCYVGVDIGKNQLDVHLHHQARGQSFSNSPEGFTAFLSILPAPQTCHIAMEATGKYFFNLAQFLFNHQIKVSVVNPASIKYYAQSQLKRTKTDLQDAKLIAHYCQSQQPKLWQPPSQVIVELQEWQQFQALLIKQKTQLTNQMQTTECERLKQLQLEQIVQLEQEINEVSEQIKTLISQDEKLNEQTSLLTSIKGVGEKTAIQVLTLIKDIDGFDNAKQLASFAGVVPQIKQSGSSVNSSSLSKIGHSELRKCLYMPALAAIKFNPVIQTFAQNLQSRGITGKKKVVAVMRKLLHIMFAVLKHGKPFDPCYKIST

SEQ ID NO: 480146 - protein, 354 aa, unidentified
MAMYFVGIDISKYKHDCCIISADVQKVVAKLTIKNDKAGFEQLLSVFNSLSIPENIKIGFKSTAHYALNLELFLENAHYSFMEINPLLIKEYKKSTSLRRTKTDSVDCESIARWLMSVEYKPHSKGFYHSYSLKSLTRLRDRLIRQRSFYLVKITNVLDHTFPEFKPFFHEHLSKTALYLLENYGSSEKTARMNSASYEKLRSLSRGKFSPQQFIQLKELAANTVGVNNSIFDVELNSLLILYKSLLKEIDTLKKEINRLIEEVHPHYMSVPGIGSISAAVIYSEYGDISSFSTPAQMLAFAGIEPGINDSGTESHGGRMVKHGSSQLRYVLINCCLPLIRFDMTFAAYYEKKT

SEQ ID NO: 480147 - protein, 344 aa, unidentified
MEMHTIGIDLGKTIFHLVGLNQSGEVVVRKKFSRAQLLHFTANRDVHLIGMEACGGAHFLGRALREQGHEVRLIPAQYVKPYVKTNKSDYIDAEAIAEAVGRPTMRFVPIKSDDQLDMQSLHRVRERWVMRRTAVINQIRGLLLERGITLRTGRRHLDEALPAIVEDAEAKLSGALRSLLWQLKLELDQLTIRLEEADALIQQTAQDNEACRRLDAIPGIGPLTATALIAAIGHGAAFRKGREFAAWVGLVPREHSTGGKQKLLGISKRGNSYLRTLFVHGARAVLQFREKQSAGLKAWLAQLTSRAHYNVAAVALANKLARIAWAVLAKGEVYRPPLLAGIST

SEQ ID NO: 480148 - protein, 338 aa, unidentified
MEFKRISIDTSKHVFTIHGVDGEDRIVLRRELRRGQVETFFTRAAPTEIALEACAGSHHWGRTFRAMGHQVKLIPPQYVKPFVKRSKNDRNDAEAINEAASRPSMRTVPVRTVDEQAATMIVKHREMLVGQRTQAINALRGHATEFGIVAAKGCGNVAALVCCMSNDPGVPAVAKSMFAQMGQHIAELDRKIMRVDQQLHEQHKASPLSQRLAAIPGVGPIIAITMALSINPRNFESGRHFAAWLGLTPRENSTGGKHRLGRISKAGNERLRQLLVVGAMAVIRYAKPGSKSASAWLLQLLGRRPRKVAAVALANKIARVIWAMMARGETYRQQPATV

SEQ ID NO: 480149 - protein, 397 aa, unidentified
MATYVGIDVAKRKHQVAFMDQAGELVGRPLSLANDRVGFEALRERLMSLTAPVEIGLEATGHYWLALYDYLSQDGYSVYVLNPLQVHACQKSGIRKRKTDKIDAIWIADFVRIGGASQAPPPDSLRSYMQLRQLGRFRVSLVEWIGECKRRLLSVLDRIFPEYETLFSSVFTVSSRALLAQALTPAEFAHFDLEELSELLRRHSRGMLGRQRAQELQSLAASSIGVSFLADAVRVQTSCLLSQIEFLEAQLTEVNAALAQILERLPRQYLTTIPGVGPAGAAVMVGEIGIIRRFPCVEKLVAYSGMDPATHESGQFQAGSVHMSKRGSPYLRQALWLAAGVARQHDPELKAYFDKRRAEGKPYNVTMGAICHKLLKRIYVDLRDSRPYVLQQLATTT

SEQ ID NO: 480150 - protein, 370 aa, unidentified
MKKNNIECPKQERKSRKQLSGKLTVGIDLGDRSSRYCILNQDGEVVQTGSVATTKKDLNRVFGALRHSRLALEVGTHSPWVSRHLKALGHEVIVANPRRTRLIAESSNKQDRLDAETLARLARVDPKLLFPIRHRGEEAQADLAVIRVRAALVEARTRAINTARGLTKSFGERLRKCDAHSVNEELAQDLPPVLKAVVAPLLEQARELSARIREHDEALRKIARERYPETALLTAVYGVGVLMALTFMLTLDDPHRFQRSRDVGAYLGMRPRRRQSSGSDPALGISKEGDVYLRRLLVQGAHVILGRHGADSDLRRFGQKLAARGGKGAKKKARVAVARKLAVLLHHLWVTGEVYEPVHRKPAQPVQTAA

SEQ ID NO: 480151 - protein, 342 aa, unidentified
MESTTIAVDVAKEVLEVAVSHHPGQVRQQRRLSRAAFTRFFADQPPATVLFEACGSSHYWGRCLQQLGHRVVLLPPHATRPYVFRNKTDRADTRGLLEAFRNRDIRPVPLKSVPQQALTALHRLRSTWLAARTARLNTVRGLLREFGCVIPVGAHRVLPAAAALLGDAASGIPDALRPALAEACREIVDLESRMALVERQLTALADQTPAVARLRSIPGVGLITATALVAFVGDVQRFPSGRHFASYLGLTPREHSSGLIRRLGAISKRGDVYLRMLLTHGARSVLWTARSKRQPDRLRAWALEIQSHRGHNKAAIAVANKLARIIWAVWKSGSDYREGPAA

SEQ ID NO: 480152 - protein, 351 aa, unidentified
MMVFGVDPHKQAHTAAAADELGRKKAEKTVKARREGYRELIFWARDLEPGGRLWAVEDVRHVASGLVRELMAAGEEVRFIPARLMAESRKGGRERGKSDPIDALANARAALREDVHLPAARLNARVLDVRRLADHRDDLVTERTRVMNRLRWLVHDLDPDLAPAPRALTRQKGRRLLESGLRGLPDNGGRRVALSQLEAVTRLSAEIAGLEKDLETMLGQLCPELPEICGIGIVSAARILGETGDIRRFRSPAACARHNGTAPIPVSSALSDVHRLNRGGNRQVNAALHRAALTQARCHDGAKALLERRAGTIRETRKAALRALKRHLSDVVYRTLRTAAWRLDQQSQNSA

SEQ ID NO: 480153 - protein, 401 aa, unidentified
MPFFVGIDWASQTHAVCVIDATARIHWHGAVPHTAEGLAEFLRRLHGFRRRGPLRVALERPSGLLVDTLLDAGLEVVPIHPNALKATRPRYAAAGGKHDAGDAFILADLLRTDGHRFRSLPGPSDETRAVRALVRGREALVAQRVALANQLRALLERFWPGAAAIFADVASPIALAFLTRYPTPHSAARLADRRLAQFLAQHRYCGRRPVAELLARLRHAPASRVGEAEAEASGEVVRALVALLAPLGAQLQQLSAAIAAALAQHPDGPLLQSLPRSGAVNAAQILAELGDDRARFLTDAQLAAEAGLAPVTKESGTHRAVVFRWACNKRLRQALTTFADNSRHASPWAALVYQRARTRGCRHPHAIRILARAWARVLWRCWQSRTPYDVRRHRAAAVLAA

SEQ ID NO: 480154 - protein, 372 aa, unidentified
MNYNTVYVGMDVHKESFTLCAYTIDAEKGSHFQRTEADYKNVLKYLEFLRTVYGNDANFICGYEAGCLGYTLYHQLTEHDVNCVILAPTTMLEQCSRRRIKTDRRDAEIIAKCLAQHNYSPVHIPTATDEETKEFLRMRDDHKLALKKVKQQILAFCLRHNYRYDGNSHWTAAHIKWLKSLNPEALYKEILDEYLLTYTTLSDKVERLDKRIEELASKDEYRESVKKLCCFIGIKTHTALSVLVEVGDFQRFASAQNFASYLGLVPGEDSSGDGQTRLGITKAGNRHVRMLLTEASQCYARGQIGFKSKELKSRQAGNSPQVIAYADKANERLRRRYYKMVLGKSKKHNVAKTAIARELACFMWGMMTEHIA

SEQ ID NO: 480155 - protein, 341 aa, unidentified
MNKPKFYIGIDIAADDFSVSFLVNPQEQILTKECIPNNFVGFDELLIWLNSFGVVPGESIICLEATGVYAEALCHFLHSQQFPICIESPLKVKRAFETSGHKTDAADSRQIAEYAYRFCDELKPWAPPQIVVDKIKQLLSAREQLVRQSTASKNALKVIERSVVQDPTALNVFHSHLDQIKKHIQTIEKEIQKHLKSNPDLHQKTLLLISVPGISFLLVAHLTVFSDAFSKPLNYKSMAAFFGICPLKYQSGSSVYKPPKSRQYGPSMIRKILYLASLSIATHNRTFRTYYLRKVNEGKSKKLVLNNVANKLLKLICALLKSNKSFIKNYQSVNPMCLINT

SEQ ID NO: 480156 - protein, 391 aa, unidentified
MIYIGIDVAKDKHDCFITNSDSKVLFKAFTIFNNLDGFNDLYQKIESVMDDVTKVKVGLEATGHYSYNLLGYLIDKGLPTYVINPLHTNLYRKSLSLRQTKTDKVDARTIASMLMSDVNLKSYSDTSYHNKELKSLTRYRFDKVKERAKLKTSVSRLVCILFPELEKLVPTLHIASVYALLSEFPSAKHVATAHLTRLTNLLSESSKGRYGKDTAITFRDSARASIGSNMPAKSLELKHTIKLIQELDSEIDEIENEIKIIMDEINSPILSIPGINYRMGAMIIAEIGDFNRFDSPDKILAYAGFSPSTYQSGQLDGAYAHMEKRGSRYLRYALYNATKYVCHWDPTFAAYLAKKRAEGKHYNVAISHAVKKLVRVIYHLEKTKQQYIKAA

SEQ ID NO: 480157 - protein, 318 aa, unidentified
MPQKTRFVGLDVAKSKVDACIRSEGLRMSAPSTPEGRAELVAWVRANRVGRAVMEASGGYERGWAEALRAAGVEVRIVDPKRVRHFAKAAGRLAKNDPIDADTIARFAEAFPDGEAQPHDPARDEIDRLVAARTALKDVEDRIKQQGEHGPPPIVAKALAAIAKTTRAELRRLEAAIAAKIKANPGFARRAEIVTSVPGLAGQTAAGVIAWLPELGRISDEAAAALIGAAPYDDDSGGRKGQRHIKGGRRKLRNLLFMPVMGAATQHNPVLKAYYQRLRARGKEAKVALIACMRKLIVILNTMLARDETWDPPARAGA

SEQ ID NO: 480158 - protein, 386 aa, unidentified
MQSVTSATAVATTARANDITLYASLELSKSKWVVTINHPGSEKFSKHVVEGGDGAGLLDLLSRSRAKAEQRYGVQVKAIVIQEAGLDGFWIHRLLLADGIESHVADAASIAVDRRHRRAKTDAIDGETLLRTLMAWARGERRVCSMVRAPSREDEDRRRLTRERGTLLKERIQHTNRVRGLLSGQGVQDYDPLRRDRFERLEALRTGDGCQLPPMLKEEIRRELDRIALVTTQLAVVERARDALIRMDAEERNPAALLLKLKGLGPEFASLLWLESLFRSFGNRRQVAAYGGLAPSPWQSGGVERDQGISKSGNRRLRKTMIELAWFWLRHQPDSALSRWFHERVGAAKGRIRRIAIVALARKLLVALWRYVTQGVVPEGAVFKAA

SEQ ID NO: 480159 - protein, 412 aa, unidentified
MEVVYPCCCGLDVHKKKITACVLWAEAKGKGRKEKRRFGTFTHDLLQLADWLAECGVTHAAMESTGVYWKPVWNILAEQFEVLLVNAQHIKAVPGRKSDQKDSEWIADLLQHGLLRGSFVPPRPTRELRDLTRYRVSLVQEINRIANRIQKVLEDANIKLASVATDALGASGRAILEAMLAGEQDSARLAEMAQGKLRNKIPELKLALEGRMTEHHRFLLRQLFDHLRFTESKLSEIEQEIDRRMLPFEDKVTRLCTIPGVDRVTAWGMLAEIGLDMNQFPSSEHLSSWACLCPGSFESAGKRLSGKMRKGNVSLRRCLSQAAWAISMTKNNYLSALYRRIAARRGAKRAVMAVAHALLVMAYHMLKRKEDYRELGADHFDRIDVNRTRRSLVRRLERLGHRVILEPLAQTA

SEQ ID NO: 480160 - protein, 453 aa, unidentified
MMTSRYAHAKQFKRHHRQLRLLRSRLGRIIRDIRRKIEGQPALEEAFALPLGRAAQIRSQQQRQRGWKLYSLHRQRQGRGALRVNGMDHARSQRQRNPRQEKEARAMSHTNIVTIGIDLGKNTFHVVGFDTTGAIILRKKRSRNQLEQSLANVPACLIGMEACSGAHHLGRKLEKLGHQVRLLPAQYVKPYLKGHKNDFRDAEAIAEATQRPTMRFVPLKSAEQLDLQALHRVRSRLVTQRTAVINQIRGFLLERGLPVRQGAAALRLALPQILSAPKDNLSPRVVQLIQDLGEDWRYLDRRVASMTKEIDELADQDPHCRRLMSAPGVGPIISSAMVAAIGTGDAFHKGRDFAAWLGLVPKQISTGDRTILGRISRRGNRYLRTLFIQGARAVLLRRQSWPRHGFGAWLEAAARRLHSNVLVVALAAKLARMAWSMLVNDRDYDANPLGRTA

SEQ ID NO: 480161 - protein, 372 aa, unidentified
MNYNTVYVGMDVHKESFSLCAYTIEAEKASHYQRTDADYKKVLNYLEFLRTIYGDDANFICGYEAGCLGYTLYHQLTVNNVKCIILAPTTMLEQRSKKRIKTDKRDAEIIAKCLAQHNYSPVHIPTAKDEETKEFLRMRDDHKLALKKVKQQILAFCLRHNYRYDGNSHWTAAHLKWLKALTPEALYKEILDEYLLTYQTLSDKLERLDKRIEELATQDEYKEAVKKLCCFIGVKTHTALSVLVEVGDFKRFASAQRFASYLGLVPGEDSSGDDQNRLGITKAGNRHVRLLLTEASQCYARGQAGFKSKELKARQSGNTPAVIAYADKANERLRRRYYKMVLNKCKKHNVAKTAIARELACFMWGMMTDNIA

SEQ ID NO: 480162 - protein, 316 aa, unidentified
MAAESYVGIDVSKAELVVAVRPSGERLTLANDRAGIKRLVGRLGELKPTLVVVEATGGLQRQVVAGLWLAGIAVAAVNPSWVRNFAKGRGVMAKTDRKDAELLALFAQRERPEPRPPADAETQALQDLVMRREQLLEMLVAEKQRLHRASGPMRKELRHHIAYLEGRIKELEEDIDKTVRRSDAWRRKSEIVRSVPGFGPRFSAIALAKMPELGTLNRKQIGALVGVAPMPDDSGRRHGRRIIAGGRFEVRNKLYMCALVAARSNPVLRQFYERLVARGKPKKLALAAVMRKLIVILNAMLKTNSLWRPPCPDPSV

SEQ ID NO: 480163 - protein, 397 aa, unidentified
MSMFFVGIDVSKDYSSAQGLDREGKKLFYLEFGMNGEGFSEFLKVLKIHCEDLLGVTVGMESTGCYHINLFAFLCSEGIVCVVINPLLISNFARLSLRKTKTDRKDALTIAQFLLGHRSKLSQVSYSQNSQDLKDLARERESLAVMMAGLKNDVRRLLQLTFPELEHRCKLFTETMLRFLMKFPSARAIRIAKPKEISKALIHAEGKRKRVFISAEEIIKLAKASIASESVAKELILSEKIETLLYLEEKKARITEALVEACKSMRVDELDIITSVDGISAITGSTFLAELGDIETFRTYKHVIAFAGLDPSIYQSGQYEGISRLSKRGNRHLRRVIFLMTLCAVRSQNIFREYFLKRKGEGLPPKKAILATAHKLLRVLFAMLTSKSYFRKEVVEV

SEQ ID NO: 480164 - protein, 402 aa, unidentified
MIFINCLGIDISKSESVVAHYKDEVLVKEMVIQNNQNGYRYLKNYIKHLDSLFILFESTGIYSRGMKRFCEIHKIDYLEMNPLEAKFKTSSLRSWKTDKSDAHKLALLAFRMKDSKVQRQSEEIYFELRERARFHLEMEINQNRLKVELVETLHQTFPGLEKLFTNRYSKIALNIAKAFPHPDFVSTLTHDELVEKVLHSTDKGISVNKAHKYVQKLIEIKNNSFPNVDKSSFLLQKVQYLCDKLLIGIEEMKEFDQEMIDLAKNTTEFENIISIPGIGELTAALLIGELGNIREFKTNKQLNAFVGIDIKRYQSGTSKSRDTINKRGNKKARRLLYLIIMNIIRGRNHYQSHIVDYYYKLREQPHGKTHKTAVIASINRLLKTIHYLIVNNKLYDYQKAPH

SEQ ID NO: 480165 - protein, 348 aa, unidentified
MLHAGLDLSRRKIDVCLLSQAGEIVEEWASPPDADGVRGLARRAGAHGLPVRGVIESMTGARFVHDRLEELGWEVLIADAAKVKGLAPLACKTDKIDARVLAVLSQRDLVPEIWLPDPSIRRERELARFRLHLVKHRSMLKHRVHATLITFGHPCPVTDLFGVAGRQLLQRLDVPQPWRATVDASLRLMDDLEAQIETINKQLRALGPEHRYMPLLMTVPGIGWVLSYTIAAEIGDIGRFASPKKLCGYTGLCPRVNQSGDRDRRGPLTKQGPKYLRWAMLEATMHALRHPAYRERYQRNKRRLGRQRGAKVAQIDVARKLTEAIWHMLTNNQPFAPAPGGSTFRLAA

SEQ ID NO: 480166 - protein, 360 aa, unidentified
MTTQADLRQIVAGVDTHKQTHHAAVLDANTGRLLADNEFPATAAGYRQLASWVDTYGSLIKAGLEGTGSYGAGLQRHLQSQGVTVIEVSRPNRQERRKRGKSDPIDAINAARAVLSESAATTPKFRDGYVEAVRQIRTTRRGAVKARRSALNQLHGLLWGAPEELRAKLSGYDRAALVTRCARLRTPTGAALDDPSITVRRMLRRIAKRIQMLDEEIADANQELDGLLTVHTPNLLAVTGVGTEAAGQILTTAGQNLNRIKSEASLARLCGVAPIPASSGNTTRHRLHRGGDRDANSSIHLVVISRLRWHQPTKDYLDRRTREGKTKKEIIRCLKRAVVRELYRALQADLNPQRQLLDAA

SEQ ID NO: 480167 - protein, 351 aa, unidentified
MVVVGADVHKRSHTFVAVDEVGRKLGEKTVKAITEGHHEALMWARDQFGAELTWGIEDCRNMSALLERDLLGAGQAVVRVPTKLMAQTRKSGRTRGKSDPIDAESVARAVLREPDLPVASHDEISRECKLLTDRRDVLVGQRTSAINRLRWNVHELDPERGPAPRALKAAVHQQALLVWLDTMAGLVAELARAELADVIRLTSEINTLEQRLSERVREVAPALLDIPGCGDLTAAKLVGEAAGVARFKSEAAFSCHAGVAPIPVWSGNTAGQMRLSRSGNRQLNSAIHRIAVTQIRMPDTGGHAYYQRRTADGKTKAAARRCVKRGIARRVYRALLADHQTRNQAPQTAAA

SEQ ID NO: 480168 - protein, 316 aa, unidentified
METPQPFVGIDVSSQRLDVDTVPVSQPFSEPNTDDGIASLRAHLKAINPRIVLLEATGGYEIPVAYALYEAGLPVVITNPKAVRHFAKALGRLAKTDKLDAQVLALYAQRVQPTVQPLRGQEQLDFANLMTRRRQLQGMIVMEENRRCTCTPKVRGNIDLSLAHLRQLLKDLDRDIHDAICRSPLWHEKSEILQSFTGVGPKVSASLIADMPELGRLPANKVSALAGLAPMNQDSGKHRGKRRIKGGRPAVRQALYMAALVASRHNPVIKEFYQRLRRAGKPAKVALTACMRKLLVILNAMLKNRTYWNPQLPLAA

SEQ ID NO: 480169 - protein, 339 aa, unidentified
MIAVVNSSGKLVMESIVETKASSILQFIHGLQGELHVTWEEGTWASWLHDLLQPHVDKVVVCNPRRNALLMEGSKSDKVDAHKLANLLGTGMLRPVYHGENGLRTLRELGRSYETISKDLNRVMNRIKALYRGWGIACAGTQVYASRYREEWLGKIEHAGVRRRAELLYQQLDGLQGLRRTLRPELLAESRKHKATKLLRQIPCIGPIRAARLLALMQTQHRSRSKRQLWTYSGLGVETHDSAQYRYVHGQLQRSRKPQQIRGLNQNHNHEMKEIFKGAATRARCGVGPLRDFYVALLDKGMRPEMARLTLARKIAAVALTLWKKEERFDAERLKPQAA

SEQ ID NO: 480170 - protein, 398 aa, unidentified
MNAVGIDVSKGKSTVAVIQPFGVVIAEPFDVSHTESDLNKLVQLIKSLSGETKVVMEYTGAYYEPIANALHNQVIFVSVVNPLLIDDYGTNRVRKVKTDKKDSLKIASFAIDKWLDLREYIPANDIRKTLKILNRQYVQYNKILVMQKNNLISLLDSCFPNANTLFTSPRRESDGHEKWVDFVLKFPHIHSISKLSLSAFKVKYQSWCRKNNYNYSDKKVADIHSYCKTQISVLPMTDSVIKIITEAAVMLNSTLETLCMFRDEMDRLSSTLPEYNAVMGIYGVGKVLCSQLIAEIGDVRKLNNSKSLVAMAGIDPPPNQSGKVDTKSRSISKRGSPVLRKTLFQIMTIIIQNKPVDDPVYQFLNKKRSEGKPYRVYMIAAAHKFLRIYYARVMQALN

SEQ ID NO: 480171 - protein, 365 aa, unidentified
MQKMSTMQTSGKTIFKGQLTIGLDLGDRSSAYCVLDEAGEIILEQKLPTTPEAMKQTLGKMPRSRIAMETGTHSPWVSRLLAALGHEVIVAHAQNVRLIVKSRRKDDRLDARTLARLARIDPELLSPVRHRSAQAQLHLTEIRARAGLVSARTALVNAARGLVKSYGERLRKCGTQQFRRETMSGLSAGLREALEPLLQEVESLNERIQEYDQRIERMAKERYPETALLKQVKGVGDLIATTYVLTIEDPHRFRKSRDAGCFVGLQPGRRNSGESEPQMHISKEGDEYLRTLLVQGAHYILGPFGEDSDLRRWGQKLAERGGKNAKKRAVVAVARKLAVLLHRLWVSAEVYEPLHNSQKVMSAVA

SEQ ID NO: 480172 - protein, 339 aa, unidentified
MKLYSGMDLHSTNTYTAILGEDRRRVIDRRLPNVPKVVLDFMEPYRADLQGIVIESTYNWYWLVDLLQENGYQVHLANPSAIQQYSGLKHVDDRHDAYWLAELLSLGLLREGYIYPKEGRPIRDLLRKRAHLCRLRTSLLLSAQNIVLRNQAIKVDAEDIKKLTTDLLTPLLRENEGLFLTGKISKELIDAFTRQIKAIETWVMKHLHPDPRLSNLLTIPGVGEILAMTILLETGCIDRFSKVGNYASYCRLVASQRISNDKIKGKGNRHNGNKYLAWAFSEAAEHARRHYAECRAFYNRKLQQKNVTVAHSALARKLARAAYWILRNQEVFDETKLFS

SEQ ID NO: 480173 - protein, 388 aa, unidentified
MLPSIHHASTEQTASDSPDLTLYASLELSRATWLVTCLLPERDRMSKYSTPGGDGGALLGLLERMRARAQQLTGRPAKVVVIQEAGLDGFWVHRLLEANGIESHVVDPASIAVPRRRRRAKTDAIDGETLLRTLLAWTRGEPRVCAMVVPPTPEEEDRRRVCRERAILLQERIRHTNRIKGLLAGQGITDFNPLHKDRRQLLAAARTGDGRPLPPQLKAEILREIELIELLLRQIADVEAAREVLAGPKAAKAPSPVVLLEQLKGIGPEIASVLYLEGLFRSFGNRRQLAAYAGLAPTPWRSGTVDQEQGISKAGNPRLRSTMIELAWLWQRHQPASTLSRWFHTRVGNERGRIRRISIVALARKLLIAVWRYVTQGEVPEGAVLKAA

SEQ ID NO: 480174 - protein, 335 aa, unidentified
MNKLETTFLPCGIEISCKVLVINLSGKAPCEFANTPTGHQCLIRWLQLAGSQIRVCMEATGLYGLDLALALHAAGIAFMIVHPRSARNFARAMMQRSKTDRLDAIVLREYAARMPFEPWRPPSPQALHLMAIAHRIQALTRMITAEKNRLHAASLSRALPAVVRQDLARSIQSLQRALKRLTLAALELVLSDPQLARRNELLLSVPGIGVTSALNVLAEILRLGPDCGVRQWVAFAGLDPRHYTSGTSVAKKTIISKSGNAHLRRALYMPALVTVQHEPHFRGFYQHLVARGKTKLQAIVAVMRKLLHAIYGMFKHNQLFDGSKIYALDTSCAQN

SEQ ID NO: 480175 - protein, 359 aa, unidentified
MRIIGCDLHTRQQTIAMFDTETKEVMETTLTHEGDAVRQFYSALPRPVQVGIEATGAMFWFLQLMEELGIPCLVGHPAAIRKAETRKQKHDRRDAALLLRLQLERRFPAIWMPAAEQRDLRHLLLHRHQLVSMRSRVQHALQSLALSHGLRRGARLWSQSGRDALQALPLAPHATRRRNTLQRLRQHLDQQVLQLDQRVAQQASQRPACRRLMTHPGVGPVTALATEVFLGEAQRFPSGKALASYVGMIPTEHSSGGNRQRLGALSKQGNPFLRFLWVEATLHAVRKDPGLRRFYRRKLFQKGLGKARVAAARKLGIRLWIMLREQIDYTEFCRRGQHRQNGGAAYAEMPAKEFGPATA

SEQ ID NO: 480176 - protein, 411 aa, unidentified
MEVLYPRCCGLDVHKATISACAVVAEGKAKQRSMLRCGTMTPNLLALAEWLEGWGVTHVAMESTGVYWKPVWNILDGHFELLLVNAQHFKAVPGRKTDMRDSEWLAELLQHGLLRGSFVPPTEIRDLRDLNRNRAILAQERATVSNRIEKVLEDANIKLSSVASHVLGQSGRAMLHAIGAGEENVDKLAEMARAKLRNKIPELRVALQGRLRDHHRLLIRHWLEQLDGLEKQIAEMDLEIDKQNVPYRETIERLMTIPGVDRITASGLIAEIGTNMDQFPSAQHLASWAGLCPGNDESAGKRRSGTTRKGNPWLRRVLCQAAWAASHTKDTYLAAQFRRLAAKRGKKRAIIAVAHTILIIAYHVIRRGEVYRELGGDYFDRTNCEGLKRYLVRKLEKLGQKVTLEPTSDAV

SEQ ID NO: 480177 - protein, 439 aa, unidentified
MRIASSVPMPNEVPIEQEIVAYVGLDWADQQHVICWQAAGSARVQSAVVQQRPEELQAWVAELRQRFPQGLVAIALEQSRGAVIAALMHFDFLRLYPINPKSLARYREAFASSGAKDDPDDAGLLLELLVKHRDRLTPWVPDDPLSRELALRVEHRRQLVNLQTKLIQQLRSHLKVYFPQALDWVGELDSLQACDFLQRWPTLAAVQKARPSQLEKFYHQPHCRRPQLIQQRLEQIRQAQPLTQDPAIVQAYSQMVLALVAQLRVLIPTLQQWQQQISQLFAQHPDAALFASFPTAGPVFAPRLQAAFGSRRDRFGSAAEVLQFSGVAPVTKRSGKSRQVQRRWARPKFLHQSFVEFTGLSIPHCCWARALYQQLRARGHRHWAAIRVVAYKWIRILFRCWQDRVPYDEQKYLKSLERRNPTLWAAIQQLPAHPSRKEV

SEQ ID NO: 480178 - protein, 399 aa, unidentified
MLAVGIDISKSKSVAAILNQDGSMHTSPFEFHHTQPELDAFIKYILNSNQSATILMENTGHYHYPVLKAFREAGLPVCMVNAYQIKKFGDMDLRKAKTDKKDAVRIARYALEKSYSLVPYTSMEQKYEDLRFLARQYNQRMLTLKTNKVFLLNLLDETMPGITNILPLTTRTPETSLSVLFINRFKSYDRIKKMGKNRFLDAFEKIARKSRNRQTKTYGLAIYEAALRNITTRGENEYTLAAQDQCLELVCESQKAADSIILKMQTLAETLPEYAVLRSMAGVGDRLGPLILAEIGDIRRFHSGKALNAYAGNDAPPYQSGTFESHNRHISKRGNAALRKYCFEVMQTLKLTRPQDDPVYLFLLKKEQEGKPYNVAKMAGVNKFLRIYYARAMETLKQQ

SEQ ID NO: 480179 - protein, 324 aa, unidentified
MQSDVVCLGLDISKATIDCALLKEGKVRLKQYENSARGFERLSEWLKQRGAMSCHVACEATGTYWEGVALWLHERGHLVSVLNPAQLHAYAQSQLSRTKTDRQDAKLIAQFCAERQPPAWTPAPAEERELLALVRDLQALQAMRIAESNRLPTAHVSIQPRIERHLVFLDAEMDALLDRIKDHIDKHDGLKQRRDLLDSIPAVGDKTIPWLLAYLSDGQRFAGSKQAVAFAGLNPRQWESGTSVKGKPRISKIGQADLRHALYMPAMVAYSRVDAFKPFVQRLKAKGKAPKLIIVALMRKLLAIAQAILKAGTPFNPSIHAKYV

SEQ ID NO: 480180 - protein, 330 aa, unidentified
MTSMGQEKMINDIARSADQITIGIDISKDRLDVYAHPEKAVAQFNNDRKGHAKLIIWINLRRPSRIIFEATGAYHRALEMALGKAALPAVKVNPLQARRFAEATGKRVKTDPVDAAMLARFGYTMQPDIPAARDETIDKLGELLAARRALVKDRTAALNRAKTLTLALLKRQSQQHLTQIQTQIKAIDRERATILAANERLSARSDILVSIPGFGAATAAALLIDMPELGSMDGKQAGSLAGLAPVTRQSGNWKGKSFIQGGRAALRQAIYMPALVAIRFNPPLKAKYTALRAAGKPAKVAIVAIMRKLIIMANALLRDNRMWTAEPVHA

SEQ ID NO: 480181 - protein, 344 aa, unidentified
MNHYAGIDVSLELSSVCIVDATGKVAKEAKVETRPEALVKFFKDFGFPLTRIGLEAGPLSQWIYAGLTEAGFETVLMETRHVKAALSATTVKTDRRDARGIAQLLRMGWFRPVHAKSAGSQEVRALLVARKQLQHKLKDIERSLRGILRGFGLKVGKVNDKTFEARIRELVTGHPMLEQIAEAMLAARAALLEQFKKLHKAVLKIVRQDEVCRRFMTTPSVGAIVAITYKSALDDPGRIKKSRNAGPLFGLTPKRYQSGETDITGGISRVGDEMVRTALYEAANVLLSRVTRFSALKRWGLEVAKRRGLKRAKVAVARKLAVILHRMWIDGSTFRWTKTEAAHA

SEQ ID NO: 480182 - protein, 337 aa, unidentified
MKLYCGIDLHSSNNVVAVSDEQDRPLYEKRLNNDLDAILDVLKPFKGELVGCVVESTYNWYWLVDGLMEAGFPARLAHTGALPQYTGLKYTNDFSDARHLAHLLRLGILPMGYIYPKEERALRDLLRRRLLLVRQKTLHHLSLQSLIARHSGQRLTANAIKALTNEQLATYLDAPILLGGQITHQARCWLDEAISRIERELQQRIQPRKDYQLLQSIPGVGPVLGTTIALETGTIQRFSSPGNYTSYARCVKSEKISNGKRKGQGNKKNGNKYLAWAFMEAAHYSAIWNPRIKQYYQRKKAKVHVLVAKKAVANKLARACYHMLKRGEVFDVTRAFG

SEQ ID NO: 480183 - protein, 347 aa, unidentified
MKKIFVGIDISKEKLNVCLMRDMDIIHEDEFENTVKGVQKWLRQMVKTTGCCMNEVMLCAEFTGRYIYPLTVACHDEDAFLWMEDPTRIKNSLGLTRGKSDPIDARRIAEYAARYQDKAVAYELPEKELASLRILMTDREQVLSDRQKYAAQLNDQKRFMSDEDYAMQCKIWKGIIKELQKQLDNIDKKVDELVAENKRASHQMELLKSVDGVGKRVAIAMIVCTDAFTRFDNARQFNCYAGMAPFTYTSGKSIQSKAKVSQRANKHIKSLLHMAALSVATRMKTGEYAEYYMRRCSEGKHPLCVLNIIRAKIVSRMFAVIKRDKEYVRNYERVSIEKNLSTPLQIS

SEQ ID NO: 480184 - protein, 408 aa, unidentified
MGRAAEVVAPSSSIRIDGGCPVAQVNDLSRSLTAFDLISTLVVVVEMSKASWLVSGAVPGVERQPLKKLEPDATALLRLIERWRNEAVRAGRPISRIALAYEAGRDGFWLARWLIARGIEAHVIHSASVAVSRERKRAKTDRLDAAMLMRVFLGWLRGERGHCGMVAIPTIEEEDARRPSRERESLVNERSRITNRMKSALARLGVRGFKPHLRKASERLAGLRTAEGTGLPANIIEEFRRDMARLALVREQINSIEKTRAERLKRAPDTGPHAMVRLLARVIGIGIETADMLVREILSRKLRDRRAVARYAGLTGSPDESGLKRREKGLPKAGNARVRRGLIQLAWRFLTFQKDSALARWYRTRTEGPSGARKTTMIVALARKLLIALWRLVTTGEVPDGVELRPAG

SEQ ID NO: 480185 - protein, 314 aa, unidentified
MAEENVYIGIDVSKAWLDVAVDPTVRYWRSENNERAITELVDRLTELKPKCIVVEATGGYEDRMVTCLCEANLPVARVNPGRVRRFAQGMNWLAKTDKIDAKLLARFAEKASPRLTKLPNEHEKRLAALVKRRKQVLEMLVSEQNRLDTADPDVIRYIQGTISMLKKQLKELDQAIHELIDATADLKGKQDLLLSVPGVGQVTASTLTSQLPELGTCDRKEIATLVGVAPFSHDSGTKRGRRVIKGGRPAIRSVLYMATISATRFNPVIKRFYDRLINNGKKNKVAIVACMRKLLTILNAMIREHHYWNPEFKS

SEQ ID NO: 480186 - protein, 334 aa, unidentified
MNYIGMDIHKRFTFAVVKDPDGNKISEDKFDNSKENFEKFLQPFRSEETKIVMESTGVWEYIYEILDSMHYEVKLANPVRTKAIAYAKVKTDSVDASTLADLLRANLVAESYIPPKKIRTLRELTRLRKMATKQRTQTENRLHALLTRKGIIIPNRTLCNKSVKFLKEFQDSMIQEFLEVIEFQRQRESQIKKKVEEASLTNKEAEILMSFPGIGAIRAMELIAEIGEIGRFPTTEKLCSYAGLVPSIKQSGTSLRLGGLIRQASRTLKHVFVQIAWCIVRQKESNSLQEFYKKLAKKKGKQKAICATARKICCVVHAMLRKGEEYRIHDPMIA

SEQ ID NO: 480187 - protein, 331 aa, unidentified
MKNYVNSIGMDISKKTFDAILFHSGEHAKFANDKKGFVSFIKWLKKQGYGPANVLICFENTGYYSLQLSFFLFEKGFDYIQEHALQIKRSIGFRRGKSDKSDAMDIARYAWLNRESIRLSKPPSKSLLKLQQIKATRELLVKQTVAIKNQIQALNVIGGRDVSKVACSSLNRVLRTLDNEIHKLEAEIEHLVGQDGGLSKTFELCRSVKGVGLVLALEMIIHTQNFTCFDEWRKFAAYCGTVPYPYQSGTSIKGKTRVHPASDKRMKSLLTMASISALRVDPELKLFYKRRTEEGKPKMSVINMIRNKMLARIFATVNRGTPFITLSKFAA

SEQ ID NO: 480188 - protein, 408 aa, unidentified
MEVVHPRCAALDLGKDELVACIRTQEETRVRQECRTFKTTVKELLALSEWMASESVSHVVMEATGTYWKPIWHVLEESFTLILANAAHVRGIPGRKSDVNDAMWLADLLAHGLIRGSFIPPAPIQDLRDLTRTRKQLVREIVQHTQRIQKTLDDANLKITGVITDILGVTGRAVLKALIQGETNPERLADLARGRLKAKRSRLIEALHGWVTPHHRMLLKLHLDLIEAIEMAVDNLDKEIGNALAPFRDAAHRVKTVPGISDLAGQSVIAEIGVDMSRFPTHQHLLSWACLCPRLDQSAGKVHSTRTRKGAHWLKTLLIQCAWSAVRCKDTYLRTQFYRIRARRGPKKAVGAVAASMLTAIYYILRDGVEYRDLGANYLDTIDRTRLSRRLVRRLENMGYHVELTGAA

SEQ ID NO: 480189 - protein, 333 aa, unidentified
MMNMNPQGGVAKRDQRPNAGIDVSKQHLDVCWATEEQRLVNDASGWDELIAKFKNADVDLVVIEATGGYERGLVCALQDVGMAVARVNPRQARDLAKSMGVLAKTDRVDARSLRDFADLLARHRDRHKYITPLIEPRRKELAALMTRRRQLVDMRVAESNRLEQANARAARSINSVLRTLDRQIAQIDRDAGDHLDRHFKKQSTLLDSVKGVGPVTIMTVVSALPELGRLQRRQIAKLVGIAPLADDSGPRKGVRRIWGGRSEVRSVVYMATLSAITHNPVIKIFHDRLIAAGKPKKVAIVACMRKLITILNAMLRDQAMWDAAKHLQTSKGA

SEQ ID NO: 480190 - protein, 346 aa, unidentified
MKKLYLGVDLHKRSCWVSVLEADGHLLESRKLGTEKRELEEFFRKVEKPAAVAVEATFNWYYFLNVVEPLGLELHLVHPWKTRAIASARIKHDKLDSRVLAELLRTGFLAEAWIAPPEVREQRQLLRHRARSVQWATRAKNGVHGVVNRQGIRPPMESLFGPKGRAFLAELELAAMDRWEVDDHLLRLDVLKEQIANLDREIRRRGRENPVARALEEIPGIGPFIALLLVAEIGDIQRFPSAKHLASYTGLVPSLYASGEHRWGGAITKQGSTLLRWALVQAAHQAARSARFSAYYQRQRERLGVPKAIVALARKLAVISFYRWRAAESSGVHLGWRMVGASTQNV

SEQ ID NO: 480191 - protein, 337 aa, unidentified
MKVTLIGIDLAKSILQVCGVNQAGKPVFNRQVRRGRLMELLVQHPDATVAMEACSGSNYWGRELQQRDFKVMLIPPQHVKPFVKGNKNDRNDAFAITEAARRPELICVEPRTLIQTDLIQVHRVLDRMICQRTALINQIRGFLNEYGLVFAKGKEKLLAAMPDLLEDAENGLTPASRVLFHELYEQWRQANEAINRLEKGLKRQANNDEAAQRLMKMRGVAEKISTATIAHAGNGHGYKSGRHFSANLGLAPKEHSSGGKQKLGGITKRGNRYLRRLLIQGAWSVVRNADKNDDRMSRWARQLVERRGKHKAVVAVANKMARIMWSMLYHQTEYRAA

SEQ ID NO: 480192 - protein, 339 aa, unidentified
MQVTTIGLDLAKNVFQVHGVTDDEEVAFNRPLRRTQLLPFFSKIEPCLIVMEACGSAHHWARELTALGHEVRLIPPMYVKPYVKRGKSDAIDAAAICEAVTRPTMRFVAIKTVEQQALLSLHRARDLLVRQRTQLINGLRGMVAEFGVYIARGLARVIGFAENILTGEVLDLPDVANEVIRNLSEHLMTLHARIRWYEDRVKQVAKEDARVRLLRTIPGVGAVTASAIIASIGDGHQFRNGREFAAWLGLTPANKSSGCKEKLGRITKMGDQYLRSLLVVGMTSLVRQTRSHPERASKWLTSLLERKPARVATVAMANKTARIVWAVLTRNAPYNPHLA

SEQ ID NO: 480193 - protein, 339 aa, unidentified
MTKTKISMLAIDLAKDSFQVCAVGSDGAVLSNRAMSRTRLASLLAEQPVCVVAMEACATSHHWGRIAQAHGHEVRIVPAAYVKAFVKRQKNDHADAEAIAEAAMRPTMRFVAVKSAETQARAVAFRTHQCLVRQRTQLINALRGHLAEFGLVAPKGPASLKLLENALDDETTDLPDPVRKIGTVYLEQIANLTEVIERLAAELEAATKTDEELRRLCTIPGIGPVTAGAVAAFAPDLDTFDTGRNFAAWLGLVPRQRSTGGKTKLGSVSKMGQTDIRRLLIVGAMSVIRWVVRKGGSPNRWLAALVARKPKMVAAVALANKMARMIWAVTTKREDYRMA

SEQ ID NO: 480194 - protein, 379 aa, unidentified
MRRVCGLDVHKDSIYMCILYENGSKIESVFGVLTPELDKLRDLLVSHHVCEVALESTSIYWIPIWNILSVDFSLKLVNPYFIKQLPGRKSDVKDAEWIATVLQKGLIRGSYVPDRMIQCLRQYERRNHELSKNIVHAEQRMDMILQRCNIRISNYVSCISCKGYQKVVNAIISGESNPKVLVTLIHKRTLNKHGRQVVEDSLNGFVSDTDRDILRQYRDERMQMEQHKSENKAKMQAICEAHYCEELELFQTLPGIKEESAANIIAEIGVDMKMFLTASAIVGWAGLKPCNDQSAGKIKSRKIPHGNKYLRKILVEAAWSAARTKDSRFMKMYQRLLARGKSKQKALIAVARKLLVLIWNILSKKEAFNPEYKRRIQAA

SEQ ID NO: 480195 - protein, 346 aa, unidentified
MKTNVEMFSEKVNQLYVGLDVHKNQWSVCMRTEEFEHKTFTQPPNPEILYDYIQKNFSSYQVICAYEAGFCGYWISEQLKSYGFECLVLNAVDIPGSDKDTQRKTDRVDCRKIARELSKGEVQGIFQPDRAQQGFRNLFRQRNKLVKQLRVVKNNIRSLLFFNGTQIEKEYENGNWSLSFRKWLQAIPMDTNTNRLSLDSMLRRLDFLQQEYLVVVKQLLSYVQTNHKENYKLLNTIPGIGKIVSIALLCEIGDVNRFKRVDEFCSYMGLVPNIYQSGDKLRVRGLTKRCQSVLRSYIIEAAWTAVRKDPELIEYYKRHVGKKSNRENNSKGCKKIIGKNLLYIKI

SEQ ID NO: 480196 - protein, 408 aa, unidentified
MKILHRRCAGVDVHSANVVACIRVMTKGKVRHEVRRFATSTRDLLTLRDWFEAEKITHVAMEATGVYWKPVWHILEEKFTLILANAAYVRNLPGRKSDVNDATWVADLLAHGLIRASFVPPAPVQELRDLTRTRTQLTREAARHIQRIQKALEDANIKLASLISDIVGLSGRRILKAIVAGETNAAKLAALGSKRLKCSRCELMAVLEGQVSDNHRFLISQHLGILEDLERRIEAFDKRITDVLAPFRHLVELLMTIPGVSRVSAEIILAEIGFDMAPFPTAGHLLSWAGVVPRLDESAGKRRSTRVRHGAPWLKPVLAQCGWAASRAKGTYLQAQFYRLKARRGPKKAVIAVAASILTAVYHMLKNHMSYQDLGPDHFVKRDAARIAAKLARRIKDLGYDVKYSLAA

SEQ ID NO: 480197 - protein, 353 aa, unidentified
MLIIGCDFHPGFQQIAIFDNQTGAYEERRLSHRAEAEQFYRSLAGQEVRVGMEACGHYPWFERLLAELGFELWLGDAAKIRASVVRQQKTDRRDAEHLRMLMREDRFPRIWVPSLEERDVRQLLVHRHKQVQARTRTKNQLHALALSQGVQKKWKLWTAAGRAELESLELLPYAAQRRRQLLHRLDALEAEIAGLNRQVEEEVKGRPAAVKLMTHPGVGPVTALAMVLTLGPAERFRDGRKVGSYFGLIPSEYSSGGRQRLGHISKQGSSFVRFLLVEAGQSAVRKDAELGRFYRRLGARKHRALAKVAVARKLAVRLYLMLREDWTYAQLCRAVVQASPSHSVAASKNRPLE

SEQ ID NO: 480198 - protein, 354 aa, unidentified
MVKNNTKIDFKGKDFFIGFDTARKRWSVTIRYEDMELKTYSMNPSPEELVKYLHKNYPGGVYHTVYEAGYGGFWIHRRLMELGCDSMVVNPADIPTTHKDKDRKTDPVDSRKLARELSKGNLEAIYVPSEESQNLRLLSRHLRRCIQSQTRVKNRIKSLLSYIGISYADGTKKTPKSYIRWLQELSLDNGPARQTLQCHISELQEHHNRVNSIVKQIKDYCREIGSSDILSLLCTIPGIGLRTAITLYTEIIDINRFKKLDHLKAYSGLIPTTDSTGERDRAKGITKRRNVFLRHVLIEASWVAIRKDPALLQYYSKACFRMKGQQAIVRVAKKLLSRIRYVWKTGNPYECSIN

SEQ ID NO: 480199 - protein, 391 aa, unidentified
MFAGIDVAAERHMLARLDDDGMPMGRPTAFAEDAAGYRTLLEALGAPPVLVVMEATGHYWKNLYATLTAAGHDAVLLNPLVARRFQEAQLERTKTDAVDAIALARLGFEKRPAPTRLFDQAAEALRELVRHRDRLRQDFDDRVRQLHRLVDLGFPEFTRYVKGLDSMLATALIAEYPTAAAFARAQPRRLAKLRYDGCHKVGEDLAEALVAAAKRSVGQHHGPVYEMQARHICQDLDLWRRRLKEIEGDIDRLLDAHEIGRLLTSIDGIGPHSAARIIATVGDPARFRSPAAFAAYVGVVPGLRQSGKRTGSRAATSPFGNARLRRALWMAVLSAVRRNDWLKPFYERLRAAGKPPKLALVAAMRKLLHAVYSVARNRKPFTVTTEQARAA

SEQ ID NO: 480200 - protein, 420 aa, unidentified
MFKIFRKNCCGLDVHKTWIYACVGITDENSLTEYKQARFSSFSRGLRDLAAWIASFGCKEVCMESAGKFWIPVFNILEKTLWVTLAHPKYTKPQKGNKTDRKDAKWICDLFMCDMIKPSFIPPPDIRELRDLVRYHRKLTNMLTGEKNRAQNCLTVSNLKLDDVFSDVFGKSARSITEHILKHPGEKFDVAPFVDKRCKHPIEEIQAAVDGAISREQAAKLREILAHIDEITAHKKRIEVEILRLAEKYEVQLNLIRTVPGFSANPLTAIEVLSEIGADMSVFPTAKHLVSWAGCCPRNDQSGGKVKSTRISRAGAWFKPVLVQVANAVVKSNKHPEIKERYRRIKTRRGHKKAIIAVCRMFLTAIWNILDKLEPYSAQGYLSDIPPPAQERVISTADALKMLKSRGYIIREDLPASASV

SEQ ID NO: 480201 - protein, 413 aa, unidentified
MKEVYRRCCGMDVHKDTVVVCVLPALGRDGRPIRKTYGTFRNDLIRMRVWLKQLKVSEIAMESTGVYWRPVWNVLEDEGFRLLLVNPAQVKALAGRKSDGRDAQRIAEYLQDGRLDPSFVPPAEVRQWRMMLRHRISLLEQRNEVHNQIRDLFETASLKWSSVASDLLGVSGRRIIEALISGEQSPEILSWKVRGRLRGKDKLVKESLKGYFNEFCRSMLESYYKHYQFLTSQVALFEERIARAMEPYTSQTDLLISIPGVDRIVAWHLIAELGLDSLTFPDADHCASWAGLVPGENESAGKHKSTRCRKGNRTLRRVLTQAAWAASHCKTGYLRAFFHRVKSRRGWAKAIVATAHKILIIAFNILRTRTPYQDLGDDYFDRLNPGRATRILVQRLEALGHQVQLSSPLRSSA

SEQ ID NO: 480202 - protein, 332 aa, unidentified
MSLYAAIDLHSSNSVLAVMDGDGKAVLRCRRPNDLPRLLNDLAPYRDELVGVAVESTYNWYWLVDGLMDHGYVVPLVNTTAIPQYDGLKHGDDDSDALHLAQLMRLGLLPEGYIYPREQRGTRDLLRRRFSLVRQAVRLMLSIQSSFSRSTGQQLSGNALRRLTPSQLVDLFPELSIRYGVLIQFKLWLTLQDQITALEQWIRKDLARLQSVPGIGPILGMTILLESGAIERFDSVGDYASYCRMVESVRLSNGKRKGAGNRKCGNRYLCWAFMEAANYAVHYDPLIRRWYERKRARKHRVVAIKAVAHKLARACYHMLHEGTPFDPTRAFS

SEQ ID NO: 480203 - protein, 424 aa, unidentified
MKVTYQTCCGVDVHKSFLVATIIKTTAGIEPSYQKKRFSTFNNSILDFKSWLLENECHDVCMESTGKYWVPVFNLLEDQINVTIANPKWVKAVKGNKDDTKDSKWIGDLFRLGLVKSSYIPCRLIRILREYTRYRYKLVSCRSSEKNRYQNALTVCNIALDSVVSDIFGKSSSSIIDYLLEQSGTTINHEEIASKLLKSLKSKEDAVIESIEGYQMTDAQKYRMRLIRAHMDYITAEINDIDKQIESLISSDPDYDKAIRLLTTIPGVKRDSAITIISEIGIDMSQFCNSKRLCCWAGLTPGNNESAGKKKSVRITRAGVYLKPALVQCAHAAVKSDKSPYYKTKYESLVKRRGKKRAVIAIARMILIAIYRMLSTGEVWNPSDLYKIDMPAPLAEKQKAKAIKQAKKLLQKEGLLPPDEPLAS

SEQ ID NO: 480204 - protein, 337 aa, unidentified
MQLKRLAVDTSKAVFTVHGVDAQDRPTLRQNLSRAQFEAFCRKLAATEVVLEACGSSHHWGRFLQGLGHTVRLIPPQYVKPFVKRGKNDRNDAAAINEAASRPDMRFVPVKSLAMQADAMDLSARDLLVRQRTQLVNSVRGHAAEFGIITAKGIARIQPLLEKIAETDMPEAAKIVLAQLGRCIDELDAQLVTVDARLAARHKAHPVSQRLAAVPGVGPTIALTLATKIDPSQFKSARHFAVWLGLTPKERSTGGRQRLGGISRAGDERIRQLLVLGATSVIRRAIPENKAANPWLLKLLERRPRKLAAVALANKMARILWAMMTNDTAYRRMPQTA

SEQ ID NO: 480205 - protein, 362 aa, unidentified
MKKSAQHHLVAKVPLGQPRIELTIGIDLGDVWSHYCTLNKEGEVVDRGRFRTTPKGVEKWFIDLPPARVAMEAGTHSIWISEQLRELGHEVIVANVRELRAISHSDRKSDQVDAEKLARYARLDPKILRPIAHRTVQQQEALTLIRARDLIVRLRTAAVNAVRGLTKSCGYRMPASSTRCFAKRSLAVMPSGLAQALGPVLEQIAEMTIKIKQYDRQIQQLAHTKYPEPQALLKVYGVGHIRALTYVLTLGSKQRFQRSRDVGCYLGLRPRRSQSGDRDPQLGITKAGNVYLRSLLIECANHILRPQGKDSSLRRWGLDLAARGGKQAKNKAVVAVARKLAVLLHRIWITQEPYQPFYAEAA

SEQ ID NO: 480206 - protein, 414 aa, unidentified
MRRLIDRCAGIDVGQALLVVCVRLVDPAGKLTEEIRSFGATVPDLVALRDWLVSVEVTHVAMESTGVYWKAPYYLLEGEFEVLLVNAQHLKHVPGRKTDVIDAQWIAELLSYGLLRPSFVPPRPFRELRDLTRYRKALVRARTGEINRLHKVLEDAGVKLATVATDVMGVSGREMMRALIDGVTDPQVLADLARARLRTKLPQLHKALTARFGEHHAFLLARMLAHVEALEADIDVLSQRIAELVEPWTGQLMILDSITGVGPRAAEVILAEIGPDMSQFPTAGHLASWAGRCPGQRESAGKRGSAKPRKGSPWLADVLTECAWAAVKTKDTYLSAYYRQIMRRQGKQKAIMAVSHKILVIAWNLLSTGALYDDPGAAVVRKTTDDQMRRRAVRQLEALGLRVTVEPREPHEAA

SEQ ID NO: 480207 - protein, 343 aa, unidentified
MQSISTIGLDIAKSVFQVHGVDAVGQVVMRRQLRRRHVLTFFQKLPPCLVGIEACASSHYWSRELQTLGHTVRLMPPAYVRPYVKRHKNDATDAEAICEAVARPSMRFVPTKTVEQQSCLMLHRARHLFIRQQTAVINSIRAYLAEFGIIAPVGRRGVEQLLEVVADKADYRLPEVARACLAALGSQLRAMKTQILEFDRRIIAWHRSNATSRRLDAIPGVGPALATALVASVADAKAFRSGRDFSAWVGLVPKQNSSGGKDKLGSISKQGDRYLRSLFTAGALAVIRYAKIHGTGHRPWLTALLARRPTKVAAIALANKLARMTWAMMAKNEDYKEPAALAA

SEQ ID NO: 480208 - protein, 403 aa, unidentified
MFHLGIDVSKKSCRYFLINPEGQKVKSFSLDNTHEAFQNLLKRLEDLSIPKEDLLIGLEASGGFWENLYSHLKDNEFRVVLLNPYHTKKFREALAKKAKTDDIDALVIAQLLRTGEYVQSQVAEEFIQSLRELTKLRYELMTERKNFQRQVFSLLSVIFPELEKTALKNPFSLASMAILQSFPTAKNLAQAKPKQIEKIVRSIQGNNFNIEEIGKLIQTAQTSIYSGRAKEARATSLRILLGHVKNLSSSIEELEREIQQLLSPQEPQGSFPGENLLTIPGVGDKTLAAVLSYLGADGSSFSSSTKAVGYVGYFPKIYQSGQTHRDNAICKRGPKLLRWALYMAAVAGLKHNPEMRTLYHRKISQGKTEKQALICVGKKLFQVMLAMLKSGEPYNPAKVFVSC

SEQ ID NO: 480209 - protein, 411 aa, unidentified
MNAVLSVCCGLDVHKKFVTACLLITGASGRVAKEQRQFGTTTAQVLELLAWLQDRGCRHVALESTGVYWKPVHNRLEGAMAQVLLVNAQHIKHVPGRKTDMKDAEWIATLLRHGLLSGSFIPPKEIRELRDLTRTRTTLIRQRAAECNRIQKLLENNSIKLASVASNVLGKSGRAMLEGLAAGRDDAEALAELARGTLRKKIPELTEALRGVLSETQRWLLTEQLRRVAELDAAIGRFDARIATQARPYEALLVLLDQVPGVNRQMAEVILAEIGPDMSQFASASRLASWAGMCPGQKESGGKRQSGKTRPGNVWLRSALVQAGWAASKAKGSSLKAQYHRVARRRGKKRACLAVGHRILRIVWAMLSSGQEYREGGPDYFVAASKEQVKDQLVRRLQKLGYAVSVEAPAA

SEQ ID NO: 480210 - protein, 357 aa, unidentified
MPQKERLVGLDVSSSQVDGYVLASTAARSVQNDAAGRAGLLAWLRAEGVELAVLEASGGCERTLVRQLRTAGIEVRVVDPRRVRAYARALGRRAKNDHIDAEVIARFAQACPAKPGEHSEHDPAREAVASLLATRQDLLETRISMANRLGHQDGPARQVLARVIAQLEKEIAGLDRLIARAIADHPPFQALARRLDTVPGVGPVLIAALIAWLPELGRANRMKLAALAGVAPYDEDSGNSRGPRHIAGGRTALRGVLYMVTLGAATRSNPVLMATYQRLRQAGKEAKVALVACMRKLLHILNVMIAREQDWNPDAATRPVDERPATAGSVLRTDPMKSPKPGGWTGARPIAAGGGGA

SEQ ID NO: 480211 - protein, 465 aa, unidentified
MNNNKKKVNSKRIKVKELDSFEVIRPNTAGIDIGSDQHWVSVPPTNSEQDVRKFGAFTCDLYQIASWLKKCNIEYVAMEATGIYWIPLFQVLEEKGFNVSLINARHIKIVDARKKTDRLDCEWIRRLHACGLLTPSFRPEPEICKIRSLLRHRDNLIKMKTRHIQHMQKSLELMSIKLSNVISDITGVTGLAIIKKILDNERDVYKLAALRDRRIKSSSEDIAKSLQGHYREEHLCTLQLALDALEFTNKQIKQLDRKVEFFLACLCGDIESQQLIFDFDDDQPLREKKRKIKTNNADYDLDYYLQKITSTDLTSVTGIKDSSLTIVSEIGLDMTKWPSAKHFSSWIGLTPRPKISGGKVLSHRTPKVKSRVANLFRNAASTLRNSNCYLGTFYRHIRKRKGPACAVTATARKLSVIVYHMLKNQSSYRELGSDYILKQRERNVIKNAKRQLKALGYSVTLTKNN

SEQ ID NO: 480212 - protein, 409 aa, unidentified
MKRYYMGVDWGDRLHQVYVGDQEGKKVKEMKLAETVEGLAEFGRWLEEKRAEGFEFWAAIEKPAGRVVDFLLDHGVEVYPVNPKALDRVRDRYRMSGSKSDAFDAYVLAEFLRTDQAHLKALRPSSENAQELKMLCRDQRRVGRHKARLLNQLTITLKEYYVRPLEAFEDIETEVALDFLTRYPTPAHLQALKPKEFKRFATKQHHLSQQRSEELWEKLSQPQLAVPDHVVRAKAQLLEVLIDQLRAAIKSVKTYNHKVESFFASSPAAQIAKTLPGGKSGTVVAAIWAELGDAQGRWESFRHLQAEAGAVPLTKASGQSRVVQFRFACNKHLRYAMYWFSFVSLNHSEWAKLYYRQQRAQRHTHPEALRALGAKWLKIIFVMWRDHKPYDEKLHLANIALQKMRQEAA

SEQ ID NO: 480213 - protein, 401 aa, unidentified
MTAVRSRAWIGVDIGKTHHWVCAVDETGKKLLSLKVLNDEAQIIEVITSITDLADGRVWAIDILGTPSALLVALLANAGEQVRYASGRVVAAMSTAYTGEGKTDAKDAYVIAETARIRTDLAVIDADTDLVRALDVLTGHRADLVADRVRMINRLRDLLTSVFPALEREFDFASCKGALVLLSGYATPESIRRMGEARLSRWLRQRRVRGYADVAARAVAAAQTQQTVLAGQDVAASIVAELAEAVLAQHARLKLLDQQIQDAFAQHPQAEVIESMPGFGPVLGASLLVAAGDLAAFPTAGHLAAAAGLVPVPNDSGRRAGNLHKPRRYSRPLRHALYLSAQTSMMRAGPNRDYYLKKRDQGRSHSQAVIALARRRIDVLWALLRDNRTWTTAPPTRAQAA

SEQ ID NO: 480214 - protein, 401 aa, unidentified
MNAVGIDVSKGKSMVCVMRPFGEVVLEPFEVLHTAQSLNDLAGKLKALDGETRVVMEATGNYHKPVAFVLHDAGLFVSVVNPVLIHDYDNNSLRRVKTDRKDAVKIANYTLDKWTRLRQYLPEDDTRLALKNCYRQYQQAVAVRTMLKNNLISSLDLTFPDANKLFSSPAKSNGCEKWVDFIGGFWHSECVSSLSSDAFAKKYLKWCQKHGYNFTRSKSDTIYACAVNAASLPKSPTSKLLIQQQVAQLKAVSQSVAAFQQEMLRLSQQLPEFDTVMEMYGVGPSLGPQLMAEIGDVRRFSSKKSLIAFAGIEPQPNDSGKIVGNDSGISKVGSAVLRRTLFLIMTVILKTQPQDEPVFQFMNKKRSEGKPYKVYMMASANKFLRIYYARVKAVMDSKHSK

SEQ ID NO: 480215 - protein, 435 aa, unidentified
MSKQGLPQINAHACGIDIGCENNHVSVDGKTVKVFPTFTESLSDIVKYLLESKIETVAMESTGVLWIPLYDILVSSGIEVYLVNSTHVKNIPAQKSDFQDCRWLQKTHSYGLLRASFIPTETIRELRTYVRHRESLVDTSSQNIQRMQKAFELMNIKFHNVISDITGVSGIKVIESILSGERNNKKLLSLCDARIKKGKSKEVLLSLQGNFKKEYLFLLSQSYQSYQFFQEQILNCDKEIEIILSQITEELPSPPSTPSNPARHNQPKVKNLHDMMVQMLGGRDATVLPGYNDKTLLKLISETGTDLSIWPTEKHFTSWAGLSPRKKQSGKMNRTHKINVKTKVGQIFRESAYSIANSKYIALKGFYARIKSKHGYKTAIKATARKLAVLYYRFIVYGIDYVEKGLKIYDEKYNAVLLKNLTKKARGFGYTLVKD

SEQ ID NO: 480216 - protein, 387 aa, unidentified
MKVIIGMDPHKRSATIEIIDPAAAVLATGRYDTDNAGYGAMLTAARRYPDRVWAIEGCNGVGRHLAHRLVHDGETVIDVPAKLSAQVRVFATGNGRKTDPVDAHSVALAALHSPNLRQVHADSELIALGMLADRRDELGRARTDTVNRLHRLLLELLPGGAKKFLSAMQARKLVATVKPRDPAGKVRRRLTVELISELEAIDRKIKASDKELRQLITERGSTLTDLNGIGPAGAARLLADVGDLHRFRDRNRFASWNGTAPLDASSGQQQRHRLSRAGNRKINRVLHIMAIVQLRNPSAGRTYYDRRKAAGKTSMEAMRALKRRLSNVVYARMLADQQQRQTASPGGQSGATLDSSATGPTPHTGTSDKPQPGLTTNQNNPDLQTTP

SEQ ID NO: 480217 - protein, 343 aa, unidentified
MIVVLGIDLGKNLCSLVGLDAAGAVILRRRMRREGVVAFVAGLPPCLVAMEASCGAHHLGRQLVAQGREVRLMPPEYVRPYVKSHKNDDRDAEAVAEAATRPTMRFVALKTEAQLDLQMLHRARERLVGRRTALINQLRATLLDRGVAVPQGKRALQRALPQILEPADTGLSGRIVALLTDMLAEWEELDRRVAAFDTEFLALAREDDAVRRLVAVPGFGPLTASALVAAVGDARRFKRARDLGAWLGLAPRQATTGGRPRLLGISRRGDGYIRKMLIHGARAALPGLVARETTTGRWLRGLLERTHKNRVVVALAHKLARIAWAVLVRGEAFDADRGAVPAG

SEQ ID NO: 480218 - protein, 351 aa, unidentified
MIIIGVDYHPSVQQIAYVDTETGETCERRLNHSDGEAEHFYRALERRQVSVRVGIEATGHARWFERLLAELKFELWIGNAAEIKAARVRKQKTDRQDALLLLKLLVEDRFPRLWVPSPENRDLRQLIWHRHRLVQMRTRAMNQIQATAMNEGVRRKKALWSKSGRQQLESLLLAPWATHRRQDLLELVDRLNGTIAELTIAIEQEAHKRPEVLRLMTHPGVGPITALAFVLVIGSPDRFACGKQIGSYLGLIPCEDSSANRQRLGHITKQGSSLVRFLLAESAQAAVRWDSDWRRRYAHLSMRRDRRIAKVAMARRLAISLYWMWRKGYDYQQSLKFGSHAGEPGYRHGVK

SEQ ID NO: 480219 - protein, 416 aa, unidentified
MEVIVSRCAGLDVHKNTVMACVRVPGPNGGRTSTVRQFRTFTAGLRQLRDWLVAEQVSQVVMEATGVYWKPVWHVLDATPGLELMLVNAHAVKNMPGRKTDVADAVWLAELGECGLLRPSFVPPPVIAQLRDLTRYRKKLIEERARETQRIQKLLEDAGIKLDSVVSDILGVSARQMLEALIAGVRDVAALAELARTRMRPKIPQLRQALEGRFGAHHALMLRMHLEHLDQLSVSIDRLDSEVDRVIRPFRSVLQRLITIPGVGRRTAEVIIAETGADMRRFRTAGHLASWAGMCPGNHESGGKRRSGRARKGNAALRAALCEAAWAASHARSGYLPAQYRHLLRTFGKKGQTRAVFAVGHSILVIAWHLMAHDRDYADLGGDHFTRATDAEARERYLVRQLEALGHKVTLEPAAA

SEQ ID NO: 480220 - protein, 400 aa, unidentified
MEVVYPCCCGLDVHKKSITACVLWAEAKGKSRKQKKRFGTFTHDLLQLADWLAQCGVTHVAMESTGVYWKPVWNVLAEQFEALLVNAQHIKAVPGRKTDQKDSEWIADLLQHGLLRGSFVPPRPTSELRDLTRYRVSLVQEINRIANRIQKVLEDANIKLASVATDALGASGRAILEAMLAGEQDAARLAEMAQGKLRNKIPELQLALEGRMTEHHRFLLRQLFDHLRFTESKRSDIEQEIDKRMLPFEDKVTRLCTIPGVDRVTAWGMLAEIGLNMDQFPSAAHLASWACLCPGSFESAGKRLSGKMRKGNVSLRRCLSQAAWAISMMKNNYLSALYRRIAARRGAKRAVMAVAHALLVIAYHMLKRKEDYRELGADHFDRIDVNRIRRSLVKPLAQTA

SEQ ID NO: 480221 - protein, 352 aa, unidentified
MDRFCVGIDVSAKKLDVAYRNGKRGIERHTFANDSAGHAALVRHLMKRPAGKVIRIVLESTGVYGLDLALALDGASLEVMVANPRASANFAKATMQRSKTDRLDCAMLLEFAEQMRFKRWQAPSTVQLQVRTISRRVHALMGIIRDEKNRMHAASQVDGTTIIKRSIHDTIKQLETQVRKLRAAAFELIKAEPQLTRRYELLVSAKGIGHISAIAILAELAVLASDMSDRQWVAHAGLDPREFQSGTSIKMPPRISKRGNKYLRSALYLPARVACRFEPGVASFAARLRASGKKPLQIHVAVMRKLLHAIHAMFASGQQFDGTRFYLRAEAAVGTSGIASSAISEVSTAVLT

SEQ ID NO: 480222 - protein, 312 aa, unidentified
MEKISHGGIDVSKDRLDVMLLPDRRCFSVPNNASGWVELIERLRDLTIVAMGIEPSGGYERGIIRALLAAGLSVRRINPNKLRQFARARGVLAKNDRLDAQLIAEYVAIMPTRAVQRDVAAERLAEIVTMRRQLCDEHVTVQNQAAHIEDTLLGRINKRRLTRLKADIALLDKRLAEVVAADPALAHRYELLTSMPGVGPVLAFTLIALLPELGQMSRKQIAALVGLAPYDFDSGKLRGHRSIYGGRLPVRNVLYMAALSAARYNPALKAFHKRLAAADKSSKVVIVAVMRKMIVTLNAMLRENVAWQHGAT

SEQ ID NO: 480223 - protein, 357 aa, unidentified
MKYIGCDFHPSFQQIAMLDKETGELVERRLLHTQEARAFYEGLQGSVVIGIEASGNMDWFESLLVGLGQEMWIGDAAAIARQEGRKQKHDRRSAALILRLMVENRFPRIWVPTLAERDLRQLLIHRHHLVRMRARIKNQLQHMALNQGWQKKSKLWSRAGLELLGNLKLEPWAQLRRDTLLAMLEGLEEKIKPLDQAVEKQAEQSEAARLLATHPGVGPVISLATVLTMGDVNRFVSSRSWVSYLGLNPSEESSGQRRRLGSISKQGNPFLRQLLVEGALTAARGDKDLGRMNARLKARKHHGVAKVAVARKLAVRLYWMARTKSSYPDVVRTQGSQSHPVAEVKAETLNRPPASHP

SEQ ID NO: 480224 - protein, 355 aa, unidentified
MIGEKYIGLDVHQATISVAVMDSKGKVVMESILETQAATILEFFAGLRGTLWVTFEEGTWAAWLYDLLKPHVAKLVVCNPRKNALLKHGNKSDKIDARKLADLLRLNDLEPVYHGETGVRMLRELARSYLTIVKDLSRVMNRLKALYRSWAIPCAGRDVYYTRHRSEWLGKIPEAGTRRRAEQLYQQLDMLQHLRQQARRELLAESRKHTITAKLRQIPSLGPIRSALAVALIQTPHRFRTKRQLWTYSGLGLETRDSGEYHYVQGQLRRSKKQVSIRGLNKDHNHDLKGLFKAAATRASVQPGPFQDFYQRSLAKGIKPTMARLTLARKIAAITLTLWKKGENFDAEKLKSQAA

SEQ ID NO: 480225 - protein, 434 aa, unidentified
MEEVTDEPLYRDRVCGIDIGKAELYATIRVPSDTSPRRRMSETRSFATTRRGVLALADWLRSWQVPAVVMEATPACWMGPFFRLEAEGFECVLADARQVKNLPGRPKRDPSDSSWLAQCSERGAVRPCFVATKEFRVIRLHTRYRRDLINERTREKNRAEKLLETAAIKLSSVITDLHGVTGRDIMDHLIAGERDPKVLAQLARTRARAKITELQHALEGAEFFTGHHARLLKTMLERIGQIDAQVSDLTAVIEELLAPYEEQLAQAESMPGWGRRSAEDAVAETGAGMTRFPTGGHLASWAGRAPLDKQSGKRKGQARHKKGNTYLGGVLGETAVCAGRTQTREGARYRKLARSRGKNKACVAVGNTQLKVSRKLLSNPGMRYQDLGPDYYERRAQTRRKIAYHVRELEELGLEVTLCRPGPAQDDPEPTQAA

SEQ ID NO: 480226 - protein, 338 aa, unidentified
MATYAGIDLHSNNIYLAIIDQHKERLFNKRLPNKLSTIKKVLRPYRKALAGIAVESTFNWYWLVDGLQDAGYKMHLANPAAIKQYEGIKHRDDKSDAFWLAQMLMLGILPEGYIYPKDQRPTRDLLRRRLLYVQQRTAHILSLKSMTARSLGETIATKEIRKLKPEEADTLFDQEHLRLAGRHALATIRFLSSQAKSIEKQVMKYTKIKPEFASLLTMPGIGNILGMTIMLEVGDIHRFRRAGNYASYCRCVKSEKRSNEKKKGSGNRKNGNKYLSWAYVEAANFAIRYQPKARRFYDRKASRTNNTVARKALANKMARASYYIMRDQVAYDESKMFP

SEQ ID NO: 480227 - protein, 425 aa, unidentified
MEVIHRRCSGLDVHKETVVACVRLVLDDKITREVRTFETTTSGLLLLLAWLTELGCTHVAMEATGVYWKPVWNILSDGDFELVLANAAHIKNVPGRKTDVSDAAWIADLLAHGLIRSSFVPEQEFQELRELLRTRKQLGRQQSSHIRRLQKTLECANVKLDSVITDIVGKSGRAMLQALIAGETDPVKLAALADRRIKASAQELREALRGRVTDHHRFLLHLHLQHIDFADSAIQDIDRNVTALITRMDQEVEAGQTRATFQSLILLLTTIPGIDVLSARIILSEIGRDMSRFPTAGHLLSWAGLCPRNDESAGKRRSTRLRKGDPWLKTLLVQCAWAARRKKGSYFNAQFLRLRGRRGPKKAACAVAASLLTTIYHMLKDGTQFQDLGADHFDRRSKDVRAKRLVAQLANLGFNAKLTPLAQAA

SEQ ID NO: 480228 - protein, 442 aa, unidentified
MAVRKREDEVFPNAAAIDIGASNHWVAVPLHLAQAAGDEPVCEAGAMTDDLNALARWLVKLGVDTVALESTGVYWIPVFEVLEQHGLKVWLVDARQMKYVPGRKSDVLDCQWLQKLMSLGLLRAAWRPSAEVCVLRAVARQRETLITEQASWVQRMQKALVQMNIQLTEVITDVMGQTGQAIIRDIVAGERDPKTLARHRRVKASEADIVKALTGNWREEHLFVLKQALGVYDDLGHHLAECDAKLQALLDQRAATKIDLGPTPRAGSKARAEHDIRQRLADWAGVDLTRINGLGVTIVMKLLSEIGPDLSRFATVKHFCSWLGLCPGTKISGGKVLSSGTKRSASRARQALKMAAQSLCRSESALGAFYRRLCGRMDKPKANTATAHKLARMVYFMLTRGEAFVDQGQQRYEEQQRQRSVAALKRRAAALGFQINPVETAA

SEQ ID NO: 480229 - protein, 355 aa, unidentified
MQRKEISFKGQTIYVGIDVHKTTWSVTVMTATGNYEKNFTQPASPQKLFDNLQKNYPDARYEAVYEAGFTGFSTYYSLKELGIRCIIVNAADVPTTDEERRFKTDAVDSAKLARYLRNGDLHGIYVIPKENLDARGVVRVRKTFLQQLSGYKVRIKHLLYSNGVEYPERFARSTTHWSKAFTKWLCEEVELLSEDRVSLDLLLEQVEYLRQSVLKATRKLRELSQLPYYKKNFDHLLTMPGVGAITAMTILTEIADTKRFPNEKAYTKFVGFVPNCHDSGDHKSKCEMTGRGNNRLRMAYIEAAWVAIRKDSALCSAYLRYCHRMEKTEAIVRIARSLVHISLALVKNDTDYAQS

SEQ ID NO: 480230 - protein, 375 aa, unidentified
MSVYPEYPPGEKAKGRFSLLIFLKLNGKMKRIVKQVVGIDVAQKELVVCLGRMYDDWEPELYASKTFGNTAKEFTALTLWVKKLTEESSPVRYVMEATGVYHESLAYFLEGKGFEVSIVLPNKISNYFRTLEVKTITDKTASEAIARFGLERKLDRWKRPAEIFRKLKQKTRERDQLVGERTLVKNQMHAEQTEAYPGKESIARMKTRINLLNKQVMEIKEEMSVLVKGSTEVKKSVALISSITGIGTLTAVTVLAETNGFELIRNKRQLTSYAGLDVREKSSGTSVKGKPRISKKGNRHLRKAMYMPALAAIRYDGRFKVLFTRLVSRHGIKMKAAVAVQRKLLEMIYTVYKTNTVFDREYHKEKVIALSTQEA

SEQ ID NO: 480231 - protein, 322 aa, unidentified
MTQQDPSSFPVVGIDVSKKSLDIFIDSLNQRFTLDNSDQGIATLIGRLKDAQVRLVVIEATGRYHRRLAVTLLAAGITTSVVNPQRAREFAKAMGKLEKSDRIDAMVLASFGRQLQPRPEQIQPENRTILADLVSRRRSLVQLRVAEKNRAHDDLPRLAAEQSKTLLRLIEQQIEDLDREIARQIQADDDWHNKSQIIDSVPGIGPGSANQLIVDLPELGQLNRQQITKLVGLAPLTRDSGAFKGQRSIRGGRRDVRVTLYMLAHNAVLYCPRFKTFFAQLIARGKRHKVAMTACMRKLLVTLNQMVKTKTHWNQQIATEPT

SEQ ID NO: 480232 - protein, 381 aa, unidentified
METLHSHCAGLDIHQKEIVVCTYIGSSDEELIKEIRTFPTMTKNLYEMLQWLEELNITHLAMESTGIYWKPVFNILEDFFEITLANAQRIKNVPGRKTDVADAEWIAKLLRYGLIEKSFVPPVDIRELRDLTRLRKKMIGNMTAEKNRIQKTLECSNIKLGSVISDIFGVSGRKLLTRLVEQGYVNPNEVEEHIHVRMMSKASQITESLFGTINPHQIFLIRQSWNHILFLESSIQQLEDKIDEILLPYQEQVELLLTIPGVKKHSVACIIAEIGVEMNQFPSAHHLASWAGLSPGNHESAGKKKSTRTTKGNPHIQSTLCEVAWAISRTRHTWLSGKYWSLAARRGKKKALVAITHKTIKIIYHILNQRSGFIEYSKVLA

SEQ ID NO: 480233 - protein, 319 aa, unidentified
MTQISTPPVRFIGCDVGKAVVTVFDSLTGQTRDIPNRKPDLVRLARALDVGCLVVCEATGGYEAKLLAAMLAAGVPAHRADARKVKAFIRSFGTLGKSDAIDAQALAHYGAERHPALARWVQPDPVREELQALVLTRVDLVRLRQAHRNRLAAPGAEAVATVLRAVVREVDKQVRALEARIAACLRQHPALNRDLAVLRDMRGIGEVTAAALLALMPELGALSGREAASLAGVAPHPHESGQRSGYRKTRGGRPEVKRTLFMAALVASQGKGTLAEVYRSLIARGKKPIVALTALMRKLVVIANAKLRDARAAEAAQVS

SEQ ID NO: 480234 - protein, 345 aa, unidentified
MKNSNVIGIDLAKNVIQVCIISKHGELISNKAMSPNKLKALLAKSNPAIVAMEGCSGCHFWGRFARKYGHDVRIISPKKIKAFLQGHKTDANDALAIAIASTQVGMVFSHIKEEEQQSLQTLETSRKFLEKELTALGNHLRAYLYEYGITINRGRKYLRETIAIVLGDHDNRLPACLKNTLQVLWERYQSTVDQFKEIEKHKAALVKQLEPCKRLLDLEGVGNVCASMLYTSIGNGSDFKNGRHASVYVGVTPKQYSSGGKTYMVGIDKVGGNKELRAALYQGALSVISRLPSEPRTLKQQWLLALVKRVGVKRACIALANKTVRTAWALLATGKSYESVLLHQQ

SEQ ID NO: 480235 - protein, 317 aa, unidentified
MQKIINFVGIDMAKNDFYACLSDMIEPRKFNNDTKGIKSFFNHLKRHNFQKENTLLGVESTASYHLNLCIESTESNYGIKVINPLIVKKQNQTNLRRVKNDKQDSRLIRFCLIGGAGYLFDNDPEAMILKSLIRQRDSLVFSKLKFTRQQADIRLKEKCLKQDISPIYTEIINVLEDKINLLKADLRLYRPKEQYLLQSIPGVGPITAASFISEVGDINRFNKPEQLVAYAGLDPRVHQSGISINGKGYISKRGNKILRTRLFNAASVAVLHDNMFKVFFQKKKSEGKPYRVALVATMRKMTHVIHAVWTRGTPFIK

SEQ ID NO: 480236 - protein, 345 aa, unidentified
MKHYVGLDVSMKKTSVCIVDENGKIVHESEVKTDPHALADSIGKTGLKIEFVGFESGSLAHYLAQGFKERAIPAVCMDARKMSAILSIRVNKTDKNDARGIADALRTGMFTRVHERPLESINRGAVLSMRRFLVNQRTDIKNHVRGILKTYGIRLGAVGPKRFNGTVKNRIQNLDNLVRQTLEEMLEIFDIVDQKIDRLDNELLKIAHQDKEVQLLMSAQGVGPITALSYKTEIFDPSRFSNSRAVGAYLGMTPTQYSSGEMKKQGRVSKCGSKELRSLLTEAGIVILTRSKKWSKLKAWGLKLMRKKGSQKAALAVGRKLAIILHRMLVEQKAFIWGEVPTKAA

SEQ ID NO: 480237 - protein, 476 aa, unidentified
MSPIKANIKRQHRRSGKAGTEQPLREIRTDVAGIDIGATENYIGCRPTANGGPNVRSFGTDTQSLLETADWLEAESVHSVAMESTGVYWISLYQVLVRRGIEVNLVDARAVRGVPGRKTDVLDCQWLRQLHACGLLKGCFLPDDQTAALRNLQRMRHTLRQSQDDWIRRIQKQLDLMNVRVHRAVSDITGLTGMLILRSILAGERDPRKLATLRDPRCRKSEEEIARELTGNWRDEHLQNLAVTMSMYDHLSAQIATTDQNIGQLLTRIRAIREATGQAVAAVVPPHPSKEKGRRMIKRGEEPMRQELARTFGTDLTVIEGVGVEAAACVYMELGPDIPARFPTEHHLVSYLKLSPRLAISGGQPVHRKSKSPHRGSLPLKRVLLTAASAVRDSKTVLGDYYRKIAYRKGAGVAAFATAAKLAQRIYRALAHGIEYATGGDARWQSAEQERRRARLARQAASLGLILVPTATASTP

SEQ ID NO: 480238 - protein, 406 aa, unidentified
MTYRVFVGIDWGSQEHAVAVLTRDGTGAQERKVAHTGMAIAALVDALITLADGAPESVAVALEVPRGSLVEACLERGFHVYALNPKQLDRFRDRYTVAGAKDDRRDARVLASALITDVGAFRRLDPEDDRLVQLRELTRLEEDLDTERRRLSNRLREQLYRVAPGLLTLCPGADEPWLWTLLTRASTPAGAAHLPRAAVARVLHQHRIRRLTPDDLLAVLRAPRVPAAPGVLRAVEDHLAVLLPRLRLAAEQPQTCATRLEQLLDELGQTQEHRDVAILRSLPGVGRKISATMLAEASRPLAARDYHALRTQAGSAPVTKQSGQRRRVTMRRGCNPRLRNAVHYWAQVSAGHDAVSAALYARLRARGCSHGRALRGVADRLLAVLVAMLRHQTLYDPERRRISAAA

SEQ ID NO: 480239 - protein, 455 aa, unidentified
MPGTKTRGTSSGRLSTINPDAAGIDIGSNFHVVAVPSDRDDRPVRTFRTFSSDLHQLADWLTEVGITTVAMESTGVYWIPVFEILEARGFEVLLVNARDVKHVPGRKSDVNDAQWLQQLHQHGLLRGSFRPRDSVVRLRAYLRHRERLIDYAAAHIQHMQKALMQMNVQLHHVVTDITGLTGMRIIRAIVSGNHAPEQLAEFRDRRCHASEDTIREALIGNYRPEHVFALRQALELYDFHQAKVAECDVEIEAVLGGLNEQRVTPEAPLPSVRHAKGRNEPTFDVRPALYTLLGADLSQIHGFGPYTVLRLVAECGDDMTKWPTAKHFTSWLSLAPGNRISGGRLLSSKTRRSSNRATALLRIAAVNIGRTQTALGAFYRRLAARTGKAKAVTATARKLAILFYNALRFGMTYVDPGVSSYEERYRQRVIHNLHRRAKSLGFTLVAAPPATEGVS

SEQ ID NO: 480240 - protein, 317 aa, unidentified
MSNSRFIGIDVSKQNLDVHVRPDDLRYQLSYDAAGLAALVEQFHGLQPELIVLEATGGYEHQLVAELLNDQLPVVVINPRWVRNFARASGQLAKTDAIDATILSAFAEKMRPPIRPLPDDDLKELRGLLVRRRQIVDMIVSEKNRQYTAPKRIARQIQTHINWLEKRLDEADDDLRCHIEASPLWKAKDDLLQSAPGIGPACSMTLLAALPELGTLNRHQIAALVGVAPINKDSGRFRGRRTTQAGRSHVRSVLFMSALSAIRFNPVIARFYKHLLAAGKPKMVAMVACMRKLLTILNTMLKSSTPWISNYEKNTCA

SEQ ID NO: 480241 - protein, 362 aa, unidentified
MEYFAGLDVSIEETAICVVGDDGKVVLETEVPTEPELIAEALERFAGRLRRVGHEAGSVSPWLHAGLIELGLPAVCLETRHVRAALSAQRNKTDAADALGIAHIMRTGWFRQAHIKTEECYRIRLLLVQRRNLKRKFLDIENAIRHSLKVFGIRLGKVGRGSMAKAVREAVAGDAMTAGLMDCMLRARAALWDEYLILHKLVTQLAMRDELCRRFMAIPGVGPVTALSFKSAIDDPTRFRRSRNVAAYFGLTSRRWQSGSSIDVKGRISKAGDPDMRRALYEAASAMLTRFKGRDTIKTWGLKLAKTKCHAKARVAVARKLAIVMHAMWRDGTFYVGDPDAEAHEFDSAYAAKMQRLSYARS

SEQ ID NO: 480242 - protein, 343 aa, unidentified
MLEVSIIGLDIAKNVFHAHGADASGRALFSRKIGRGKLLEFFAGHQRCTVALEACGGAHHWGRELTRLGYKVKLIPPAYVKPFVKRNKNDAADAEAICEAAQRPSMRFVAIKSEEQQASGLVFRTRDLLVRQRTQLINAIRGHLTEYGWVAPKGPSHVAMLGDLLEDEMASSLPEAARSMFRTMLDLLEELNEKIGDLDKEIARRAREDAVARRLMTIPGVGPITATALAALAPPAESFTKGRDFAAWLGLAPRQMSTGGKQKLGSISKMGERTLRRLLIIGCSAVVLQASKRGAPQGSWLEQMMARKPRMLVTVALANKTARIIWAVLVKEEDYRAPVAAAA

SEQ ID NO: 480243 - protein, 344 aa, unidentified
MTYYAGLDVSLRTVNLCVIDDQGAVIAEAKLASEVTELVAWLDGLDLEIAQVGLEAGTLAQYLTYGLQSAGYAVVCMEARHVKAALSAMRNKTDKNDARGIAQLLRTGWYRPVHVKSMASHRIRALLASRKAVLNKCIDLENEIRGLFKVFGIKLPPKLGHGAFDAAVRGIIETDATLSEGFLPLLDARLVLYHCFRELDNRTRQQAPSDPVCQKLMSAPGVGFITALTYKAGVDDPARFKRSRTVPAHFGLTPRRFQSGELDFEGHISRCGDREVRSTLYTAANVLMTRSAQWSSLKAWGMQVAKTRGHRRAVIAVARKLAVILHRMWVDDTQFNWGTEGARS

SEQ ID NO: 480244 - protein, 401 aa, unidentified
MLTLWAGIDAGKTTHHCVVIDCEGTVVLSTKVNNDETALLDLIATVIDLDSEGDICWATDLTDGGAALLIALLAAHGQQLLYIPGRVVHHAAATYRGDGKTDAKDARIIADQARMRTDLQPVRIATQMAVDLRLLTSHRLDVVHDRVRAINRLRATMLEYFPALERAFDYSKNKAALVLLSHYATPESIRRIGVTRLAAWLKARGCRNSAGVAKAAVDAAHTQATTLPAQAVGSALVTKLAAKIAAIDEDLAGIDAEITEQLAKHHSAANLISMPGFGPVLAATFLAQIGGSLDAFETVDRLACVAGLAPVPRDSGRISGNLHRPRRFNRRLLRTCYLAALSSLKNSPASRAFYDRKRAEGKSHKQALIALARRRMNVIWAMLRDNTHYIEPAATNVATAA

SEQ ID NO: 480245 - protein, 481 aa, unidentified
MSSKCNVPSKKKQTVKYTKNLHIVHPYCAGLDIHKETIWVCTSPFQDGIAPEVTTFGTDTVSLENLAAYLHERKITSVAMESTGVYWLQTFLHLRNANLNPILVNPSDVKNIKGRPKSDRADSVWICRLHSYGFLQASFVPENQILNLRNFYYACEKLTKESGSHIQRMNDELVKMNIRIDLILTDLTGVSGSRLVNAILQGERSPENLYKLLDRQIIQKKPKSEILRYLSGNFDENNLLVLKVWHDLYIFIQTSLNNIKEQMCMIMDSFPKKADRKDIPPPKKNYREDYLKFPIEMRPLFYEIYGVDLTQFPGIGAGTVTALLCTVGTDLSPWPSEKHFVSWLGLAPINKESAGYRKSGATRKIKNPLANAFKMAAMTAKRTTSYIGNTARRLASRILPKKAKVATARKLAALVYKVLQKGMPLTVHTEEEYQQKKEEHKIKTFLRDLGKYIVDGKFTPEVLEVCNKSSYKVEIESFLGV

SEQ ID NO: 480246 - protein, 461 aa, unidentified
MRIIGLDLALTAEHKALIADARGQPLAPILRLRTTASELTRLFQRAREGTAPDEPVLLIMEPTGMAWLPVAVFAQRHQVTPHLVNSQQVADLRRYYKKHAKSDRIDVRVLVKLPVVSPEKLHPLALPHADLFACQRGCKELDHLMTLSTALQNRIHAIDGFAWPGLEAVLSEPFSPLTRWFREHWYQPHQVLAAGAAVLEQAWQMEPAARTVTAPEAWAPALVRLAQHTLDLYGTDSPYLDYAYLQAEVTREQTLLAVVEAHHHTLQLQTVRPLYRHLHPSRNLETLKGVGQDGAAVYLSFIGDPHRFADHSHFRGWTGMVPDSKQSGEREAKGLHISQAGPDLIKKFAYLDAETARQWDPQIAAIYYDQMVEHGKHHNQAICACGTHLLDRIWTILIEDRPYELRDVDGTPVTVEQARAIIAERYTVPKEVRQRNNQRTRRARMERRAERKAERESRASQ

SEQ ID NO: 480247 - protein, 346 aa, unidentified
MTIVEGTRSITGGVDTHLDVHVAAALDDIGGLLGVESFEASAAGNDKLVCWLGSFGSVVRVGVEGTGSYGAGLARFLRGAGIDVVEVDRPNRQARRRTGKSDPADAVEAARAALSGRAQGAGKTRDGNVEAIRALVVAKRSTRSTKIKTLNQIRHLSFTATDDLRERFRGVSRFHLGATAAALRPRAGSDPVAYATKTALAVLGRRVIALDEEKERLDALLAELVTKTAPQLLALHGVGVDTAAALLVAAGDNPDRLRSEAAWAHLCGVAPIAASSGKVTRWRLNRGGDRQANSALWTIVITRMASDARTRAYVARRLEEGKAKADIIRILKRYVAREVYRHLPRD

SEQ ID NO: 480248 - protein, 311 aa, unidentified
MIIAPGFIGIDVSKNHLDIFDAAIGRSIRIDNSVPALAGLTESWAQREAAFVLFEATGRYDLLLRRALAAGGIRFARVNPGRARDFARAAGFLAKTDAVDAHMLAAMAHCLHPRTEEARTEPREQLALLNKRRDQLVATRQQERTRRHECSDPISLDSIAEHLAWLDAAIEAMQAQIAALIASTPELDRARRLLASTPGVGPVTAATLLALLPELGQRSPKQLAALVGLAPFNNDSGARRGQRSIRGGRKRVRDALYIAAFSAAHHAPRFVAFYKTLISAGKPTKLAIIAVARKLLTVLNAIVRDQQPFRA

SEQ ID NO: 480249 - protein, 325 aa, unidentified
MQLEVIGGSCLGIDVGKADFHCALLIDGRSRSNSFSNSQAGFQKLLGWLHNRDAWRVHACLESTGGWSEELAGFLYKHDHGVSVVNPSAVKAFGQSELSRTKADKADAALIARYCQAMAPRLWTPPSPSQQRLQRLSRRRVALDGMRVQESNRLKGPGVDDVRSSIEETIAFLTRQIKAIDAEIAALIDDDPSLRSKRELLESIPGIGERVATTILGELPQITELGNGKALAAFVGLCPREYRSGTSVGTSWLSKVGNRNVRRVLYMPAMTAMRFNPVLRAFAARLRSYGKRPKQIIAAVMRRLIVIAYGVLKSAQPFSAQGGHC

SEQ ID NO: 480250 - protein, 323 aa, unidentified
MQGKVSFEENAMPAVYVGVDVCKEWLDIHLHPLGQSRRFGNDTTGIRQLKRMLARCRPESIVMEATGKFHRAAHRSLSADGFCVSVVDPLRARLFARACGYLAKTDRLDARLLALLAASLRPGANTPPSPHIEALQELVNARAAAKGEITALQNRARTATTAFLRGELSRRLKSLERHVQRLDEEIERCIGEDPELGRKVEILTSIPGIGRITAWALMAGMDELGRCSGKQAAMLAGLAPVANDSGARTGRRSIRAGRPAPRRALYMAALSARRSNPSLTRFAKTLEAAGKPPKVILVAVMRKLLVLANCLLAQDRLWTPNPP

SEQ ID NO: 480251 - protein, 381 aa, unidentified
MNTTTVAVDLAKQVFAVCVGDAHGHGGKTTVFKRAEFLAWLKTLPAGTQVAMEACGTAHYWARTLLALGLVPRIMAAEFVKPYRKNQRVKNDSRDAEAILAALHAPGMRFVTPKTEAQQQRLCWHRLREGYKEERTGLLNRIRSLLAELGYLVEPGATKLRRTLANMLTPDEDGTLAPESLRQMIQGVLTQLTALDARIEECSAHIARQSRLDPSVAALQKCPSIGPLIADALVATVGDARHFKNGRQFAASLGITPSQHSSGGKNRLGKITRRGDSYLRGLLIHAAGAVLNATIRKHTAQPAQLSRLQQWMIGVYQRAGYAKAKVAIANKHARQAWAMLARGEAYNSETWQAWQAAHGEVQAADHPQDDLPTAALAAASV

SEQ ID NO: 480252 - protein, 407 aa, unidentified
MVCETGKENEELYAVSFYDLRGRIGEWSKSPKRVDSGGRGVRMRIDVGVDLHKTQMTVYVRTGKDEGEGGEYATDEEGYREFLKALGKWRSKGADVRVAVESTGNTRYFMHRLETRGYPVVVINTMKFKVITQSVKKTDKHDACTIAEFLSKDMLPASKLCSEKSEEVRRLLKVRSMLVRTRVSIKNQIHGLLVSRGMEDTRASLQSKRGRQKIQDTLAGAGNGLVVQPLFETIEVLGEKIKAIEAQIEKLLAEDKAVKLLETIPGCGPVTAWTIRAYTDDIRRFASYKQYSSYAGLVPWVQCSNETEHYGRITKRGPEELRTAFVQLVMGIRRSRSTVSWRLMVQYESMKRQKGTGKSIIATARKMSKIVWYMLMREEEFKTSLMVDTKLDSVIQSMREEALCESA

SEQ ID NO: 480253 - protein, 337 aa, unidentified
MELYSGLDLHSRNTYIGILDTDFKRVFKQRVSNNLNLILETLEPFRDRLKGLVVESTFNWYWLVDGLMDAGYDGVHLANPSAIKQYEGLKHSDDQHDAFFLAQLLILGILPQGYIYPKKDRPVRDLARKRMFLVKHKTAHILSLQSLIARCCGQRISSNEIRTLTAADLRQLLKEEYLLLSAQANLDIIAFLIQQIKTLEKAIKKKVKLDKTFEQLMTVPGIGFILAMTIMLEVGDIERFAKVGNFASYCRCVSSQRLSDGKSKGSGNRKNGNRYLSWAFVEASQLGRRYSLRFGRYYDRKAAQTNTIVATKALSNKLARICYYIMRDQVPFREELF

SEQ ID NO: 480254 - protein, 313 aa, unidentified
MLFIGIDVAKAQLEFACRPSGETGTVPNAEAGIRDLVARCQTLGPALIVLEATGGYEAAVVAALATAGLAVVVANPRQVRDFAKATGQLAKTDALDAQVLACFAERVRPTPRPLPDAAVQALDARLTRRRQLVEMLTAERNRLLIAGPAVRRDLQQHIRFLERRLHDADHDLHRAVKASPLWRVRDDLLQSVPGVGRVVSLTLLAELPELGRLSHKEIAALVGVAPLNRDSGTLRGKRLVYGGRAPVRAALYMAALVASKWNPVIRVFYRRLRAAGKPAKVALTACMRKLLTILNAMARSGTPWQPDRSLART

SEQ ID NO: 480255 - protein, 344 aa, unidentified
MEAIVTIGLEIAKSVFQVHGVDANGAVVVRRRLTRAKVLSFFERLPPCLVGLEACATAHYWGRELRKLGHDVRLMPPSYVKPYVKRQKNDAADAEAICEAVTRPSMHFVEIKSPEQQSIMSLHRVRQMLMRQRTQISNAIRGHLGEFGRVAPIGRNGLAQLIAIVADENDNTLPDDVRAAVAMLAVQLRIVNDQILELDRRVRASARATDVGRRLLEVPGVGPVLASALVATVPDASAFKSGRNLAAWIGLVPRQNSSGGKERLGGITKQGNRYLRQMLVVGALAVIRYAQRHGTRRPWLVHLLARRTTKIAAVALANKTARMIWAIMTTGERYREPSAASAAV

SEQ ID NO: 480256 - protein, 440 aa, unidentified
MKPLYRQIEERVSALPGVRAASYSSFTLHEGSLNTFVKVAGYDTDPNINVKHNIVGNGYFATMQIPVLAGRTFGPQDTATLSGEADSENNHGGSSMTTMNYIGLDVHKKTISYCVKDVSGRIQQEGKIGSTRRELDCWMKTLPQPWTVAMEATIFSGWIYDHLLPHATQIKVAHPLMLRAIAAAKKKNDQIDASKLADCLRCDFLPECHMMPRAIRDRRRTLRYRHLLVRQMVQRKNRVSGLLMETGVEYNKQRLHKVSYFRELLSANGEVDPSLRPLLKLSRETIERCQKTEYALVSSLQRDPVLADRIKRLRTVPGVGPITALTWALEIGDVSRFGSIKKAISYCGLCGEERSSADKAMRMPLSKQRNKHIQRALVEAAKLAPRQNHEMAVIYDQERQKGNSNRATLAVARKMVAYLLAVDRQQRDFVPAEERRTTAA

SEQ ID NO: 480257 - protein, 412 aa, unidentified
MTITCGIDWAEQRHDVAVLDHDGRLLARRRIDVGMGGFTELVGLLTELADNQPAQDVLSVPIAIETDKNLLVVALQAAGFTIYPINPLAVARYRERHGQSGKKSDAGDARVLADILRTDAHRHRTLPAVTEHGSAVKALARQHQEAVRAMQQTANRLRSVLLEFYPQALQAFPNLLHKATQTLLAAAPTPAHGARLTPKRVVALLHRCGRRNDPCLVEHIVNAMRTPALRQPPAVEAALGVATQTLLTVLAAEQAAVETLEQALGEQFADHPLAPILRSAPGLGPILAARVLAEIGDDPGRFTSPAGLRAFAGTAPVTRASGRSHYVKARKIRNKRLGDACHWWAFAMLTKSPGARAHYDRRRAAGDHHNAALRNLANKLLGRLWWCLNNHELWDDNAAWTSTATASQVAAA

SEQ ID NO: 480258 - protein, 334 aa, unidentified
MALELLAIDLGKRSFHLYGIDTDGMILSRKVSRAKLAEVVNHLAPMAIAMEACASAHYWARCWLAVGCEVRLINPRFVKPFVKGSKNDAVDAEAIFEAAMRPTMRFVPVKSTDQQDLQSLHRARDRLICQRTALINHTRGLLAEYGIVLPQGPSRFTARAPAAIAGADLSDLARTIFGELLDQLDDLDRRVKKLDATIAGLCRTNETCRRLAKLPGVGPVVATAIVAAVNDGRQFRSGREMAAWIGLVPRQYTTGGKPRLGGIGRRANHYLRRQLIHGARAVVSRSAKHDDRQSTWLKALVARRGFNRTIVALANKTARIAWVLLSRKEEYAAP

SEQ ID NO: 480259 - protein, 322 aa, unidentified
MPDASLWIGIDVSKRCLDVCVRPSMQQFQETNTEKGIAALVKRVREIEPALVVLEATAGMEAMVAAALAAEHIPVAVVNPRQVRSFARATGKLAKTDSIDASVLAHFAEAVRPQVRPLPDTQAKELSELVGRRRQLVEMIVAEKARLAGICGIALADIKAHIAWLEKRLKRLDGELQSAVTSSPIWQAKSELLKSVPGVGDVLSLTLIAGLPELGTLSGKQIANLVGVAPINRDSGSMRGRKSIWGGRAQVRCVLYMATLVAVRHNPVIKTFYERLREHGKPPKVALTACMRKLLVMLNAIAKAKQPWSFQGDPVVGSANAA

SEQ ID NO: 480260 - protein, 408 aa, unidentified
MKTLQKRCAGLDVHKKEVVACLRLVIRGKATYEVRRFPTTTRGLLELADWLEQAGCTHVAMEATGVYWKPVWHMLEGRFQQILANAAHIKGVPGRKSDMNDATWISDLLAHGLIRASFVPPQPIQELRDLTRTRKQLTREIVQHTQRIQAVLEEANVKLSSVITDILGLSGRRILKAIVAGETDPVRLSELGGTWLAATRSELADALHGRVHSHHCFLIGQHLKTIEQLEETITAFDARIEAALDLFRDAVERLKDVPGLSETSAQILIAEIGMDMKQFPTAGHLLSWAGLVPRLDESAGKRRSTRVRKGAPWLKPVLVQCAHAAARKKNSYFEAQYLRLKARRGPKKAVVAVAASILTTAYHMLADGTCYQDLGADHFARRNPRRVVAKLASRIRSLGYEVVIKAAA

SEQ ID NO: 480261 - protein, 372 aa, unidentified
MAKSIRYVGLDVHAETIAVAMAEGRGEVRSMGAIPNRTESVRKLVKRLEPLSTVRVCYEAGPTGYALYWQLTKLGVKCEVVAPTLVPTKAGDRVKTDRRDAEKLARSYRAGDLTPVWVPDAAHEALRDVVRAREAAIKDERRAKHRLGKFLLRHGLRPAEGVKAWTTKFSEWLESVRFDYRAQNATLLDYRTEVERASDRIARLDKAIDEAVQEAPAQMKVVIDALQALRGVAKVTATTLVSEIGNFSRFTRAKQLMGYGGLVPSEYSSGGSTRRGSITKTGNAHMRRVLVEAAWNYRHRPKLCGKQKRRQDLVSDRVKDISWKAQQRLHARFWQLTAKGKVPGKAVTAVARELVGFIWAVGVQAEREAAAA

SEQ ID NO: 480262 - protein, 317 aa, unidentified
MNNTEIQTPVNIGVDVGKANLDIALHPSGQFYTIQNTEAHIRRFVRILKNYEIERIVVEASGRYEHALVQACDEAGLPIIIVNPISVRRYAQAIGVLAKTDRIDAQVIAQYAATLKPEFKPIPDKTSQKIKDLLVRRSQLLEMSTMEKNRLQILPKSLHRSIKSMLRMLQNQIETVTRQIEQEVAKVDQWRIKMEVMTSVPGVGKVLAYTLLSELPELGSLNRKEIAALVGVAPINRDSGKLNGKRRIRGGRHRVRTVMFMAMLSSIQCNPVFKRFYKRLKAQGKIPKVALIACMRKMIVVLNTMIKNQEPWRAEMA

SEQ ID NO: 480263 - protein, 353 aa, unidentified
MTSTKYIGMDIHKESISIAVRNDAGKIVMECVIETKANIILDFIHGLRGELQVTFEEGTWATWLYDLLKPHVTKLVVCDPRKNARQGNRNDQIDARELADRLYRNKLSSVYHGGAGVRTLKELASSYLTISKDLARVMSRVKAIYRSWGIPCAGKQVYAPRHRAEWLAKITEVGVLRRAQFYYQQLDALRSLRHEVRRDLLAESKKHKATKLLCQIPSIGPIRAALLIALIPTPHRFRTQRPLGKYSGFAIETHSSADYHSAKGQLQKSKKQVSVRGLNRDCNHDLKNLFKSAATIASVKPGPFQEFYAALVAKGMRPERARLTLARKIATIVLIVWKRGVSFDAQYLQPQTA

SEQ ID NO: 480264 - protein, 413 aa, unidentified
MDVVYPCCCGLDVHKASITACVLWAEGGGRARKEKRRFGTFTRDLLELADWLRACGVTHVAMEATGVYWKPVWNILDGQFAEVLLVNAQHIKAVPGRKTDQKDSEWIADLRQHGLLRGSFVPPQSTRELRDLTRYRVSLAQECNRIANRIQKVMEDANLKLASVATDALGASGRAMLRAIIAGEQNATALAEMAKGLLRNKIPALREALAGRVTDHHRFMLRELLDDLDHAEAKMTTVEQAIDRRLRPFEDDVARLCTIPGVDRVTAWGLLSEIGFNMDQFPSAAHLASWAGMCPGNAESAGKRLSGKTRKGSAVLRRHLCQAGWAVSTKKHSYLSALFRRIARHRGPKRATMAVGHAILVIAFHLFKRQTTYVDLGPDYFDRRNADAVRRSLVKRLQNLGHSVTLAPAPVFS

SEQ ID NO: 480265 - protein, 370 aa, unidentified
MGKYSEVFVGIDTAKKKHAVAIADAGRDGETRYLGEIDSAPATVERVIKKLASKYEKVRVCYEAGPTGYGLYRQIITLGHECTVVAPSLIPKKAGDRIKTNRRDAVTLARLFRAGELTSVWVPDAVHEAVRDLVRARDTAAADVRKKRQQLLSFLLRHGRIYSGSKHWTRAHARWLATQAFEHPAQQIVFQDAIDAIEDCVSRLHRLEEQLYAIVPNWSMAPVVDAYQAMRGVSFIVAVTFVAEIGDVRRFENPSQLMAFLGLVPSERSTGDNVRRAGLTLAGNRRARRALVEGAWTYRYQARVSAKLQKRLEDIPKQVRDIAWKAQVRLCGRFRRLAAIGKKRPVIVAAIAREMAAFLWAIGQHVAPAS

SEQ ID NO: 480266 - protein, 344 aa, unidentified
MDHFAGLDVSVKETSVCIVDETGKIVREVKVASEPEALLAVLKNPAYHFKRIGLEAGPLSQWLFSALAEAGLPVICVETRHMRAVLKAQINKTDRNDARGMAQMMRVGLYRPVHVKTLRSQKLRMLLTHRQLLLSKAIALENDLRGTLRNFGLKVGMVGKVKFEARIRELVENLPDLAVLVEPMLIVRRVLREQIVILHRRLLAIVRDDEVCRRLMTTPGVGPVVSLTYRATVDVPARFRQSKSVGAVFGLTCAKYQSGEVDWDGRISRCGDEMMRVMLYEAAQSMMRSKKWSWLKAWAMQVARRRGMKKAIVALARRLAVIMHRIWVDGTEFRWTRDQAAAAA

SEQ ID NO: 480267 - protein, 350 aa, unidentified
MNITTYGVDLAKRVFQVHWVDQSSGEIKRKPLTRGEVRAFFSGRESGLIVMEACGSAHYWGRVLQGLGHEVKLIAAQFVRPFVKTNKTDAADAEAIWTASAQPGMRFVALKSEEQQAVLSLHRVRAQLVKVRTMQANQVRGLLYEFGVAVPKSWRMLLAKASPILADEVRCPVPALLRTELLEQLAGLRALTNRIAELERQIGSWLRREAECRRIAAIPGVGRLSATAVIATVGDARTFRSGREFAAFLGLVPRQSGTGGRVKLLGISKRGDPYLRTLLIHGARSVLIQHSRAGREPDPWLKAVLARRAKNVAIVALANKMARTIWALLAHGRAYDRGWGRSALTTASVI

SEQ ID NO: 480268 - protein, 413 aa, unidentified
MLFIGDDWAEDHHDVELMDTAGRTLARARLPEGVAGIARLHAMIGQQLGEDAQDLEDAAGQVAIGIETDRGPWVQALIAAGYTVFAVNPLQAARYRERLGVSGAKSDAADAHMLADMVRTDAHQLRPVAGDTAEAEAVKVVTRMHKTLIWERTRASQRMRHALREYFPAALAAFEDLDAADTLELLGRAPDPASAARLSITQISAALKRARRRDIAGKAATIQAALRSEQLGQPAVVTAAYAATVRALVAVLGTLNEQVKALQGQVEAHFGQHPDAEIVLSQPGLGTVLGARVLAEFGDDPDRYTSAKARKNYAATSPITRASGKKKVVAARFVHNDRLIDALMTQAFSALQASPGARAYYDRQRARGAEHNAALRQLANRLVGILHGCLKTGTRYDEATAWSHHRKDLELAA

SEQ ID NO: 480269 - protein, 326 aa, unidentified
MEHELHYIGIDTAKEKLDVDVLRPDGRHRTKKFANTTKGHDELVSWLKGHKIDHAHICIEATGTYMEPVAECLYDAGYIVSVINPALGKAFAQSEGLHNKTDTVDARMLAEFCRQKRPAAWEAPHPLERALRALVVRHQALTDMHTQELNRTETAREVQRPSIDAHLLWLEAELKRLEKQIKDLTDDDPDMKHRRKLLESIPGIGEKTSAVLLAYIGLKDRFAHTRQFAAFAGLTPRRYESGSSVRGASRMSKAGHVSLRRALYMPAMVATSKTEWGRAFRDRLAANGKKGKVILGAMMRKLAQVAYGVLKSGVPFDASRHNPVAA

SEQ ID NO: 480270 - protein, 372 aa, unidentified
MNYNTVYVGMDVHKESFSLCAYTIEAEKASHYQRTEADYKKVLNYLEFLRTIYGDDANFICGYEAGCFGYTLYHQLTANNVKCIILAPTTMLEQRSKKRIKTDRRDAEIIAKCLAQHNYSPVHIPTAKDEETKEFLRMRDDHKLALKKVKQQILAFCLRHNYRYDGKSHWTAAHLKWLKALTPEVLYKEILDEYLLTYQTLSDKIERLDKRIEELATQDEYKEAVKKLCCFIGVKTHTALSVLVEVGDFKRFASAQHFASYLGLVPGEDSSGDDQNRLGITKAGNRHVRLLLTEASQCYARGQVGFKSKELKSRQSGNTPAVIAYADKANERLRRRYYKMVLNKYKKHNVAKTAIARELACFMWGMMTDNIA

SEQ ID NO: 480271 - protein, 316 aa, unidentified
MKTQVFVGLDVSKQKLDVAVRPQGRHFVTPNHERGIKQLVKRLTALKPQLIVLEASGGYEFLVIAALAEAQLPVALINPQAVRKFAGATGKLAKTDKIDAQVLAHFAEALRPEPRPLPDQDQQLLKAALQRRLQVVKMIGQEKNRLEKTFIPALKQDIQAHLTWLQQRLEQLDRDLNDQIRQSPLWRDRDRLLQGIIGIGPVVARAIIAQLPEAGALPGKKTVALVGVAPYNRDSGRFRGKRMIRGGRSHLRHMLYMAAVVAARWNPVIRPFYQRLVAAGKPKKLALTACMRKLVLIINAILKNNQPWNQFATQVP

SEQ ID NO: 480272 - protein, 272 aa, unidentified
MTFRPHALHLKAELFVKSSRVHVRDDGFTRCNFHLKFFIMVYRGIDISKSSFVAAYPSTNGNPTKTFPNTTAGMRELIGTLAVAEHHCVMEATSNYGCCCTCYIRTVLPSVLPPPPPKKKQIKHFSRMMMPVTKTDEKDAYMIAMYGEKMNPPIYKMPSQATIRILTTEGFTYFDNAKQLSRFIGICPTYQQSRTSVNIREHINRNDDERLRSLLYIAFWTALRYNSRECYIRLKANEKPFKVALIAVTNKLVRPVLTITTINSIYRWICPG

SEQ ID NO: 480273 - protein, 318 aa, unidentified
MSDSVFVGIDVSSQSLEVASSSLAKTWQVSNDAAGLDSLVSRLLDLKPALTVLEATGGYEFEAACALQAAGWAVAVVNPRTARDFARAMGALAKTDALDARMLAAFARVLHQHPERERFVKPLADAELQRLQALVLRRRQLVQMITAERQRMRISHAAARPSIERVIEFLKAELADSDAEVAAHIQRHHAELAAALASVPGIGAASVAVLLAELPELGKLDRRRVAALVGVAPLNRDSGQMRGQRSIWGGRADVRRTLYMATLTAVRHNAVLKAHYEHLLAAGKRKKVALVACMRKLLTMLNAMAKKSSAWDPTLHLA

SEQ ID NO: 480274 - protein, 338 aa, unidentified
MDKIMTIGLDLAKHVFHVLGCNEHGKIVRKRMLKRSQVLAYFANLPVSLVGMEACASAHYWARELGALGHEVRLIPPQYVKPYVRGNKNDYNDALAIAEAVVRPEMRFVGVKTPAQQDIQALHRLRERCLGDRTALCNQLRGLLAEYGLVFPKGVTTLRRRLPGLLEDGENGLSDLFRQLLAQGYQQLQELDGHIDFYTQELVYQSQQDDTCQRLQTIPGFGPIVASVFHSVVGHGEAYRRGRDVSASIGLVPRQHSSGGKEVLLGISKRGDRYLRSLLIHGARSVVIQAKAKDDRLSRWINRLVSTRGFNKAVVALANKMARIGWVILSKKTTYQAA

SEQ ID NO: 480275 - protein, 312 aa, unidentified
MILPITPVYAGLDVAKATLQLHLQAKSIDLDNTPSGHALLVKRLSAIPGVHVVCEATGGYERAVAAALHAALIPVSVMNPARVRQFARALGTHAKTDPIDAQVLSAFGSALTPDSTPPRTPLELKLTAYGNRRLQLIEIRIAEEQRAEVCIDSILAKTFVAALRSLQNAIARIDLLIKELVAAEAKLAERVRRLEEISGVGLVTAVSVLAQLPELGTLSRGQAAALAGLAPYNRDSGTASGKRCISGGRPEVRRCLYMAALSASRSNRVLKPFYERLIAKGKTGKVALTAVMRKLIILMNHILKNPSFALEK

SEQ ID NO: 480276 - protein, 335 aa, unidentified
MTPSPAPLYDLFVGIDIAAATASVAWKQPSQKVSRALTIDQTPQGFHSLQQRLLATGHPVKRILVVMEATGSYWMTLATTLAQTGFTVSVINPAQAHHFAKALLKQAKTDAIDAQTLAQLAALLQPTVWNPPPAIFVELYQRLTERESLMQMRQQLRNQLHALTHCPSVIASVRTRMELLMESLTKQILEVEAELDEALSLDPLWAASASRLQTITGIGPLTAAWLLVTTLNFTLCHTVEELTAYAGLAAHPFQSGTSVHGRACIGHTGNAALRTAVYLATLSAAQYNPLIKAFYDRLRAAGKNSPLDKQYRILRSMGPISDTAQSVPVIYNILS

SEQ ID NO: 480277 - protein, 353 aa, unidentified
MIHVGLDLHHRNSYVRAVTDKDEWIPGRRVYHDEIETLWQYLGQFGDERKRVVFEATANARWMYRLLAQDPTVEPVAVTPHKVRIIAETIAKTDKIDARVLAFLSQKDALPRAWLPDPDVEELRELTRYRASLVRLRTMAKNRVNGALVRQGLLRPYGDIFGPQGRRWLAEATLPAPMRLQVDHWLELIEEYGDKLRRVESRLYDELGKSRRWAEDIGLLLTMPGVGKLTAVTILAELGDYRRFKGRASVACYAGLVVRSKRSDESVHYGRLTKRGPTALRTILVEVSIQAARRSPRYARLYQKLRAQNRPNAGKAAVARQMLEDAWTLLMKREPFRHTAQDREAMETLTRVG

SEQ ID NO: 480278 - protein, 338 aa, unidentified
MKLYAGLDLHSRNTYIGIMDNAFNRVFKKRVPNHLELILKTLDPFRDQINGFVVESTYNWYWLVDGLMDAGYSSAHLANPAAIKQYEGLKHSDDQHDAFFLAQLLILGILPEGYIYPRKDRPVRDLARKRMFLVQHKTAHILSLQSLIQRCCAMKVTANDMRHLTAKELEAWLKEEYLVLSAQANLDSINFLKQNIKRLEKAIKKNVKLKKAFHHLKTVPGIGDILALTIMLEVGDIKRFPKVGNFTSYCRCVPSQRLSDGKSKGYGNRKNGNRYLSWAFTEAAHLGRRYNEKFRRYYNRKVAQANTSLATKALSNKLARVCYFIIKDQVPFREEQFC

SEQ ID NO: 480279 - protein, 411 aa, unidentified
MTSRQRTTSSSTDPPVRREVVLAVDTHGEVHVAAVVSPLGKILGTESFPATAAGYRQLLVWARKRGTVRRAGVEGTGTFGAGLSRYLLAQQIQVYEVNRPDRSARRLLGKSDPLDAQAAARAVLSGRARAQAKSGDGPVHSARMLKLAKDSAVKARTQAINQLKAVLVIADPALRERLSGLGNAELFRTCATLSPPDGGGDEDAVAQATHMTLRMLAERIEQLSGQINELNQRLTRLVERYAPQLLVPVGIGPDSAATLLITMGDNPERLNTEASFAALCGVGPIEYSSGRRRTRRLNCGGDRQANAALHRIVFTRLRHDPRTQAYYERRTQERKTDARSSDASSDMPPERSSTCQTGFPHPRVLGASVRRERVWGVSETPPNTLQYRFDGPEDAPVLILGPSLGTTWHRL

SEQ ID NO: 480280 - protein, 409 aa, unidentified
MQVVYPRCAGLDVHKKDVYACALVVDENGQKRQQIRKFSTVTVELLKLADWLQSHAVTHVAMEATGVYWRPIWAILEGQFELLLVNPHHVKAMPGRKTDAKDCEWLAALLQHGLVRGSFVPPTEIQDLRDLTRYRIELTQSQNRVANRIQKVLEQANIKLSSVAADTLGVSGQLMIQAIIDGEEDPERLADLAKRKLRQRIPELQVALSGRIRPHHRFMLREHFDEWKTLSERIQRVEQEIDRAIAPFEQAVMRWKTIPGIDRVTACCLVAELGVNMAQYPSAQHLASWAGICPGHNESGGKRMSGKIREGNRWLRRALCQAAWAATRKKNSYLSAQFKRLSSRRGVKRALIAVAHSILIIAYTMMKNAQDYKEVGGDYFERLNHTQLQRHLIRRLQRLGLTVTVQLAT

SEQ ID NO: 480281 - protein, 320 aa, unidentified
MTILTSQTVVGIDIAKAEIVVYRSDLQAIDTIKNDRTALKRWLKTLPTQSALAVEATNIYHLDTVELAHAMGHQVYVVDAYRVSNYRRGIGQRAKNDPCDARLLARYLTNEQHELRLWNPPPKAYTTLKSLLHRRATLVKNHAGLMLSWADEPLLKKALIAQQKAFKEAIQAIQKLLQKVSKESGIEANIGRCKAIEGVGELVATGLATSFMRGDFADSDAFIAFLGMDLRVDDSGKKNGPRYLSKKGDPEIRRLAHIAAMTACRSPRWKPFYESYLVRGFSKTQALVVLARKLCRVAFALMKNQSEYQPKPMLQGCPAT

SEQ ID NO: 480282 - protein, 338 aa, unidentified
MEKMQLYAGLDMHTETITGTIKDDAGNNVRVSKVETSPEGAKELFRRFKRKQIKAVFEASRNWPYYAELLRPYCNEIVMAHPMRVRAIASARIKTDEIDSNTLSELLRLNSIPESYMPSLEIVQLRELLRYRAGLSNLRGRLKAKVKNILSREGKTCEFEDVTGKKARLWLNRVTLNDLNRRELDYIIDLTDNLSKEIKSLDETIDTEQYKYPEVEILKSIIGINTYSAMLIIAEIGDMTRFYSPHKLASYAGLVPSTYQSSTTCYHGRITKKGSKWLRWILTQCTHASIKSRKSHKLKRFYLRIARKKGKQKAIVATARKMLVVIWHLLNKNEYYTY

SEQ ID NO: 480283 - protein, 364 aa, unidentified
MYRLNNTIELSSLEETRDQFNGRTGVIKLGIDVHQDFYVVVMQLGGNNPKPPQRFRKEGFLHWAAKLKSLGREVYAVYEACGFGFGLQRALGALGIECYVVCPQKLDERNRRVKTDSLDAKALCLKLDRFVQGNRDALALVRVPSAEEEQLRAIHRQREQLVKARKRLEAQGRSLMVNHGIEPVQNCWKPRTFAALPVPSWLKELLENSQPILIALQEKIRVLTIRLQSAAGPNPARGLGAMTSVIIDREIGNWERFHNRRQVGSYTGLCPGEHSSGNTRLQSCVTKHGNPRLRAALVELAWRLVRFQPNYKPIRKWNEILRKGALATGATRKKAIVAVARQLAVDLWRIRTGRVSAEQLGLIN

SEQ ID NO: 480284 - protein, 359 aa, unidentified
MEGQERSPGRIVGGVDTHKDLHVAAVVDELDRVLASRCFATTRHGYKQMVAWMGAFGSLQRVGIEATGTYGAGLLRYMQKAGIEVLEVTTPDKHDRRKRGKNDDLDAQNAAHAAFAGKRTVTPKSRNGMIESLRVLKACRRTAVAARRVALQMIQNTIVCAPDELRELLRKMTRMQLIRTLAAWRPDLTDYRNVTSAYRITLKSLGRRYLELHDEIADLDTMIIAIVDELAPNLVARNSIGHESAAQLLLTAGDNVQRLRSEASFAALCGVSPVPASSGKTTRHRLSRGGDRAANSALHIIAIGRLRTDPRTQAYVARRITEGHSKLEAIRCVKRYIAREVFSLIKQRPKESHPASSLV

SEQ ID NO: 480285 - protein, 373 aa, unidentified
MKKVRFLGLDVHAETIAVAVAEPDGEVRSLGIIPNREESVRKLVRKLGPAEQLQACYEAGPTGYVLYWQLTALGVKCEVVAPSLVPVKAGDRVKTDRRDATKLARSYRAGDLTAVWVPNQEHEALRDLVRAREAAKQDQLRARHRLSKFLLRHGRRVPAGIKVWTQRYQDWVKEQVHFEQPAQEYTLLDYLHEVEHMGDRIQRLDQAIAEAVKLAPPRMQEVIQGLQALRGIAQISAVTVVAELGKISRFDRARQLMGYSGAVSSEHSSGKRMQRGQITKTGNAHLRRIAMEAAWAYRHRPAIGPRLRKRQEGLSEEVKEIAWKAQHRLHKRYRTLSAAGKEKQKVITAVGRELLGFIWAIGVQVERNSKRVA

SEQ ID NO: 480286 - protein, 447 aa, unidentified
MLFVMKPLPVLDPQAAAIDVGSESLHVSVAGDTPKVFGTFTVELEALREWFKGQGVRTVAMEATGVYWLYLYEVLEAAGLEVVVVNGRHVQNVPGRKTDMSDCQWLATLHAHGLLRGGFVPPADIRRLQDYQRLRADHIIGAAGQVQKIQQALERMNVKFHDVISDLTGVSGLKVVRAILRGEREPVRLLALCDGQIQRKKSAAVKESLRGCWKDEQLFALRQALELWETFQQKIADCDRELERLLHQLAGPPPSQGGPGGGELRLAPVKDAGKNAPAIERCQQLLARICGGRDATQIPGLSVYLVLQLISEVGTDMTRWPTEKHFTSWLGLAGGRKQSGKRKGSIKAHRNRAGRMFCAAARALARSMDKALGGFYRRLRGRIGGLAANVALARKLAQLFYRLLRYGMEYVEKGLKAYEVKVWETEARLLRKLAKNQGFILMPATPK

SEQ ID NO: 480287 - protein, 347 aa, unidentified
MRFYTRQHKFYCGVDLHARSMYVCVLDQEGNVLVSRNIASAPEPFLELVAPYREDVAVAAECMFTWYWLADLCAREGLVFVLGHALYMRAIHGGKAKNDRIDAHKIAALLRGGMLPQAYVYPQAMRATRDLMRRRNYLMRQRAELLAHITNINHQYNLPALGVRPARPAERAGLAEHFAEVPVRKSVEVDLSVIEHYDRELPALERYLESNAQAHDPVALAIVRSIHGMGKVLGLSILYEIHDIARFSRGQQFLSYGRLVKPTKESGGKILGHSGRKIGNAHLKWAFSEAAVCFLRANKPAQALRARLMAKHGKGKSLAIIAAKLARAVYFMLKRGEPFDAERFFSH

SEQ ID NO: 480288 - protein, 320 aa, unidentified
MAQRSFCGIDVAKDRLDVMVLPEELCWSVANDAAGWAELVAKLRGLRIAASGIEASGGYERGVVRALLAAGMSVRQINPFKLRQFAKACGVLAKNDRLDARMIALFVATLPTRSAQRYAPVERLAELVTARRQLSDDKVAAENASRLFEDAALRRLYGGRIARLAADIALLDKRLAEILAGDAMLARRYALLVSMPGVGPVLAVTLLALLPELGQMNRKQVAALVGVAPYDFDSGRLKGMRCIWGGRAPVRRVLYMAALIGCRCNPQLRAFHDRLAAAGKKAKVVLVAVMRKIITILNAMLRDNVPWVDHSIGQHILPAA

SEQ ID NO: 480289 - protein, 370 aa, unidentified
MEHQHRQSDVKIKHYVAMDLHSDNVCVVIEDQDRRCVLKRKFPTRIKIILANLKPYSKSIEAIVVEATATWYWIVDGLKPVGYNVHLAHPAAIEDRSGKKRTNDFDDCFNLIRLLRNGDLRESYIYPKEERPIRDLMRKRSFFVKSRTQHMLNFMNMVSRNKGFKLSGNQIKQLTEKNLEDLFDHHFLLLSAEASISTLNHFTQQIGVLEKAILKVGRLKPEFNRVMAFPGIGKTIGLTIAYELGTLSRFAGKGDYLSYCRCVDSKRLSNGKKKGENNRKNGNKYLSWAYVEAANFAKRYCPYARAYFNHKLKESGIYTVAIKALASKIASATYYMMTREANYDPEKVFGNYKAQAQAFIKKSKSRDSKP

SEQ ID NO: 480290 - protein, 418 aa, unidentified
MKKHNNSRKKSEPTSKRAKTRGPMRRDTKEVLAELVGKLKEKLDPKKVSATSTGEEHPRGELRPNLDRLTVGVDLGDQWSHYCILGLEGETLAEGQLRTTQEDIAEFFQALNAARVVFEVGTHSPWVQEVICGCGHEVLVANPRLMEGSKRRKRKNDRIDANKLARLGRVDPQSLHPMQHRSREVRQDLVVLRARDALVAARTELINATRGLVKSMGTRLPKCSSPSFAQKVEEAVPVEIREALLPLVRMAAALSDCIQGYDQKIEKLGREKYGHTALLRQVKGVGPITALAYVLTLENPGRFAKSRDVGPYLGLVPKQEDSGESQPQLGISKTGDTMVRKLLVGSAQYILGPFGPDTDLRRYGLRLCERGGKNAKKRAAVAVARKLAVLLHCLWVSGEVYEPLRQGMSPTIASAVAA

SEQ ID NO: 480291 - protein, 403 aa, unidentified
MHKSFLVATIIKTPTDSLQPSYQKKRFSTFNSELNRFADWLHENSCLDVCMESTGKYRVPVFNILEKRGILVCIANPKWVKAVKGNKDDTKDSKWIGDLFRIGLVKSSFIPAKDIRILRELTRYRYKLTSMKSSEKNRFQNAFTVCNVALDSVVSDMFGKSAAAITDYLTSDENFDARHCVSLLQRSLKKKADDVIVAIEGYESTPEQKTRISIILDHLRYIDDLISRVDACIDVMVQKYEGYIALLCTIPGIDRSSAITIISEIGTDMAQFGSSKRLCCWAGLTPGNNESAGKKKSVRISRAGVYLKPALVQVAHAAAKDKSSSYYALKYERISKRRGKKRAIIAVARMILTAIYSVLSTGEVWNPVDLYKVDMPEHLKEKQLQKAINQAIRFLETQGLNVA

SEQ ID NO: 480292 - protein, 345 aa, unidentified
MDHFAGLDVSVKETSVCIVDETGKIVREVKVASEPDALLPVLMNPAYHFKRIGLEAGPLSQWLFSALAEADLPVVCVETRHMQAVLKAQINKTDRNDARGIAQMMRVGLYRPVHVKTLRSQKLRMLLTHRKLLQSKAIAIENDLRATLRNFGLKVGVVGKVRFEERIKELVENLPDLAALVEPLLVVRRVLREQIVILHRRLLAIVREDEVCRRLMTTPGVGPVVALTYRATVDVPARFRKSKAVGAVFGLTCSKYQSGEIDRRGRISRCGDEMMRAMLYEAAQSMLRSKKWSWLKAWAMQIARRRGMKKAIVALARRLAVIMHRIWVDGTEFRWTREQAAAAAA

SEQ ID NO: 480293 - protein, 409 aa, unidentified
MRLFVGLDVSSFDIKVCILNGEGKKLDSFSVNNDLPGATAIKERLLQRIANQEVKTFKIGLESTSVYSFHPSMFLHYDEDLQRFGAKVFLMNPKQIANFKKSYSDMDKTDEIDAFVIADYLRFGRNQMSIVKESQYVALQQLTRSRYQLVRMLTKEKQHFLQHLSYKCNTFSQEVDSSIFGNAMMELFLEKFSLEELADMSLDELAEFLQMKGKNRFGDPKCVASTIQKAVRSSYRLDKVVEDSIDVLLGTSIAVIRTYQQQIKEIEKSIKRIMAGLTQTLESIPGIGPVFAAGIIAEIGQIERFDDETKIAKYAGLYWRTHQSGRFTAENTSLSRNGNHYLRYYLVEAANSVRKHVSDYQEYYVKKYNEVPKHQHKRALVLTARKLVRLVDALLRSHQLFTPERGVKV

SEQ ID NO: 480294 - protein, 411 aa, unidentified
MIKENFIYVGIDLHKETHTAVMIDCYNQKLGEITFPNRPADFPKLVTKVKKCNTDAKEVVYGLENAYGYGRPLAVWLIDKGYFVKDVNTAISHRQAKHRGAMYRKSDSDDAEAIALATLNMLDKLPDACPNDAYWSLGQLVHRRDNIMKQRTRLVNQLHEQLCIAYPSYKQFFNDISRPTALYFWEHYPSRKYLKGKSVEDLRTELVPVSHNRCSTKNCEKILDAVASDKVKNNAYQDARDMVTLSIVSDLQHYDSQLAEVDKMLEQMYKMLGCTLTTIPGVNVITAVKILAEIGDIKRFSNANKLAQFAGIAPLHLSSSGKGKDVATKQGNRRLQATIYFLAIQMVQVSSKGTPRNSVVRAYYEKRKAEGKTSQQALICISRRLISIIYGMLKHGTEYRMPVVESAGENR

SEQ ID NO: 480295 - protein, 354 aa, unidentified
MVVVIGADVHKQTHTLVAVDEVGKAVGQGTFQARRSGHLKALAWARRTFEGAEVVWAIEDCRHLSGALERDLLSSGQSVVRVTPALMGAARRTGRQRGKSDPIDALAVARAALAHPDLPVARHDETSRALKLLVDRREDLVRQRTSAINRLRWHMHELDPDLSPPAGSLDRVVVQDRVRSALESFPAQSLLVEIALEVLADIIHDSSRIRDLEKRIAALAEQAAPDLLELPGCGPLTAAKIVGETAGADRFRTEACFAMFTGTAPVPVWSGNTTGRVRLNRGGNRQMNAALHRIAITQVRLGGPAKTFIDTQRNHGKTKTEAYRCLRRHLARTVFTILNQPRHAAPDACIPTAA

SEQ ID NO: 480296 - protein, 414 aa, unidentified
MSTCSNIYKVHPQHLREILAAYRLDELLYVPIDGATYHHLACVVNFFGDVLIPPFEIPATLHGIEFLLKKVTHAVTTTGAKKVFLGLEATGHYHEHLVLRLRALGSEVAVLNPLDTWREKENPHAKTDRVDLSAIARGLISQKGSRWIVADGIYQHLKQASRTRRKYVWMQTQTKHRITALVDRLFPGLWPAAAPIFTDPWGKASRLLVTHYPMPQQVLRLGEKRLAAFFHKHNTKLGLETAQRILQAAQNAPTRPEEDLQVDLVALDCHLQTLTLVEEHRTRLEAQMARYLLATPGVYLLSVPGISMISAADFTAEVGGIQHFADAKQLIALAGTCSKTEQTGESDLTGLPISKQGRNLLRAILNQIALSLNAHCPDYTTYYHRKHQEKQDRPKIAAIATGNKFAHLAFALMK

SEQ ID NO: 480297 - protein, 341 aa, unidentified
MEDRFATTPDGIRRWARRLKRRCEGRILCCYEAGPLGYALQRTLVSLGLECIVIAPSLIPSKPGDRIKTDRRDALKLAELLAAGLLTEVHVPTPEQEAVRDLCRARESVKGDQKRIQHRLSKFLLRRGIRWVQGRKMWTRAHREWLHGRRLEHVADQDILDDHLLALEQNEGRLTALDEKLAHWSTEEPYTEPVAWLRCFRGIDTLTALSVVAEIHDWRRFPSPRALMAYLGMVPSESSSGGKTQRGGLTKAGNRRVRRLLIEAAWHYRHRPSVGYRLAKRRVGQPAEIIAIADRAQQRLHSRYVRMSARGKRHSLVIAAVGRELVGFLWAAMQRTAIPSA

SEQ ID NO: 480298 - protein, 335 aa, unidentified
MNVIYLGIDLAKNVFQLCGLNQAGKPVYKKRPDRKTLLQTVANIPACLIGVGASTGAFYWQREFEKLGHKVKVISPQYVKPFARGQKNDGNDAQAIAIALMQPTMQFVPPKSPEQQDIQALHRARQRIVNHRTATVCQIRGLLLDRGITIGTAVSRVRHAIPLILEDTENGLSTRMRRTIAELYDLFNDLGRRINFFDKEIDTVFRQSEACQRIAKVKGIGLKTATAVVAAIGKGTEFKNGRHFAAWLGVHSSGDRQVLMNITKKGDKHLRPLFIHGARAVVRVAANNNEGYLNQWVNQLKERQGFNKTTVAVANKNARIIWSILHNETEYRPAV

SEQ ID NO: 480299 - protein, 328 aa, unidentified
MTAPLVFDNIFIGIDVGGASFEAAWHRGGFARHENRPDAIAAFVSHLRTQRGIVRIAIEPTGGYERPLVKALRRAGLPVEIVHTSRFKAYRALVGANAKSDSSDARLLAAYAASPDEVRGRKYPRIALAEDADREELAALAARRDQLKRMIHAETCRLATTHSEMVRQAIMAMRDVLNQQEREIHAAMVKIVRRRDDLNDAKRLLQTITGIGDKTALVCLGLLPELGHIHNKCAAALVGVAPFLYQSGTVKAPARIYGGRSPVRDTFYMAALAASQHNPVLKPFYDRLVAEGKPKKVALVAVMRRLVVFANAVLRSNKPWNGAKALDT

SEQ ID NO: 480300 - protein, 351 aa, unidentified
MIIIGVDYHPSFQTIAFLMEETGEYGEQELNHSDGEAERFYRELKERGVSVRVGMEATGHARWFERLLAELGFELWIGDPAEIKAKRVRKKKTDREDARLMLKLLQENRFPRIWVPSPENRDLRQLLWHRHRLVQMRTRIMNQLQAVAMNEGYRWKKKLFGEKGRALLEKLSLALWASRRRKELLELLDQLDPKIAELTAAVEQEAKKRPEVVQLMTHPGVGPITGLAYVLVIGTPGRFPCGKQIGSYTGLIPCEDSSAGKQRLGHISKQGNTLLRFLLVEASQAAARCNPDWRRRYAHLMMRREKRIAKVAMARKLAVRLYWMWRNNWQYSQLVEFGSNAGKLGTVHGVK

SEQ ID NO: 480301 - protein, 350 aa, unidentified
MKTTHPVIIGIDTHKASHVAVAIDTQGTRLATLSIPTNPKGYLELERWSQSLGKVQAFGIEGTGSYGAGLSRSLLAHGHNVIEVTRPNRQLRYTQGKTDSLDAEGAARSVLSGQATARPKTQTGSSEMIRHLKIARDTAVKSRSQAMVTLKTLIINAPADLRDALNHIRGKIALIRHIAAFRPGGIDTPLASAKAAMRALARRWLWLHEEIIAHDKELERLVTERAPELMASHGIATLTVAQMLILVGDDPTRIRSEAAFAKLCGVCPIPASSGKTHRFRLNRGGNRQANAALYRVAIVRMRSHEPTLAYVKKRTKDGKSKSEIIRCLKRYIVREIYSQLCVPKSSQIKA

SEQ ID NO: 480302 - protein, 312 aa, unidentified
MNTEIFVGVDISKEHLDVAFGPDQAPQRFPYTPEGVNRLLAHLQALSPTLIVLEATGGLEADLMDALSRAGLPFSRVNPRRVRDFARASGVFAKTDGLDARILAEFGQKMRPPVTVLPDEHTRHLEILVARRRQLVEMRAIEEHHWRTAPETARPYIRKHLEWLDAEIATLEREIADWVNQTPLAETVEILDSAPGVALVGAATLVAEVPEIGRLNRKKIAALVGVAPYNRDSGTQRRQRRVTGGRQAAREVLYMLTIAGIRCNPVLRTFYQRLRAAGKPPKVAIVACMRKLLTILNAMVRDRRKWCLELAG

SEQ ID NO: 480303 - protein, 368 aa, unidentified
MNEYKLKAAPTAVSKEGNSQKEAKANRIAIGVDAHLKSYQAARKIDNGAVGVAQTFRSKEALLLYVEKQREQAKEVVVVYEVGPLGYTLYRQLKAMGLECLVCAPRSGEQKRKRRKNNAIDARSLTSELANYLNGNEQALQLVRVPTEAQEQARVESRQHDALVEQRKRIGAMGNSLLLSQGYGSWSNWWRPKAFERLSQGVAPWIEKHLRRWVGVLRELDQQIQQAKAELTKQYQGARPKGMGAPSLAQLNAEVLDWNLYSSGRKIGCLAGMVPSEWSTGEGQRLGSITKVGLPAIRRIITEMVWRMILFQPEYKAVQKWREVLEGSNRGLKKKAVVAIGRQLMVDIWRLQTRRITAQELGLIMIEG

SEQ ID NO: 480304 - protein, 307 aa, unidentified
MELLLNAVAGVDIHKKQITITALVKDPETGKTQKETWESNTFTKDLIKCGKKLLEMGIKDVAMESTGVYWKPVHNVWSEQGINITLGNATHIKNVPGRKTDTKDSEWIARLHMSGLIRPSYIPNKNFQELRLLTRHRRNLVDDMTRIKNRIQKILEDGNVKLSSVISDVFGVAGLKIIESLAGGETIPSVLASCATTNIKCNQEELEDALTHTFNGNQFYLLQSLIIQLKSTQQLYDQLDEKINQEMTPYSNIIDQLSTIPGIKEKLAEDIIAEATTDMSNFKNEKMFAAWAGVAPGSNESAGKKKE

SEQ ID NO: 480305 - protein, 416 aa, unidentified
MTFKVVRFICGGMDVHKNLIVATIGTTDRQTLITEYIQQSFSTFYSDLIRLKEWFISHDCYDVCMESTGKYWIPIYNVLETELNICLTHPKYVKAIKGKKTDKRDSKWICDLYKCDLVKHSFIPKKEIREMREIARYRCKLVYMRSSERNRYQNCLTVSNISLASVVSDPFGKTATNIMKELMQSEVIEDDKILKLIHKNCKDKDKILDSLQGYRIESEQRFKMDTVMNHIEYLDKQIQACEAELIKRAYPLRDYFQHITHIKGISALSAILIVSEIGTDMNQFESDKQLVNWAGLSPANNESANKKKSVRISKAGQYLKPLLVQCALSSIKDKNSYFGIKYCRIKKRRGHKKAIIAIARMMLVCIYHMILTGEEFNPCDYESLTNPKPKKEPIMTVESALQFLKDSNFDFSSIQL

SEQ ID NO: 480306 - protein, 333 aa, unidentified
MLPPNCGTATPYILRNAVGLDISKLTFDASAMVGNAEYSAKFDNDSKGLNQFSDRLKSLGCQNLHICMEATGNYYEEVADYFAQYYSVYVVNPLKISKYAESRFKRTKTDKQDAKLIAQYCRSAQESELVKRQKPTDEQYRLSRMTAAYAQIKSECAAMKNRYHAAKDEEAAKAYAEIIKAMNEQLEVLKEKIKEQTEKPKCKEGVKCLETIPGIGRMTAAVLFHHLTSSKFETSNKFAAFAGLSPQQKESGTSVRGKGKLTKFGNRKLRAVLFMPAMVAYRIRAFPDFIKRLEEKKKPKKVIIAALMRKLAVIAYHVHKKGGDYDPSRYKSA

SEQ ID NO: 480307 - protein, 424 aa, unidentified
MAGPSTGFTCENGKVARVTATDVVWVGIDAGKASHHAAAVGAAGKRLWSVKVANGQQPVEELIGRAAKSAGDGEVRWAVDLVSPAAALLLAILLSSGQKVVYVPGRVVHGMAQVFRGEGKTDAKDARIIAGTARMRRDLTELTPADELVVELTRLTSCRAGLMADWVRGINRLRDLLTSIFPALEASFDYSTRSALILLTGYCTPGAIRQAGPGAVAAYLREHGAWAKGIVAMAAKAVRAAGTQTVALPGEATTALLVKKLARQLLDLDREIKDTDKLLTSRFRDHPQARIIESLPGMGPILGAQFLVATDGRALEAFANPGRLASYAGLVPVPKDSGRVTGNNHRAKRYHRPLRNVFYMMALSSLRAEGPSKVFYQRKRDENKIHTQALLALARRLADVLWALLRDNRTYSPIPPSQVTAIAA

SEQ ID NO: 480308 - protein, 339 aa, unidentified
MKEVTTIGLDLAKNVFQVHAVDRTGAVVVRRALRRSQVLAWFAKLPPCLVGMEACATAHYWGRELRKLGHEVRLIPPAYAKAYVRRNKNDAVDAAAICEAVGRPAMRFVTIKTEQQQAMAGIHRVRDLLIKQRTMLRNQLRGMMAEFGVVAAQGRRGLNELLAILSDPEDRCIPSPLREGLMTIMETWRGLERKLEEIDRQMVAAGRADATCRHLVTAPGYGPILSSAMAALVIDPGAFKRGCDFAASLGLVPRQDGTGGKVRLGPISKRGNGYLRRLLVNGATSLIKCQRARQDPWVAKLLASKPRKVVAVALANKLARIGWALMTRQEDFRSRLAAA

SEQ ID NO: 480309 - protein, 316 aa, unidentified
MQDQVVFVGVDAAKAELVSNVYGSECCVVLPNQAAAIEAWLQALPKGVRVAVESTGNCHAPLVHEAIRLGVPVYVLNPKDVYFYAKALGTRGKTDRVDARVIARYLAEHHGRLRAYQPAAPEQAEIERLLRQRWAVVNKRTALREALCGSTVIETQIAQLDDSFESLLQAIDQRIDQLIDADKALKAGRQRLQTITGVGSQSSALLTSLLARLQFASADAFVAFSGLDPRPHDSGRSRGTRRLSKRGSPYLRRQMFMAAMSASHSKVFKPLYEQLRARGLKTTEALVVLARKLLRIAYAVWRQDVPFDPTRFTVPA

SEQ ID NO: 480310 - protein, 344 aa, unidentified
MKQHVGLDVSLNETAISVREDGIRTWRGKCSSDPGVVAEVIRRHAPQAERVVFESGPLATWFYHTLTSAGIPAICIEARHAHKILSETLNKTDANDADGLAQLAEAGFYKEVRVKAFSSMLARTLIAIRSQIVGISIQLSNQIRGVMKTFGLIVPKGKGRAFEANVRALLDGRDDLARIILPLLGAWRDMRNHVAEFDRQLLAAARKSRDALLLMTIPGIGPVTALSFAAAVEDPSNFRRSRSVGAWLGLTTRRYQSGEVDYNGHISRRGDRHLRSLLYEAATVMLTRNKLRNDSALRTWGLALRERIGLKRAAVAVARKLAVVMHSMLKAGEAFRPTGCNTAT

SEQ ID NO: 480311 - protein, 346 aa, unidentified
MKTTTIGIDLAKIVFQIHGVDERGKVSVRKQLKRAEMSSYFANLEPCLIGMEACGSAHYWARKLEGYGHTVKLMAPQFVKPYVKTNKNDMADAEAICEAVARPNMRFVAIKTVEQQAILSVHRARQGFVKARTAQGNQIRGLLAEFGIVIPQGIRSITKQMPEILEDGENGLPGAMRNLLERLTENLKEMDRQVKELEEKIQLWHRENTASRKLAEIPGLGPITASAIVATVGDAREFKNGRQLAAWMGLVPKQHSSGGKQTLLGISKRGDTYLRTLMIHGARAVIRFAENKAEPNVWLGKLMARRNKNIAAVALANKNARIVWALLANDRMFRPDYTPAAVVAGM

SEQ ID NO: 480312 - protein, 307 aa, unidentified
MVLGIDISKEWIDAHLLPQETSWRVLNNAKELKSWVKQLPHGITLAVMEATGGLETQPAIALAQATIPTAIVNPMRIRSFAVAMGQKAKSDPIDARLIADFGVRVAPKAKTLPDEEQASLREMIVRRRQLVDNRVAEMNRLGSMRSKQVQRSIKAHILWLSKQIDKIEQQLEDTIKNSPLWLNNEQLLITVPGIGSVTARSTLTHFPELGKLSGKEIGSLGGLAPFTRDSGKWKGKRFIGGGRKDARSALYMATLTATRCNPEISKFYLHLTGQGKPHKVAITACMRKMLTIMNAIVRDQKPWRKCA

SEQ ID NO: 480313 - protein, 352 aa, unidentified
MQHFIGCDVHTRNQVVAWIEEETGEIKKRRLEHASQEVKEFYAQFPRGTVVGIEATFPAYWFERLMGELGHELWVGDAARIRASEVRSQKTDSRDAELLLDLLRTQRFPRIWAPSLEERDLRQLRVHRMKQVRARTQVKNPLHALAIGQGVCRKGKLWSAQGRKELESLALLPWAARRRKELLEGLDRLDGQVRELDRAVEEAGREREEVALLRTHPGVGMVGGLAFVLTGGPVERFPNSRKRVSYWGLNRRENSSGGRQRLGAISKQGNTMMRWLLVEAAPTAARLDPQLRRIYQRLKKQKTSGVAKVAVARRLAVRLFWMLRTRHNYAQLVHMSGSPSSAVVPPPAEPNL

SEQ ID NO: 480314 - protein, 341 aa, unidentified
MNIITVGIDLAKNVFAVHGVNDSGKAALVKPKVQRADLLPLIAQLPPCLIGMEACSGAHHWARLFRQYGHTVKLMAPKFVAPYRMTGKRGKNDAADAAAICEAVTRPSMLFVPVKEEHQQIILCLHRTRQGFVEERTASYNRLRGLIAEFGIVLPQKVVCLRREIGAHLEDLPGYANLCVGDLLAHADELDKKIDEYDRAIAKAAREDARSKRLMKLPGIGPVTASALLASMGCGHDFDNGRQVAAWIGLVPGQYSSGGKARLGRITKAGDGYLRSLLVMGARAVLNSLGDKQDRFSRWARSLEERRGYWRAAIAIAAKNARLAWAVLKYGEDFKLELGKE

SEQ ID NO: 480315 - protein, 366 aa, unidentified
MKKLTTRGICRNGKLQDQQLTIGLDLGDRSSFYCVLNGAGEVIVEQKVLTNPEALKKSFGKMPRSRIALETGTHSPWVSRLLSDLGHEVIVAHARNVRLIGESRRKDDRLDAQTLARLARIDPQLLSPIQHRSAQAQADLSVIRARHALVRARTALVCAARGLTKSFGERIRGYSAKGFKQATGEALSPQLQVALAPLLSALETINERIREYNVQIEQLAEESYPEVALLKQIKGVGTLIALTYILTLEDPKRFRKSRDAGCYVGLQPGRRNSGQSEPQLHITKEGDSYLRMVLVQGAHHILGPFGEDSDLRRWGLKLAGRGGKNAKKRAIIAVARKLAVLLHHLWISGEEYEPLHNTQTRTLAAA

SEQ ID NO: 480316 - protein, 418 aa, unidentified
MKSIKTKKVTKINDKTVIATLDIGKNIQYGYFRAPNGNDVKPFAFYNSKKSYNEFWQKLCQFKDNERLEQIVIGFESTGPYAEPLFHFLRKKPVTLVQVNPVHTKRVKELTGNSPNKTDNKDPRVIADVISLGHALTLVVPEGPAAELRRLTQARERAITDRTAIINQLQHLIFVIFPEFLKVLKIATKTARYFIKHFTTPEKIFTLGLDSVGQIVKKVSRGKLGLDRAKQLHEAAGNSIGISEGKQSIVFEIEHLMGRIEAEDQFIDRLEKQMRVYLQQIPYSQNILSIKGLGEVTVAGLIGEVADFNKFDTISEVMKLAGLDLYEISSGNHRGQRRISKRGRPLMRKLLFFAAINAVKSKGIMHQKYHQMLDRGQLKMKALVAISRKLLGLIFAIVRDNTKYVENYSDNYHYKLAA

SEQ ID NO: 480317 - protein, 383 aa, unidentified
MRNSAYAAGREELVLAVSLELATASWKIACHDGRRDKPAVHTLTDPQAGARLQAALDLIERQKHQWSLRAGVRTVVCYEAGQDAFWICRALQAHGIECYVIDAASIPVVRHRRRAKTDRLDAIKLVLNLRAWLHGERDRMHVVHVPSVQDEALRHLTRDRAELQKEVLQHRNRIGKLLRTLGCWDDLKHGFASRLARGEVRCYDGSPLSREMHDRLLRECERVALARQQLAALEKARHQALPATVRERIDHLTRLKGVGQIGASRLVLELFWRQFDNRRQVGSCTGLVPQPYDSGDSHTDQGISKQGNRRVRSLLVEMAWYWLRYQPGSPLAQWFRHRTEGTGANRRARRIAIVAVARRLVILLWRYLEHGVIPQGVQMKPST

SEQ ID NO: 480318 - protein, 327 aa, unidentified
MPKYVGLDVHKRTCQATVMDEHGAIIEQKNFRNRLEDVERFFDDVEDAKVAMEAGYCWQPVYEFLESRGFEVKLAHPFKTRIIAEAKIKTDASDSEALAQLLKLDWLPTSYVPPDEIRELRDLVRLHVYLVRERTRFKNKIRAEMSKRGIEIVGDPFTKRRRSQLKEAGVKAIDDYLTIVASLDERIKELEQKLKMQAQESEDAKLLMTIPGVGYFSALAISAEIGDIKRFPSAEKLCSYVGLVPSLRQSGAAVRLGRITKQGSALLRWVLVECAWMHFRYAENSRLTKFFWRIAKRKGKAVAVTATARKLLVAIYWMLTRREEFRA

SEQ ID NO: 480319 - protein, 345 aa, unidentified
MKKLFIGIDFSKEKIDATIILASGLEVLSARVHESFVTTVSGYNKFVKWVRKNSCDMEESAWLFCGENTGDYSKPLCNYLYGRGYDVWLENAKCIKDASGLRRLKSDKADSAMIAEYAMRNYDRAELYIPLNESLSQLRELFLFRQMLVRQKHGFQVRRGEKNRAMEKSSVKTAISQIGRHMVNECNKQIEKVERRIKDIIDGDEELKRTYELITTIPGIGTQNAVCLLTFTNNFTRFGYNARKIACYYGIAPFGRDSGTSVHSDPHVHYMANRMLKSMLTQAALASIRCCAPIAHYYHRLIALGKKKQVALNNVKNKLIHIITAMVKNNLSFNPGYTNINKFIA

SEQ ID NO: 480320 - protein, 304 aa, unidentified
MFGIGIDVSKATLDVAVHGEQFRQFSNDKRGFVRLIRWLKTWPIKQVVLEASGGYERAALDVLHAAGLPMVRINPARARRFAQGTGRAAKTDRLDATVLAQMAHLLPLTRYVPPAPWQQRLAEFAQCRRQLVQMRVSEIQRLRRLVDPDLIAMKQRHIAQLSDDLKQLDKAIAEQLEGQPGWKNIGALKGVGPILISTLACELPELGSLGSKAIASLVGLAPMNRESGTWQGQRRISGGRAVVREALYMAALTAIRYEPRLRAFYAGLKAKGKASKVALVAVMRKMLVILNARKRDAEVALGCP

SEQ ID NO: 480321 - protein, 375 aa, unidentified
MQEKVRFWGLDVHAETIAVAIAEPDGEVRSLGTIANRAESIRKLVKKLGPVDQLKACYEAGPTGYVLYWQLVKLVVECEVIAPTLAPIKAGDRVKTDRRDAERLARSYRSGDLTAVWVPNEGSEALRDLVRAREAAKQDQFRARHRLSEFLLRSGQRPAMGVKAWTQPYMAWVRQLRFTQIAQEFTRLDYLHEVEHMGERIKRLEQAIAEAVKLASPELREVIKGLQALRGVAQISAVTIAAELGNMSRFEGARQLMGYSGAVPSEDSSGQRTRRGSITKTGNAHLRRIAIEAAWSYRLRPGVGPALRKRQEGLPDEIKEIAWKAQHRLHRRYLSLVAAGKDQRKIITAVGRELLGFIWAIGVRAEAAVRQPIAA

SEQ ID NO: 480322 - protein, 331 aa, unidentified
MNIIEVIGIDVGKLENEARIHTNQKTYSFENNPAGFKKLENWMLKNINCPKQQLLIAFEHTGLYSHLLSVFLTENQYSYIVIPGLELKRSMGITRGKDDKIDAKRIAQYAYEKRDDLVPYQLPSEEIIQIKRLLSMREKLVKQRAGYMGTLKEYKHFLKRKDNEMLFDVHEKMIAQLSKHIARIENQLDDVIKGDDQIKKMYELITGIKGIGPQTALFIIAFTNGFTQFKNWRKFASYCGIAPFPNRSGISVRGRTKVSNLANKKIKSLLDLCAKTSIQYNMEMKIYYEKRVSEGKSKMSTINIIRNKLLSRVFAVVERETPYVNTVRYFK

SEQ ID NO: 480323 - protein, 353 aa, unidentified
MSNDKYVAMDVHKASVVIGVRDSEGKMIGRAVVETKAQTLRDYVRGLSGTVHLTLEEGTQAAWLYDLLKPLVAECIVCDPRRNKLLESGNKSDDVDVEKLSELLYLGRLRAVYHGGQGTRALKELAQNYEALVKDKTRVKNRLKAIFRGRGISYEGSELYDYEQRAQWLGQLSERGVRERASQLYEQLVQLEEWVAKARLQMLRESRKQKARKILEQIPTLGEISVAQLIATVDTPFRFRSKRQFWTYSGLAVVRHTSADYQFAQGELRRRTKPGPTRGLNRNYNRRLKRLFKSAALAGSSKGPFKPYYERLLARGLKPELAQVTLARKIAAVTLTLWKKGASFDQEKLVKPE

SEQ ID NO: 480324 - protein, 370 aa, unidentified
MDDASTFVGLDVHKATIAVSVLYPGHREPVRWEIPNEAAALRRLARQLRREGGGQVRCCYEAGVCGFAVQRRLQADGVECVVVAPSLIPIKPGERIKTDRRDADKLTQLLRAGLLTEVQPPTTQEEAVRDLCRARETAQEDLTRCRHRLTKMLLRKGVTYTAGRAWTNKHRFWLNQVRLEHEPERVAFDDARLAVAQLEERVRNLEAALDAVAQQEPYRQAVAWLCCLRGVKTLTAMTLLSELHGFRRFKTARQLMGYLGLVPTVRASGESAHRGRITRTGNAHVRRILVETAWHYQKPPGLYLDLRRRRQGQPAWVIATADKAQQRLHRRFWALVRHGKPPGKAVVAVARELIGFIWALLYRDVNVRMA

SEQ ID NO: 480325 - protein, 316 aa, unidentified
MSHAAMPVSRFIGCDVGKTTIVIFDAASRRTHAIANEPQALARFASGLEPTCFVVCEATGGYEGALLAALVAAGVPVHRADARKVKAFIRSFGTIGKTDAIDAKALARYGEDRSPELARWQARDCHRLRLQALVLARRDMVRDRLAYANRRVAPGAEPIHAYLDAILASFDAQIKAVEADIKTLIDQCEPIARAVRTLVAIQGLGDKTAAALVALMPELGSLGRRQAAALAGLAPHPRQSGDLDAYRRTRGGRPEIKRVLFMAALSARKHNPLLKAFYERLLDNGKKPLVAITAIMRKLVLIANAKLKTDIAQQLS

SEQ ID NO: 480326 - protein, 380 aa, unidentified
MSIQNSAPAAGAENSAVVFVAIEMSRSRWDVVVHTPVSDKLSRHCLEAGNGAALIEFIDRVKGVARQRARDVRVVSCYEAGYDGFWLDRLLRQNGIANHIIDAASVEVNRRARRAKTDRLDAEGLLRVLLRWWQGDRQACHMVHVPSLAEEDAKRPARERQRLVKERIQHVNRIKGLLATQGIYDFHPLRADREAQLAPLAVPTHLRSELRREFARLVLVLEQIAELEAARNAVVAGRTTAQDDPATAKICKLFTLKSMGPEFSTGLVREVFYRDFANRRQVGSYLGLTGSPWRSGRLAVEQGISKAGNPRARTMMIEAAWMWLRYQPDSALAHWFGERVGQQRGRMRRIAIVALARKLAVALWHYLEHDILPEGAVVKS

SEQ ID NO: 480327 - protein, 409 aa, unidentified
MRYYLGVDWADQTHAVWVVDEGGTKVAMRTVPHTAEGLTEWGRELDEWRAQGIELWAAIERPEGRVVDFLLDHGVVVYAVNPKTLDRARDRFRQSAAKSDPFDARVLADFLRTDHAHLRAVQPSSEAAQELKLLTDDYQRQIRQQTRLVNQLTTTLKAYYPRGLEVAELTTGLAREFLQAYPTPATVTALTERQWQRWAHAHRLSQTRTQQLWVVLQRPQLPVPPHVVRAKARLMQSLVAQLTVVMEGVGAYREAIEDFFARIPAAQWIRTLPIGDHGITAPTLWARLGDAPGRWESFRHLQAQAGTVPVTIRSGKQQVVRFRFACDKSLRYIIDHVAFLSLRWSEWARAYYAEQRARGHSYRQALRALSAKWLKIIFVMWERRVPYDEQYHLAMMTRQQLRQRQEKVA

SEQ ID NO: 480328 - protein, 371 aa, unidentified
MKSIIYIGMDVHKNTYSLCGINSSTGEVIAQTKCAAEVKNILKFIKSAKERMSEENEVDILTGYEAGCLGFSLYHELAYHDIPCVILAPSTMHGSVKNKKVKNDKMDAFNIATNLMHDSYKAVHVPTEHDNEIKEYIGLREDVIQSRKRIKQQISALVLRRGLRYEGKSNWTVAHIKWLETIELPVIVRETLNEYLKVYDYLNERIEKYDERIEEFSKEEEYKEPVSKISCFKGIDTLSAMKIHVTVSDFQRFPTAKAFMANLGMLPGENSSAEKYSNTPITKMGNAMVRKTLVECTQALVRGTVGKKSKALKKRQKGQEDEIVAYADKAVERLQKRFRRMVLRGKPYNVAIMAVARELAGFIWGMETGRI

SEQ ID NO: 480329 - protein, 355 aa, unidentified
MTTMTDSAVLVTGGVDTHKYTHVAVALDERGALLGTGEFAATGAGYKELLDWLEGFGAVDAVGVEGTGSWGAGLCRSLLDADITVHEVGRPNRQRRRRAGKSDPADAEAAARAVQANDGLAVPKSRSGAVESMRLLRIARSSTSKTINLLANQMHAIIDTGPEAFRARHRGRTLRAVASDAAASAPRGHLADPQVAAATTLRRLARRWLELTAELADIDNDLKALLALAAPPALMAEFGVGPDVASTLLVSAGDNPTRLHSNGAAAALWGSSPVDASSGLQQRHRLNRGGDRQANRALHTIVITRLRYDPVTQAYLARRINDGKTKKEAIRCLKRYLARRIWHIITQPPNLQHAP

SEQ ID NO: 480330 - protein, 406 aa, unidentified
MRKTSKRRGPGPSSVLLTPDHAGNVVGIDPHKRTLTATVLDYRGGILASEHFRVSGEGHRALEAWARQFGPIARWGVENAAGWGRHTAVFLAGRGHDVRDVCANRTPRSDRARQRGKSDTLDSERIAREALAHALLPKAFKRAGADSGPDERHELLALWHNRRLSILTSRQHLVNEAEHLLCELPLQLREQLPDTKTVRPRLAALARRNRRRRYDAPTALRLQLLDGYRAQITALDGEEKQAVAQLAALVQASGSTLGELCGLSTRSVAELLVEVGDPRRFTEGGFGRFNGTAPLPASTAEGPGEPVRHRHNPGGNRRINAILHRMAVTQLRCEPRAQTIYAGARANHHTKKEARRVLKRHLSDVVYRRMIRDLAAHPAHPLLVAQPRAGAAQSRVARQGRAKRAA

SEQ ID NO: 480331 - protein, 338 aa, unidentified
MNLYAGIDLHSSNCYLGIIDEQLEKVLGKRVRNSLPLIIDCLAPYKKNLQGVVVESTYNWYWLVDGLQENGYMVHLANPAAIKQYEGIKYSDDKWDSLWLAHLLKLDILPQGYIYPKETRPVRDMLRRRMLFVRQRTADILSFQSMVTRNTGTRISVNHIKKLTEANLERLFPDPDLRFMAQRYLCIIDHLSQQIKLIEKQAMEKIGLTESFKWLSTINGVGKILAMVIMMEVGDIARFKKVGNYCSYCRCVKSERISNGKKKGVGNKKNGNKYLSWAYVEAANFCIRHNSQAEKFYQRKKAKSNGIVAIKALSNKLARASYYMMRDQVPFDSQMLFS

SEQ ID NO: 480332 - protein, 465 aa, unidentified
MVAIGIDVSKGKSTVGAVNENKKVVQKPFNVAHDKASLSGLVAFAEKFDDEVRVVMEHTGVYYRVVAEILCAAGIRVSVVNPVLIKQFGDNTLRKVKTDSKDAMKIARYAVENRGELRDFTKDDTTRDNLKTFVRQFNFENKTLTAHKNSLGALLERAFPAIDGFFPFSNPAKSNGQLKILDFVIEFWHNDCVSLLSEAKFVEKYRKFCKKNRYNFDESLAKAIHAKSRENLTTMGKDDTTKLLIQGAAKRTLLFSQAVEGLRSEMVKLAKKLPEFPAVMALYGVGESIAAQLMGEIGDIRRFESKRALVAYAGVDPDKNDSGQKVSISGEISRRGDALLRKVVFQAVECYLLNSPNNEPVYQFLDKKRSEGKHFYVYMTAACNKFLRIYYARIKEFMNSLEIETSREVCAEQADFCMEIPAISIASASIASTLPVKDNIAFACGQDSAMPEGNTSGPQDFGLYG

SEQ ID NO: 480333 - protein, 380 aa, unidentified
MSDVSSTAPADVNQWIVFDVHKNSLVAGVLPASGGTPQVSRLENTERAIRRFIERTGDPATLAVAYEAGPCGYDLFRFLSGMGVACDVIAPSLIPIRAGDRVKTDRRDAKKLVRLYRAGELFFVAPPSPAQEGLRDLVRCRDDLRCARTAARHRVAKALLRHGHIYREGKTAWTVKHREWLDRQRLDDPLAQLALEQMRAHLGGLDAQLATLDHELAQIAEREPWADPVAWLCSFRGIATQTALGLLAEIGDFRRFAQPRELMSYLGLTPSEYSSGDQQHRGHITKTGNRHARRLLVEAAWHYQHPARLSKRIATNRQHVPPQVSSRAWQAQIRLHHRHRTLTSNGKRPTVATVAVARELCGFIWAAMTDQPLREEVAAA

SEQ ID NO: 480334 - protein, 353 aa, unidentified
MKTYYVGMDVHQASIVIVVLNGAGKVVEAITLKTGATAVRSYLQRFKGRVLVTFEEGTQAQWLYDLVQPLVTEVVVCDPRHNRLLATGNKSDRIDAQKLAELLRNRSLKAVDHRDHGMRALKELVRSYDCLVQDSTRVMSRLKAIYRARAMGCAGHEIYRQDRKAKWLGKLKEPGARKRAGYLYEELAVLRPLRQKVKLEMLRAARRQAAYNWLLSVPRLGPVSVAQLLAVVGSPHRFRSKRQFWTYVGLAVVTRTSADQEVVNGVLRRSRRPLATRGLNRNHNHLLKRVFKTAATSACHSRPFAAAYEARVQRGIDPALARLTTARQMAAITLSVWKRGELFQAERMKLTAT

SEQ ID NO: 480335 - protein, 434 aa, unidentified
MEDERNWFVGVDWASETHHVRVSDARGRKLGARAFAHSGEGLAAMAAWILEVTGAPPEAVFVAIEVPYGPVVESLMERGFRVHAINPKQLDRFRDRFSPAGAKDDTRDAEVLGDALRTDPRCFRALQPLDPVVVELREASRMAEDLKQERNRLGNRVRELLWRFYPQMLGLTDDVAAPWFLDLWRLIPIPEKATRVREATVDRLLKRHRIRRLSAADVLEALRRPAILLAPGTVSAAVSHREAIAKRLDLVNRQMLAVDERLDRLTQSLAGAQERAGGQRPEPCDVTILRSLPGVGRIVLATLLAEAVEALQRRDDRALRCLAGVAPVTKRSGKSRIVLMRRAHAPSRPRPLAQRRLPLGARRRAARSKKPSEICGSSRPRPRPWPRPPISRRSPHRRGLRHARGQDHLRSEPCQPKSPKPRKSRLLNGGESPP

SEQ ID NO: 480336 - protein, 348 aa, unidentified
MLADQLDYIVGVDPHRDSHALAVVHVVSGAVVFESTVIADSDGYGQALRLVDQHAPGRRAFAVEGTGSFGAGLTRFLTVRGERVLEVGRLRRERRPGGKTDALDAVRAARSVLTQQRPATPRAGGERQALQALVAAREGAVNAKRAGLCQLRDLLITTPEPLRSELRPLTRARLLQRLAATRPHSRHDAELRGSMLALRSIARRVLQLTAEERELAAEIETITRKLAPQLLEQPGVGPHAAAQLVLSWSHRGRIESEAAFARLAGAAPIPASSGQTIRYRLDRSGDRKLNRALHMILVTRKRSHPATIAYIQRRIQEGKTRREANRCLKRYLARSLYRLLEHGAPLAT

SEQ ID NO: 480337 - protein, 316 aa, unidentified
MQIPLNIGVDVAKDQVVVACDDTSFTPRSIRNCRTALSAWLRRLPAGSRIGLEATNVYHQCLADLAHALGFAVFVLNPKDLHHYAKGVGRRAKTDRVDAQVIARYVAHEHQKLHAYIPPSPEQHLMEQLLRRRARLVSLRVALQATMAELGSCRAQSKAVVLQLDALVAALEAQLKQLLKHSETSRQAQLRLQSIPGVGLIVGAGLSVALQRLPFKSADAFVAFTGLDPRPCDSGKKVGRRRLSKRGPSELRRLLFNAAMAGSCTKAWKPFYQHHRQRGLASTEALIVLARKIARTAWSVFHHQTSFDPTRLHALT

SEQ ID NO: 480338 - protein, 381 aa, unidentified
MAYRIAGIDVHKKKLAVVVVDVEVDDEYQFERRWFGSNPEQLQRLAEWLIEQRVEEGVMESTAQYWKPLWSALERYWKPSCQNREGAGKMSGTLHLAQALSNRGRRGRKKDFRDAERLVKRLVSQELTLSFVPDTEQRLWRTLTRTRYQRTRDKVRLQNQLEALLEEAHIKLSSLVSDLLGVSARRMLHALADGETDPGAVAALAHQRLRATSAELRDALGACTELNPVYRRLVRLALDDLQLIEQQIGQLDQEIASLLREHQDAVQRLAEVPGLGVDSAQQIIAEVGAKAATFASAKNLVSWVGACPGEEESAGVNRSKRSPKGNRQMRRILNQAANAAVKHKGSIFEIVYRRLVLRLGHNKTIGAIAHRYRVEPVVIPA

SEQ ID NO: 480339 - protein, 363 aa, unidentified
MIVIGADIHKSTHALAAVSGDGGLVAGELEIRADEQGHFAALRWARELGNERVWAIEDCRHISRRLEQALIAAGERVVRVPPRMMGQARRSEREPGKSDQIDARAVARAVVREGLERFPAAFLDERALEIRLLHDHRSDLVAERTRQISRLRWHLVDLCPDLEAKIPARQLDSGSMLDRIARRLRREDRSARVRVALELVASIRSSSRQAYELERELRTLILAYRPTLLAERGLGVLTAATLIGRTAGAERFPTDAHFARQAGVAPIPVSSGRTDRHRLHRGGDRQLNRALHVIAITRARIDPETRAYLERKQAEGKTRKEALRCLKRHLARHVHRLLSMPPVNPDRRTRIRMNSAISVPCLT

SEQ ID NO: 480340 - protein, 343 aa, unidentified
MQLVTTIGLDIAKSVFQVHGVDAAGQVVIRRQLKRRYVLMFFQKRPPCLVGIEACASAHHWSRELKALGHRTRLIPPAYVKPYVKRHKNDAADAEAICEAVSRPNMRFVATKTPEQQGCLTLHRTRHLFVRQLTSVINAIRAHLAEFGIVAPVGRNGIEELLYVVSDASDRRLPEVARACVAALGTQLRMLKAQILQFDRMIMAWHKSNEASRRLDDIPGIGPVLATALVASVADPKMFRSGRDFSAWIGLVPTQNSSGGKDRLGSISKRGDRYLRNLFTTGALAVIRYAKIHGTRRRPWLTALLARRPTKVAAIALANKIARMAWAIMAKDERYKEPAALAA

SEQ ID NO: 480341 - protein, 425 aa, unidentified
MNYKQNEKINQVKESTLVVGIDIGSTKQYARAFDWRGIELGKVFTFSNSREGFEAFKAWMQRLQDKYRKSDVIAGIEPTGHYWFDLGAYLEDEGILLVMVNPYAVKQTKELDDNSQSKNDRKDPKVIAKLVTEGRYSAPYTPDGVYADLRIMVANRKRLIREMTQIKNRFARWFAIYFPEYTDVFGDYEAQSSMLLLKKVCTPEAIVELGAEKINQIWRDAKLRAVGMKRATTLCETAKRSIGLKKGSSAARYEMKLLLEDYEYKKAQLDAVMEEIEKLCRKIPESEQMLAIKGIGVITVAGFLAEVGDVRRFESPRQIQKLAGLSLRENSSGKHKGQTTISKRGRSKLRAVLFNAAIPLIAKNPEFKSLHEYYTTRANNPLKKKQSVIAISCKLIRVFYAILAKGVTYDAQKLISDIHRQPQAA

SEQ ID NO: 480342 - protein, 331 aa, unidentified
MKKVTETIGIDVSKLTLDVFVRTTNVHKQFSNDTKGFKQIISWLNKQKINLDQTLFCFEHTGWYCLQLSYFLYENDYRYCCINAIEIKRSMGLKRGKSDKADAWEIANYAWLRREELVPSTPPAKKLIELQRMMSLREQLVKQQTASKNLLKGMASIVEDDKSDVSMTILKENIGQLENQILTTEKAMNELIKQDEAMITNYKLSKTVKGVGMVLAVQMLLHTHNYTRFESSRQFSAYCGLVPYPYQSGTSINGRNKIHPISDRKMKSLLSMSAISAIQHDNELKIYYKKRLEEGKPKMVVLNIIRNKIVSRVFATINRGTPYVEMNKFLA

SEQ ID NO: 480343 - protein, 349 aa, unidentified
MDRTTYGLDIAKNVMQLHWVDAQTGEIGRRKLARARLAAYFAQLQPVRIVMEACGSAHHWARVFTALGHEVQLLPAAQVRAFVRSHKDDAADARAIWVAAQQGDIRRVPQKNVEQQAVLSLHRTRQHWVSVRTATVNSLRGLLYEFGVVLRGGRQAGLKALAEQRAAIDQQLPVVMHSLLDGQLHTLEQLQQRIDALEGQIAALQGQLKGGPELDRVPGIGVLGATALAATLGDGKAWRSGREFSASLGLVPAHAGTGGKVRVGHISKRGDPYLRTLLIHGARSVIERAKHQPKWLEDMLARRPKNVAVVALANKMARTAWAMVAHDRAYQRDWKSARPGSAAAQAAGA

SEQ ID NO: 480344 - protein, 451 aa, unidentified
MKKKKVSLEVVNPYAAGIDIGSRSHFVAIGQDADEVREFGVYAEDLQKLAAWLLEHGIKTAAMESTGTYWQNLFSTLQAFGIEVFLVNGKFTKNMRGKKSDVMDCQWIQKLHTMGLLSSSFLPDSTTETIRTYTRHRLSLIQLAADTSKKIQKYLRLMGFRLDVVVNDICGLTGIAIINDICNGNLNPKLLSVHRHYNCRKSIEEIEKALHGNGRKDYMFALIDEFEMYQILKTKIEKCDKEIESLLKEIIEKNENKKYHIAEAKPHKRITKNTNKQLDLNQVAFQYFEGIDLMKIEGVSHATVMTIISEIGLEGFSKFHTSKQFVSWLRLSPNNKISGGKVLSNQIARGSNRLKIALRQAANCIGNLKETHLSDFFRRICIKRGRASAVSATARKLGVIIWTMITKKIQYAPPKEYLMLDQKRKLGLVSRIRKSIVKFDLKPDDLGFATV

SEQ ID NO: 480345 - protein, 403 aa, unidentified
MNAVGIDVAKGKSVVSILRPFGEVISSPFELCHTSSAIDDFIHSLSNLEGEVRIVLEYTGRYHEPIARWLSDADFYVSVVNPKLIKDFGNNSLRKVKSDKKDALKIARYALDNWNDLRQYCFMDKTRDQLKTMNRQFDFYMKHKTALKNNLIALLDQTFPGANTFFTSPVRKDGSQKWVDFVASFWHVDCVRKVSLSVFTERYRKFCVRKGYDFHPDKPAQIFEASKELIALLPKDKMTKNLIMQAIEQLNTLSRTIEQLRLQMDQTAAQLPEYPVVMAMKGVGPSLGPQIMAEIGDVRRFSRRGALTAFAGVDPGVNQSSTYNQKSVRTSKRGSAQLRKSLFQVMDVLVKTSPENDPVYAFLSKKRAEGKPYYVYMTAGANKFLRIYYGRVKEYLASLSEEE

SEQ ID NO: 480346 - protein, 382 aa, unidentified
MRNESTPGARGPVFCGVDTHADSHWLCVLDWRGRRVLSRRFPADAAGYEALAGAIAAAGEPACVAMEGTSSYGAGLTRHLASLGMPVREALSPARTQRRRPGQGKCDEADAERAARAAMSGSRLGTPKSQDGWVDGVRCMLAARSGAVKARTSAINTARSLLTTAPEGLRSRFRGMGGPRLMEELPSVRAEGALGAALGALADLWAAARDAALDMERAIEASLEENCPALLAMYGCGPVSAAKLAVAAGDNPGRLRSEASFAAICGACPIPASSGKTVRHRLNRGGDRQANSALHEIARQRVMRDAETAEYAERARGRGKSDREVMRCLKRYVAREAYRALMRPHEIRRAYEAWVEAGLPLNWDRQAFEAERKMDSKKHLAK

SEQ ID NO: 480347 - protein, 347 aa, unidentified
MVTLGGDCHKRTHTLVAVDDNGQQLGAKMVSAVSAGHLEALDWARQWAERRWALENCRHLSRRLEADLLLAGEVVVQVSPKLMAGARRSAREWGKSDPIDALAVARAALRESDLPVAQLEGKSREVKLLLDHRDDLVGERTRVQNRLRWLLHELDPNLNVPERSLDRKVVLKRVAKVLAVHRGVAADIAVEQLERVRQLTERINELEGQIRAVVSHLAPNLLELDGCAALGAAKLIGETAGITRFKTPARFAMHNGSAPIPVWSGNSARHRLNRGGNRQLNVVLHRIALTQMRLGGRGYDYIQHRRACGDTKKEAMRALRRRISDEVYRRMWQDSMKATSDQACAAA

SEQ ID NO: 480348 - protein, 368 aa, unidentified
MNQITKEASKQSEKQSSQEAPKQGNLKLGLDVHYRQVTVAMQEQNGPIKVVGKMSHQAFSNWITKKQRERWQVSSCYEAGASGYWLDRALEQQGVNNLVVVPKAMGQGGQKQKTDRRDSVQLCDNLDRYLGGNTKALSVVAVPSAQEEQRRGLIRFHRQLMKDKARYEARGKGLLCAQGIEVKGPWWKAKGWQELLQHAAGLQEWLKEQLGVWRNKILSTQKEEKLLRERIEAMAPQPLPKGVGAYSAAVLQYELRGFERFKNRRQVASYTGLCPGIHLSDGRGKEGSINRCGNPTVRWTLVEMVWRMLRWQPHYEPIKELVAAIMKSRRLKRRLVVKAARRLAVDLWRLATGRTTAQKLGLIMQSDC

SEQ ID NO: 480349 - protein, 348 aa, unidentified
MTLTIVDGARPVTGGVDTHADAHVAAALDGIGGLLGVSEFPATPAGYARLLGWLGGFGAVGLVGIEGTGSYGAGLARHIAAAGIGVVEVDRSDRQDRRRKGKSDPLDAVSAARAALSGRASGAPRGRDGQVEAIRALMVAKRTARAQRTQAINQARALIITGPDGIRTRFTGQTPAGLIAELAALRPRPGTMVRYHTLLALRELGRRAQFLDGQLGRLDELIVPLVTARAPGLLSLYGVGPDTAAMLLIAAGDNPGRLRSEAAWAHLCAAAPIPASSGKTQNRHRLNRGGDRQANHALWRIVITRMGSHPPTRAYVARRSKEGLSKPEIIRCLKRYAARETYRYLRAG

SEQ ID NO: 480350 - protein, 360 aa, unidentified
MKVQRTSIGLDVHARSVVGCGLDGDTGEVFQRRLCPDHWEILEWIGGLPAPVAVTYEAGPTGFWLARALIGAGIDCRVAAPSKLQRPAGDRVKTDARDAAHLARLLHLGQIVEVTVPSVVQEAARDLVRAREDCRGDLMTVRHRISKLLLRQGIVYSGGAAWTGKHEMWLRAQRFDNPALMLAYEMALDAMVAGVHRRHRLDEAIAVMAVESEFTPVVRALSCVRGISTLTAFGLAVEIGDWSRLTGRSIGAYLGLVPCEYSSGTSRVQGGVTKTGNGHARRLLVEAAWHHRAPYRPSRDLRRRWDAATPALRARAHQANHRLHRRWAGFDQRKKRPVIANTAIARELAGWCWSLAIMAD

SEQ ID NO: 480351 - protein, 421 aa, unidentified
MKPQAPEAFAAFVGLDWADATHDICLQVAGSTRREFLRLEHRPEVIDAWVCTLRTRFNGQPIAVCLELNKGPIVSALQNDDGLVLFPVNPLTVAKYREAFTPSRAKDDPTDAELQVEILLKHRDKLTPLVPQSPTMRALAQLVEHRRRLVGDKVRLTNRLTSALKNYFPHVLQWFQEKDTAIFCDFLSRWPTLKAVQLARRATLESFFHAHHVRSADVITTRIEAIKNAVALTTDEGVIAPNTFLVQALVAQLRVTLQAITDFDTAMAQRAQAHPDFPLFDALPGAGAVFAPRLLVAFGEQRERFTSAEELQKYAGIAPVTERSGKKSWVHWRWQCPTFLRQTFVEWAAESIRHSFWAQVYYQQQRDKGKAHQAAIRALAFKWIRILYRCWQDRTPYDESTYLQALHRRGSSLIQNLAKAS

SEQ ID NO: 480352 - protein, 353 aa, unidentified
MIYTGIDYHKRYSVACTLDAQGQKLHEARIDGNASAAFAAYFKKLGTPSEVVIEACWNWGVLYDLLEDTAGVAKVVLSHPAKNRIIADAQIKNDRIDAKALATLLRGDFVAKVHVPSRDVRQRKNALRQRLWLARLRTMIRNRIHCVIDRHPQLERPAVKDIFSNQGKAWMKRAPLPTADRTLLDDDLALHALLQTQIDALEKTIVADNAANPLAVRLQTLPGVGKILAPVVALEIDQVKRFKTADKLCAYAGLVPTTHASGGKTAHGRMLPFCNRWLKWAFIEAAWVAVGCSDYFGSFYRKQRLRGKGANDAITIVARRMAKIAWKMLAEERDYSPHAPVAKPTSPAALITD

SEQ ID NO: 480353 - protein, 333 aa, unidentified
MVAGTLGSLNKAGSTKMTKTIMTTAGIDTSKATLDIAVHGRPKRWQFANDLPGWRALATTLAKAGVARVGIEATGGYERGVARHLRAAGFTVLVLQPIQVRAYARFRLRRAKNDALDAALIAACAANLDPPEIETDPRLADLAGPLTFVEQIEEDIARFKVRLEHIDDRRLRRLVTNDIARLKARRKAELRRIVERLRAHDALALRLDLVLSVPGIGERTAIALIVRMPELGRISREQAAALAGLAPFDDDSGKHKGQRHIIGGRARLRRSLFAAALPAAFRWNKALNALYARLTGSGKPHKLALIACARKLLIYANTVVQRGTPWTENAAPS

SEQ ID NO: 480354 - protein, 331 aa, unidentified
MKKKDVIGIDVSKLTIDAYLKLAQAHAVFGNDTKGFRQLVKWIRKHTDCKTEELLICFETTGLYSLQLASFLSQSNIDFVMENPIQIKRSMGLVRGKDDHVDSKRIAEYAYMRKEKLKFTQLPSEELIKMQNLLAIRERMIRQKAGYQASLGEYKRVLVQQQQKDFFLLLINMINALKKQIRKAEETLIEIIHSSSKLLNIYTLLTSIKGIGVILAANIMVTTICFTKFNDSRKYACYCGTAPFKYSSGTSINGRTKVSQMANKKMKALFNLAALSAIQHDPELKLYFDNRMANGANGMSTINIIRNKIIHRVFAVVKRGTPYVVMAKYAA

SEQ ID NO: 480355 - protein, 441 aa, unidentified
MAMRKRDDDLVFPNAAGVDVGGSSHWVAVPRHTCDEPVREFGAMTDDLNAMADWLLACGVDTVALESTGVYWIPVFEVLTQRGLRVWLVDARQMKYVPGRKSDVQDCQWLQRLMSQGYLRAAFRPDDEVCVVRAVTRQRDVLVADQASWVQRMQKALVQMNIQLTEVLSDVMGTTGQAIIRAIVAGERDPKVLARHRNGRVKASEQDIAKALTGNWRDEHLFVLRQALAMYDDIGRHLGECDAKLQGLLTQLGQSKVDLGRAPRAGSKTRAEFDTRQILANWAGVDLTRINGLGLAVVMKILSELGPDLSRFANVKHFCSWLGLCPGTKISGGRVLSAKTKRSANRVRQALKMAAMSLSHSDSALGAFYRRMSGRMDKPRANTATAHKLARMVYFMLTRGEAFVDQGQQRYEEQQRQRSIAALKRRAAALGFAVTPTPTPA

SEQ ID NO: 480356 - protein, 531 aa, unidentified
MEHGPGIDDCVDGGGLVLKKDKSPTPLERMCEFRHPGRVALNSTFDRTAMKPNQQEQHEKTPGRLSPMAWQQMNRKQRREWTRKMQAEEISLQVINPDAAGIDIGNEAHYVAVPPSRDNQSVRRFGCTTAELKDMAAWLKKYRIRTVAMQSTGVYWIAVYDLLEEAGFEVYLVNARETRNLPGRKSDVQESQWLMKLHTYGLLRNSFRPSQEVRTMRTYWRQRNDLIRSAGRHIQRIQKALTQMNLQLANVLSDVSGVTGQAIVKAILAGERNPWKLAEFRDKRVKASEEEIARSLEGNWQEDLLFLLKQEQDGYEFCLRQMAECDERLQQYLKQRKDRSAGASLPEEKRKERLRKKKENKPRFDLRAELFRMTGTDLTRIDGIDVRTAATVISEAGWDMSKWRTEDHFVSWLRLCPDNKVSGDRVVGKGRLPTNNPLTVALKMAASCLRQSNSYLGAQFRRLRTRLGPPVAIKAMAAKLARLVYRMLRYGMQFVDRGAEFYEARHRQREINSLRRRAANLGFQVTELTST

SEQ ID NO: 480357 - protein, 310 aa, unidentified
MTIICGVDVSKAWLDAWIAPAGHRRFANTAEGVAELGDYCRKHDVALVVMEASGGIEQSAFLALWQAGQPCAIANARSVRKFAEAMGYLEKTDRIDAMMIARFADAKRMVATPPPSADQQRLTALATRLRQVTTDLGVQKQRLHSVRDPFARQSIQEAIAFFTAQTDRLAAEITALIEVDPLWVALDRTFRSVKGVANRTIAYLLAELPEIGTISNRAVTKLVGLAPLPDDSGQRRGRRSIRGGRAGLRSILFLVADVARKYDPSLTDFRERLLAKGLSKMEVRIALARKLLVRLNAKARDVRADLAHAI

SEQ ID NO: 480358 - protein, 354 aa, unidentified
MSQTPSTAIAVIGIDIGKNSFHVVGHDTRGTIVLRQKWSRGQVEARLANMPPCLIGMEACVGAHHLSRKLASLGHDARLMPAKYVRPYSKGQKNDFNDAETIAEAVQRPTMKFVATKTVEQLDLQALHRVRERLVSQRTGIINQIRAFMLERGIAVRQGIGFLRTELPTILATRTDALSPRILRVIEELTGDWRQLDQRIDSLSGEIEALARQDQACSRLMTVPGIGPIISSAMVAAIGTGDVFSKGRDFGAWLGLVPKQISTGDRTILGKISRRGNRYLRVLFVQAAWVVLVRIKNWERYGLRSWIEAAKKRLHHNVLAIALANKLARIAWAVLAKGRAFELTRTNDAGVRPA

SEQ ID NO: 480359 - protein, 362 aa, unidentified
MFLERTSVGLDVHARSVVACSIDGVTGEITQARLCPDPRQVIGWVAALPGPCRVVYEAGPTGFGLARALTRASIECVVAAPSKLHRPAGDRVKTDARDAMLLARLLRLDEITPVRVPTIEQESARDLVRAREDARGDLMRARHRLSKLLLRHGVVYSGGHAWTGAHDAWLRREGRTLPTAALRLTFDADYEAVLTVRSRRDRLDQEIARMAADSEFTPVVRRLACLRGVDTLTGFGLAVEIGDWDRFTGATIGSYLGLVPTEASSGASRVQGSITKTGNGHARRLLVEAAWHHRKTYRAGSTLRGRWQAAPGVAVARADTGNRRLHARWRGFDARSKRPVVANVAIARELAGWCWSLATMPD

SEQ ID NO: 480360 - protein, 412 aa, unidentified
MLEVMFSHCAGVDVHKKSVTVCALIPGPKGKVRREVKSFGTTTKALLEMKAWLVSMGVSHVAMESTGVYWKPVYNILNDEVEVWVVNAQHIKQVPGRKTDVKDAEWIATLMRLGLLNNSFIPDESQRDLRDLTRYRTQLTNERSASVNRVQKVLEDANIKLASVVSDIQGVSARRMLEAMIGGQEESEVLAELAKGRLRRKIPELVEALTGQVRGHHRFLLQELLEHLDGLNQRLTQLNERIQQLTAPQAELIERLDAIPGVGQQTAEVLLAEIGHTIEQFPSPKHLASWACLCPGNNISANKRRSGKTRKGQKWLRTALTEAAWAASRTKDTYLGAQFHRLRLRRGAKRAAIAVAHSILTIVYHLIQDPNATFQELGGDYFIKRNKGDQQRRAIKTLTTLGFAVELTPLAG

SEQ ID NO: 480361 - protein, 345 aa, unidentified
MTAPANRGSYQLFVGVDIAATTFTAAWTAEGPPRERARTFAQTPQGFAALMDQLRASGVSPTNTLIVLEATGSYWVALAVTLHEAGYRVSVVNPAHAHHYAQSLPRRAKTDLLDAFLLAQFAAERKPVPWTPPPQVYHELRQRLVARDALLEMRTQARNQRHALLQWPVVIESVREHLEELIADLDRRLAALEAEIAQVLRDGAWAESAALLRGITGIGLITTAWLLVGTLNFQACASAASASAYVGLVPLARESGSSVRGRAQIGHAGHARLRTALYLATLSAARFNPLIKAQYERLRAAGKPPKVARCAAARKLLHLAFAVVSKGQPFDPTYRTRLLSERLAA

SEQ ID NO: 480362 - protein, 374 aa, unidentified
MRMSIGVDLHKTQFTVCMLSEDRKIEIIKEYPTREEGYEAFIKRINSLIEEGYEVSAAVESTGNTRYFMNRVVKAGVLVKVVNTLKFKVVNESVKKTDRHDARTLAEFLEKDMLPESQLCSQESEDIRRVIKSRAVLVQAIVSLKNQVHALLLSYGIETKRGQLQSKKERQRILSGLEDHKVYGSAAKAVKPLLDTINEVYAEVKKLEKVLEELVKDDEVVELLQTIPGVGLITASTIRAFTDDIDRFENAKKYAAYTGLVPWVQNSNESIHHGKITKRGPAELRTAFVQVVLGMVRVQRKTHAYRIMSKYGRMKSQKGSGKAIVATARKMSTIVYTMLKNKKPFDELKMAFTKEYMDMQAAALGAAMAEDKPA

SEQ ID NO: 480363 - protein, 342 aa, unidentified
MSDTIIGVDLAKRVFQVHGATVTGHVIFRKKLAREQFRIFMAAQPACVIVFEACGSASYWAREMEALGHETRLIAPQYVRPFVKRQKNDATDAEAIVTAARQPEMRFVTPKTQEQQAKAVLFRGRERLVHQRTALVNALRAVLYECGNVFPIGLSHLKRIDALVKDPACDLPALIIAECQDLLLQIAAKTERIDVKTKTLKALAAKADTSRHLQTMPGVGPLTALAVEAFAPDMAQFKCGRDFAAWLGLVPRQRSSGGKERLGRISKAGQADIRRLLIIGAMTRIMGPARHKISANSWIGRMLARKPKMLVGIALANKMARQIWAMLSKKEDYRDPALATAA

SEQ ID NO: 480364 - protein, 375 aa, unidentified
MIKDSEVFVAFDTSKLRNAVAIAEAGRAGEVRFLGEIENTAGATTKLVRKLEAKYERITFCYEAGPTGYELQRHIRGLGHECIVAAPSLIPKKPGDRVKTNRRDAVSLVKLSRAGELTAVWVPDRRHEAMRDLTRAREAAVIDLRAKRQRVSALLLRQGRSYPADKKTWTKVHMNWLASQRFEQPELGVVFAEMMFATRQAQERVERLEQAIRTAVPDWSLAEMVTAFMAFRGIDLVSATCLLAELGDLTRFPTAPEVMGYVGLGCSEGSTGDKIKRGGITKSGNRRARRMLVECAWSYQHPPRVSIAKQANVAAAPAKVREIAWKAQCRLNRRYRVLLRRGKLKTVAITAVARELAGFLWAAARELSSPQRVAK

SEQ ID NO: 480365 - protein, 344 aa, unidentified
MVYVGIDLHRKRSQVCAIDEDGAQLLSRSVDNDPEALLSLLANLGERPRVALEAAYGWEWLADLLDENGIELHLSHPLRTKAIASARVKTDAVDARTLAHLLRTDLLPEAWVAPQPVRDLRELLRLRIALTQARTALKNRVHALLARHGVRHGHSDLFGKAGRAFLWQLPLREAPRRRLQALLRLIDGFNSEIAALAEEIDSRAVDDPRVELLTTLPGIGRYSALLILAELGEVSRFPSARKLCSYAGLTPRVRASAGKVRMGQISKQGSPYLRWALVEAAHHAARGEGPLRKRYDQIARRRGRNVAKVAIARQLLTLCYYGLRDGEIRCLARASSTEDMAACS

SEQ ID NO: 480366 - protein, 313 aa, unidentified
MKRYIGIDVSKARLDVAVHESAQCFSCDNTEAGVEALIKQIKEWEPELIVMEATGGYERLCAAMLAAGGLALSIVNPRQVRDFAKSKGILAKTDRLDARVLAHFGAAIKPEPRALPDAQQQLLDELMLRRRQIVAGLVAEKNRLGMAHTDAVKKSLREAIAFYERLLADVDRQVGEHIERSPLWRAREDLLRSFKGVGPVSSRTLIGDLPELGSLDRKRIAALVGVAPMAHDSGKRKGVRTIHGGRGQVRAALYMVAITAIRANDPIRQFYQRLRAAGKPAKVAIVACMRKILIILNAMVRTQSRWNEHMAIS

SEQ ID NO: 480367 - protein, 359 aa, unidentified
MSESNLLAIDLAKSSFQAHLAAPNGRALVRKKLSRGALADFVAKSDATVVAMEACAGANYWGRRFTTLGKEVKLLAPQYVKPFVKTNKNDANDAEAIAEAAARSSMRFVPLKTVAQQDISSLHCVRSRLVAGRTALTNQIRGLLTEYGVVLAKGHAKLRACLLELRDETAFRGDLSPFMLRKLEELSQELTSFNERIASCDAEVKQLCDQDQLSRELTKIVGIGPLTATALRALSGDMAQFKNGRQFAAFIGLVPRQNSTGGKTRLLGISKRGDPYVRTLLIRGARAALISAHKRGDYRSQWANRLKEAKGMNRAAVALANRNARTVFALLRHGRPFDADRPGRASRSDVAPRREATIG

SEQ ID NO: 480368 - protein, 458 aa, unidentified
MKSPVNDVEEIDGDEAERILTYAAAIDVAKASGMVCVRGPHPSIDGRRTSRVWEVDSTTNSILGLGEDLVALGVERVVLESTSDYWRPFFYLLEAAGLTVWLVNARDVKQVTGRPKTDKLDAVWLAKLNERGMLRPSFVPPREIRALRDYTRLRTELVEERSRHKQRIEKVLEDALIKLSSVAADLLGVSARAMIEALIAGERDPKVLADMARGKLNAKRAALIEALTGRFDDHHADLARLLLDQVDACTDKVDRLTTRIEALVAKLPEPSPPADRQPRPTPANDVPVEHDPHADRLTPVERLDEVPGIAERAAQIIIAEVGLDMAQFPTPAHLVSWAKLSPQTIQSGPRIKAGKTGKGNRYLKGVLGEVATAAAKTDTFLGERYRRLVRRRGKQRALVAVARSILVIVWHLLNDPDSRYVDLGSDYYAKRLDPDRKTRDLVRQLQALGHSVTLAPAA

SEQ ID NO: 480369 - protein, 430 aa, unidentified
MMEEVDDAELVVERIAALDLGKAGLEACVRVPSPQRPGRRMQELRGYGTTTAQLLEMVAWLRHWGVQRAVMESTSTYWKGVYYLLEAEGFECWLVNAREVKNVPGRAKTDRADAIWLAKVAERGMCRPSLVHPAEIRRLRDLTRYRRALVQDRTREQQRIEKLLEDAQIKISSVLSELHGVTARAMMDALIAGQRDPRALAQLAKGRARKKTAQLEEALRGFFTDHHAAILRMMLDNTDRISAQIAALDARIEKEIGPFSGQAARLAEIPGVDAVAAAELIAEIGVDMTRFPSDAHLVSWAKFCPQTHESAGKSKSKGRGRGNPWLAGTLGRIAFANSRADTFLGARYRRLARRRGKQKAIVATGNSVLTVVYYLLSDPMATFCDLGPGYYESRINVHRRARDLVTQLQALTGQHIVIRDGKAVITDAAA

SEQ ID NO: 480370 - protein, 320 aa, unidentified
MMAQNDLVVVGIDVAKDQVDACIRSLSLRQTCPSTAQGHRKLIAWLRKHKVNKAVMEASGGYERGWARVVREAGIEVRVVDPKRVRSFARSAGRLAKNDTIDAEMIAWFAETFSEAPSQTHDAAHEELLALVKARIGLVDLKMRLQSQSEHAAPVPAQKAHAGVLKTLADEIAKLEAVISARIKSAPHLAERAEIIESVPGFAQTTSANLVAGMPELGQVSNKIAAALLGAAPYDDDSGKRYGERHIKGGRRWVRNAIYMPCVGAATQNNSMLKAYYDRLIAKGKKPKVALVACMRKLIAILNTLIARRQKWDQSRYVLN

SEQ ID NO: 480371 - protein, 340 aa, unidentified
MEKVSIVGLDIAKHVFQVHGVDVAGAVVVRRSLRRAKVLEWFSKLPKCLVGMEACATAHHWARELQQLGHEVRLIPPAYAKAYVRRNKNDPVDAAAICEAVSRPSMRFVTLKTAPQQASAGIHRVRDLLMRQHTMLRNQLRGLMAEFGLVAAKGRRGMSELLAILGDDEDGRIPSPLREGLLTIAETLSGIDRKLAGIEKQLIAAGREDATYRHLITARGYGPILSSAMSAMVINPRAFKCGADFAASLGVVPRQEGTGGKVWLGPISKRGNGYLRRLLVNGATAVLNSKQAKQDPWLARLLASKPRKVVAVALANKMARIGWALMVRQEDFRSPKAAAA

SEQ ID NO: 480372 - protein, 383 aa, unidentified
MTGFHDVLTQRRPLLRAALMRWSPPPYERVTLVGCFHFWRAIMQRATLVGIDLGKHAFHLHGQDQHGNAVFRKKVSRKQLVEFFATLQACTVVMEACAGAHHMARTLASFRHHVRLISPQFVRPFVKSNKNDFVDAEAICEAASRPSMRFVSPKTESQQTLSALHRVRDSLVRDRVKAVNQVHGFLLEFGVSLPVGKTVMTRLPAALAEHALPPRLVAILERLHEHYKYLSDQIDELEKEMYRQLADDELGQRLLSIPCVGPITASVLAAEMGDGKQYGSSRDFAASIGLVPRQYSTGGKANLLGISKRGDKNIRRLLVQCARVYMQRLDRQVGRLADWVRSMLTRRHSNVVACALANKLARTAWALATHNATFDAGAIVMSA

SEQ ID NO: 480373 - protein, 402 aa, unidentified
MRFSVGIDWATQAHAVCILDQTGRVQWQGSVPHTADGLAALLARLRRFRRRGPLRVALERPSGLLVDTLVAAGLEVVPIHPNALKASRPRYSAAGGKSDPGDAFILADLLRTDGHRFPALRPPSDDTRALRTLVRGRDDLVAQRVAVTNQLRALLERFWPGAVAIFADVDSPIALAFLSRYPTPHSAARLGEQRLAQFLRQYAYCGRRPVGELLARLRSLPVSQVGEAEAEASGEVVRALVAALTPLVTHIQQLSAGIEAALSQHPDGPLLQSLPRSGAVNAAQILAELGDDRARFPTDEQLAAEGGLAPITHASGKHHAVVFRWACNKRLRRALTTFADNSRHASRWAALVYQRARGRGCRHQHAVRILARAWVRILWRCWQDRAPYDVTRHRAAQALLAA

SEQ ID NO: 480374 - protein, 351 aa, unidentified
MSHKTAATVVHTIGIDTGKNTLHLIGLDDQGAIVLREKIARGRIAARLANVPRCLIGIEAGMATHYVARELSALGHDVKQVPPAYSKPFRQGHKNDFRDAHAIAEAVQRPSTRCVPVKTDDQLDLQALHRVRSRLVGQRTAVINQIRGFLLEHGIAVRQGLRFLRQQLPDILAKRSDVLSPRMIRIMEDLSGDWRRLDERIEHITKEIEVLAGTDVNCGQLMTVPGIGPIVASATVAAIGNGAAFARGRDFAAWLGLVPKQMSTGDRTILGRITKRGNRYLRMLFVQGARAILLRPKSWAKHSFGPWLTTAARRLHRNILTIALANKLARIALSVLIQGRSYETRIVPAAA

SEQ ID NO: 480375 - protein, 373 aa, unidentified
MGIDLGDKYSQVCVLGDAAEVLEESRVRTTVDALRRKFEAMEPCLVAFEAGTHSPWVSRLLEGLGHESLVANPAALHRKGQRKNDKVDAKKLARWARADPEMLNPISHRGEDMQADMGLLYARRALVEARTKLINTTRGLVKAYGARLPACDARSFPNQVKDAVPEALRPALEPLLRSIEQLSEEIYALDRRVEALAEEKYGFQTGAMRQITGVGALTSLTFVLVIRDPYRFSRSRRVGPYLGLTRREDKSGESDPEMGISKAGNQYLRQLLVGCAHYIMGPFGPDCDLRRWGLHKAQGGKNAKKRAVVAVARKLAVLMHRLWLTGEVYEPLQEAALAASGVDKTATHGSLPARTGSLTGRRAMQPDAVLSTR

SEQ ID NO: 480376 - protein, 345 aa, unidentified
MTTVDVARPITGGVDTHLDSNVAAALDPIGGLLGVAEFGTTRAGYAELLGFLNGFGPVSRVGVEGTSSYGTGLARFLRTSGIEVVEVDRPNRQARRRTGKSDPVDAIEAARAALSGRAQGAGKTKDGNVEAIRALMVAKRSARSTKIMTLNQIRHLGFTAPEELRERLGGVSRQHLATTAAGLRPRVGSDPVLFATKTALSMLGRRVLALDEEKERLDRLLADLVKATAPSLLEVFGVGIDVAATLLTTVGDNAGRIRSEAAFAHLCGVAPIPASSGKVNRVRLNRGGDRQANSALWTVVITRMGNDPRTRAYVERRLKEGRSKGEIIRVLKRYVAREVYRYLPL

SEQ ID NO: 480377 - protein, 349 aa, unidentified
MKDNITIGMDLGDKTHITVVLDGDGNELDIATVVNTKAGIGKYFANYKGSTVAIEAGTHSPWISRLLEQMDCTVYVGNPRKLNFIWDSIDKSDERDARLLARVCRLDHRLLWPLRHRDGKAQADLAVVKSRDILVRCRTQLISHCRSVVKTNGERLPSCSADCFTRRCEEHVPSVLWPALEPVFRTIAQVSEQIHELDSKIMQLGRLQYPETERLQQVSGVGPVTALAYVLTIEDPQRFSKSRQVGPFLGLTPRRDQSGKTDKQLHISKAGNNYLRKLLVGSAHYILGPFGPDCNLRRYGLAIAARGGKNAKKRAAVAVARKLAVLLHRLWVSEELYRPFYGTDKQKAA

SEQ ID NO: 480378 - protein, 312 aa, unidentified
MEKLSYGGIDVSKDRLDVVVLPEGWFFSVSNDTAGWAELVARLRPLAVSAIGLEPSGGYERGIIRALLAAGLSVRRINPNKLRQFARARGVLAKNDRLDARLIAEYVAIMPTRVVQRDDAVERLAEIVTMRRQLCDEHVAVDNQAAHLEDAMLRRLSKRRLIRLQADIRLLDKRLAEMVATNAAFAQLYELLTSMPGVGPVLAFTLIALLPELGKMSRKQIAALVGLAPYDFDSGKLRGHRSIYGGRMPIRNVLYMAALSASRYNPALKTFSNRLTHANKKSKVIIVAVMRKMITTLNAMLRDNAAWQPQSN

SEQ ID NO: 480379 - protein, 344 aa, unidentified
MTYYAALDVSLRTVNICVIDDQGEIQAETKLDSEVTDIIAYLDDLDLEVTSIGLEAGTLCQYLTYGLQSAGFEVVCMEARQVKAALSAMRNKTDKNDARGIAQLLRSGWYSQVHIKSMASHRIRALLSSRKAVLCKCIDLEQEVRGLFKVFGIKLPPKLGHGAFDAAVRGIIETDATLSHALLPLLDARLALYHYFRELDNRTRNMAHADPVCQRLMSAPGVGFITALTYKAGVDDPARFKRSRTVAAHFGLTPRRFQSGEIDIDGHISRCGDQDVRCTLYTAANALMTRSSRWSSLKAWGMHKAKTRGHRRAVIAVARKLAVILHRMWVDETQFNWGMEGARS

SEQ ID NO: 480380 - protein, 338 aa, unidentified
MTIIATGIDLAKNVFAAHGVNDTGKVELRQPKVARAKLNALVAALPPGVIGMEACSGAHYWARLFQSHGHTVKLIAPKLVTPYRMSGTRGKNDAADAAAICEAVQRPNMRFVPVKSEDQQARLMVHRARQGFVTERTACINRIRGLLSEFGIVLPLKAEVVRREARNHLEDLPGFANLVIGDLLSELTHLDERVKQYDIHIRTMARDCNAAQQLMQLMGIGETTATAIVAMVGNASEFTCGRQFAAWIGLVPGQYSSGGKARLGRITKAGDPYLRSLLVMGARAVLNAAKGKQDSLSRWAVSVAERRGYWKAVVAIAAKNARMAWAVLTRGAQFKLPA

SEQ ID NO: 480381 - protein, 392 aa, unidentified
MVISVGIDVSKDKHDCFIVSAEGEVLADVFTIPNNMDGFHCLLQRIQTCATPQDKIKVGLEATGHYSYNLLGFLLDNGLPTYVLNPLRTNLYRKSLSLRKTKTDRVDARTIASMLLSDAGLKPYTDTAYHNEELKSLTRYRFDKVKERAKLKSSISRLVCILFPELEKLVPSLHIASVYALLAEFPGAKQIAAAHLTRLKALLETASKGHYKRDMALEIRDAARNSIGSWMPAKSLELQHTIRLIRELDDEIVEIEEQIQAIMDELNSPITTIPGIGFRMAAMIFAEVGDFTRFDSPDKLLAYAGMSPSTYQSGQLKNCYPHMEKRGSRYLRYALYNATKYVCHWDPTFAAYLAKKRAEGKHYNVALSHAAKKLVRLIFSMEKSKRPYCLAA

SEQ ID NO: 480382 - protein, 335 aa, unidentified
MKEITTIGVDLAKSVFTVHGVDATGHTVLRKTVRRERLMELVAGLPPCLIGMEACGGAHEWARKFLGHGHRVGIMMARFVAPYRKSSKNDGNDAEAICEAVARPNMRFVPVKSAEQQAILSLHRVRQGFIEQRTATINRIRGLLAEFGVVLPQRAEQVRRAAVVVAEGLPVLAREAIADLRAYLSYLDERITRYERQLVELARQREAAVRIQRLPGVGPLTASAITASISDGHEFANGRQFAAWLGLVPRQYSTGGKPRLGRITKRGDAYLRTLLMLGARAVLQSAAQKSDRLSRWAMALLARRGYHRAIIAVAAKNARIIWALLANNREFAPPA

SEQ ID NO: 480383 - protein, 315 aa, unidentified
MEQSIQQNVGVDISKDFLDVALYPAGDAFRLANDANGHRALVKRLAGLQIVRIVFEATGAYHRVFERTLAQAGLPMVKVNPRQARRFAEASGKLAKTDRCDAAMLARMGLALALEPRPVVSQALEELRELLNARDALIKDRVAALNRQKNAFSPLLKRQLAARLRQIEAQIEAIDQEQKKLRSADSGLKDRFDILTSIPGVGAITANALIAELPELGGLDQGQAASLTGLAPIAKDSGKSSGKRSIRGGRARARQALYMPALCAIKFYPACKAKYEALIKLGKPKKVALVAIMRKLVIIANALLRDRRKWSPAAP

SEQ ID NO: 480384 - protein, 304 aa, unidentified
MHLTANISIPQKNFIAIDLHSDNAVICVRRNALNKAGELVGKNIWCGRVSIRDGLDNFIKVLVPHCQDFDHVAVVESTYNWYCLADAFEERGWLLRVADPSTVSQANLKSSDDRTDAQYLAERLRVGSLKHYLPLNYSSRALRDLCRYRMAMVQDCASLKIKLINLYRNQLSKNVRVADLLERCQPHMQPNYRFNSDILEEFKDPNIRLRVAFEISRIAMLEKMIEECNAEIQKQCKDQELVKLCKTIPGCGPVLSAVISTEIGTMQRFKSAGDFVSYCRLCSTSKLSNGKSKGLGNAKTATPT

SEQ ID NO: 480385 - protein, 407 aa, unidentified
MRYYIGVDWADEEDAVWVANDAGDKMLSRRFAHTVAARSEWARWLRERQAEGIELWAAIERPHGRIVDFLLDHGVVVYPINPKSLDRARDRFRLGGSKSDPFDAKVLALFLRSDHLQLRPLRPNSEAAQELQGLTRDYRRQVHLQTRLLNQLTATLKEYYPRALELGEDLTAGWAQAFLARYPTPAAAAALTEPDWQAFAHAHRLSPTRTAALWETLQQPQLPLPAHVVRLKARLLQALLRELAPTLATIAEYRQAIDDFFATMPTAEIARSLPVGKSGTTVPTVWAELGDHADRWGSFRHLQAYAGSVPETDCSGKHHVVKFRFACNTALRDAMHQLAFLSLPHSLWARAYYDRYRERGHTHHQALRALGAKWLKIIFVMWKRQVPYSETHHLATMARQHLHQTAA

SEQ ID NO: 480386 - protein, 319 aa, unidentified
MAKEKVYVGIDVSKEQLDVALYPRDTCRKFSNDDKGIGDLIIYLKDLTPAIVVLEATGGYEMPAVATLSTTGIPVTLANPRQIRDFAKATGRLAKTDGIDARVIAHFAAAIQPSPKSIPDDQTQEFKELLMRRRQVIEMITAEKNRLDKGGTAVKNLIETHIQWLQQQLDDINHRLDRTVKQSPLWREKDTLLRSVPGVGPVLSATLLADLPELGMLNRHKIAALVGVAPFNRDSGMMRGKRTVWGGRSKVRVALYMSTLVATRYNPVIRTFYLRLCSYGKSKKSAITACMRKLLIILNAIARTGLPWSYTSLQNSPEN

SEQ ID NO: 480387 - protein, 387 aa, unidentified
MPQPNDLSKSLVALDHNSTIIAVVEMSQSSWLVGGVVPGIERQPRKKLEPSPERLLALLHRWRDEAIRTGGNITRIVLAFEAGRDGFWLARWLAARGIEAHVIHPSSVAVSREHRRAKTDRLDTELLKRAFLGWLRTERGHCSMARIPTIAEEDAKRPNRERECLVRERTRIVNRIKATLARLGIREFKPTLRKAAERLAALHTPEGPPLPPNVSAELQRDLARLGFVVSQIKEIEKARQRRLEQHSESGPHATVRLLARVVGIGIETADMLVHEVLSRPMRNRKAVARYAGLTGSPDESGAKRREQGLARAGNARVRRGMIQLAWRFLLFQKQSSLAQWYRARTADSRRGTRKTMVVALARKLLIALWRFTTTGEPLEGVILRPVG

SEQ ID NO: 480388 - protein, 346 aa, unidentified
MMIIGCDFHPSWQQVSWLDTESGNCGERKLVHASGEAKMFYQQLGLPVLIGMEATGNSQWFVELVEDLGHEIWIGDAAQIRASYVRKQKTDKRDAAHILKLVVEGRFPRLWTPDREQRDLRQLVLHRHKLVEIRSRVKNELQHLSLNKGMQRKGKLWSQAGQKLLRELPLKPWAACRREDLLGLLSMLNQQVGQLDTAVQHAAEENPQARLLMTQPGVGPNTALAYVLTLGEVSRFPRGKQVASYLGLIPREHSSGGRQKLGVITKQGNRMLRSLLVEAAQIAVRFDPGMKKQYLHRCHQKPKGVAKVATARKLAVRLYWMLRTNVAYPEIVRIESSPRVPLVGAS

SEQ ID NO: 480389 - protein, 358 aa, unidentified
MSMQQVPSHRRVVVGVDTHKYVHVAVAIDDLGTVLDDRSFVADAGGYAQLIDWAASFGGKLIFGIEGTGSYGAGLAGAVRRRGIGAMEVVRTDRRDRRLRGKSDTIDAENAAKAVLAGLATAVPKSADGVVEMIRQVKVAKDIAVKARTSAMISLKQVIVNAPDTLRQELQPLSKMALINRCAGLRPGRVTTVAAATKHTLRAIARRWQQLNAEIVEHEKILTDLTSSAAPELAKAFAVGPDTAAEMLIVAGDNPERVRSEAAFARLCGVAPIPASSGMTTRHRLNRGGHRQANAALYRVVIVRMQHHEPTKAYVARRTAEGKTKAEIIRCLKRLLARELWAAMRPIRDARQSLPNAA

SEQ ID NO: 480390 - protein, 406 aa, unidentified
MQANEQDSSNFFRPPRFLFPYGPDKNIVDLLRFVGENKSLCPKIIKTFKVMKNYYLGIDVSKKDLAYCLSRGVEGIITTGKIENSSKQISKFLKKILKTYSITKGQLVVVAEYTGIYSNLLAEVCTTESYDLWLGDPKKMKAGFTETRGKDDMKDAKRIAEYAWRHIDQMALFKPKDGSILKLKALLRTQKTLIKFLHTLEVQLGEEEKFLDQESYQLRKDLLEPVIEKLEEAMENADEELSHVIESDPVLANKDKRAQSVGGVGPVISHYMICLTEGFTKFKTAHEFMSYCGMVPIKYESGTSVHKKTVTSNECSHIMKGIMYMPVLGFVKGSKRPKADTELHDYYVRKVEGEGKHHNCTTNVLMAKLIGRIFAVVRDDRDYLPEEEYNKKYHPERVNKEEAATS

SEQ ID NO: 480391 - protein, 343 aa, unidentified
MTKLNVIGVDLAKNVIQVSVLSPSNQDLRNSALTRRKFSEFLGRQRPSLVAFEACATSHYWARVAQRQGHEVKILPAKAVFPFRQGHKTDENDALAVAEAARRPNVKLAPLKTVEQQGMQAIQRSRELLVHERVSLANHLRGLLMEFGMVIPQGFASLYRLLPEILEDGENELPDLYRPTLNLLYGRLCDLREDLERLNREIEVLVQANPVCRRLTALEGVGPIGSVLLYATLGTGEAFTNGRQFSAYLGLTPKQFSSGGKVNLVGISKRVANRRLRAVLITGARAYVYHMKEPKTAKDRWLWAIVERSGKCKAAVALANKNVRTAWAMLTQNTEYQHYPIAA

SEQ ID NO: 480392 - protein, 348 aa, unidentified
MSQSNQYVGLDVALKETSICVIDDADKIVWRGRTDSTPEAIASAVKQHAPHAVRIGLESGQLSSWLFHELKAAGLPVICVDARHAKAALSLKVNKTDANDALGLAQIMRVGWYREVTVKGLDCQAVRALLVARAQIVSQITTLKNCVRGILKTFGRVLPKGLRSQFPARVRAAIDGHPVLGAIIEPTLQVLEATRAQLLVYDKAVIQRARSDDTARQLMSAPGVGTVVALAYMTGVEDPARFKRSSSVAAYFGMTPRRYQSGEVDHAGRISKCGDGMVRGLLFEAAKVLLSRSARPSALKTWGEALGKRIGAKKATMAVARKLAVILHRMWTTGTTFQWNIEAASPAA

SEQ ID NO: 480393 - protein, 341 aa, unidentified
MTPSYTLYVGIDIAAATASVAVMTSDQTINDVFTIEQTEPGITGLIAKLVATDHPVNQVQVVMEATGTYWMRLATRLYQTGFAVSVINPMQAYHYAQAWLQRAKTDELDAQMLAYLACQMQPDLWVPDPAVYEELEQRLVERESLLHIRQQLRNQLHALCHRPIVIVAVEERKRALLASVQTQIDAIEREIKILMRQEHAWSSSAQLLQDIQGIGMVTAAWLLVATHNFTTCSSPEQLVAYAGLAPYKRESGTSVRRRGQIGHAGHARLRHALYMATLSAARHNPAIKTFYDRLRAKGKPMKVARCAAARKLIHIAWAVVVKQTPYDPHYQSNRQIQLQMA

SEQ ID NO: 480394 - protein, 345 aa, unidentified
MNKHTVISLDLAKSVFQACNIDTRNQQVRSNKTLRRNQVLDYMRRQPPCRVFMEACGGAHYWARQLHAMGHEVHLMAPQFVTPFRKGHKTDANDALAIAEAGQRPNMRFVPIKSLEQQDIQSLHRVREVCIRQRTQLINQTHGLLQEYGVASGRGQKSLRQSVWRALEDADNELTVLMRELLTEQMIELARLNGRIDALDKRVERMSRSVAACRALLALEGVGPVGATMLYSALGNGHAFSKGRQASAYLGLTPRQYSSGGEVTLTGIGRTGQPQLKATLIRGAHAVLKSLGDKQDAKSRWLRALVSRTGKNRAAVALANKTVRTAWAMLHHGQAYQKEWISTPT

SEQ ID NO: 480395 - protein, 343 aa, unidentified
MEQISTIGLDIAKTVFQVHGIDGSGEPVVRRQLRRRQVLSFFGRLSPCLVGLEACATSHHWARELEKLGHEVRLMPPHYVKPYVKRNKNDAADAEAICEAVMRPTMRFVPIKTPEQQSVLMVHRTRQLFVRQRTTLINAMRAHMAEFGIVAGVGRNGVETLLELISKGEDGRLPSSARECLMALAAQLELVKRQILEADRRVRAWHRASKTSKRLEAIPGVGPLVATALVASVPDPHVFRSGRDLSAWIGLVPKQNSTGGKNRLGSISKAGNRYLRQLLVVGALSVIRRAKQLGYTRHPWLVQLMARRSTKVAAIALANKIARIAWAMMARNESYRTPLPQSA

SEQ ID NO: 480396 - protein, 390 aa, unidentified
MLRKNIVQTLDAATSWKVFGLDLAKHDLAVVAIPADGSEVQYVKRYSYADFLEFTAQIPSATMVFEPGNGANHFALRLQAQGHTPKMVSGASVKSWITLHMSGQKTDLNDAYALARLSEDPDLKTVRIKSVDQNRLQSLQAMRKQLVEQRTKTIVSIKGIFQCWGILFKKDSRSLKKFKEAANNNKELLGEEVVEAMILQIDRIADLDKDIKHVEELLKKVTMQNPRAQPMLDIPCVGLQTVSRLCAIMGDIKDFETPRSFVAFIGLVPKNMISGNKTTTPSGYEQVGQGKVNRRGDKMARSLIIQCASSMYMNFHKDNFPECALKDWIQKQKDAHKPYGKIMVSLAAKLLRIIYAVLKHGEAFSYEKAGISRSALAALKAAQPAEVGNA

SEQ ID NO: 480397 - protein, 297 aa, unidentified
MNIVYLGIDLAKNVFQLCGLNQAGKPVYSKRTGRKGLLQTVANIPACLIGVEASTGAFYWQREFEKLGHKVKVISPQYVKPFVRGQKNDGNDAQAIAVDLMQPTMQFVPPKSPEQQDIQALHRARQRIVNHRTATVCQIRGLLPDRGITIGAAVSRVRRAVPLILEDAENGLSARMRRTIAELCDLFNDPARRINFFDKEIDAVFRESEACQRIAKVKGIGPETATAVVAATGKGTEFKNGRHFAAWLGLVPRQHSSGDRQVLMNMTKKGDTHLRTLFIHGARAVVRGSSNNNDVVI

SEQ ID NO: 480398 - protein, 337 aa, unidentified
MNPTKSNHKFCLGIDISKADYHVALLHRESGESIARSKFANNPQGHAKLLDWLAKHTGADLPVHACMEATGSYGESLADHLDGKVAILSVVNPRAIKAHGDSDLRRCKSDPADARLIADYCRSKQPRAWQAPSPAQRKNKAISRCLANLKKDRTRESNRLDLCSDKTVVKALKAHIKWIEKQIAKLEDELIAAVKENAASARALELIVSIKGIGEKSAAYLIAELPDLALLKNARQLAAYAGVTPRIFQSGTSGKTRPPMSKAGNRHIRKALFFPAMSAMRFNPICKAFAERLKEKGKPSIVIIGAVMTKLLHLIYGVLKSEKPFNPDILKKAQIIP

SEQ ID NO: 480399 - protein, 326 aa, unidentified
MEHELHYIGIDTAKEKLDVDVLRPDGRHRTKKFANTTKGHDELVSWLKGHKIDHAHICIEATGTYMEPVAECLYDAGYIVSVINPALGKAFAQSEGLRNKTDTVDARMLAEFCRQKRPAAWEAPHPLERALRALVVRHQALTDMHTQELNRTETAREVQRPSIDAHLLWLEAELKRLEKQIKDLTDDDSDMKHRRKLLESIPGIGEKTSAVLLAYIGLKDRFAHARQFAAFAGLTPRRYESGSSVRGASRMSKAGHVSLRRALYMPAMVATSKTEWGRAFRDRLAANGKKGKVILGAMMRKLAQVAYGVLKSGVPFDASRHNPVAA

SEQ ID NO: 480400 - protein, 400 aa, unidentified
MKTVLSVDVAKNKSMIMLMNNEGEILIDTKEIKHNLGEFEKVKEEIEKNNPENLTVFMESTGTYHLPVERYFKENGFNTLVINSLTTKNNFDTIRKTKTDKKDCYRLAKLFFVNEVEYHEISKKDLYANLKAMTRQYFYLTQVNIRCKNRYKRLINICFPEFEGFFARNRIYEDTALNFIKAFPHAYMVREKRIDALYNNLRKVDARHDYYYKRLARQLKDTAMDSFPGVDKDHADVKNLSDMASILQENNRLIDEIRKNMIELAKQSPYFEIVNSFYGIGEVLAAELLGELGDITRFDNHKQLIAFCGLDPAIVQSGKSINVHGAISKRGDKYARWILFNISQMVVKLGHQYPSHPVYNYYLIKKAEGKHYYESLTACSTKILRMLYSMCKNNKRFLEE

SEQ ID NO: 480401 - protein, 357 aa, unidentified
MAEGSWVGLDVHARTTLAGVLDAASGELRVQRVSPRSEVTVAWLQSLPQPVRVAYEAGPTGYGLARACAQAGITCTVAAPSKIPRASGDRVKTDRRDAERLARLLRLGELVAVRVPDPLVEAARDLVRAREDARSDLMRARHRLSKLLLRHGLVYEAAAWTLAHDAWLRRQRLPGRPLALAFDESYGAVLQAKGRRDFLDRAIAELAAEQPFRDVVSRLVCLRGVSTLTALALSVELGDWQRFRPESPGPFLGLVPSEDSSGDRRRQGAITKTGNTHARRLLVEAARHQRRPLRASAALERRRQGQPAAVRARADESARRLHARWHALEGRGKRRTIVAVAVARELAGHCWALATMK

SEQ ID NO: 480402 - protein, 414 aa, unidentified
MSKNVKVIEYEQVISRGCGLDVHRDTVVATVMGSGIKTETRTYNTTTSSLNELGEWLSSLGVTDGAMESTGIYWKPVMHVLRVYPINLIVVNARHVKNVPGRKTDKKDSEWICQLLISGLLKGSFIPPEKIQNMRDLHRYKKKLIGMQSSEKNRIIKFLEDANVKLASVVSDTSGVTATHLINGLIEGRTDLDKLISECYHKKLKSSPQQIKEAITGRLTAHHAFILKSIQKHIKSIEEQITEIEKEIDKYIIDFEKEIELLRTIPGVQKEGAIGIISEIGVDMSIFPNEHHLAAHSGMCPGNNETGGKKKSTRIRHGNKYLKATLVELAWGATRTKKSFYKAKYESMVSRRGKKKALIAIGHKILCAAYLIIKNKEEFKELGYEYLLERKKKAKIEYLKRELKEFGYKIEKVA

SEQ ID NO: 480403 - protein, 343 aa, unidentified
MKITTVGIDLAKNVFQVHGVDERGKAVLKKPLKREQVAPFFANLPPCLIGMEACGSAHHWARKLEAFGHTVKLMAPQFVKPYVKTNKNDAADAEAICEAVGRPNMRFVPIKNGEQQAILAMHRARQGFVKARTAQANQIRGLLAEYGIIIPQGISHIAKRLPDILEDGENGLPGAFRQLLHRLGDHLKELDRQVGELEVQIQVWHRENEASKKLAQIPGIGPITASALVASIGDAKSFESGRQLAAWLGLVPKQHSSGGKQTLLGISKHGDTYLRTLLIHGARAVIRVAERKAGYAQSWLAQLIGRRNKNVAAVALANKNARIVWALLAHERDYQPGYEPSAA

SEQ ID NO: 480404 - protein, 405 aa, unidentified
MGKVFVGHDWAETHHDVYVEDGAGQRLGKARLDEGVSGVARFHELVSSFVDDPGEVTVATETDRGLFVGALVAAGYRVLAVNPMSAARYRERHSTSGAKSDPGDAFVLAELARTDGHHHRPVAADSELAEAVKVLARAHQSMIWTRQRQVNQLRSTLREFYPAALSAFDDLASSDALAVLALASTPSLGRGLSRSKIASALRRGGRQRRIDERAAEIQTILRADTLQAPGLIAEAMGASVRALVAVISEQVAQTARLEAELADHFELHPDAKIIRSLPGLGTILGARALGEFGDDPNRYTDAKSRKNYAGTSPITRASGKHHVVLARHARNRRLADVCYQWAFAALTASAGARAFYDQHRAAGDTHHQALRALANRLVGILHGCLRHRTPYDEHTAWGHRTAAAA

SEQ ID NO: 480405 - protein, 320 aa, unidentified
MSSESPASRVFVGIDIAKAELVIALRPSGQCWAVPNTPEAWADLAQTLASQQPERIVLEATGGLERPLATTLTAAGLPVAVVNPRQVRDFARALGRLAKTDALDAYVLAHFAEAVAPEPRPPLDAAAQELEALVDRRRQLRDVLVAERNRLRQADPVVRPGIERHVEWLEAEMETIEQELAERVAQDSIWQAKAQLLQSVPSVGPVIATTLLARLPELGTLGRKEITALVGLAPHSRDSGTMRGRRRIWGGRGDVRAALYMGAVNGLRWNPTIQAFYARLRAAGKPAKVALTACMGKLLRILNHLVATNQEWDATKLSPA

SEQ ID NO: 480406 - protein, 314 aa, unidentified
MRKMTETTIGVDISKATLDAHRLSDSAAAQFSNDEAGFRALTAWLKGGDIARIVYEPTGPYHRDFEVALQKGFPLTKVNPLQARRFAQSLGTRAKTDAVDARMLAMMGAALSLPPQPQMSGIQRDLKELHIARLALLKDRTRTLNRQGALTLGLLKRQAKARLKQLGAQLEAVDKAITDRLQSSPKTARATEIICSIPGLSKVSAAALLTEMPELGTLNNKQVSSLAGLAPMTRQSGQWRGKSFIGGGRKLLRNALYMPALVAMRHNPDLKSKYTALIGTGKPAKVALVALMRKLIILVNTLIREDREWEKNRP

SEQ ID NO: 480407 - protein, 388 aa, unidentified
MNNTNTNNTNKKQTHTQANKAAPEAKAKTIKLGIDVHLDRYVVVRIIDGGTPQPPQRFGPPEFLLWVAKQIMLADKVFTCYEAGPFGYSLHRKLEKMGVTNYVVRPRDWDEYAKKVKTDKRDAKQLALHLDRYVNGNHDAFCVVRVPSPQQEQQRSISRQRESFQRERQRLAAQGRSHALYYGEHIQGEWWQEEVWKTLAAQLPPIVVNLLEPLHRLMAVLEVELKTRTREVEAAAPEQLPVGLGKLTSQILEREVADWNRFKNRRQVASYTGLCPSEDSSSDRRFQGSINKHGNRRLRPVLVECLWRLCVFQPEYRVVKKWLPELSNPKTSRPRRKKIIVAMARTFAVDWWRVRTGRCQAQDLGFKLQAPSPSAKTKSAPITSSQNK

SEQ ID NO: 480408 - protein, 339 aa, unidentified
MNFIGVDLHKKLITVCVMNQNLKVTARKTLSCDQPDQIVEFFRQFAPFKAVIEATASYLWLVELLDPLAEKIALANPKKLRIIAESTKKTDRLDAQVLAEFLARDMIPESHMPTPRQRQHRRLVRHRQYLRSRLTSVRCRIRSILADYNADRKDLFSAQCGKAYFKQVALSDADRFVIKQMWAEFEDHQARLVALTKKIKTFAAKAPKREAEARQIVKTAPGVGFVTAEVVLSELGDVSRFRNAKTVCAYAGLVPSVRQSGGKRSKDLHITKEGSGLLRWALVESAWRLVTVNVKWAAIFSRLRKRSGKKRAIVAVARKLLCVLYAMLKTSTPYKVMTT

SEQ ID NO: 480409 - protein, 367 aa, unidentified
MTYFFGIDLHKTQFTVHYRTEDRIAKEIVQYATDGDGYAEFLRRIRSLRTRGYEVRIGVESTGNTRFFKNKVEQAGAVVTVINTLKFKVINESTKKTDRHDAATISEFLSKDMLPESYLCSKDTENIRRLLKSRERLVRSIVGQKNEVHALLVSMGLQDDLRSIQSKKGRQKVLDTLSSQSDLVLEAQTVKLLFEIIGRIEESVKKVEGQLHGLLDGDGMVRRLLTIRGCGPITAWTIRAYTEDIGRFASAKKYAAFCGLVPWVQDSNRTVHHGKITKRGPQELRTAFVQLVLGIRRCGDTGKWRLMQRYEYMKRGKGSGKSIVAAARKMAELVWTLLTDRVDFDSRRMEGNYTPPSESLAEQAAFA

SEQ ID NO: 480410 - protein, 348 aa, unidentified
MKATTIGFDLAKNEFQVHGVDAAGKAVVRKKLSRAQVLPFFARLAPCTIGIEACGSAHHWARKLTELGHTAKLMAPHFVKPYVKANKTDAADAEAICEAVARPNMRFVPVKNAEQQAILAVHRVRSGLVAERTAQLNRLRGLLAEFGLIAPRGRRALMERLPLLLAEETLPGVARNLFERQSARIRQLEADISAEEAVILAWHRNNELSKRLDAVAGVGPITATALVASFGQGREFDSGRQMAACLGLVPRQHSSGGKTRLLGISKRGDTYLRMLLIHGARAVIRTLERRATGASNPTDRWLAKLLARRNPNVAAVALANKTVRVIWALLAHDRTYDRNWSGQRATTA

SEQ ID NO: 480411 - protein, 373 aa, unidentified
MYQRTFIGMDVHARSVKICAITPETGEVQRAALAMDAAGVRHWILTHGGEISTVRATYEAGPTGYGLARTLAAAGIECVVAAPSRLIRPSGDRIKTDARDAEHLARLLSLGQVTEVRVPDLDEEAARDLVRLREDARMDLMRSRHRLSKLLLRHDLLYPGGKAWTADHRAWLEAIRFDISPLQMTLHESIGMVDTVIERRDRLDAQIELMATTSSYAPVVNALECLRGVGPLTAFGLAVEIGDWTRFTGNSIGAYLGLVPSEHSSGQTRSQGSVTKTGNKHARRLLVEAAWHHARPYYEPSSTLRRRWDAATPETRALAHRANQRLHQRWEAFEERKKRRCVANVAIARELAGWCWALAEPQQRTTEDTVMES

SEQ ID NO: 480412 - protein, 387 aa, unidentified
MPQPAAVLPHASPDYDRTLVLAIELSSKSWVLAAQVPGLAQVKAKRTIEPTKEALLGALASYRARAAAAGHQIERVVSIYEAGWSGFWLARWLITQGVQVHVVQPSSVLTDRRMRRAKSDGIDAELLLRTLLAWLRGEPRVCSMVPIPDQTDEDARRAVRERGELVAERVALVNRIGAVLATLGAGDYNPLLQSRRRRLNELRTGLGEPLPPHARAKIERLLARLELVLAHITELERERNAVAETAAPDHAARMIQQLAGLRGIGVQSATVLVREAFVRRFANGKALGAYAGLTATPYSSGGLEREQGIGKAGNRRLRSVMVELAWLWQRYQPGAAQVVWFRERVGKTGRRLRKVMVVALARKLLIALWRYVTDGVVPEGAAMKPAI

SEQ ID NO: 480413 - protein, 401 aa, unidentified
MKKLSGGIDVGSESHHIIILDEEDNFLYNQKVAHKLNEFTESIKLFRKIEKQEGGKISFALEGKNGYSAPLDRILLDQGFTLYNVDNLKLKRFREAFAGEWRDDERDSLMLSKMLKLKDYINSERERVFIKIEKPSLITEGLKLLSRHQQTLINEKIRLINRLGKKLLEVCPQILKLGKLKNKKIIAVLAKYPDFSKYKRITLKSLLKIKGIGKIKAPFLVKRLNNIEYMSGLTDIYQTIILSYAQRILKLQKEIEDIDRKLDEIGEKSEEVKHLKTIPGVATKLASRLIGEIENINRFPSEKQLAIYCGVACVDNNSGKVTKAKAVYKANKICKQTLITMAGCSIRFSPQCKAYYLKKRAEGKTHNHTLRCLARQLIKVIYKMLTEDRDYIVRKELRKVA

SEQ ID NO: 480414 - protein, 360 aa, unidentified
MNTCVRSQTLFVGVDVHKDTHTAVGVSPFGEKLFEITVGNHSKDFRSLSEKVESLKGSLSPYFGLEDCHGYGERLAEYLITKYPVIHVPSIMVDRLRQNATHPEKSDSLDALGVAKVMMQSIDTLPPYTLTEESKRTKQIKEISMDREYLVKERTRLKNQLHILFYRIWNTEYQTKFTNPFALKALKYWTKAKPSCDEFLLRTMKRKAKRLVDLHYEINELEKDMAILLAEGGYTLQTASGCGVTIAAEIIGEVGDISRFHSPGALAKYAGCAPRECSSGKKTRYRKTRSGNRRLNRGFHRMALSQISRMGNSKAKTYFAKKISEGKSKSQSLVCLRRQLINVVWMMLKHKTEYRCPQED

SEQ ID NO: 480415 - protein, 346 aa, unidentified
MEYIALDVHKNYTWARVENSKGERLYESRLAHAQGSIKNFVRRWSGGSLVAVETVGNWYWVVDEIEAGGATPQLVNARLAKLMMGSVNKSDKLDTKGINRLQRTGTLPTVWIPSSVVRDQRELPRTRMVLSSQRTQLKNRVHATLGKYGHTIQGASDAFGKKGRKIIEELLVKLPPHTEQTLRVVLDELDHVTDNLKQIEGQMLKSFSPCPQTNWLKSLPGVGDILAVVIFAEIGTIERFSRAEQLASYCGLVARENSSGGKIRFGPVRRDVNVYLKWAFVEAANSAVLNAGRCDYAHVSRLYGRLKPRRGHGKAKVAIARHLAEACFWMLKKGEPYREPMPSTQR

SEQ ID NO: 480416 - protein, 482 aa, unidentified
MAKRQSPPVEENQQRRFRRGRARAKGRLEDRQAAEVRRVEGLGVVNAHAAGIDIGSFSHWVCVGAGAAQELPAHTDGLHAIVVHLREQLVTTVAMESTGIYWIPLYELLEAEGFEVLLVDPGYTRQVKGRPKTDRLDCQWIYRLHSVGLLAAAFRPDEKTCQLRSYLRQRANLIRYGGQHIQHMQKALEQMNLKLTEIISDITGLTGENIIRAILRGVRDPRQLAKYRNCHCKASEAEIAQALTGTYRDEHLYALKQAYEAWRFYAKQRDEIDEQIQQQLARMKQDRNLPPLKPRKLVHGRKPNQPRFDVRTALYYVVGIDLTEIEGIEETTALTIISEIGVTMSKFATVKHFCSWLGLCPQIKKTGGVIKSSRTRPGANRAAAAFRLAAFGLHASKGALGAFLRRKKAHLGAPKALVAAAHKLARLVYYALKNGLTYVRQTQEAYETKMRAKQFQSLQRRARQLGFALVDAASGERAAFAT

SEQ ID NO: 480417 - protein, 370 aa, unidentified
MSVRRILAKTIDTDLEYEAIGIDLAKNCVSAALLTTDGEVVCIDRLDYSELEKSAQALSPTTFAMEPCTEMNYLVQKLEAWGHRCLVIGGKNVQNYVENHYSGQKTDLNDAQALAFLAQDTQLRTIKAKDIEQQKYASLTTLREQYIKQYRQTIVSLKGICQAWGLNISKGISGKARLKDLIENHAAFPEELKESLVDMVTHAQTAQKALNKITKTLEVLAKNDKVCQLIQTIPGLGTICSCRLRATIGDIKRFKNPKDFPAYYGLVPRSIATGHNEKKGKITHRGDRTMRSLMVQGAGCVIRLATCGKLKSKQLTKWILKKQKEKMPWGKLVCAVAAKLLRIVRAVLISNKPYNSKIAGVAKCSLSKGS

SEQ ID NO: 480418 - protein, 298 aa, unidentified
MNLTPETIPIDRYIGIDIHKYYVMVGGQNRRQEWTLRPRRIQMNRFRDWAEKNFRLSDAVVIETTGSVWDIHDIVSPLAGMTLVANARSIRQIAEAKVKTDKKDIERMLTQLISGTVPEVWVPPVHVRELRSLISFRWRLNKQITMSKNRLQSVAQRFNLDLPEGGLLTEKNRGWWEEQEFTDLTGFEVKQDLEIVKLLEDQKEALDQKLAELSNTEPWASDMVFLMQIPGMGLILSMAVLSAIGDITRFSHAKKLVSYAGLSPEVHASGETNRSKPITKEGRKELRWAMVEAGTQPM

SEQ ID NO: 480419 - protein, 415 aa, unidentified
MENITAVGIDISKGRSTVAVMRPGGKVVISPYDTGHSIEELNRLVLTLKLLEGEVRIVMEHTGAYYLPVASVLYDAGFFVSVVHAKLVHDFGNNSIRRGKTDPKDAIKIANYALANWTSLVRFQKQDDIRQELKKLNRQLHLYTKIETSMKNNLIALLDHTFPGLNKLFPPTQKANGHEKWIDFALRFWHRDCVCSLSRNSFAESYRKWCKKTGSYWSADKSNEVYDHACAQVATIPKNDTTKLMIRQAASQLNSLLETVLVIQNEMTRLASTLTEYKTVLSMHGVGKILASQLIAEIGDVTRFHSKRALTAFAGLDSPPYQSGQFELRERKISKRGSPHIRRSLFRVVTMILLNQRKDDEIFKFICKKRSEGKHYYVYMTAAANKFLRRYYGMVRDCLLTGCDIIKTNEPDHVA

SEQ ID NO: 480420 - protein, 352 aa, unidentified
MVIVIGADVHKATHTFVAVDEVGRKLAERTVRATTSGHDGALRWARAAFGPELRWGVEDCRHLSARLERDLLAAGQRVVRVPPKLMAQTRASARERGKSDPIDALSVARAVLREPGLPAASHDAATRELKLLVDRREDLVGERTRQINRVRWHLHELDPEFEIPVKALRSRKQRDRVAGWLSDGTGLVAELARDVLTDIVTVSEKIDALEKRVTLLVEQRYPHLLAIPGCGPLAAAKIAGETANVSRFRSEACFAMNAGVAPLPVWSGNTRGRVRMSRAGNRQLNAALHRIAVTQIRLDSPGRAYYRKRLDTGDSRVEALRCLKRKLARIVFHALHTDQQQIETPASQPLVA

SEQ ID NO: 480421 - protein, 368 aa, unidentified
MKQQTSATTETNIKGRNIIDFTGKTIYVGIDVHEKDFQVAKVLGDICLGNHRMPATGQGLIDHLRTHYPGAGFKCVYESCAWGFTLQRQLQQAGIDCIVVHAADVSSSDKEKKRKTDKVDALKLARNHAAHQLTGIHVPNEEIQKQRNLIRFRKKIVGDLNRSKNRLKSLLKYQGINIPEQLGKKNNWSYNFMNWIEEVAKKDVLLQDTLLLMLEEVKLLRQLLLKTERALRKLMQTSYNDKAKLLMTTPGVGRTTAMLFLLEIGDIQRFGPFDRLNDFVGFCPDTDSSGEIDRDTGITSRRHKQLRSALIEAAWEAVRIDPALLDMYQKLTKRMKGNHAIIRIARKLLRRMRAVLVSGIPYQKGVVV

SEQ ID NO: 480422 - protein, 390 aa, unidentified
MRGLDYIGFDVHKKIINFCAKASDGQILDEGKIAARRVDLNAWAKARSRPWMGAMEATLFTGWIYDLLLPQAQALKVAHPAMLRAITAAKKKNDRVDARKIADLLRCNLLPECYMAPSQTRELRRILRYRNLVVREATRMKNRISGLLMETGTPYNKGKLHGKTYFAELLGTLQETPASVRDLLRLSRGQLDLFESIQSRLVKELVCNPELAERVERLRSINGVGAILALTWILEIGEVKRFASIRQAQSYCGLTSAQHNSAGIEHRGPISKQRNKHLQTMLIEAAKLAPRFNERLAAVHVREMGHGNRNRATLAVARKLVAYLMAVDKSGQPFQTRTSEASVVVHQESDRSVGRIGKGHRCGNGLGVEPVHYGKLGFTWCEDESRTPSP

SEQ ID NO: 480423 - protein, 420 aa, unidentified
MNISIMSQFDSNFIIACDVSKDTINLVVKSANHCIEREIQNYTVDLENELIQLKAFAKKCGVSKIWVIAEPTGIYHKNLFRTAKRLGLHTAYVSGESVAKMRIIETNDTGKTDIKDPHVIHSLASMGKTLKHRSLSEPYNLLRRWNKIYDLADKNAVRSKAAIRTLIKELFPDFDKKKEFIFGNSGRALMTKYKCNPYRIVRSGKNRFSCCMKKAVPRIQNNTIDIVFNQAMTSVRNNVNPDYIELIELELIQRWQDLNTNIERKEQAKESMEKLYVQARRIDPNLPEACKGFITEFHLARIIAETGPISDFKSWRKLMRFAGFNLCERQSGKYRGKTRISKKGRRLIRKVLNLVILPLIKKKGLYGTYYHRKKETMPGTKAMAAVSRHFLKMLYGVYRTGSEFNVDRVFLCESQINQAA

SEQ ID NO: 480424 - protein, 325 aa, unidentified
MSDSVTVGIDVSKLTLDVHVSPAQLRQTLSNSDAGFEELKTLLSMQQVSLVLLESTGGYEDAVVCFLQSLGYDVSVINPRQARDFARSMGRLAKTDRIDAELLAQLASVIDSRSDRAHFVKKITDDRRRKLASMVARRRQVVNMISTEQQRKSAASVYSTESINRVLSFLRSELKSIDADISLHVRSHFADISGLLASFKGIGPATIGVLLGEVPELGRLNRRQISALIGVAPFNRDSGIMRGRRTVWGGRTMVRNALYMPTLSAVRFNPVIREFYTRLISQGKPRKLAQVAAMRKLLCIINAMLSSGTMFNPALHLHSVQEAQQ

SEQ ID NO: 480425 - protein, 359 aa, unidentified
MDVRDPAKRHVVGGVDTHKDLHVAAVVDERDRVLGSRSFTTTRQGYRQMLAWMGSFGEVQRIGIESTGSYGAGLLRFVQTVGIEVLEVTTPDRHDRRRRGKNDDLDAQNAAHAAFAGQRTVTPRSRDGMVESLRVLSACRKTAGAARRVALQLIQNTIVCAPDGLRDDLRSMTRMQLIRTLAAWRPDLTAYRDVEAAYRITFKSLARRYLELHDEIADLDVMIGAIVDELAPDLVARNSIGHVGAAQLLLTAGDNPDRLRSEASFAALCGTSPVPASSGKTIRHRLNRGGDRHANSALHIIAIGRLRTDPKTKIYVAKRIAEGHSKLEALRAVKRYIAREVFTLIMRRHKTINQTQIAA

SEQ ID NO: 480426 - protein, 343 aa, unidentified
MDKNMMIGVDLAKNIFQLHIATMTGKVLSKKKLSRDRFKEFMKSHEPALVVLEACGSAHYWTETLGDMGHDVKLIAPQYVKPFVKRQKNDAADAEAIVVAAQRPEMRFVAAKTKEQRSKAVLFRSRDRLIHHRTEHVNALRAVLYEYGYVIPQGIASIRRIEDILARPNCDLPDLVCDECRHLLEQISSNTKLINAKTDLIKQLAKQTNMARQLQTIPGIGPMTAMAIDAFAPPMDLFKNGRGLSAWLGLVPRQYSSGGKERLGRVSKAGQADIRRLLIIGAMSRLNWLGRKSIPEESWLGKMLARKPKMLVAIALANKMARTIWAMLTKETDYRDPTISATA

SEQ ID NO: 480427 - protein, 409 aa, unidentified
MLFVGDDWSEDHHDIEVQDEAGRVLARARLPEGLAGIDRLHMMIAAHTGDDAVDLEATVGIETERGPWVQALLGSGYRVHAINPLQVARYRESHHISGAKSDAADAHVLAEMVRTEGHRLRSVAGDSERAGAIKIVARGHKSLIWERTRHTQRLRVLLREFYPAALQAFDDLSAAEALELLAKAPDPVSAARLSITQITAALQHARRRKVAAKAAKIQSALRSPQLRQPELVTAAYAAQVRAQVAILGTLNAQVEAMEEQVTTHFSEHPDAEIYLSQPGLAEILGARVLAEFGDDPDRYSDARGRKNYAGTSPITRQSGKTKLVVARYVHNDWLLDALGRQAFSALGSSPGARAYYQQLRDRRVGHHAALRQLGNRLVGILHGCLKTHTRYDETTAWSHRPTAKLDSAA

SEQ ID NO: 480428 - protein, 379 aa, unidentified
MSRTPRIPEPSHLPTSSPDIASAQVVEEAVLGVDTHKDVHVAAVISGLGVLLGTRSFPTTASGYRQLLDRAGGFGTIRRAGVECTGSYGAALARHLSANHIEVIEVNQPDKASRRRRGKTDTVDAEAAARAVLSGRARATAKAGDGPVEMLRIFKLAKTSAIKSRTQAINQLKAVLVSADPQLRESLSGLRNPTLIRRCAQLDTSPPHDAPAVAAYTLALLGRRILELTTEIDDLNQQITAILTRHAPTLLQRIGVGPDTAAALLIAAGDNPERLHSEASFAALCGVSPVEASSGKTHRRRLNRGGDRRANSALHTIVLSRLRWDRPTRAYPTRAYLARRLTEGKTRREAIRCLKRYVARELYRLIAPPTEPQRQTPAA

SEQ ID NO: 480429 - protein, 343 aa, unidentified
MEHFAGLDVSVKDTSVCIVDETGKIVREVKVASEPDALLTVLKNRTYHFKRIGLEAGPLSQWLYSALAEAELPVVCVETRHMQAVLKAQINKTDRNDARGIAQMMRVGLYRPVHVKTLRSQKLRMLLTHRKLMLSKAIAIENDLRGTLRNFGLKVGMVGTVKFEARIKELIENLPDLAVLVEPLLVVRRVLREQIGILHRRLLVIVRDDAVCRRLMTVPGVGPVVALTYRATVDVPARFRNSKAVGAVFGLTPSKYQSGEIDRTGAISKCGDEMMRVMLYEAAQVMLTRTNKWSWLKAWAMKIARHRGMRKAIVALARRLAVILHRIWVDGTDFRWTREVAAA

SEQ ID NO: 480430 - protein, 349 aa, unidentified
MKLIRVGVDLAKNVFQVHGVDRSEKPVWRRRLSRANWLKTLRETVEPGCEIGMEACAGAHHWARQLQQRGYAVKLIAPQFVKPYVKSNKNDANDAEAICEALGRPNMRFVAIKTVEQQDVQAAHRIRAGLIEQLIAKANQIRGLASEYGLVAPKELVHLRRAIAHWLGDAENGLSVRFRRLLHGLSEDLAGLDARVGELNEEIASIARADPLAQRLQQLRGVGPMIATALVATVGDVRQFANGRQMAASLGLTPKQNSSGGKARLLGISKRGDAYLRCLLVHGARAVIRTARTKADPLSRWVMRIATQRHPNVAAVALANKTVRIAWAMMRYGCDYQPRLALAQHASQS

SEQ ID NO: 480431 - protein, 315 aa, unidentified
MLDETTVVATDDGLLTWAGQLAGERLWALGDCRQLTRWLERELLAAGEELVRVPPKLMAPERRAGRARGKSDPIDALAVARAALREPRLSRPRPDEQPFRDLKLLVDHREDLVDERRRAQQRLRWHLHQLDPSFVVPARRLDRSMHLERVARWLARREQEVQVRVARELVARCRSLTRTIVELDAELERRTAETAPALLELPGCGALTAAKLLAEVGPIDRFQTDAQLARHSGVAPLEASSGRVQRHRLDRGGNRQLNAAFYRIAITQARYHPAARAYLERKQAEGKSRREAIRCLKRQLARVVFNTLKTSPALT

SEQ ID NO: 480432 - protein, 404 aa, unidentified
MTDTDHIGVFLGLDVGKSAHHGHGLTPAGKKVFDKPLPNSEPKMMAVLDKLKAKFGTVLVVVDQPASIGALPLTVARQSGCEVAYLPGLAMRRIADLYPGQAKTDAKDAAVIAEAARTMAHTLRSLETKDEITAELTVLVGFDQDLAAEATRTPNRIRGLLSQFHPALERVLGPRLDHPAVTTLLERYGSPSALRKAGRSRLVEVLRPKAPRMAARLVEDVFTALDEQSVVVPGTDTLDLVVPSLARSLAAVHTQRRRLGEQINQLLEAHPLSQVLISMPGVGVRTAAVLLVTIGDGTAFPSAAHLASYAGLAPATRSSGTSISGEHAPRAGNRQLKRAMFLSAFACMNADTASRTYYDKQRSRGKTHTQALLRLARQRINVLFAMLRDGTFYQSRPPAVDLAA

SEQ ID NO: 480433 - protein, 340 aa, unidentified
MTITTVGIDLAKNVFAVHCVDQNGKTVLVKPKVSRAALPELIASLPPCVIGMEACSGAHYWARVFRQYGHEPRLMAAKFVSPYRMAGKSGKNDAADAQAICEAVRRPHMRFVPVKDESQQAMQCLHRTRQGFIEEKTATYNRLRGLISEFGVIAPQSTDALRHIVSEQKNSLPLQVQQCVDDLLEHINRIEDNIAEYDRILSRMAKTDHRSQRLMELKGIGPTTACALVASIGNAHDFKNGRQLAAWLGLTPSQYSSGGKSKLGRITKAGDSYLRTLLVQGARSVLIGAEKRTDSFSRWVCKLVERRGYWRAVVVIAAKNARLCWASLHYGDDFRLYSAS

SEQ ID NO: 480434 - protein, 321 aa, unidentified
MTIIGFDVSKNELVGARTNKSGLLKESIILENTQSAIAQFLDEATQLYPSMLVASEATAEYHRVLAEECIGRSVSFRLLNPILTKQFTRATIRKQKTDRTDALIIAKLALAGEGTVLRKESLHPAKSIARVAYKLARLEKILAAMRSRVLRVFPEEVEMSAVIEQPRKVIGDSVRILRNCLATRIDSKLALLLASIPGVGPTLAATFIAEIGSINQFPSGKALVAYAGLDPRVRQSGISLRRNTKLTKRGSPYLRKAAYIAAYIAKRHDAELGAYHAKKILEGKRYKEATVATARKILYRVYAVWKRGTPYQKHTLSTIIA

SEQ ID NO: 480435 - protein, 339 aa, unidentified
MSKLFKNFVGIDISKTWFDAALIKDDDSSVVIHERFSQKPDGFIQMQNWLQKLGVLPDEQTLFCMEYTGIYNIGLVHYLVKAKAALWVEMPLRIKKAGGFERGTDDKAASVKIALYALRYKDQVKLWQPIDSNIESIKNLIAQRDRIVNAIILLTVPVNELKDCGCAETAKTLEKLQRAPVAALQKSKLSVEALIAKTIQQDEQLNTKVKRVASIKGIGQVTSVALMVYTKGFTAFENGKQLACYCGVVPFTKSSGTSVRYKSTVSPFANMKLKKLLHLCAMSAIQNDAEMKAYFERKVKEGKNKMSVINAVRNKLIHRVFAVIRDERNYENNYVRNCA

SEQ ID NO: 480436 - protein, 487 aa, unidentified
MNSKYGISCKKASLHNLPEKGGAMAVLNVGIDLGVTAKHYAEVINREGIRVCSSVAFPGTTEGFDMVSKHALEHVAEGTKLRFICEPTSMSWFPLAVYAKKYGHEMMRVKAQKSHALRKYYSKHSKSDKLDARTLAMMPIVDRESLEEVYLPDKLTNALDRRCRQREKIAKEIASIKTRVKSLYHWVMPGLTDCFEDPYGERAKAFYKKYSNPFRVKRLGISRLRIFLDKAGRQQSSDGLAQRVYDAAIRGSALYDHSDKYIDFDELQKEVECELHLLESHEKVQKKVDEAISRLYVCVDPNKNLETIPGIGETLGPVFLGIIGNSERFSSQSKARSYSGMIPKQNDSGESSKKGLTITKDGPSRYRRALFLASDTGRQWDPQLSKVYYDQMVNKGNCHTQAVCAVSTHMVGRIVRVLKEKRPYELRDLEGRPITKKEAKILITREFTVPEEVRKRTRSRRIKKGYERDQIQGIAQMQSSRSSAYPS

SEQ ID NO: 480437 - protein, 480 aa, unidentified
MPGNPRCCYVRVCQSPVLNWGSAGGALESHRCGGVLLQEVARRMKVLYERVAGIDVHKEMIKVAIRSPGDKPWTRKTEILEYRTFYGVLQQMARELRRRAVTHVVMEASGVYTEPVYYALVEQDFTQVAVINPAHAKALRGHKTDAKDCARLAELFECGLLRGSYIPAPELKEVRDLTRYRMKTVQARTSEIQRLGKALESAGIKLGSVASSITGVSATAMIEALIDGERRGQVLADLAIGRMRSAGKLADLSMALTGRFTEHHALLCRLHQDRIAGFDVAVAGLDERIAGKVTRWQREADLLRSVPGFGDVVGQAWLGEIGPAPHRYFSSHEKLACWVTLCPGNNISARKRKHGRTGDAGTYIKPMLVQAAWAAIRVRGRLQARYNRLVRRFGGDKNPAAKKKAITAIAHTLLKIAYQVLKSGAPYQELGADFYTRRESPEHKQAWLERQLQKLHPGCTVTITIRPAEAALTPEFNPTP

SEQ ID NO: 480438 - protein, 331 aa, unidentified
MNAHVGIDISARSSAMGWRQNGKAAGNGDIQHTPKGRKAATEKLLRLKPLSVVMEATGIYYLDLAMELHAAGLPVSVINPKSFHNFAKLMLQNSKTDQIDAQLLAEYGERMGPRLWVPPTAEQMMLRAIGRHINRLIGHRTRAKNELHALQATETSIALLIEDEKDAISALDIRIERLKQAARDAIAKCPDLSLQFRCMMAAPGVGEASAIATLAELTTLPVTLRSAQVSRHAGLDVRLTQSGTSVNRPGRMSKCGNAYLRAAMFMPALTAIRCDPYVKAFYEALVGRGKKKMQAIGAVMRKYLTGLWACMRAGENFDTAKLFSKIHLPKA

SEQ ID NO: 480439 - protein, 363 aa, unidentified
MTANPAVPTGQPADEEVILGVDTHNDVHAAAVITVLGVLLATQAFPTTGAGYAALLNWARTHGTLRRAGVEGTSSHGTALTRHLRREGVHVIEINRPDRAARRRRGKTDALDAENAARAVLSGRATAEAKAGDGHVEAIRMFKIAKDSANKARTQAINQLRAVLVRADPPLRESLAGLGPVTLFRACANLPTTDTTTTGAATVMVLRGLARRILTLTDEVKALNRQITAVLKVCAPKLLDRHGVGTDTAAALLITAGDNPQRLTSAAAFAALCGVNPIEASSGKTTRHRLNRGGDRRANSALYTIVLTRLGRDRRTREYANRRTTQGKSTKEIIRCLKRYVARELFPIIAAALTPATTPPTTT

SEQ ID NO: 480440 - protein, 355 aa, unidentified
MNTNIKYIGIDVHQATSVFAVMNPHGKMVGEATLETKPATIIDFLKGQRGTLWVTFEEGTYANWLYDVIEPQVAKLVVCDPRKNKLDGNKSDKIDARRLAELLRLNALTAVYHGKYGIRTLKELARSYVSLQQDSTRVMNRVKAMFRSRGIECRGTSVYQPKNRQEWLEKLDGQGPRHRAERLLKQLELLQELGLEAQKDLIREGRRHKSYKILRGIPGLGPIRVALILAFVMTPYRFQSKRQFWTYTGFSVVRRGSAEYEITEGELKRTKNKPLPRGLNRNYNHVLKNVFKGAALTAAYRGPFQKAFDRRVADGVAPNIALLTLARKIASITLALWKKGEPFDIKRHCLGEQTT

SEQ ID NO: 480441 - protein, 411 aa, unidentified
MNNTLFVGIDISKRSNVATFMNCEGKVVGRLTFSNSGSGADRLVAKILSYYEKEDFEAIRIGMENTSVYSKNLVWFLYEHEALNEHKLSIIPLNALMVANYKKSFLDMDKDDITDSFAIADFIRIRPGLLPFKLDDRQEALKIMTRSRYNYVQALSRMKSQFLTRLFLSFSEMEAGKPFYSIFSKTSLSLLEEAFTLDELAEKPIPELVEFLQEKGGGKFQNPEEIAKVLKKAASSSYRVPAMVRESLNRTMASDMEIMRILENEIHNCDKNIEKLMKSVPAILVSIPGIGPVLAAGIMSEIGDISRFQKQESLGKMAGFKWKRNQSGKKESEDKAAVLSGNKKLRYYLVEAANRVRIHDPVFEAYYRKKYAESKTHAHKRALILTARKLVRVIFYLLKENKLYKPDVGIS

SEQ ID NO: 480442 - protein, 371 aa, unidentified
MADYREVFVGIDVAKLKNAVAVAESGREGEVRFWGEVDASDANMRRIIQRIAAKFDHVHFCYEAGPTGYGLHRLIRSLGHECVVVAPSLIPRKPGDRVKTNRRDALALARLLRAGELTEVWVPDEGHEAMRDLVRARAAAVETLRVHRQQISAFMLKHGRIYPRKKAWTMRYLCWLQEQQFDHPAHQIALQEMVEAVRVSKERVGRLETVIEEFVPNWSLAPVIRALQTLRGVDLIVAVTFATEVGDVSRFESPRQLMGYLGLVPGERSTGETVRRGSITKAGNGRVRHMLVESAWTYRHPPKVGARKLYRLQEAPPKVREIAWKAQSRLTARYRMLAGRGKRTTVVCTAIARELAGFMWAVAREAQSIRS

SEQ ID NO: 480443 - protein, 341 aa, unidentified
MSIITVGIDLAKHVFAVHGVDDNGKSALVKPKVSREHLLPLVAQLPPCVIGMEACSGAHHWARLFRQHGHTVRLIAPKFVTPYRLGGKRGKNDAADAAAICEAVTRPNMRFVPIKEEHQQIILCLHRTRQGFVEERTATYNRLRGLIAEFGIVLPQKVANLRRHIGARLEDLPGFANQCVGDLLSHADQLDVRIAEYDRLIAKVAREDARSKRLMQRPGIGPVTASALLASIGGGHDFKNGRQVAAWIGLTPGQHSSGGKDRLGRITKAGDHYLRTLLVLGARTILNTLGDKQDHFSRWARNLVARRGYGRAAVAIAAKNARLAWAVLRYGEDFRLSPSAA

SEQ ID NO: 480444 - protein, 329 aa, unidentified
MKQFLVVGVDVSKATLDICFKPTGAMVHINNNLQGFKNWYKELKTRLQPETTVMVIMEHTGGYSLRFESFLRAKSIDHCKIAALQIKRSLGMIRGKNDQVDAERIAEYGWLRREILTADKPCLEGIERLRQLLSLRAKFVRDRTGYICRIKEMKTAADYSKKDPLLHIQEKLIATLTLNIKMVEQQIDELINDHTELKRTYDLLRTIKGVGKIVAAYMVSCTNNFKRFTNARKFNCYAGLAPFKNESGTSLKGRARVSQLANKEAKALLSLAACCAIRCDNELRAYYTKRVAEGMKKMSCLNIIRSKIVSRIFAIAKRQTPFVILELAA

SEQ ID NO: 480445 - protein, 326 aa, unidentified
MTLSHITDNIFVGIDVGGAGLDVAWHRGDSAHYANRPDAIATLVQRLRTGPEVTRIVLEPTGGYEKPLVKALRQAQLPVEVIHTTRFNAYRALVGVKAKSDTSDAKLLASYAAAPDEVRGRKAGYVELPEDAIREALSELASRRDQLKHMIHAETCRLGTVRMVELRQAITAHLEVLRAEDKQVHRMMLELVRQRIDLRRDQRLLKTIKGIGVKSALSLLASVPELGRIDNKAAAALVGVAPFVRRSGTMNAPARIHGGRAAVRSILYMAAVTASRYNPVLRPFYERLIAKGKPPKVALIAVLRRLVVFANAVLRSGQPWRGAVTP

SEQ ID NO: 480446 - protein, 395 aa, unidentified
MQRDTKEVLAELVGKLKEKLDPKKVAATSAGEKLPSGELRPNLDRLTVGVDLGDQWSHYCILGLEGETLAEGQLRTTQQHIAEFFQALNAARVVFEVGTHSPWVQEVICGCGHEVLVANPRLMEGSKRRKRKNDRIDANKLARLGRVDPQSLHPMRHRSKEVRQDLVVLRARDALVAARTELINATRGLVKSMGARLPKCSSPSFAQKVEETVPVELRDALLPLVRMAATLSDCIQGYDEKIEKLGREKYGHTALLRQVKGVGPITALAYVLTLENPDRFVKSRDVGPYLGLVPKQEDSGESQPQLGISKAGDTMMRRLLVGSAHYILGPFGPDTDLRRYGLRLCERGGKNAKKRAAVAVARKLAVLLHCLWVSGEVYEPLRQDMSATIAPAVAA

SEQ ID NO: 480447 - protein, 405 aa, unidentified
MEELLVGVDWSQSHYDIAVVAPSGALLSQFRIAKTAPEFSLLAEKIDKFGVPAGNCLIGLETAHNILIDFLWSRQYAAYVIAPSIVKSSRGRFGNSGAYNDAKDAHLIADLLRTDRERFAPWRPDSELLTRIKTKLGHVDYLTKLTTSHTNRLRSILLRVYPQVLQAFNDVHVCLALHLLVAYPTAITLARLSYADFAAFCRHQRCHRLDWITTWYSRLQQPQPSVQASMAAAYQDEIGFIAQQLLWLIQEKKQALQQVQVIYQQHPDRPIFASLPGAGDMLQPKLLVMFGEDRARFPSPQDIRALAGTCPVTKQSGKRRHIQFRRACNHGFRETAQQYAVASVQQVDWAAAYFTSALSRGLRKNHAYRCVANRWLGIIWKMWQTHQPYDETYHLKQIHHQRRPT

SEQ ID NO: 480448 - protein, 413 aa, unidentified
MQTVIERSAALDVHKASVTACVRVPANGGGREQHVEEFAATVRGLLALRDWLDAFGVEQVAMEASGVYWKLPWAILEDEFECLLVNARHVKQVPGRKTDVGDAEWLCRLVEAGLLRANFVPPKPIRQLRNLTRYRKTQIQERAREVNRLHKALEDAGIKLDCVASDIMGKSGRDMLDALVAGERDPEVLANLARRQMRKKIPALREALEGRFEEHHALWIGAILAHIDFLDQQIDRLTAAIGEQIAPLAPAVGLLCTITGVQSRAAEVILSEIGGDMSRFPTPRHLASWAGQCPGNDQSAGKRRSGKTRDGSKWLDWTLEEVALAAVRVRGTYLHAQYQRLRPRRGHKKALGAVKHTVICAVWHMLSTGETYRDLGSDYFTHRDPERRTKRLIQQLEQLGHTVSITTAPAAQT

SEQ ID NO: 480449 - protein, 357 aa, unidentified
MTTTTSMSEASGQRRVIVGVDTHKDAHVAVAVDEVGGRLGSASFSADRDGYRALIMWAMAFGGTVIFGVEGTGSYGAGLASAIRRGGLGVLEVLRSDRRDRRLRGKSDTIDAENAARAVLAGIVHAIPKTGDGIVEMIRVTKVAKDNAVKARSSAMISLKQVLVNAPDDLRQSLQGLPRMTLIRRCAGLQLGPVDSVTAATKNALRAIATRWLGLDEEIKSHDLLLASLTSTVAPTLVEAFGIGPDGAAEMLIVLGDNPERIHSEAAFARLCGTNPIPASSGKTTRLRLNRGGHRQANAALYRTVIVRMQYHEPTIAYVTRRTAEGKTKPEIIRCLKRLLAREVWALTRDFRQPQRA

SEQ ID NO: 480450 - protein, 370 aa, unidentified
MTEISALTFVGMDVHRDTIAIALLRPGEQIPLEQSITNTAEAVRRQLRRWGDPGSLRVCYEAGPTGYELQRQLAAAGVDCAVIAPALIPKRPGQRVKTDKRDARMLCRLFRAGELTPVRIPGPDEEIVRDVIRAREDLTEDILRARHRISKLLLRHGRVYREGKTWTARHIAWIRAQRFGSDRLEQLVGHQLAVLDARLGQRALLDAEISAIAQSEPYAERVRLLSCLRGIAELSALTLLVEVGDFHRFTTARAFMGFTGLTATEHSSGPSRRQGGITKTGNAHLRRILVEAAWHAQRRPHFGATFRRRVVGQPPEVVRYAMAAQERLHRRYWRMAERNKPTQVATVAIARELAGFVWGLMTGRTTPTAR

SEQ ID NO: 480451 - protein, 413 aa, unidentified
MRLFAGDDWAEDHHDVELMDSAGRRLAKARLPEGVAGIARLHAMIGGQLGEDADEDDAGQVAIGIETDRGPWVAALIAAGYTVFAINPLQASRYRERHGVSGAKSDAADAHVLADMVRTDSHQLRPVAGDTAQAAAIKVVTRTHKTLIWERTRCTQRLRHALRDYFPAALEAFEDLDAADTLELLAKAPDPASAARLTTAQISAALKRARRRDIAAKAERIQAVLRAAHLGQPDVVAAAYAASVRALVAVLITLNEQVKTLQGQVEAYFGQHPDAEILLSQPGLGPVLGARVLAESGDGPGRYISAKARKNYAGTSPITRASGKKKTVMARHVHNDRLIDALISQAFTALRTSPGARAYYDHQRARGAGHNPALRQLANRLTGILHGCLKTRTLYHEATAWPQYAATSEKTAA

SEQ ID NO: 480452 - protein, 324 aa, unidentified
MFYLGIDVAKAKIDCCLILENSANKKKTKTFSNTPKGFEQLQIWLNQHAATSTQTIILMEATSIYHELLAKYLFDEGYQVSITNPARARYFAQSMSKLNKTDKVDSEVLARFAMTANLHFWQPLPKHIQLLNALLDRRAVLCEDLQREKNRLEKAESTFTMEPVLQSLHKSIEQLNKHIQGIDQQIDDHIDQNPDLKNDKELLSSIPAIADRTSLLMLSFLRSHTFERASQAAAFVGLVPTQKQSGSSIHGRSHLSKAGSSKIRAGLYIAAIVATRHNPHIKGMNERLLANGKTKMMAIGAAMRKLVHLCYGVLKHQQPYQADY

SEQ ID NO: 480453 - protein, 351 aa, unidentified
MKLEPTAQPKLYIGIDIHKRSWKVHCATDLFGGKSFAMPPKPEVLYEYVAKHFPDHQVTTAYEAGCCGYYAHRSFEAYGWHSLVVNPADIHRKGKERFTKTDKIDAQLISRELKDGRLESIHVPDVEREQLRSLFRRRNDLVKDYRRIKSLIKMQLLYFGIAIPEEFDNDHWSHKFRDWVDDVAFAYPSARETLDSRMRSFRFIDQELRDVSTKMRAYCRKHYKKDYYLLKSIPGIGGIVACGIICELGDLRRFNSIKHLAGYVGLAPGIHQSGDNQKSTGITMRAHRLMRSYFIEASWQAIRPDPIMQAYYRRHLGKNVKSIIIKVARKLLNRTLAVIKTETPYAIGVIE

SEQ ID NO: 480454 - protein, 397 aa, unidentified
MYIVGIDIAKRKHEAAVIDGDGAVIIKPFSFTNNCSGYNRLLAMLTKAKLPLDEVSFAMEATGHYWLALFTRLQKEGFRVQVINPVQTNSIRSFYIRQAKTDPRDALLIAEVIRFGHFSESTLHPENIYELRELCRGRHAIVSMQADVKRKVVALLDQVFPEYETAFTNMFGDTSMAILQACPTPKELSEMPLEELCHLIEVSRHKRFRMAKAQELQALARGSFGFAMAGDVFSTMIRLYAKHLVFLKQQVREMDRKIAEIMDTLDTPITTITGIGPTLGAYILSEIGDISRFSSAAKLAAYAGIDPTMRQSGEYNGVRNRMSKRGSPYLRHAIWLAASSAVLHDPALKLYFQKKRDEGKPYMASVGHACRKMVSIIYAVMRDNKAYTPCIPNEISA

SEQ ID NO: 480455 - protein, 439 aa, unidentified
MQLAPATVKTSTQMLWGMRRGKCTGRRSVKTSVASIGAQAKPTMEPPMRKPKRRKPFNDLSRSPTALNVNETLIAVVELSQKTWLIAGIIPGIERQPLKKLEPDENAVLNLLDRWRREAEKAGHKIKRTAVAFEAGRDGFWLARWLRAYGIEAHVIHASSVAVPREHRRAKTDRLDTELLKRAFLGWLRGEREHCKMAAIPTIAEDDARRPSRERESLVGEQTRIVNRMKAALARLGIRDFNPKLGKAADRLEDLRTPEGEPIPPNTLSELRRHIDRRRLIMHQIRQVEAARLERLKQATRSGSHAMVRLLARVKSISVETADMLVHEALSRNLRDRRAVARYAGLTGSPEESGNKRREKGLARSGNIRVRRGMIQLAWRFLRFQKDSALARWYRARTDNVPGSRKKMIVALARKLLIALWQFVREGVVPEGVVFRPAQ

SEQ ID NO: 480456 - protein, 342 aa, unidentified
MTYYAGLDVSLKETKVCVLAPGGRIVARGSVATEPAAISAWLAAQAPGVEVAVLETGGLSSWLASGLVELGVRAVIVDARLAKKALSGRANKSDANDAEGLAWLALTGWYRRVAVKSEAARVRRGLLVARAQLCSQRRALENVVRALFRGFGMKFGAAGKRAFEARARDLLEDRPELGDAVLALLAARRVITAEVRGLETGIAAAARDCTVCRRLMTVPGVGPMTALAFTAAIDDPERFKDSYDVGAYLGLTPRLFQSGEVAYNGRISKWGDALARHMLYEAANSLMARVKAWSPPKAWAARLARKLGGKKARVALARKLAVILHRIWLEGTSFKWTKEAAA

SEQ ID NO: 480457 - protein, 284 aa, unidentified
MDNFYFIGVDVSKKKLDFCVLFEGKVLREEQVSNHQQAVARLIGELKNDLEMDNEQFLICAEHTGQYTFPLVCACKSVECKLWLENPSQIKYSSGMQRGKNDKVDAKRIAIYASRFGDKVKYYDRPSEEIERLKQLERERALYVTDLAKYKGQMYDQKDFMPAALYRKKTKRMKGLIQELQAAIDAITAEMEKIIGSTEVLARQMELLMSIDGVGKVVALNVIIETEAFSRFDNPRKFCCHAGVAPFSYTSGSSQHSKNKVSHRANKNIKKLLHMAAVSVTRVN

SEQ ID NO: 480458 - protein, 386 aa, unidentified
MPKSNDLSRSLVTLDQASTLIAVIEMSESSWLVGAIVPGLRREPRKKLAADEAALLRLLERWREAAEKAGARITRLVVAYEAGRDGFWLARWLRARGVEAHVIHPTSVAVSREHRRAKTDRLDLALLKRSLLGWLRGEEKHCSMAAIPTLAEEDAKRPGREREKLVGERTRLVNRMKAALARHGVRGFNPKLKKAPARLEALRTAEGVLLPPNTLAELRRDMQRFGLVNEQIKEIEATRLERLQEAPDEPAHAMVRQLACIDGIAVETADTLVREVLSRDLRDRRAVARYAGLTGAPDESGKRRREKGLARAGNARVRRTMIQLAWRFLNFQEDSALAKWYRARTEDTSKSRKTFIVALARKLLIALWRMVTTGEIPEGLVLRPAP

SEQ ID NO: 480459 - protein, 400 aa, unidentified
MARRKYDRPRVLARRRPSGHIEREVTYVIAGIDTHKDTLSVAVVDDSGRLVAGGDVPNTERGFAQLVDMFTAHHVQRVGIEGSGSFGRAVAVHLALCWQSGQPVAVVEVPTLMTSRERHGQLGKGKTDPVDALAIARITAREQQLPPVRLTVGAAADLRALLDYREDLVRERGALVNRAHAELGGLRPGYQQQIPALTTRARVRAAVDLLGDDSSIRATLCRRRLERVIALDAETAELKRQITRLVAAADTTLTDLYGVGPLVAARFIAEVVDIRRYPNRNAFASANGTAPLPASSGRTVRHRFNPGGNRQLNRSLYTIALTQIRGDTEGRAYYERKRAAGKSKREALRCLKRRLSDIVFTTMRHDAAGADASPDQASPPAWPVLLGVGAVDANEARLTA

SEQ ID NO: 480460 - protein, 338 aa, unidentified
MLHVGLDLHKRFSTVATMDDNGDVQLEDKLYHDDRARLKRFFGDMAGRAVVTVEATRNWYWLYELLEDQGVTVKLADARKVRLIAESQLKNDKVDPRSLAQLERTGFLPEAYIPPREIRDNREYLRYRQTLVRLRTGLKNKVHALVDKLGICHQFADLFGPAGRHFLSQLELRPVYQEELGNYLALVDDLERRIVAATKEIKLQLKPDPRAKLLMTLPAIGYLTAYLLLNEIGDIRRFPSPGKLCAYGGIVPIVKQSADHRWQGHITRTGNRYIRWALTEVACLAPSKDYALGSFYRRVAYRRGPLKARVAVARKLLVAVWHVLTYEEPYKPTPFPTV

SEQ ID NO: 480461 - protein, 341 aa, unidentified
MQTTKYFIGLDISADDFSASCITSPDNLVFSTQKFSNNIDGSNEFLALLSKHNIKQSEAIICMEATGVYSENISYFLASKGFTISIEAPHKIKNKTKDSPRKNDFIDALYIAEYAYRYSDKLPIWKPSNEIIEQIQVLLTTREHLTVQMAANVNALKTLKHKYYQTPLANQIYEQTISKLKEHIKLIDQEIKTLIDKDDSFKNNISLAKSVPGVGLLLAANLLVLTKGFTEHLNYKHIASYTGICPYEQISGTSLHKPPRSRMCGPAKFRKLLYLAALSVRTHNQNFKKYFLRKQAEGKNNRLILNNIENKLLKIICAVINSGTAYTENFKSVNPELLKTA

SEQ ID NO: 480462 - protein, 358 aa, unidentified
MTAYPAETHVIGGVDTHKDLHVAAVVDHRDRVLGTERFPTTRHGYRLMLAWMRSFGDLRRVGVECSGSYGAGLLRYLQSADVEVLEVTAPDRHDRRRRGKNDDYDAESAAHAAFANRHTVTPRSRDGMVESLRVLRVCRKTAVQARRIALQMIQMTIVCAPDKIREPLRSMTRMQLIRTLAAWRPDLTAYRQVDEAYRISLKSLARRYLELHDEVADLDEMIEAIVKDLAPELVAQTAIGLNSAAQLLLTAGDNPDRLRSEASFAALCGVSPVPASSGKTVRHRLNRGGDRAANSAIHIIAIGRLRLDPRSQDYVAKRIAAGNSKLEAIRCLKRYIAREVFGIIMRRYREINQSQIAA

SEQ ID NO: 480463 - protein, 332 aa, unidentified
MKFKDAIGIDVSKKTIDVYIHGPKLTQQFENNPKGFKKMYKWAMSHYPRADFDHVIFCFEHTGIYSTPLSLYLDGLKHAFVLVAPLQIKRSMGLVRGKNDKVDAYRIAEYAYLRRDMIKPTEIPSKNIMKLQKLISLREKLVKQRAGFSADLKEYRTVLGKEKHQPIINVQNKMLSYLAKQIKAIEQQFKELIKNDERIDKVYKLITSVDGIGPILAVNLIVTTNCFVNFDNARKYACYAGIAPFEKQSGTSLKSKSKVNHNANKNMKSLLTMAAFASIQKNSELKNYYQDRVEKGKSKMSTINIIRNKIVHRVFAVVKRQTPYVNVHAFAN

SEQ ID NO: 480464 - protein, 408 aa, unidentified
MDLTPMHKRVIALDVHQAKITACAVVELDDGRVEVTKRDFGAFRRDRRALAQWALEIAPEVVVMESTGVYWKSPFAALEAVGIIAWVVNARHVKAVPGRKTDMADAQWLATLARAGLLRASFIPPVQMRQLRLVARQRQKLVGMCSAEKNRLHKVLVDAGIRINVLVSDIHGASARAMVKALIAGKPMHEVLDCKGRLRASRDELFEALSTEQFSAVHRFVAEEIMQHIEQIEQRVARLDQYLLEGLRAWQPQLKLLQTLPGIDEQGAAMLLVEIGADMSVFGSAERLASWVGICPGNNESAGKRKTGRIRKGNAWVRRLLCEFAQAAARTRCALKAKFDALAIRKGRKKAVVALAHKMLRTVYAMLANGTHYQDKEVDYEALNVERNAPRWIKMLRKHGFIATPATA

SEQ ID NO: 480465 - protein, 465 aa, unidentified
MKAVLLYGTMIPSKNQPISCVCPNASQNAYVNVHAQVISICPYQAMSNMNTENEIVCGADIHRDFLVATMISRKGLKLQERFSMNQDGLLEFKSWILNHKCQRVAVESTGSYWYPIFYTLEGYVEFILANAFQIRNIEGKKTDKLDSERIAVYCLNDLIKPSRIYPKDYRDLRSITRSREALVNARSKLKNQIHQLLATCCIKLSSVISDSFGKSGRYILDRLLEGKSIDQIISGIPSKRVRNKEDELRNAIRNGLDPVQLLLIKTNLDAIDDLSEKIKILDAEISIKVKPFEEDLNILLSVPGIGLTSAATILAEMGDYRDFASADKMAMYFGIVPSVYQSAGKLRTGKITKRGSKHMRRILVEVAKAISKTKKNSNLKRFFMRVYKRSGKKNVAAIALARKVLCIIYHLLMNREDYQEPEIKKTKPKISICGSPISAMDIDEMISTLSRAGYLVEKGFKEGCG

SEQ ID NO: 480466 - protein, 345 aa, unidentified
MEPMYYIGLDVHKRKISYCVKDSSGKVFAEGLLPATRLDLDLWMKTLPQPWSAAMEATMFTGWIYDHLKPHAAALKVAHPLMLRAIAAAKKKNDRIDARKICDCLRCDFLPECYMASTAIRERRRTLRYRNLLVRQMVQMKIKISALLMEAGVSYNKQRLHKAGYFRELLASNPDIDEGLGSLLRLCRETVVRLGKTESALVRSLERDALLVERVERLMTIPAVGPITALTWALEVGDVQRFSSIKKAISYCGLCGAEKSSGSTVQHTPLSKQRNKHLQTTLIEAAKMAPRNSPDLAMLYDKEKQKGNANRATLAVARKLVAYLVAVDRRQKEFLTVERENRTAA

SEQ ID NO: 480467 - protein, 430 aa, unidentified
MINAVIERCAGIDIGKKFLAVCVMTGPASGEARSEIRQFGTTVSELKNLRAWITSEGCSDVIMESTGSYWKPVFNILEGHVRVALANPQEVKARKGHKTDNKDAWWLAHLLRHGMVTPSFIPSRPVRDLRDLTRRRRKLIQEAAAEKNRIGKVLEDANVKLGNVLSDLFGVSGQLMLEALLKGNANPAEIAAFAKQKAKKKIPEIIAALQEHTMNDHHRLMIRFSVDHLRFLEDQIIAMDEAIRVAIAEAGYLKQWELLRSLPAVDENAATILAEMGPDPGQFETVKKLGSWSALCPGNNRSAGRNKSTHTKSGNPWLRSALTESAWAISRMKTGHLRDKFWRIASKGVPGRSRPIAIVAVAHDLLKLAYFVLQRGTPYEEERGKPPMTELQKQRLIHHHLRRLGKLGIRLRPCPAPTRPAPATGTTLTP

SEQ ID NO: 480468 - protein, 400 aa, unidentified
MTQAQRAWAGIDAGKRHHHLVVVDRDGRKLLSRQVANDEAELEQAIAAGRALAEQVVWAIDLADGPAALVIALLLAQQQQVVYLPGVAVNRVAAAYRGEGKTDAKDAAIIADQARMRRDLRELRLADTTVAELRMLTAHRADVAADRTRTINRLRTNLLGIFPALERALDFTNRGPLLLISHFQTPTALRDIEERDLLEWLREHKARPAAKLAAAARGAALSQHTKIAGETAVAQIIAQLASTVLGLDQQLATLDAMIAERFHSHQLAPVITSMVGIGTLLGAELVAATGGSLEGFASADHLAGYAGLAPAPRDSGRRTGNLHRPKRYNRQLQRVFYTSALISIQRSPSSRAYYDRKRTEGKRHTQAVLALARRRVNVLWAMVRDGRLYQEPPLPAALAA

SEQ ID NO: 480469 - protein, 342 aa, unidentified
MEIVYVGLDLGSSAFQQVAIKSDGSIKVNRSFSTSEANLRAAFADQRGEIHVHLEAGELAPWAATIIAPLVKRVVCSHPRDNAWIAKDNDKCDRVDAYKLAELLRLNRFKEVHYAPDQPRRNFKQLVQHYDELTAQQARLKTKLKARLRMQGVIVRGERLFSIKGRKEVLARVESRDLRTAIKQLYEVLDQSVAAQEQARLLMLRTAQAFPEIKLLRTVPGVGPIGACRFSAYIHTPSRFSSKRKLWKYCRLSVSHRSSNGKPLRRPRLDRSGCGRLKDVSRKAFDVAVRSQKDNGFKRAYQRALETTHDKTHARLTVQRKIVSTLRAMWITRTPYCDELSR

SEQ ID NO: 480470 - protein, 354 aa, unidentified
MNPDNLLNQLTLGVDTHLDIHVAVLLNGVGRLISTKEFPVNHDGYKSVLKWALSFGQLVSAGLEGTGTYGAGLCQYLLENNVEVYEVNRPNRAKRRLIGKSDPTDAENAARSVLAQESRAVPKSHDGLVEALRYLLVARRSAIKARTQSINQIRALLVSAPHDVREGYLVPSTHKCISLCSNIISLGESVLLQTLAQMLKLLASRWLSLSEELKLIDKRLKKLTKSAAGNLITQYGVGPYVAATLLVTAGGNPERLRKEASFAALCGVNPLEASSGKKQRHRLNRGGSREANNALWTVALIRMRSDARTIQYTEKRTTEGLTVKEIQRCLKRYIVRELFPIICRDLANSRRVLT

SEQ ID NO: 480471 - protein, 389 aa, unidentified
MIYVGIDVAAEKHACCILAESGKVHKQFTFSNDISGFEKLHKALLAPSETKIGLESTGVYGNNLAEFLRRNGYETHIFNPLLVKKSIQATTLRKTKTDKSDAKHIAQYTKEHSQPNLEPSYHISELKSLSRGRFSLVRERSKVKTQAKSLLTQLFPEFSQIFSDVFGAAASAVLRQLPSARMIAQCPVDVLTDLLRTASHGRLGKVKAELLIDLAEHSVGIQSMALELQMQMFLQQIDLFTLQINRYEVEIKSEMEKIQSPITTIPGIGSVLGAVILSEIGDIRRFATPAKLQAYAGVDPSVGESGTSVSTPGRMVKHGSHYLRWALCQAARCVSLYDPIFAAYMKAKRDEGKHYCVACSHVAKKLTRVIYSILKNNTAYSLTYSQIGA

SEQ ID NO: 480472 - protein, 415 aa, unidentified
MPTPLDWKGITIMARTTGTYEGFVGGIDSHKDTIHAAVITDVGQPVADREFVTTAAGYRDAVAWLSSHEPLAAVGIEGTSSYGVGISTALRSAGVRVVEVNRTRPAERRRQGKTDRLDAYRAARSVLSGEAATEPKSATIEPLRALTVARRSAVKSQQAAWRQINALLVNAPTVIRDRFRGLPRQRLVNELARVRPDQMVNTDHADTLFALRSLARRHLDHATEIELLERRMSRRVHDANPALLAIKGVGTVVAAQLLITAGDNPDRLRSSASFAALCGTAPIPVSSGRTDRHRLSRGGDRLANAALHHVVKVRLSYDPTTQAYRDTRREKGWTSPAVFRALKRAIAREVFQALAGRCDIPDYSDLRPARRAKNLTLTTAARELGIWPATVSQLELGQRRDDDLANTYRRWLNAA

SEQ ID NO: 480473 - protein, 336 aa, unidentified
MSHYCGIDLHSNNHVVVVIDDEDKRLCERRLANDLSLTLEALAPHKAMLHGIAVESTFNWYWLVDGLQEAGFHLQLVNTVAVQQYEGLKYSDDAHDAFWLAHLMRLGILPTGYIYPKAQRAVRDLLRRRAFLVRASSSQLTSIQNQIWRSTGVRISCNALRKPDFETGLVDGYTRQAVDAGMAVLRTLQDESRRLERLALDAVRLSDDFQILQTIKGVGPVLGLTIMLEVGDIRRFPSAGDFASYCRCVDAQRMSNGKKKGTGNAKAGNKYLSWAFSEAAHFAVRFEPLAQRFYERKKAKTNGIVAIRAVARKLARAAWMMLKHQMPYEARLMFPG

SEQ ID NO: 480474 - protein, 379 aa, unidentified
MLYTRSHASWYSVGIDVGASACWISIVDPQGVVVRTPYQFNPVCVQSIHAVILEIKKAGKNDPSHIRIFMESTGNYPFQLSCYLQWKGFDVRIINPLITHSTMNMAIRKAKTDKIDSYRIALLGLQPDLKTSKPASPAWSSIRNLIRLYHDVKQNHGKAVSQLRNTLVAVFPQYLPVFSNIAGATSLAVLKTYDTPNKILQADSEELCQVLQTAARGHLKWVPGWCEKLHAAAADAVTLNGPDAAYWSLSIRFLIESIEAFNTQIKDITAALTALLKQHADTAWVKQNELVCSIPGTSPMTAATLLCEMGNIQRFKNAHQLVAYFGLDPSVSQSGRKKGDRQHISKKGSSLARKIIFMIAISNIRKKANGQATNPVLYA

SEQ ID NO: 480475 - protein, 366 aa, unidentified
MSGHRTSVGLDVHARSVVAAALDGATGQVWQARFGGPHEVDPLLAWLGELPGPVATVYESGPTGFGLYRALTAAGVTASVAASSKLLRAPGDRVKTDRRDALLLARMLHLGEVTQVVVPSVAVEDARELVRAREDVRGVLQAGRQRLSKMLLRQGLLYPGATTWTLAHDLWLRQQWREFQRSGGPGLAAAFEDAYTGMMQAKQRRDALDVRIRQAALEGEFSDLVTRLCCLRGIDLITGLALVVEIGDWDRLTGARIGSYLGLVPSEYSSGASRSQGGITKTGNSHARRLLVEAAWHHKKPYRPGPALQARWAKAPGPVVARADQANRRLNGRWAAFEARKKKRTTAVVAVARELAGHAWALAVMD

SEQ ID NO: 480476 - protein, 294 aa, unidentified
MHYIGLDVHKQSVSYCTKTAAGEWVEEGRLDATREAFESWAQAQPPWRGAMEATLFSGWIHDTLAPYADDLAVGHPAAMEAITRAKKKSDRLDSAKLADLCRVNLLPRVWMPPRELRELRRLLRFRRRLVEQATWSKNRIATLMMEIGEPYAKSKLHHKRYFYRFLDDLKASETDLLLLAASRDRLEDSAELARLVEKRLLEHPLLRERVARLQTIPGVGAITALTWAVEIGDPRRFRSLDRAVSYRGLCARLNESAGKSKRGPLSKQRNPHPQHVLIEAAKLAPRWNEPLARL

SEQ ID NO: 480477 - protein, 400 aa, unidentified
MDKDRIVAGLDVHKDTIYLCVMDNTEAVIFAKVYGTLTPDLELMCSEMVSHGVTEAAMESTSTYWVPVWNALCESMSLKLVNPYFIKQLPGRKSDVKDAQWIAECLLKNLIRGSFVPDKRVQDMRKYNRRIFDLNEDLTYNSNKQDAALQRCGFRLSNYVSRVNGKSYQKCVRAIITGITDPEELVKLIHGKTLRKYGRNIIKDAVTGDFHQADICLLKQYAELIEVIERQIEECRNALIAMCQEHFPKQFKRLQSIPGVKERAASAIIAETGADMKPFEKATNLVGWCGLKPRNDISNNKVKSNRTTHGNRFLRQILIEISWVASRTRNCVFSNFSYVQCTQRHKNKMKIQVAIARKLLVAVWHMLTKDEDFIDVYLKRLEKQAEWQNDIQALESLLVG

SEQ ID NO: 480478 - protein, 336 aa, unidentified
MQGIPAGIEISKTTLVACGGPPDAPRQREFPNTRSGHQAIGRWLRRPGCEVRVCLEATGTYGLDLALHLHATPGVELMVVNPRAARRFAQALMQRAKTDRLDAEVLHHFAARMPFAPWQPPSPEGLELRALTRRIQGLTRQRAAEKSRLHALRQTRTAPRLVTQSLTRQIRHLGAEIERLETAGHRHVRRHEGLHRRFRLLRSIKGIGAKSALQLLGELAVLPEDLDPRQWVAFAGLDPRPYESGASVQRPRRISKAGNVYLRRPLYMPALVAVRHDPHFQAFYQRLLERGKLPLQALVAVMRKLLHAIWGTWLHQQNFDGAKLFPQLQPMTQKTA

SEQ ID NO: 480479 - protein, 370 aa, unidentified
MDVHTTNYTLCAMEPIIGEDDRVFATIKVTPDYKNILMFIENLKLKLGLNDEYDIQCGYEAGCLGYSLYNQLTAAGIKCVILAPTTMLTPQGVRIKTDMRDAYMIAQCLSYGGYHAVYIPTEDDDSVKEYLRMRNDHKLALKKIKQQINAFCIRHGFCYDGTKWTLSHLKWLKKLEITNGLYRETLDEYMASYEEQEAKIERYDKRIGEIAEQTRYHDKVKKLGCFLGIKTHTALSLIVETGDFERFAKGNQYASYLGLAPGENSSSDNIHRLGITKAGNSHLRQLLIEASGGICKGAVGHKSKELRARQNGNTAEVIAYADKANTRLRSRYYKFIRHGKKRNVAVAAIARELACFVWGMMTDNIEMKAA

SEQ ID NO: 480480 - protein, 363 aa, unidentified
MTVVGIDAHKAWHTLVAVDDVGKRVAEFTVQARAAGHRQIVVWLERFDDVRVAVEDCRHLTRRLEADLLAAGHRVVRVHTRLMAGMRRSTREPGKSDPIDAEAVARVALREDDLHTAELPGLMREIKLLSEHRRTLVARRTAMQSKVRWFLHEIDPDLHVPSRALRRYRLGELLAHLDGHEGALVEIARDLLEDIAALTVRINALERRLDKLVRTTHPTLREVPGLGVLGAAMILGETAGARRFRSKDAYARFNGTAPIPVWLGNKVRFRLSRGGNRTINTALHMAAVTQLRLGSEGAVYYDKVTTAGKTRTEALRLLRRRISDRVFAALRADEQRADHAATTADPLAQNTPTLSSHELRRAA

SEQ ID NO: 480481 - protein, 455 aa, unidentified
MPRKKLHRKNQRVAPPIMNPDAAGIDIGATEIYVAVPADRDPESIRMFATFTEDLNRLADWLQQCGVRTVAMESTGVYWIPLMQILEERGLEAYLVNAKHVKNVPGRRTDVSDCQWLQYLHSVGLLRPSFRPAREVCALRSLLRHRNGLVEMATAHVQHIQKALDQMNLQIHHVISDITGTTGLAIIDAILTGNRDPQVLATLRDPRIRASKDTIAKSLVGDYRPEHLFTLRQSVDLYREYQKRIAACEEEMQRLMKGMEASATSSASLPTAKDSVRKCKVMAPAKAIALREEAYRILGVDLTAIPGISVLHVQTILAELGGGISKFPSAGAFSSWMGLCPDNDISGGRVLWTGTRKVKNRIAVTLRMAAQSLQNSESALGAFYRRMRTKLGAPKAVTAAAHKLARVICHMLKTREPYDESVFARSEIKHRQRAENRLRAMAQNLGYTIAPAQAK

SEQ ID NO: 480482 - protein, 322 aa, unidentified
MSLPGPLCVGIDVSKVTLDIAASSAIEQFSVANDADGFDSIITELRKLPVALVLMEATGGLEAAVACALQAEGFDIAVVNPRQARDFARAMGYLAKTDRIDARVLAQMAEVINRHPQRERFIRSLPDAERQALAAMVVRRRQLITMMVAERNRLYPAHPQSRKSINIIIKALEDELARIDEDMNNHIRSHFKELSERLSSIKGVGTMTAAALLAGVPELGQLSRREISALVGVAPVNRDSGTLRGRRTIFGGRAGVRTALYMAALVATRFNPVIKAFYIRLVASGKPKKVALVACMRKLLTILNAMLRKNEEWNDSYHHVAP

SEQ ID NO: 480483 - protein, 344 aa, unidentified
MDHYVGLDVSVRETSVCVVDETGKLLKEARVPTEPEAIASLLAQGGFACKRVGLEAGPMSQWLYAELAKAGLPVICVEAQHMRSALSAQRNKTDRNDARGIAQMMRVGLYRPVHVKTLPSQERRLLLTARKLLQAKMLDLEADLRGTLKNFGLRVGVVGKGGFRARVRELVEGREGLSAVMLPLLEAHAALQAQYNVLHKRLLDLVRDDPLCRRLTTAPGVGPVIALTFVATVDIPTRFPKSRLVGAHFGLTPKRYASGETDHSGRVSKCGDAMMRTALFEGAQALLVCTKKWCSLKAWGMTIARRRGMKRAIVAVARKLAMILHRMWLDGTEFRWGKEAAAAA

SEQ ID NO: 480484 - protein, 344 aa, unidentified
MYFIGVDHHKQWSVVTILDEDGRELESGRVFNRREAVSRFLKGYEPFTAVLEAGYSSYVMADLLWELGGEVKIANPAEVKAIAHARIKTDKRDSRTLARLLRSGDIPEVTQRTAANRRAQRVMRLRAFRVEKRTELKNKIRALLAQQKEEIRLEVERREDGLFSGKGLELLGRLALAQPDQMILDDLLESYRESQTHLRQTDEIVAKLHEELKDAQRIDTVPGFATTLSVLVAVEIGDINRFESASHLHSYAGVIPTTYSSGARTYHGHITKAGNVWLRWAALEAVIPATKASLEIRGLYSRLSRRKGPNVAKVAVARRLLTIIYRLLKEKRDYIREMKIPSAA

SEQ ID NO: 480485 - protein, 345 aa, unidentified
MLYLGLDVHSKWTTLKGFDPETGEIVERVRISNQPEVMTAVLGELPGPLHGVMETGTNAWAMYRALEPCFARLVIADPAQLWDRRWDQSAKTDRRDALRMAQKLQRGEITGIYVPDEHTQDLRVLVRGKVRATRWVTKLVNEIGSLLRCWGYLPSKSLLSKRGKEHLEAVQLSGHSARVLELWREMLEKAQEIKAELEAAIEEEAEHDAVCAQLRTMPSVGPFTALAVRAEIGDIGRFPSSAALISYAGLAPRVFQSGEHCRYGSLGHRGNAWLRYALVLLANRMASHGKGSRLHQLYWRIRLREHGNGAKIAVARKATHLIYHLLRTGQPWRELTPEEQVKATA

SEQ ID NO: 480486 - protein, 451 aa, unidentified
MTGQQVSKVKLSTQPFGDGPTMTKRSSTPADAVLVAIDMSKHRQEVLIERPEGGRRRRMTIMATKADYDRLADELSSIGRPIVVGFEATGNYHRTLAHRLLSAGFELRLISSVALARTREALHNGWDKNDSKDAQVILHMLRIGATQRYVDPLAAGINDLQEMSKTHEVISKAKTQTWHRILTHYLPLYFPEIERFAGNSRSDWFLALLERFPTPASMTALGQEDFTREAWSLVGRKVSKARLINDIYETACASVALPVDEDSVAIAMFRMVIAQARSLIRQRDEIERTAHALLSENRDYQLLRMIPGIGPINALTILAEAGDLRRFAHHRQFLKFCGLDLATCQSGTFRGRTKLSKYGNARLRRTFWMATQVAIRQRDNSFRDKLGRYVASHGNDPDRRRKAMTALTAKMARVAHAVIKTGAEYRPFDERADTRWKDPSLSCREGATATL

SEQ ID NO: 480487 - protein, 344 aa, unidentified
MNPFSYYVGLDIHRKSTSYCVLLPDGKLVREGKVASTREDLEAWARTVPGPWCGGLEATICSHWIYWRLKPYAAEMKMGQPAKLKAISEAKRKNDTLDARTLANLLRCDLFPACYVLSPEHEMLRRHLRYRSFLVRMEVMLKNKAAGMLIESGVLYDTRRLHGKKYFHALLDELDTTQLLDRELKQLIEFGRAELERLKAVDRGILGRLLSDPLLSERVARLRSIGGVGEVTALLWALETGDPARFPNEKHAISYCGLCAAQRESAGKQQRGPLSKQRNAALQTGLLEAAHLAIQHNPELKLIYEAQCAKGPKNRAILEVARRLVRRFLAIDRRHAAGLATTAA

SEQ ID NO: 480488 - protein, 363 aa, unidentified
MIKYSIGLDVSSKKIDVCLSTIDINQTIKVKGTTTIPNSLGGFKKLHTWIEKYRKEESIPLVICMEATGVYHESLALYLVALDYTLSVLLPNKSKKYLQSLGLKSKNDSIDARGLAQMGAEQKLKKWSPPAKYFHTLRSYSRQYQNIQEQKTMTKNQIHAISRGMYPSKEIVKQLEKIIALFDKQLKELVGLMEKHIESDKEISKKVDQICLIKGVSTLSVCTIIAETNGFELFENFKQLISYAGYDVVENQSGRHTGKTKMSKRGNSRIRRALFMPAFNVVRYEQKAFYDIFHRTLEKHNIKMKSYVAVQKKILTTIYALWKKDEAYIENYKNMSMIENSHTQGVATQGKQSKTASSLVGQM

SEQ ID NO: 480489 - protein, 432 aa, unidentified
MTEGTVMEFAAWIGIDWADKKHRWAMRIHGEARVQQGDLESTPEAVEQFFLGLAARFPDRRVAVALEQSRGALLFMLGKYEHLVLYPIHPNTLDHYRKGFYPSGAKSDPGDAALILDLLLKHPERLRPFNPDTVETRTLQFLVEARREGVDDRTRYVNRLTAQLKMFFPQLLEWFDDVDSVIVNQLLRKWPTLEHLQQAKPSRVAEFLRKHRVPDARVEILQQAIVTSIPATKDGAVVEVSVLIVRRLVLQLEALREAIKEHDERIAARTASHPDVCIFSSLPGAGPVMVPRLIAAFGTQRQRYATASEIQCYSGIAPVTESSGKQKWIHWRWACPKFLRQTFHEWAWLSTRKSGWARAYYEGQREKGKSHHGAVRALAFKWLRILFRCWKEHLPYDEARYTQAVQRRASSNPVEIRLKNVSGFTKLDGLSY

SEQ ID NO: 480490 - protein, 362 aa, unidentified
MTIYIGLDLHSKRTVYVAQDADGRTIASGSVETSSRGLIGLLEDLGAAEGTEVAMESGTQATWAARLLEAAGMSPVVIDAAEVRAKARRRAQKSDLRDAWELCDGLRRDIYVKRVYVPPLRVERLRRALSRRRHFVEICTSQVNAASFLFRSAGLRRPVRYLRTENHWCCLCDAEGAEAFRHHLLLHFQVWLAARRAILELEEELAEAISCFGEESSLLQSLPGVGPMTSAAFIAALGCPERFGRSAEAASYIGLVPSGYDTGGVIRRGRITKSGPPYLRALLCEAAHHAARSSHPLNPYWRRICSRGGYGKAVVAVAHRMARILWAMWRGGRDFDVSMLNVERVSAPESSRRHIYRLRRSA

SEQ ID NO: 480491 - protein, 346 aa, unidentified
MSYSTTVGVDLAKNVIQISVLNGRGKETLNRSLTRRKFTEFLGKQKPSLVAFESCATSHYWARAAERHGHETRIIPAKAVAPFRQGHKTDSNDALAVAEAARRPNIKDAPMKSIEQQGMQAILRARDRLIQECVASSNHMRGILLEFGITIPQGFASLMRKLPEVLEDGDNELPDFYRPTLHRLYHRMLELREDLATMTKDVNLLVKNHPLCSRLTDIEGIGPICAMSLYASLGTGSAFGNGREYAAYIGLTPRQYSSGGKANIVGLSKYVGNRKLRSVLIQGALAYVYRMREPRTSKDRWLKDLIERAGPRRAAVALANKNARTAWALVTQGTEYQRRGQLEMAA

SEQ ID NO: 480492 - protein, 408 aa, unidentified
MNPLYVGIDVSSKSNVVYLMLPNGDKHSNFALKNSHVGSSQLVKRILSAMTSHSLDTVLIGLEATSVYGDHLVYFLREGATLAPFNRKIHVLNPKQVNKFKESYNDLPKNDYVDSFVIADCLRFGRINKEVYIGDYRYKALQNLTHARCYAVCNLIKEKQRFMNVLFKKYSTMTQEKVFSDTFSTTALAVYEEFESAEALANMDLQDLTDFIMEKGKDRFPDPDSVARAIQKAARSSYRLPKTVNDSVNQVLSISITSMKALESQIKEFDKAIAAQMELLPNVLISIPGIDPVFSAGIMAEIGDINRFGNHAQLAKHAGLAWRQHQSGGFEAQTTRLINSGNRFLKYYLREAAFSLVRCDKEHNDFYHLKYKEVNRYQHKRALALTARKFVRLVFVLLKDNHLYRPAK

SEQ ID NO: 480493 - protein, 405 aa, unidentified
MGKSTPLFVGLDVHKDSIAVAHAAGGRADPPVFVGAIGTRQADLDQLIRRLQGKASALMFAYEAGPCGYGLHRYLTDQGLACQVVAPSLIPKKPGDKVKTDRRDAVELARLLRSGDLTRVYVPSVEDEAVRDVSRARDAARVTLKDAKLRLKAFLLRLGRHYVGRADWNAAHRRYLAKVVCPTPAQQIVFQEWVRAVDEQVDRLQRLEAELQEVGPRWRLYPVVQGLQALRGVQWLVAITVVAELGDLTRFANPRQLAAFVGLIPSEYSSGRTRRQGGHHQSRQRTGPPRLDRSGVGVPLSRQGLRPHSAAHRHTTETAPRYRVEGAGPPLQTVSSADLTRQASQRGRHRHRPRTDRVHVGDCQGGARVRVTARGNTRSRGGAWAPILAQPSTTLRGDFTVDPRA

SEQ ID NO: 480494 - protein, 352 aa, unidentified
MQRYIGIDVHAASSTLVVVSPTGKRIETRVVETTGKTLFDAVSAVPGERHICLEEGAQSSWLYELLAPLAKEVAVLAAEKKKRGTKNDAVDAFELAERMRKREFGRRVYKNPKRFAELREMCRVYTMVTQDVVRVQARIKSMYRGSGIRTRGTSVYKEENRNDWLKRLPAKVRLPTKFLYEQYDALTELRGEAQKELLRQARKHRIAAILETAPGFGPIRVAELLSIVVTPHRFPTRQKFRAYCGLGITTWSSSDWEQTADGSWIKKKRKKATRGLNRNFNPMLKDIMKGAATTVIARANEEPLHNHYQQLLDGGTKPNLARLTIARQIASIVLSMWRSQEVYDPKRVSQTA

SEQ ID NO: 480495 - protein, 483 aa, unidentified
MKSKPEEQNKRATNHPTQHHWHEMNRKQRREMMRKMQNEDLSLEVIHPDAGGIDIGNESHYVAVPPSRDSQSVREFGCTTAELKAMAVWLKQCRIRTVAMQSTGVYWVAVYDILEQAGLEVYLVNARDTKNLPGRKSDVQESQWLMKLHTYGLLRNSFRPSPEIRVMRTHWRQRNDLVQSAGWHIQRMQKALTQMNLQLANVLTDISGATGQAIIKAILAGERDSHKLAQFRDPRVKASEEQIAQSLEGNWQEDLLFVLKQEHEGYEFCHKQMAECDRQLKQYLQQREDRSQGAPLPEEKRKGRLKKKRANKPQFDLREGLFRMTGTDLTRIDGIDVMTAMTIISEAGWDMSKWPDEDHFVSWLRLCPDNRISGNKVIGKGRLPTNNPISIALKMAASTLRQSKTYLGAQFRRFRTRLGAPIAIKAMAAKLARLVYRMLRYGMKYVDQGAAFYELRHRELQIKRLKAKAEKLGYRVTPIPAAA

SEQ ID NO: 480496 - protein, 364 aa, unidentified
MTTVHYVGMDVDKEKIVLTRVGVGRDTRAIEHVIANRPSVVKKYFAALLADAEVHATYEAGCFGFDLYRQLSALGVSVVVAAPGLIPVKPADRVKTDPRDAHSLALALRAGQLTGVYVPTVQDESVRDYLRMYDALRGDLRICKQRVLQFLLRRGIRYEGGGHWTVKHKHWLSSLEFSQSRDRQTLDMYLAHMQELEARCAEVAAEVESIAAQDCYRQRTQMLTAFKGIKTLIALSFVTDIGDFRRFASARQFMAYLGLVPSERSSGNKRRQGGITKAGNSHLRRLLVEAAWHYRSYHPSSRDLTQRRRGVDLAVLIYANRAGRRLNRKYLRMVLRGKRSQVAVTAVSRELAGFLWGAMTNQVA

SEQ ID NO: 480497 - protein, 456 aa, unidentified
MKIPQSTIRLLTGRLVKILLNREVSTMKSNTQNAKIEAITEKTLVLGIDVGSETHYARAFDYRGIEYSKKPFKFSNTEAGFATFKEWILDLKERHEKDKVVPGMEPTGHYWFNLGKFLQDNEMKPVLVNPHHVKKSKELDDNNPTKNDRKDPKVIAGLVREGRYMIPYLPDGVYADLRTASNIRFQLQAELTRIQNRISRWFNIYFPEYKTVYGKPDAKSGMLILKAAPFPEDILTLGIDGVNQIWRDAKLRAVGKARAKTLIEAAEHSVGSKEGAVSARMEIRMLLEDYESRNIRLQEVMTLIEGLVKQIPMAEKLLEIKGVGIRTVSGFLAEVGDISRFNNPKELQKLAGLALVENSSGKHKGETTISRRGRKRLRYLLFEVAMSLVAKNPEFRELHNYYTTRRLNPLKKMQSLMAIAAKLIRVFYAMLTKGVDYDPKKMVSDIKRPAVYIQAA

SEQ ID NO: 480498 - protein, 453 aa, unidentified
MKRKTVSYQKHQERKRNISGKKVIGIDPAKEKHQVTVIDEHGMQMGNSFSINVSHKGFNEDLWKKLGKVLGKFRKQEVVFAIESSCDLWRVFAGYLQNRGYTVVLVSPFITYKTRPTINNDFSKTDPKDAYLVAENAQGGKYNEYMSYSPEINKLHSLCIAHDKLTKDRNRTILRLRALMEEIFPEYLKCVHVEIKTSLYLLGKYFLPEHFQQLDVDEEEWNIRRISNGKHNTNTLKKIKEFAYNSIGAGKTGEEDGVRITLDAWISQLRLIDEHKKAIGDKMIEQAKETEFFEILVSVPGISDISAARLIGECRDLSLFEHYKQIEKMAGSNIRLCDSGKYIGTRRINKLGNKRLLKLIYIMTTHTAKYMPEVRIKFLKRQIKKKNYRKNIFAASSILMRILMALIKEKRTYELREDKVQEMERLELKYNPEKKDKKKSRKRNKKTPVQKAA

SEQ ID NO: 480499 - protein, 379 aa, unidentified
MRNDSTVYVGLDLHKDSITVAYAIDAGEVELLGKTGTTGADINRLCTRLQSKAPHVRVVYEAGPCGYGLYRQLVQKGFDCMVCAPSLIPRKPGERVKTDRRDAIKLARSLRADDLSAVYVPGIEDEAFRDLARAWAAAREDLRRARHRLKSFLLAHGVRYTGSANWGEAHRRWLGRCSFPSAWQHLAFDEHRRTIEDRLAQCARLETALREAVISWRFYPVVLALQAMRGVQFVTAVGMVSEVGDLSRFEHPRQLMAWLGVTPSEHSSGGKRRQGSITKTGNSYARRLLVEAAWSYRHPARVSPEIQARLEGLPKAIIDRAWDAQVRLCRRFRRLTARGKPINITVVAIARELAAFIWDISRLAMSLAIPRSKLPAACV

SEQ ID NO: 480500 - protein, 474 aa, unidentified
MTTGVQVISNMLCEQIKEAPRVQELRLGIDLACRESHRAALADETGKILWSNRRLFTTSVDLQSLWTAVRAAGDVPVLVVMEPTRNAWVPVAAWLRARGADVRMVPPEQSADLRKYYNKHTKTDRLDCELLARLPLLHPDGLVATPGLGPAEALRRSVAHRQSLVARRTAGLQRLDALLELLGPAWTDVLGTDFGKAALTVLERYADPDALFRLGRARLTQVLIRASRGQWRQDKADELLDAAAQTRLLWAGGGLVFAELADDIAVEARLVRQLGAEIDQLDDRITTHYQDADPTGVVASAPGVGPVLAPLLLGRLGDAKRFRDLAAVRNYTGLVPKVNQSGTSDHTGGLTKAGDPLLREALFMAADHARKVDPTLAARYWRLRAADKHHNSALCTLAAVLVTRIAACWRNDQQYILRDLNGNPITETQGRAQCADLKPTPTAKAGTGRRNKESHSAPSTGPSTKQATKLRKSA

SEQ ID NO: 480501 - protein, 443 aa, unidentified
MKELPVLDSRAAFCDVGSEHMHVSIAGGLPKVFGTFTSQLHELRDWLLGEGVHSIAMEATGVYWLSLYGVLEAAGLEVVMVNGRQTRNLPGRKTDMKDCQWGATLHAHGLLKAGFVPPAHIRKLQDYQRLRTDHITSAASHVQHMQKALERMNIKLHNVISSLMGVSGLAIVHAILDGERDPAKLLELCYSTIRHKKAKDVIEALRGTWEPEHLFALRQALQSWEHYHRQIAECDQQIQLLLQEITFNDTQGGGIGEKPKATAGKHPSANAPQISGLHRMLIDLCQGKDLSILPAHTDYSVLQIISEVGTDLSKWSTEKHFTAWLGLAPGTSQSGKRKSNVKHSRSRVGRYFCVMARSLARSKDMALGGFYRRLAARRGGLIANIALARKLAVLFWRVMVKGTEFVEEGLAAYEAKFLEGKKRSLRRLARELGQTVSPIPVTV

SEQ ID NO: 480502 - protein, 391 aa, unidentified
MSLYFVGIDISKYKHDCCIISATDQKVISKFSIKNDKVGFEELITTFNSLSSPEDIRIGFESTAHYALNLELFLENAHHSFMEVNPVLIKEYKKSTTLRRTKTDSVDCESIARWLMTVEYKPHSKGFYHAYSLKSLTRLRDRLIRQRSFYLVKITNVLDHTFPEFKPFFNERLSKTALYLLENYGSAEKMARMNSVSYEKLRSISRGKFSPQQFIALKELASNTVGVNNSIFDVELNSLLTLYKTLVTEINTLEKEINLLIEEVHPHYLSVPGIGPISAAIIYSEYGDISNFDNSGQMLAFAGIEPGINESGTESHGGRMVKRGSSQLRYALINCCLPLIRFDMTFATYYAKKRAEGKPHRVAITHVAKKLIRVIYALERQDTDFCVQKLR

SEQ ID NO: 480503 - protein, 344 aa, unidentified
MLHVSTIGLDIAKHVFHVHGADGKGRAVFSKRISRGKLLDFFAAQPNCTVALEACGGAHHWARQLTRLRHEVRLIPPAYVKPFVKRQKNDAIDAEAICEAAQRPSMRFVAVKSEEQQAAGLVFRTRDLMVRQRTQLINAIRGHLTEYGWIAPKGPSHVATLADLIEEEAMASSLPEAARPMFRVMLDLLAELNGKIADLDKEIARRAREDEVSRRLMTIPGIGPISATAIAALAPPIETFAKGRDFAAWLGLTPLQKSTGGKQKLGATSKMGERTLRRLLIIGSSAVVQQASKRGAPKGSWLEQMLTRKPRMLVTVALANKMARIVWALLVKRENYRAPVSAKA

SEQ ID NO: 480504 - protein, 346 aa, unidentified
MTANNITIGLDLGDRRHAACVLSASGEILAEEAITNTRECLTSFASRHAGATFVMETGTHSPWVSRLLESLGHAVIVANARKLRAISQSTTKSDEEDARMLARLGRADPALLSPVRHRSEAAQRALVQLKVREALVRSRVNQMNSVRFLVKSLGLVVPRGIKATAFVRQFRTRADAATAALVEPLLQTIDAINAQIKQLDARLEALATECYPVTGRLRQVDGVGPLTALCFVLTVETPERFPHTRDVGSYHGLVPRRDQSGNTDKQLPITKAGNAQLRCLLVNCAHYILGPFGPPSHLREAGERIALRGGKSAKKRAVIAVARKLAVTLLALWKSGADYHALPQAA

SEQ ID NO: 480505 - protein, 309 aa, unidentified
MNTQNKNIVAIDIAKSSLQIQTEKKAFCVTNDSTGLKRLHLLIKKLDHPYVVCEASGGYERLLVRTLHQWAVPVSVVNPAMVRAFAKSEGIKAKTDPIDARILLKFGQTKELRQTPCPDPHIEELAALMDRRTQLSDSLAREKNRLDKEPIYTRKWIEQTIEFISQQIQELELRIEEILTMNERLSKRVTRMTELKGVGKTTAYTILAYLPDLETMTRGQLVSLVGLAPYNKESGKTKSKAHIHGGRAKIRKCLFMAAQSAAQHNEAIHQYVSNLIKAGQPKKSALVAAMRKILICLRSLLKNPNFSLA

SEQ ID NO: 480506 - protein, 318 aa, unidentified
MHVTTIGLDLAKNVFQVHGIDDHGEIAFNRALRRAQVLAFFERLEPCLVGIEACGTSHHWARELIKLGHNVKLIPPAYVKPYVKRGKSDAVDAAAICEAVTRPTMRFVEVKTPEQQAILAVHRTRDLTVRQRTQTINMLRAQLAEFGLVLPQGVYHPLQFAKDCVDGEQPDLPKNAQEVVFDLCDELLFLHAKILRHSRHMTRIAKSEKRVALLRTIPGVGPITASAIVATVGSGKQFNNGREFAAWLGLTPLNRSSGGKERLGHISKMGDQYIRRLLVLGMTSRIRSIRMEPEKFDPWFADILSRKPSRVAAVAITA

SEQ ID NO: 480507 - protein, 419 aa, unidentified
MQTITLYLGLDVHKDSITAAIAEPLPKGEIRLFGSFANSIQAVERTLTTVRKAHPGAHLEVAYEAGPCGFGIARRLKQLEVPCLVAAPSLIPKQPGAPFKTDQRDARSIARLLRAGELTAVYVPEPTDEAIRDLCRARTDAVDDLRRCRVRLKSFLLRHGYHYQGKANWSQPHMRYLRELVLPHPAMKAILEEYLQGIDAAHQRVLRIEASLATLLETWRLKPAVQALMAFRGFQLVAAMITVSELGNIHRFAHPRQLMTYLGLVSVEHSSGPHQHLGAISRCGNGHQRWLLTECAEHYASPPKISKELSRRQEGQPPQVRALSWKAQNRLHLRFTRLLARRLQRNKAKVAIARELCGFIWALLRTQSCYTQPEGEPQTPQVSVAPVPAPKPPAGTATALHLQRLNRIANERRLRRNGK

SEQ ID NO: 480508 - protein, 346 aa, unidentified
MKIIGCDFHPSFQQIAVFDTETGEIIEHKLVNGNGDAERFYRSLAVGSLIGIEACGNSHWFIDLLGRLGHRVWVGDAAKIRASYVRKQKTDRRDAAHILTLLLEKRFPKLWTPSRQERDQRQLLIHRHKLVQIRTRVKNSLQHLALNQGVQKKQKLWSKEGQKLLVRLPLEGWTAVRRQDCRELLACLDERIAKLDKAAEQAAEAHPQASLLMQQKGVGPITALAFALTIGDVSRFQHSKQLASYLGLIPSEHTSSNKRRLGSITKQGNSFLRMLLVEAAQSVTRFDPQFHKHYVHLCRNKHKAVAKVAAARKLAVRLYWVLRTDQNSQKTVPIESSPRVPLVGAS

SEQ ID NO: 480509 - protein, 340 aa, unidentified
MQVTTIGLDLAKNVFQVHGVDERGKVTLRKQLRRDQVAAFFANLPACLIGIEACSSAHHWARKLQALGHTVRLMAPQFVKPYVKSNKNDAADAEAICEAVTRPSMRFVPIKNVEQQSVLALHRVRQGFVKARTAQANQIRGLLAEFGLVVPQGIAHIAQRVPDIIEDALIELPGSFRLLIARLLEQLQLLHRQVDEIEAQIKAWHRTSDASRRLEKVPGIGPLTATAMAASVGDARNFDNGRQFAAWLGVVPRQHSSGGKPTLLGMSKRGDAYLRTLLIHGARSVIYRATQRADVDGWLMKLVTRRNKNVAAVALANKTARIAWALLAHDRKFEADYAAT

SEQ ID NO: 480510 - protein, 350 aa, unidentified
MTMVGGLDVHRQQITFDYVDDDGLVRTGQIRPATRKTLRGWLAEHCPKGDAEFALEGCTGWRYVTEELAAAGVVAHLGDPAEIAGLRGRKKRAKTDRADARLLRTLLVEGRFPESWIPLAHVLEIRSLGRLYCTLMDERRAWQQRIHAQLFQHGCAQIRALLSAAGREALVHAELSAAGRQYGAAALRRIDEISAEINPLRAQLVNFARRQRGCQALERHYGIGWLSAAIMWAEIGDARRFSSSDQLIRFAGLDVTVYSSDGKSSPGHLSRQGSPELRWAAFEAAKCAARRSSPDYAYYHKLAAKHDHNNGTNPTLAVERKILRRCYHMLRELSDAALARPGTTTQEVAA

SEQ ID NO: 480511 - protein, 346 aa, unidentified
MSEITTIGLDLAKNVFHVVGCDARGKRVLRKRLSRRQVLSWFARQNPCLVGMEACASAHYWARELRQLGHEVKLIPAQHVKAYLRGNKNDYNDALAIAEAVVRPEMRFVAIKTAEEQDIQALHRLRAQRIRERTALGNQLRGLLAEYGIIIPQGVGALKRRLPEILEDGENGLSECFRRLLYQAWQQLQELEAHLKAYDREVARVAQAHEACCRLQTIPGFGPVVATVFYSRIGQGEGFRRGRDVSASLGLVPRQHSTGGKEVLLGISKRGDSYLRGLLIHGARSVIRQARHKTDRLSRWIMQLVARRGHNKAAVALANKMARMGWAILAYKTTYGEGGVHEALAH

SEQ ID NO: 480512 - protein, 352 aa, unidentified
MHATTVAVDLAKDVFELAFADGQGRVIERKRLTRRAFARAFEQRPPLRIVMEACGSAHHWARRFVRQGHAVRLLPASDVRPYVRGNKTDRNDASGILEADRCGGIASVPVKTPEQQAIQAQHRLREHLKRERTATINLLRGVLREFGIVIAQGAARVSAQVRDALEDGDNDLPMPLRHSLGEQLQRLLHIQADMQAIEQRLDEYARRDVAVQRYQRVPGVGLLTSTALRAGAGDLSRFKSGRQLSAWLGLTPREHSSGQQRRLGRMTKRGDAYLRTLFIHGARAVLQGARLKHKRGQPLDPLQAWALGVQDKRGHNKAACALANKLARRLWAMEHHGKPFDAHHVSRQPLAA

SEQ ID NO: 480513 - protein, 409 aa, unidentified
MSLFCGIDWATEHHDVAVIDGDGNVVARGRVSNDAPGFAALLTLLAEAGDNAADPIPVGIETDRGLWVAALRATGRVIYPINPLAASRYRARYAVSGAKSDATDAVLLANIVRTDPGAHRPLPADTGAAQAIRVLARAQQDAVWARQQIGNQVRDLLKDFYPAALVAFADLDGGLARPDARTILAAAPTPAQAAKLTAARLRRLLTKAGRKRYLDRDVARLREVFTDTYLHQPLVVENAMGIHLTALLGQFEAACTAADALAEAAIAHFERHPDAEIITSFPGLGMLVGARVLAEIGDDRTRFAEARGLKAFAGSAPITRASGKKTIVLHRHIKNRRLAAVGPIWALGSLRASPGARRHYDARRAAGDWNQQAQRHLFNKFLGQLHHCLHTGQLYDEHVAFPPPLGRAA

SEQ ID NO: 480514 - protein, 344 aa, unidentified
MHYCGLDVSAKSTHVYIEDEEGRRVRRTIVTTTPEGIRGALARYQDGRLTVALEAGNQTAWIHDELRELGCKVHIVHPLKVKWIAESKKKTDRVDAQLLAHLLRIGGLPEPVHMPSRRSRELRALLGARRQLVQMRTKLMNVARGLLHQQRVQIRAKGLRTEQGWRELKNLPLSAAVREVVDAYAATVAATTAALKALDGELTRRAGVDARVARLQTIPGVGQVSAQTLVASVDRIERFANAKKLVAYSGLVPSVRASGDRVVYGRITKQGRSEIRAVWVQAAHAALAVKDGRARPLQRWCERVAHRRGKKTALVALARKLLTIAFHLLRDRTTYDPGHLRCAA

SEQ ID NO: 480515 - protein, 359 aa, unidentified
MLLQRNSLNFDGENIYVGIDVHKKSWSISIMTDTLVLKGYNGPADPVQLVSHLRDHYPGGSYHSVYEAGFCGLWIHNRLTELGVKNIVVNPSDVPCNGKERERKTDAVDASKLARSLRAGELSGIYIHQQETLHDRSLMRLRSSWVTDMTRLKNRIKGMLHYYGIVIPAELERSSNWSRAFMTWLKNTVLPSGEISKPAFELLLEEYERKRGQQLVILRKIRELSRTAAYHEDMKYLRSVCGIGLLSGMHLLVNIENIHRFENRDKFASFMGFVPTSHSTGEKQINGRITKRAPKELRGILTECAWIAMRNDPALALKYGQLRKRMDENKAIIRIARKLCNRIYYVLKNKTEYVSGVVQ

SEQ ID NO: 480516 - protein, 356 aa, unidentified
MLYTGVDLHRRLIVVCTVDENGSIVARSRMKTDPALVSEYFRQWPDQHRAVVECTTGWYWFSDLLRSLGVDIVLAHAKYLKAISYAKVKTDAVDALTLAQLLRMGYIPEAHQLPPEYRAMRDLLRQRVVMEHKRTTIIQRVTSILAQFNITDLPCSPYQSGFAEFLDQCQIPEEYRMTLMMYHQQCLQTTEHRKQLERYFKTQLRPTAAVKLLSTIPGIGDITGSIIAMETGEIHRFADDKHYCSYCRLVPGAKDSAGKRSHRSGSKDGNPYLKFAFTESAIKAIQFYPEIKHFASRLERRSGKTIARTVVAKELAKITYFVLNRQQGFKTFKGIEINKLRNWPRSRKPVRLTGGL

SEQ ID NO: 480517 - protein, 388 aa, unidentified
MQTVADRAAAPSAIQTDLRAIFVSLELSRSTWLITSLSPGGGEKLSKHSVPGSDVAGLLERFAHLKAKARARTGQAFPIIVIQEAGLDGFWIHRVLQSEGIESHVVDPASIATSRRRRRAKTDRIDGEALVRALLAYKRGEPRVCAMVKAPTPQEEDRRRVCRERKVLIVERVQHVNRVKGLLFCQGITGYEPLRRDRRERLEELRTGDSRPLPDHLKAQLRRELDRIELLIEQIKAVEAERDGMLARDHAVTPAPAAMLLDIKGIGPEFAVILWSEGLFRHFDNRRQVAAYAGLAPTPWQSGSVDREQGVSKAGNARLRTTLIQLAWLWLRHQPHSALTLWFEERVKRNGGRLKKTTIVALARKLLVALWKYVTAGVVIEGAVLKAV

SEQ ID NO: 480518 - protein, 338 aa, unidentified
MKITTIGLDIAKLVFHAVAVNKAGKLVRKKMLKRKEVLGFFAKLEPCLVAIEACGGAHYWNREITALGHQVKLIPPQYVIPYQQGNKNDYNDALAIAEAAQRPNMRFVPAKSIEQQDVQMLHRVRERLTQQTTALVNQVRGMLAEYGIVLAKGKTAFRSQLPDILEDGENALTAKGRAIFHGLYNEFVELENRLKECEKQVLQENADNPICQRLGTVLGVGPVTATAFYAAVGEGKAFHNGRHFSAWCGLVPRQHSSGGKDNLLGISKRGNAYLRTLFIHGARSILRHCEHKTDKLSLWAKALVERRGFNRACVAVANKLARIAWVIAAKEETYRPAT

SEQ ID NO: 480519 - protein, 345 aa, unidentified
MSQIIRIGMDTSKYIFQLHGVDASEQVVLRKRLSRKAMLEFFAKLPPTVVVIEACGAAHHLARMLGRLGHTVKLIAPQLAKPYVPRNKNDGRDAEGLCEAASRPRMRYVPVKTAEQQAALMLLGVREQLVMRRTQLSNTIRGHAAEFGLIAAKGLDKLAAFLTAIGQDEGVPALARELFAMLARQYEQVQVELKAIEAKLLAWHRADATSRRLAQIPGIGPVTAAALVMKAPDPHAFRSGRLFAAWLGLTPKDHSTAGKTRLGKITRAGDERLRQLLVVGATSVVKVAKAKDRGPRWLVELLKRKTPKLAAVALANKMARIAWKLMTTGQSYDSARIDAQMAVAA

SEQ ID NO: 480520 - protein, 312 aa, unidentified
MNWVGVDTHKETLACYVNGRFKEFKTTEKGFEAAIKWAGNDSKWAIEGAYCFGKPFTAHLIRNGCEVYEVNPLLTKTWRRSLAISNPKNDYGDAKVISLNANSARLQKISLETIQLKEKITARSHFVKDRTRLINAIKMLFSTRGLDLPCKDLTTLKAGKWLSNQEDLIIKHYGKTLTDFNQAINEFDKEIEKSLPEKAQKLKQLTGVGDLTAAIIYTETKGKIISEESLVSYAAVAPIENSSGRSKKHKNNKTGNRKLNSAFYRISLHQSIWDEEGKAYFERKLKEGKTKRHARKCLARQLVRIVFNLLKD

SEQ ID NO: 480521 - protein, 333 aa, unidentified
MEYCGLDVHKLSITYTCMTEEGKVLRRERVATTPEAIRGIVAPSGGKAWVALETTRGWSYVYDVMEPLGVRIFLAHPRRVKAIASAKVKTDAIDSATLAHLLRTNLLPVSYAPPPPVRSWREFLRTRQALVQMRSACRNRIHDLLAKEGLIVPMSDLFGKKGHRWLATQSLSAPHRQLVDLLSNQVGSITQAITEVEENLRHALGDPPVFDRLTTVPGFGLLTAAAFLAEVGDVERFPRARRLVSYLGLAPRVRDSGGHVRIGRLTKEGPPLICSYLVQVVQNSIRSPGPCQDLYLRVRERSGSQAARVAVARKLAILAYLAWKLSINVSSRE

SEQ ID NO: 480522 - protein, 457 aa, unidentified
MRQRGRRTKGMAEAHPFAGMSQVNANAAGVDISAEEIVVCVAGDANTQIVKAFGNYTVDLQNIGKWLQEHQVKTVAMESTGVYWIPLFEELERQGFECLLISSRSLRRVAGRKSDIQDAQWIQTLHSYGLLESSFRPQAELVALRTLLRHRGQLLDHRSPHIQHMQKALLQMNVQLSQALSDVTGETGLTIIRAIVSGERDPHKLAAMRDRNCKKNEEEIGKALTGTWRAEHLFILRQALELYDFYTKQVEVCDEQIDRLYALTRPDWDGGELKALPQKKRNSHSKNAPQNKEEIRKHLKRISGVDLSVVDGFGVSLAQTVIMEVGTDMNKFPSEKHFCSWLGLAPKHEISGAKVLKNKTMKTKNRAGQAFRMAAQSVKRADCVFGSLYRRLKSRLDKAQATVATAHAIARVVYRMLKYQVEYETISVNEYEKKYKEQQIKYMKKKAEKFGFQLVPI

SEQ ID NO: 480523 - protein, 481 aa, unidentified
MNTKNIYRNNNQILKETLSMYKPENILYVPIEIGKFNHKAGIVNFFGDVVINPFEFPCNKHGLDFFLKKLQLAMKISSAKKIFIGCESTGHYHLNLVYHLKQFSLPVESINPRDTSRENPNKNAKSDIIDLNAIARCLISNKGARQVIPEGIYYNLQRATRTRRKFVQRETSSKNTITSLVDRIFPGLWDKDNSIFSDKWGKASLLLLQHYPHPHQIIRLGEKRLTQFLRKHNTKLGEETSHKIISAAKDCLAKPQEELKMDIYALSSHIKVLLLYQEIISQLQQKIACLLIQTPGIYLLSVDGISLIYASEFTGEVGDITRFAYAQQIISYAGSSSRKFSSAEYQAENLPITHFGSVFLRTTLNQIALSLNAWSQPFHLYYTKKTLEKKDRPGIARIATGNKFVKLAFALMKEEQLYRPKGVLLDEKSYYLGLWKKILTKLDGLDLSQVPPETNYLLKIKKQLQEQYGLRLDFNFKDGKG

SEQ ID NO: 480524 - protein, 435 aa, unidentified
MRAPRATLVPAVGKERSVEIIYERVAAIDVGKKIIAVAVRTPGERAGQRRQQVRKYHTYYQTLVEMVTWLVAEGVTHVTMEATGVYWRPVFHALCTAPRPLEVLLVNARHVRNVPGRKSDALDAVWLAKLTECGLLRGSFIPPPQIAVIRELTRYRKKLIEERTSELQRLAKVLEDSGIKIDSVASTLTTLSARDMIEALINGERNPGVLADLARGVMRKKIPDLTLACAGRFGDQHALMCTLHLEHIDHLTDMIARLDTRIDEASLPFAQQTTLLATIPGIGERAAQVIISEIGVDMTRFPTAAHLASWAGLCPGNNESAGKHRSGKTRKGSKQLCATLTECAWAAGRTSTYVGAQFRRFHRRFGKSGGRKAAIATAHTLIVIIWHVLTQTTAYRDLGSDYFTRRVDHPDTRKRQLIRELEALGHKVTLEPTAA

SEQ ID NO: 480525 - protein, 355 aa, unidentified
MSQEKYIGMDVHQATISVAVMDGNGKLVMECLLETKAATILEFVQGLRGTLSLTFEEGTSAAWLHDLLKPHVSRLVVCDPRKNALLKEGNKSDRIDARKLAELLRTNQLKAVYHGEHGIRTLKELGRSYLTLSKDVTRTMNRIKSLYRSWAIPCAGTSVYAPRHRAEWLAKIVEPGVRIRAERLYQQLDGLQSIRQQARRGLLQESHQHPAVKLLRQIPSIGPIRSALLVALLQTPHRFRSKRQLWAYSGFAVETHDSGEYRYVRGKVQRNRERITVRGLNDNHNRDLKNLFKGAAISASTRPGPLHDFYVARVAQGMRPTMARLTLARKVAAITLTMWKKGVSFDPQQLSRQSV

SEQ ID NO: 480526 - protein, 340 aa, unidentified
MEKRYIGIDLRRNRFTCCIRLENERTYVTEWELEDLGRFVKKLRGSDEIAVEITGNTRLFYDAVAPHVARVVVVNTNQFKVIRQSVKKTDPHDARALALYLSKNMLPEVRMKDKEHAQLASLTQTRDTLVKLRTALKNKVNNILSARGLNLAKEALSSEKQLAEVLELPFDEIVRIELRVIVEQIRGLNKSIAELEKTIGEEGSKLEGHKGLSSIKGIGKITGAILLSVIGEVNDFADEGHLASYFGIVPRVSNSNETERSGRIHKRGTKRGRTALVQWALIAANYSPYLKRFYEQVKARRGAGKAIIALARKFLGIIYRTLKNKWIFEDFPNFVLAEES

SEQ ID NO: 480527 - protein, 350 aa, unidentified
MKKVVKQVVGIDAAQNELVCCFGKVYEDFKLELVTRFTFENKKTGFEKLELLLENIVDKGTRLRFVMEATGVYHQSFAYYLYEKGHHVSIILPNKISNYARTLAVKTVTDKTMADAITQFGLERNLDDWQPPKGIYRILQQLTRERTQLVDEKVVIKNQLHAENAEAKPNRKSIERCNKRLALIEKQEKEIVQEIQNLIATDAEVKRIVLLICSITGIGILTAATVLGETNGFELIRNKRQLTSYAGLDVKEKQSGTSVKGKPCISKKGNKNLRKAMHLPALSAIRNDERFKAIFARIVSKHGIKMKAAVAVQRKLLEMVYTIYKTGVAYDKDYLKKQNENIEDEKIVTL

SEQ ID NO: 480528 - protein, 323 aa, unidentified
MCVVDADGVVIRREVVASDPDVLARWLKRHCAGLARVVLETGPLSTFLYHGLKERAVPVICICARHAKGVLSTRVNKSDVHDAEGLAQLARTGWFKAVHMKAGATHIDRAALKIRSQLMTSRIAFANQLRGMLKLFGLRLGSVTTPGRRRERLDALFGQRPDLRAVFQPLIESIEALEAQLARSTKLLDARAAADPVTTRLMSVPGVGPITALTFKSSIEDPGRFNRSADAGAYAGLAPRRNQSGERDCNGRISKAGDPMLRSALYEAANNLLVRVKRPCALQTWGKKLLETKGPKRARIALARKLAALLHRLWQSETEFCWN

SEQ ID NO: 480529 - protein, 357 aa, unidentified
MLEGLESLSGSVGQSGVFLNPNSCMGFEPEPSKEGSWMMAQNDLIVAGIDVAKDKVDVCIRPLSLRRTFASTTEGRRELASWLRRKKVGKAVMEASGGYEREWAKALRDAKIEVRIVDPKRVRDFARSAGRLAKNDMIDAEMIAWFAETFDEAPGQAHDAVREELAQIVNARLGLIDLQTRLLNRDEHAGPEPVQKMHARMLKKIAVEIAKLETVIAVMIKATPRFVELAEIIESVPGLAETTSATLIAKMPELGQVNNKIGAALLGAAPYDDDSGCRRGERHIKGGRRKVRNLFYMACLGAATQHNPVLKAFYDRLIAKGKEKKVALVACMRKLIVILNIMIARRQKWDPNLHVLG

SEQ ID NO: 480530 - protein, 374 aa, unidentified
MEQLIRIGMDTSKSVFQLHGVDASERPVLVRKLQRRAVVAFFAKLAPTRIGLEACGGSHHWGRTLQALGHEVVLMAPQHVKPYVRRGKHDAADAEANCEVMSRPRTRFVPIKSVEQQASQMLFGTREQLVRRRTQLSNMIRGHAAEFGLVVAQGLAWIGPLLLRIAGEASVPALAKELFEMLGEEYRAVCMRLAMVEKKLAAAYRQDKTARRLAALPGVGPIGAMLLGIKVTDANAFKSGRDFAAWLGLTPKNHSTAGKTRLGVITKAGDETLRQVLVVGATAHIQQVRGGRTKASPWLTGVIARKPPKLAAVALANKTARIAWKMMVTGEPYRGDHAGSIAPASPPSRPLRAADGGGLRPALTAARRGAARPE

SEQ ID NO: 480531 - protein, 401 aa, unidentified
MKEDPKRFIGLDIHKEYFVAVGVNPQREVIFGPQKVSNYQLDNWITRYLTPEDAVVLEMTTNTYLFYDSLLPYVHSVIAVHPPNVALVTNAQVKTDKKAALALAQLHAVGLLTGVWIPPQNVRDLRSLIAQRDKMVRLSTIAKNRLHAILHRKHLILSERPFDPEQRSWWESLPLSATEQFLVHSDLDTLEFARKQLELVETCLKQESAQDERIPLLIQLPGVAMLSAITIIAAIGDITRFATAKKLVGYAGLGTRVHDSGMTHASGRITKTGRRDLRRAMVTAANHAVEHHVHWKKEFERMEPHLGRSKAIVAIARKLLVAVWHVLSQQVADRYADPGNVASALFRYAYQVGLKNLPEKQPALVFTRTQLDRLGIGMNLQEVPWGRAHHKLPPSKLPQEK

SEQ ID NO: 480532 - protein, 348 aa, unidentified
MMIIGCDYHPSWQQICWLDTVTGETGEKKLEHASGEAEKFYRGLPGPALVGMESTGNCQWFVEMAAALGHDVWIGDAAKIRAADVRQQKHDRRDAALILKLLLEGRFPRIWTPSREEKDLRQLLIHRYKLVRIRAQVKTELQHLAMNQGVTKKRKLWSKAGEKALRELPLKPWASRRREDLFRIREMLNGQIGLLDQAVVEAAEKNEKARLLMTQPGVGPITSMAFVLTMGDVSRFQRGKQVASYLGLIPREYSSGGHRRYGSISKQGNRFMRMLLVEAAQGAVRCDPGMRSEYLHRCHRKAKGVAKVAAARKLAIRLYWMLRTNTGYPEVVRVESSSRVPVVVRHGG

SEQ ID NO: 480533 - protein, 323 aa, unidentified
MTKDIKYFGIDISKDVFDVCDNNAKYYQFKNSISGFKKLVKLLDLNSVCVMEATGYYHSRLAYFLLESGFGVSVVNPLKIKRYIQMDLSKIKTDKSDAKMIQLYGKDREPKLWTGQSKTQQESLQLSRTLSIYIKQSTQLKNKIHGEDVLGNPSKIVVRSLKRSLKYLKKEMDTLEKALDKNVKKEYQESLTLLKSIPGIGDKTALMLLVFTDGFQRFESSKELCSYAGITPIIRQSGSSVKGRPRISKMGNPKLRNLLFMCSFNACKYNRACKALFDRIVAKGKSKKLALIAVCNKLLKQAFSIVKNGVPYNDEYRSTLVKN

SEQ ID NO: 480534 - protein, 265 aa, unidentified
MNTTQIGVDLAKSVFEVAVSHIPGRVHERHRLSRTRFRRFFADRAPTEVLLEACSSAHHWGRELQALGHRVALLPAADVARYRDGNKTDRADAKALLEAARNEAIDRVPVKSVEQQALSALHRLRQGYLQTRTARINALRGHLREFGVTIPLGAAQVLPRARAALAEEHLPSYLRHALTEVLEEIATLQAKAAALQDQLDRLARQLPEASLLMSVPGVGVRTATALLAFVGDIHRFRSGRDFAAYLGLTPREHSSALSRPPRRHH

SEQ ID NO: 480535 - protein, 391 aa, unidentified
MSMYFIGIDISKYKHDCCIISAADQKVVSKVTIKNNKAGFNELLTIIHSLANPADIRIGFESTAHYALNLELFLENSLLTFMEVNPVLISEYKKSKTLRRTKTDSVDCESIARWLMTVEYKPHSKGFYHAYSLKSLTRLRDKLIRQRSFYLVKITNVLDHTFPEFKPFFNERLSKTALYLLENYGSAEKMARMNSASYEKLRSVSRGKFSPQQFLRLKELASNTVGVNNSIFDVELNSLLSLYKSLVKEIDTIEKEINKLIEEVHPHYMSVPGIGPLSAAVIYSEYGDISNFTNPGQMLAFAGIEPGINESGTESHGGKMVKRGSSQLRYTLINCCLPLIHFDMTFATYYAKKRGEGKPHRVAITHVAKKLIRVIYALESQDIDFNAQKLR

SEQ ID NO: 480536 - protein, 306 aa, unidentified
MRIIGCDLHARQRSLAMLETATGEMVNLTLKHEGNEVREFYSQLPRPVLVGIEATGSMHWFLNLMDELGIECRVGHPATIRAAAPRRQKNDRLDADLILKLVAENRFPAIWLPTKELLDLRALVRHRHQWVRMRTRIQNALQAIALANGLRRGPSLWSYDGQAKIAFLPLLPHRRSALQAMYQKMDEEIEKLTQQVAEQAGQRSGARRLMTHPGVGPVTALATDVFLGDPKRFADGKALASYVGLIPREYSSGGRQRLGGVTKQGSPLLRFLWGEAGAHAVRRNPELKRFYRRKLVQKGLGRRAWQ

SEQ ID NO: 480537 - protein, 445 aa, unidentified
MQKAYLGIDVSKGYADFTLIDDKRNILEENFQLDDTQKGHRRLLEILHSLKEKHQFTQINAALESTGGYENNWLTLLKEVESLNLNVARINPYGVKHDIQAQMKRTITDSVSARHIAEYILRYPDKVNYQEEAYNLFDSLRSQYNYITTLVKQKTQLSNQLEKHVYSVFPELLPYCQDSMPNWVIYLLSEYPTADSIREASVEQISQIDYISVNKAKMIKNKAAKSVSRINNSAIQNLVKHIAMDILLRSQSINQLKKQLEKEANKDNLVQLLCSFQGIGAYSAIGILIEIEDINRFPSSKKICSYFGLHPIYKQSGDGTSYIGMSKKGAAEIRGILYMVTRSAIVYNPHIKQLYERYKSRGLKTSQVIGILMHKILRIIYGMLKNNTSYDPGYDLECQEKSLNSKKQNQDDKKTRRYFNWDEDAPISKRQAKKRREQYIAPNSS

SEQ ID NO: 480538 - protein, 436 aa, unidentified
MITRKNIQKYDAVLSFDWADEKHDYCLWDAETNSIETDTIANRPEVIHDFICRMRFRFQGKTVAVGLEQSKGALAYQLMEYGFFTIYFTHPTTVAKVREAWTPSGAKDDPGDAELIMSIVRDMNHKLRAWRPDTPETRRLMLLCSHRRKLVDLRVKLTNMLRSCLKTYYPLACKVAGDKLNEPLALNFLTKWPTYEALKRSRSSTIETFYARGNGRSSKAIQKRLDAIRNAEPATTDPVITESYSMQMLALVAQIRQLRDSIKLYDTKISETYLSHADVSIISSFPATGKVFGPRLIAALGTDRERFESANEIECYSGIAPVVDRSGKTAKIYRRYKCSTFIRQSFHEWANETTKHCLWARAHYVQCREKGMGHHQAVRSLAYKWIRIIYKCWKEQIPYDDGHYMSMLKKRGSNLMKLIAEHPDVYRLNGPVKVKF

SEQ ID NO: 480539 - protein, 315 aa, unidentified
MERSPVAPTFVGIDVAKNRLDVHLRPAGETFALGRDGFGLAALVERLVALTPALVVLEATGGFEVTVAGTLAAAGLPLVVVNPRQIRDFARATGRLAKTDRLDAEAIARFAEAVQPAPRPVPSAAAQALGELVARRRQLVEMITSEGQRRRQTRDPRLGRRLEAHVSWLQRELATLETDLDDAVRGTPAWRATEDLLASVPGIGKTSARTLIAELPELGSLDRRKIAALVGVAPINRDSGTFRGRRMVMGGRASVRTALYMPTLTAIRHNPALQAFYRRLIGRGRPAKVAITACMRKLLVILNAILRDHRPWQTP

SEQ ID NO: 480540 - protein, 456 aa, unidentified
MNFEKTDANPYNRNVRDQQKLSTNQKYEEAPIMNLTQNDKIEQIKDETLVVGVDIGKETNYARALDNRGRELKKHVKFTNSREGFRAFDKWVSEISLANEKTDVIVGFEPTGHYWFSFGDHCKKLGHKLAIVNPMHVKRTKELDDNSPTKNDKKDPKTIAMLVKDGRYREVYIPEDIYQELREAVYEKERLTDLTVSINNQVIRWIDIRFPEFTKVFSKWYGHAALMALKNFPTPEKVLKAGVDNIVSKWKEEISRAVGRKHAERLVNAAAESIGRKTGTISSEASLKNLIDQYELIMRQMKEQEALMLELLLRVPNADKLLGIKGIGLIAVATFVSEVGDIRRFESPKQIIKLAGMNLKEDSSGKHKGKTRLSKRGRKRLRHSLFKAMITVLAKNTEFKAIHRRNITREINPLNKMQSIFALCGKLIRVFYAILSKGTEYDPNKLMIEIPSMKAA

SEQ ID NO: 480541 - protein, 375 aa, unidentified
MFHFTTLFIGMDVHKESFSLCYYDMMANQFKHSTKVGPNVSYIVNYVNELRRLYGQDVEVLCGYEAGCLGFTLYHQLQAHGIPCIVMAPTTVMKEGSKRVKTDKKDAAQLTKALAFHSYRPVHISTVEDEQVKEYICMRTDHKVALKKIKQQILAFCLRHDFRYTEGSSNWTQKHVRWLCPLNIDGLYAEILTEYLLTYEKLVDQIERYDARIEQLGQSDSYQEKVSQLFCFIGIKTLTALSIVTEIGGFNRFATAQHFDFASYLGLTPSENSSGDRERRGAITKTGNSHVRRLLIEAAQSLAKGTIGYKSKELKRRQSGNRVEVIAYADKANERLRRRYRTLVLGKNKKQNVAKTAIARELSGFIWGMMTGRIA

SEQ ID NO: 480542 - protein, 347 aa, unidentified
MTTVEAVRGITGGVDTHRDVHVAAALDPLGGLLGTEQFDTTPAGYKALFGWLESFGQVTKVGVEGTGSYGAGLARFMRRAGVTVIEVDRPNRQKRRRTGKSDSIDAVEAARAALSGRATGSPKSRDGAVEAIRVLVVAKRSARQARTKALIQMRHLGYSAPEQLRCRMKGLSVPALVAEGKGLRPTRSPDPVTAATKASLSSLAHRIEALDTELAALDQRIEALLVATVPDLLELFGVGPDTAAALVMAAGDNPQRLHSEAAWAHLCGASPVPDSSGRTSGRVKAHDGGDRQANSALWRIVMVRIAHDPDTRVYFDRRVKEGKSKAEVIRILKRYVARETYKYLPRG

SEQ ID NO: 480543 - protein, 520 aa, unidentified
MHQTKYRGIITEAGSLTFSPWEPAGPLLAKPLRKSVSPFGGDLCFGWLGSPRLYLYEPLGCVSAFWKWMPARKDKNMQYQKVLKMLENIPYLSVGLDVGADFSWMSIMLPNGTLTGKPFKIVHSDPRSRELAVAKIKEAQEAYSLESRCFLESTGIYHIPLLCFLRDKGFDCSVINPIITKNSTNMNVRKLHNDKFDSKKAAKVGLDASLKTSIIPDDEVIDLRNLVRDYYYFKDLQSAVVLKLTAELKVSFPAYRKVFSKVTTQTSLKLLEAYPLAADMLDAPKDELVETIRKTARFGKKYALSKYDAICAAAKDAAIFGRALPSNALRIRLYIKTYREYQEHLDSILEELHKAVDKLEGTPDYDRILLLQTLRGIGFLSAVVLIAEMGSFDLFPSPKKLYAYFGLDPAVKQSGKFNGDRVHMSKRGSSLARRILHMAALNNLKVEKGTKTPVNPVIHSYYANKCKSKKKNVAVGAVMHKICNIIFAMLRDNKPFEMITPQEHCEQYLAAHSGKARNAA

SEQ ID NO: 480544 - protein, 343 aa, unidentified
MELFVGLDVSLNSIAICVLSSRGKVHKETTSACEPDDLIAFLRTLQGDVACIGLEAGPLSQWLYRHLVEARFETVLMETRQVKGALKAMPIKTDRRDAEGIARLLHMGWFRPVHCKSISAQEMRALLSARKTIVQAITNLELSIRGILRNFGLKLGRVSKGGFAERVIELAEDNLKLYAAAKPILDARRALRHELASLEKLLGDLARTDRLCHLFMTMPGVGPIVALTVKAAIDDPNRFHSSKDVGPWAGLTPRREQSGERDIIGSISRAGDAGLRTVLYQAAMVMLHKGRPSWLTAWALNVAKRRGKRRAMVALARRIGVILHRMWRDETPFRFTRAEPISS

SEQ ID NO: 480545 - protein, 343 aa, unidentified
MEEVSVIGIDLAKNVFELSAKSAAGALTWRKRLKRAAFMRFMEEKAPRCLVAFEACGGAHYWGRWLLARGFKVKLMAPRLVKPYRLGQHKDDARDADACAEAGSRARVPAIRVKSESAQALQALVRIRTRRIRQVVQTANQLRSVLYEFGIVVPKGHRRMLEAIAGVMSSLPAEIAGMVEGLCGELSEQMRAVKATSEDLLKCIKHEESCQRLMTIPNLGPINAASLSVALEAPGEFANGRAFAACLGLVPRHAQSAERQALLGIAKQCANETRRHLVLAAQSLFNRLNRMKELPQDRFLLWAHALLKRKNRNVAAVAVAAKLARIAWAVAAKEQVYIPRLPA

SEQ ID NO: 480546 - protein, 324 aa, unidentified
MRKSDDWVVIAVDPHKASWTAAAVDGSLQPVATVRVPVSRDGYRALRRFAHRWPHARWAIEGAAGLGAPLTTLLRTDGIEVIDVPAKLAARVRVLSSGHGRKNDDADALSVGIAALTSHALGTAQIDAATTALRAVVEHRDDLVKTRTQTVNRLHVVLTRLVLAGARRHLSTDHAAELLRGVRPRDAAAKTLRALAMDLVGEVRQLDRRIAKAANDIQMAVSASGTTLTELHGLGALTAGKILGRVGDVSRFHSAAAFASYTGTAPIEVSPGEVVRHRLSRAGDRQLNFCLHVMAIAQVRHDTPGRGYLRKRSEGKITTKPCAA

SEQ ID NO: 480547 - protein, 420 aa, unidentified
MSKTLYVGIDPHQKENFCCLLDQEGNKVINTFSVANNLEGAKELEDRIDLIMKEHCFTELKAATEAVSFLDLHIVDYLASSKLLSKYSPSVYQFNPKITAGFKKAYPDKDKTDAIDAFVVADRLRFGRLPEPYEDSQPYFPLKRLTRYRYHLVSNISREKNYFLTHLFLKYSSFSDVKPFSNVFGKAGIAVITEFFSSDELASMDIEELVEFLIKEGKNRFSDPEAVAQKVKQVARESYRIRPALANSVNLILSSTVENIRALTSSLKEVNEAIASEFKAFPNTLESVKGLGPVYSAGIFSEIGNIKRFSSHAKLAKFAGLTWRKSQSGNFAAEETYMTKTGNEYLRYYFVEAANSLRMHNEEYRLYYESKYKEVPKHQHKRALALTARKLVRLVFALLTKNRLYQENEAFSKNGVSFSL

SEQ ID NO: 480548 - protein, 321 aa, unidentified
MNRVLVGVDVCRDFLDAHARPSGLPKRFDNTPAGIEQLVAWLRSLAPERIIFESTGPYQKAAVGALLAADLPAVVVNARQVRDFAKGTGQLAKTDAIDASVLAHFGEVVATVVRPLPSQEILEFRELCDRRGQLVRMLASEKNHRHAAQGASPKVIKNIDKHIAFLQRQIDDLEERMDRIVADSETFKAKDEILQSIVGIGRQVSRVLLVHLPELGKGTRRSIAALVGLAPFADDSGASSRIRHIRGGRAKVRMALYQAAVAAVRYCPTMKSFYASLKARGKATRVALIAVARKLLVLANALLRTGIPYQRPTNSVCLKYP

SEQ ID NO: 480549 - protein, 347 aa, unidentified
MKQRSTTVKVFAVDLAKRSFQVAGEDRHGVVVFESRYRSREAFREFLGTLQAGQQVLMETGPGAQAWARVVQSHAARARLLPAQRVREHRSGAKNDRKDTLALLRAGRDTAIHDVPVKSVEHLALQALHRVRRGYIRRRTALSNQMRGLLLEHGVAMARGDAALCACLSGALADASVPLPMCLREILAELWAEWETLGKRLARLSGQIEQTVVHEPLAQRLMTIPGIGPITGSAMACKELPIERFASARQFAASFGIVPDQHSSGESIRLGKMCKRGDRYIRSLLIEGAHAVLRRVQPEAQGNRLQRWVLRHGRRGAAVRLANRNARIAWALFLRQTTYHTEKPSMR

SEQ ID NO: 480550 - protein, 346 aa, unidentified
MNYISVDCHISSLDFAVVNDTGELLKSNRAATSVNNLIGFVKSVPRPRQVYIEEGALAAWVLETCVQYGEKVVITDPKRNRWIGSSGEKDDPIDKLKLAQLARGGYIKEIHHPVGQRRRFRELMEAYHDTVRSTTRIKNKIKAEFRHNGIQCTGTTVYLEAYRQQWKQKLPQDATLLLILDGLWRQLELSEQTEKELLAAAKIQAKQYPEIKRFKALPGIGFIHAATVSAILETPHRFANKRKVWMYAGLGIMKRSSGGKLYTEKLTTDYNRLLKYTVKQAAGAAIRDTHSNPFRRKYLDMTLSGIAPHRARLTIARDMLATMWAMWKKGEKYNPEIREKASHKQG

SEQ ID NO: 480551 - protein, 341 aa, unidentified
MKNKSFIGIDISKNVIDASIFCEGTPIKDFPHDVFNNSRKGFGEMCTWLKKNHVVLSNCLFGMEFTGSYSMELEKFLNARKYQFCMLSTHVIKHYPMGPKDKSDKIDSAKIADFLYRYNGTECVKPYKMPDKTMQRLKALMNERKFLVEQRTCFMNRRQLCTTKEDAQLYDSYIKKLSHDIENIELEVQKLLETDDSLSTTYKNLLAIPGIGFVNAMNVIVITRNFTAFETARQYASYIGVAPHFHTSGTSVRWRPRPSARCDGQAKADLSMAATVAVQYDAELQSFYNRKLGGKQDSDTKRKALNAVKFKLVLRMFAIGKQNRKWELLDSKSSNEKLAIS

SEQ ID NO: 480552 - protein, 361 aa, unidentified
MNYIFVGCDSHDKTLVNKIALNREAPERRGFAATRAGRRKMIEYLKERSQAAGGAKVVVAYEASGNGFILSDELKAAGIECHVLAPTKIERSLKQKRNKNDDRDADRLLDIVRGHYLAGTKIPSVWVPDLQTRDDREPVRGRQDLSQKQTAVKTQLQMLLKRHGIEKPEGVGKSWTKPYRQWLKALSEDARQGSGIKSVLASLLRQLEFLEKEIEQLNEAMKQLAETPRWQPIIQALMKEKGVGLMTALKYATDIGDFSRFRRGRQVGAFYGLTPSSNESGENNDRKGHITREGSPTGRQVLCQSTWSRVRHDEQEREVYRRLVLKNPKKKKIALVACMRRLAVRLWHVGRQAQLQMPTSS

SEQ ID NO: 480553 - protein, 355 aa, unidentified
MDSKKYIGMDVHKESISLAVMNAAGKIVMECVIETKASMILQFFDGLRGDLQVTFEEGTSAAWLHDLLKPHVTKLVVCDPRKNASMREGNQNDKIDARRLAELLRLNHLHPVYHGEHGLRSLKELVRSYLTITKDLGRVMSRVKAIYRSWAIPCSGKQVYAPRHRVEWLGKITEPGVRRRAEFYYQQLDALRTLRKQVRRELLAEAKKHPVWKRLCQIPAIGPIRSAVLLGILQTPHRFRSKRQLWTYSGFGIKTESSADHRSVDGQLKRVKKQSSVRGLNRNCNHDLKNLFKGAAIVAASKPGPLQEFYSALLSKGLRPEMARLTLARKIATIVLIVWKKGVCFDAQHLKPQTA

SEQ ID NO: 480554 - protein, 317 aa, unidentified
MRAARPWIGIDVAKAWLDVAGDDEAEAVQRFANAAEGIAAVVADLVAQGPQLIVLEASGGHETAVTAALAAAGLPVAVVNPRQVRDFARASGRLAKTDALDARLLARFAARIQPPVRPLPDATAQELAALVGRRRQLVEMRTAERNRRPTLAPRLRLALDEHVLLLSQQIADLDRELEQTLRESPLWRAKEDLLRSIPGIGPVVARTLLAELPELGTLDRGQVACLAGVAPLNCDSGQRTGGRHCWGGRAPVRAALYMATVCAIRRNPVIRPFYARLRDAGKPVKVAMVACMRKLLIVANALLRDGTVWNPDLLPTP

SEQ ID NO: 480555 - protein, 320 aa, unidentified
MSTKKAKSFIGIDVSKQLLEVAVHESDYQFRCANKTSGFAELIGELIRLRPALIVLEATGGLEIPVTAALQAAGLPVVVINPRQVRDFAKATGQLAKTDRLDARVLAHFAAAIKPPLRPIKSADELELDALVGRRGQLVEILTAEKNRRGSAATETVRQEIDEHIDWLDQRIAALDEQLKGLLKTSALWQSNDAILQSVPGIGPVVSVSMLAELPELGTLNRQRISKLVGVAPLNRDSGPQRGSRHIYGGRKRVRSMLYMATLSATRFNPVIKAFYQRLLAMHKPFKVAITACMRKLLTIINVMIRDRTHWKTEVEPLSA

SEQ ID NO: 480556 - protein, 396 aa, unidentified
MNESTTFVGLDVHKLEHAVAMYLPEQTEPQQWTVKNNPTEIARMVRRVGKLALGPVVFAYEAGVCGFALQRLIHEHGAACQVIAPALTPVRPGDRVATDRRDARNLGRLLRAGLLTPIHPPTPAQEAVRDLCRCREAAMIDLRRIRQQINKFLLRRGQIFLDAKNWTGKHVAWLRAMRLPLETEQRVFENYLLELEHRRQRLEDLDKDVHEQAAEAPYREPVEWLRCFRGVDTLTALSLAAELYAIERFGRPRELMAYLGLIPSEQSSGQTRRTGSITKAGNRRVRRLLIEAAHHQGKPIRMSKVLVARRRGQPAWVVGIAQRAQKRLHDRYWRLVNRGKAPNKAATAVAREFSGFVWSVLRGPRTGGLPGDACPAAKAKSPRRRCAATPVCQGGV

SEQ ID NO: 480557 - protein, 390 aa, unidentified
MIRRGKLLEIAAESPASGSIFKGGHGRSMSGRSSGKTVVQQDRRVRTSGDPEQLQGHKDRILAWDQLLLYKAEAGMTTSSGKFVGIDVAKDKLDIAVLGEKKASQVGNDEVGIAKLIKRLQTLNPELIVVEATGGYQRAVVLGLYEAGLPVSVVNPSRVRQYARASGLFAKTDKLDAFNLAEFGKQMKPRRFEAKSEAGRDISALLVRRRQLEEMLKAEKSRLRTVPPKMRGSVERMIETLKEEIKRLEKELDKFMKENEEWQAHEQILTSAKGVGRITATTLLAELPELGKLDRKKIAALVGLAPMNADSGKKRGYRKTKGGRMEVRNVLYMSTLVATRYNPLIQAQYQQLLKRGKVKKVALTACMRKFLTILNAMMRDKAPFRQTVIV

SEQ ID NO: 480558 - protein, 402 aa, unidentified
MIFINCLGIDIGKSQSLLAHYKDEVLVKEMVIQNNQNGYRYLKNYIKHLDSLFILFESTGIYSRGMKHFCEIHKIDYLEMNPLEAKFKMSSLRLWKTDKSDAHKLALLAFRMKDSKVQRHPEEIYFELRERARFHLEMEINQNRLKVELVETLHQTFPGLEKLFTNRYSKIALNIAKAFPHPDFVSTLTHDELVEKVLHSTDKGISVNKAHKYVQKLIEIKNNSFPNVDKSSFLLQKVQYLCDKLLIGIEEMKEFDQEMIDLAKNTTEFENIISIPGIGELTAALLIGELGNIREFKTNKQLNAFVGIDIKRYQSGTSKSRDTINKRGNKKARRLLYLIIMNIIRGRNHYQSHIVDYYYKLREQPHGKTHKTAVIASINRLLKTIHYLIVNNKLYDYQKAPH

SEQ ID NO: 480559 - protein, 420 aa, unidentified
MKSKDNVEIVAFVSLDWADQKHAVALQESGSNQRHHFTLDHTPEALQGWIQSLRDRFGGRAVAIAVEQKRGALIYALMHVEFLHLYPVNPVTVAKMREAFHPSGAKDDPGDADLLLDILISHRHHLRVWTPDDALTRSIQLLTEDRRGVVDERTALTNQLTSALKIYFPQALDWFGELHTARACAFLQRWPTLQQLKQASLSSIRKFYKAQGYRGDDKLEQLLANIKKAQPLTQDSAVLLSCSMKVDILVQQIPLLTEAIHRYDEKIAALFEQHDDSTLFGSFPGAGPALAPRLLAAFGSNRDRFECASQMQELSGIAPVTEKSGQGIWIHWRLACSKFLRQTFHEFAGCSIVQSDWARACYDQLRKRGKSHHAALRALAFKWIRIMFRCWKNRTPYDEAVYCNSLKIRRSHLADELPGS

SEQ ID NO: 480560 - protein, 351 aa, unidentified
MGRSIGVDLHRNNFVTATRAENGRTYLRTWKMADIGRFADQLRPDDRVAVEMTTNTRLFYDAVRPSVAEVQVVNTAQFKVITKSVKKTDRRDAETLALYLEKDMLPTVRLKEVEQGQLAGLVSTRDALVKQRTTLKNKINNRFAMYGRAIKREQLSSEKGLAAVEAEPFGALVRIEIGVLVAQIRALNASIRELDKTIEDSAEKLKGYRTLTSIKGVGTVSAAILLTVIGDVDDFENAGKLAAYLGLVPRVSNSNETHRSGRITKRGSKLARTALVQCGLVAKKYSAYLNAFHARVKQKKGGGKANIALARKLLEIIYRALKNDWVFEDFGQFRLEGGISPLKVKTKRRAG

SEQ ID NO: 480561 - protein, 394 aa, unidentified
MKLIGIDIGKNKHFFCVMDQQTGEIISQPVSFSNDKEGFDFLIQKIKSYPKDSILIGMEDTGHYHFALLKYLLDLQYTVALINPKTTDFNRKMQGGITKNDKLDTINICDVLDTPERKKQYRITKVNSFDLYEQKQLTRHHHNLKEEENVYKNRLQKCIDIVFPEFNKLFNSKYGIVYMNILKMFGSAENIANTDIRTIRKCFEIEGRGNRISLTPERLKECARSSIGISSSAEVIQIKHLTAQIELIEEQLTEIDKKIEEFSIQNNSPILSIPGISHFSGTSILAELGDISNYSKPSQIIKFAGVAPLHYESSQFNAQHTSITKKGSKYLRKTLYQIILPVIRHNPVFNKYYQLKISQGKGHRCAQGHCVRKLLRIIYHLLKTNQQFDPQLLR

SEQ ID NO: 480562 - protein, 411 aa, unidentified
MEVIYARCAGLDVHKQTVVACVRQPGARPGTRSEVTQTFATTLAALQELAAWLRACGVTHVAMESTGVYWRPVYAVLEGTVEVLLVNARHVKMVPGRKTDVRDCAWLAQLLECGLLRASFVPPAAVRDLRDLTRLRKTLSRERGHHVNRIAKTLELANLKLASVVSDLMGKTGRAILDALAAGRTDPLQLANFARGSLRKKRPALVAALTGRLTPHYAFLLGEHLALIDTLDAHLGLLDARIAAALTPFQASVTRLQSIPGVAQRASEAILAEIGTDMSRFPTPGHLASWARLCPGLHESAGKRRPATSGRGATWLRATLQEVGWAAVRTTGSYYRALYYRLKARRGSHKAIVAVQHALLVAIWHMLSRQVAHHDLGADYFTRQNTASIRRHHVRRLEQLGYEVLLAKPAA

SEQ ID NO: 480563 - protein, 337 aa, unidentified
MIVVGVDVHKHSLTAVAVDEVGRTLAEVTAAEGGELLVWSRSLASERLWAIEDCRQLTGMLERTLLADGEQLVRVPPKLMAPQRRAGRERGKSDPIDALAVARAALREPRLNRPRPGEQRLRELKLLVDHRDDLVDERRRAQQRLRWHLHDLDPSLTVQLGALDRAVWLERLARRLARLEQTAAVRIARELVGRCRTLTRTIVELERELQGQVDKTAPTLLALPGCGVLSAAKLLGEIGPIDRFDTDAQLARHAGVAPLQASSGKHQRHRLDRGGNRQLNCALHRIAITQGRVHPPARAYLERKQAEGKSRREAVRCLKRQLARTVYTTLKNEPPLT

SEQ ID NO: 480564 - protein, 354 aa, unidentified
MEQADSQAEVILGVDTHLDVHVGVVIDAVGRLKGTLSIETNPSGYAKLLVWAQSFGRLNRAGIEGTSSYGAGLTRFLEMSGVAIVEINRPNRSRRRHRGKSDPTDAESAARSVLAGDATGTPKSQGGIAEALRTLSVARRSAVKAKTQAVNQLRALLVSAPSVVRDALLKAKPEHCVAACAALPENDEKNLVLASLKTTLRLLAKRWKALHEELRELDKQLTRLTKLAAPRLLGRFGVGPQTAATLLVTAGDNPTRLRNEAALAALCGVSPLEASSGKTNRHRLNRGGQRQANNALWTIAMVRMRSDARTREYVVRRTGEGLSKKEIHRCLKRYIVRELYPLILADLADSSRSA

SEQ ID NO: 480565 - protein, 470 aa, unidentified
MAAVMIGVDPHKASHTAVTISAAEEPLGELRVRACAVQAERLLAWAAAWPQRTWAVEGAGGLGHLLDWQLLSAGERVLDVPPKLGARVRLLAAGDTNKNDPNDARSVAIAALRSAGVREVRPDDHAAVLKMWSKRHRDLGRTRTQVVCRLHAVLCELIPGGVPKAIIAAHAARLLESITPAGAVEAARCELAAAFVEDLRGIDARIRETRKKLAVAVQAAGTSLTGLYGVGPVVAAVVIGDVRDVSRFPGRDHFAACNGTAPIEVSSGPRKIYRLSRRGNRRLNHAIHMAAITQIGHRHSQGRAYYDKKLAEGKTPKEALRSLKRQISNAIFACLQADARRAAARAGGPGGQPGNDSVASAAGLHPGHRLFGPATPGPGHHPTTAAGNPAPGPARARGRAGHSPVAATLPPATPQVQVERPQRSEDERPGGAARRQPHSAARKARGQGSPRKPQRPKDTSQAAKNTGGAP

SEQ ID NO: 480566 - protein, 360 aa, unidentified
MKYIGLDCHKQYDHATIINTETGEIRNKRLAHTTEEFREFIGDKADTRMVIESCWNWSRTYELTKDLVEEVILAHPLKVKAIASAKIKTDAIDSRTLAQLLMANLIPEAHLRKADNRIKQRTIRHRAFLVAMRTRVKNRINDMVSSQLLPAETLAARPKNLFAKRGKGENGVEWLKSLEWSRAEDSRMFESNMRIVEHLSHEISTSNEMVKDIYEKDKDARLLSTIPGIGRTLAVLISTEIDGIDRFGSPSRLCSYAGLVPSTHSSGGKTYHGKITLEGNKWLRWALMEAVVPASYADAEIRGKLNALRKIKNANVAKTIMARWLLKVLYHVLKEGRPYIAAHPADTNPGRLSIALANSQ

SEQ ID NO: 480567 - protein, 311 aa, unidentified
MAFLHHPPYRSLGFDISKDTIAVSDGRSATVIANRRKDIRRFLRDCGADLAVCEPTGGYENMLLDECLRRGLPIHRADTRKAKAFIRSRGQLGKSDAIDARELAAYGLERWASLALWRAPEPCEARLKALVRRRNDLVAIKVAEQNRAKAPNGKELAASYKAVLAVINRQIKAVDEAIRALARSSALKQKIAVATAIKGIAETTAAALIATLPELGHMDRKQAAALAGLAPHPNESGKRIGYRRMRGGRTAIRTILFMPAMQAARGHGEFATFYKRLVAAGKKPMLALAAVMRKIVVTLNARLRDAATQQS

SEQ ID NO: 480568 - protein, 340 aa, unidentified
MSEVSIIGVDLAKRVFQVHGALPSGDVAFRKKLSRSQFMKFLSEQPPCLIAMEACATAHYWGREALEAGHEVRLIPPIYVKPFVKRQKNDAADAEAIVEAALRPTMRFVEVKSADQQSLGLLFRTRELLVRQRTQLINALRGHLAEYGIVVAIGARNVKVFQQALLDHSTRLPKTVLSISGVYFEQIAALTQKVTELEIALRRETARDSQATLLQTMPGIGPMGAAAIQAFAPPLENFARGRDFAAWLGLVPRQHSSGGKDRLGRISKMGQRDIRRLLVIGAMSIVNWASRKGSPDSWLMRLLGSKPKMVVAVALANKMARRLWAMCVKKECYEIPVLVT

SEQ ID NO: 480569 - protein, 423 aa, unidentified
MKRAAEQPFTALVGIDWSDKKHDFCLQGAGSQHRELGVVAHRPEAIDHWARTLYQRFGGPIAACLEIAKGPLVHALQRYAFIVLFPVNPATIAKYREAFVPSHAKDDPTDAEIALELLVRHREKLRPLKPQSAAMRALTTLVAQRRNLVGDKTRITNRLCSTLKEYFPQALDWFEDRDTVLFCDFLQRWPSLKHVKRARQATLRSFFWAHNMRRSELIEERIRGIRCTSALTDDVAVIGPHQLLVQALVSQLRVTLQAIDGFDAEIAAVAKRLPDYALFAALPGAGAILAPRLLVAFGEHRERYASAAQLQQYAGVAPVLERSGNKCWVHWRMACPTFLRQTFVEWAGSTIPRSFWASAYYRRQRDKGCSHQAALRALAYKWIRIVYRCWQTRTAYDESAYLLALKRRGSPLIAAISVTPQST

SEQ ID NO: 480570 - protein, 413 aa, unidentified
MEPLDDVFKTPCAGIDVHKRELSVCVEWWGADGKLNREVRSYDTKRKSVRAMGVWFKELGVTHAALESTANYWRPVFDQLETLCVVVLVNPYFVKQMPGRKSDVADCIWIATLLRKGLLRASFIPPREIRDLRDLTRLRTVRIEHAVKVGNELRQCLEKAHIKLDSVVSNLLGVSGRAMIRAMIEGETNPEVLANLAQRRMRGKIPELRAALDGRLNDHYRFLMRQHWDLLETLEKQVEKLEREIEQRVIPFDWAVRLLMTAPGIKKIAAATILAEIGDNMDCFETARHLASWAGVCPGNNRSAGKSRSGRNPRGNRFIKGILVQVALAASRTKQAYARALYQRIARHRGKKRAILAVANSLLQAIWYMLKHRQEYKDLGVNYYEEQSKEQLTKALVKRLERLGHQVSLRQVA

SEQ ID NO: 480571 - protein, 394 aa, unidentified
MSVLARRGGAIWYGDGAMKTSSRTSPSIVTEAATFIGIDYHKKYSVWHAIDAAGCDLGKGRIEHHSPHDFSTLVKRWPNARVVFEASMNWHWLYEELEQHMPADRLTLANPFKTRIIAEAQVKTDKIDARILALLLRAGLISSVHIPCKETRQRKEVLRQRCFFVRQRTMLRNRIHRLLGAQHDLKLPVCSDLFGKKGMSFLEKLELPAPAGLLLKQQLEMLKNVQLRIKEDEKALEAMMSSTEAQKHVLSIPGMGPILASVVVSEIDDIDRFNSAQKLCGYIGLCPSTSSSGGKTYNGKLMKHCNKWLRWAFVEAAWVAMGCDSYFGDLYKKKRALGKKANTAILCVARRMARITWQLLTQGRDYQKLPPAPPPKAKTKQNFPSRSNCRLVGC

SEQ ID NO: 480572 - protein, 384 aa, unidentified
MRPAGEVLAKPFEVAHSEDGLKELSTRILSYGENTRVVMEATGRYHEPVAQALCAIGIFVCVLNPIVIKQSGAGSVRKVKSDKKDALKIAKYGIDNWRDLRQHSIMDATRQQLKLFSRQYNLHMKTVNGLQNNLISLLDKTFPGVNGIFTSVARDDGHQKWVDFVMQFWHCDLVAKVSLDTFIKRYQKWCKSKGYKFSLSKAESIHNFSQGLFATLPKSDTAKLLVTSAVSALIQTMKVRASVKVEVIRLAKELPEYETVRAMYGVGEITAAQLMAELGDVRQFANRGSIVAFAGIDPEVNQSGTQNRESNPASKRGSPHLRKALFQVVSTHLKRSPVNEPVYQFLDKKRKEGKPFYVCMTAAANKFLRIYYARVKECLNALQS

SEQ ID NO: 480573 - protein, 400 aa, unidentified
MKVYIGIDWSENKHEICFMHETGEVLLVREIPHTIAGFQQLDQARQSLGVGRQEVIIGLETAHNLLVDYLWDQGYEQIYVLPPSAVKSAQKRYRQSGAKDDAWDAHLIADLLRTDRQRYAAWKPDQPLTRQIRAEVRFAQQLGHELVRDGNRLRSILLRYYPSALEAFPHLDSVVSLAFFQTYPTFQQAQALSFAQLKVFLREHHHTQTRFWPTIYAGLHSEPPASNPEVEAAYAPLALAQARILETLVRSRSECLARLGKLYLLHPDREIYDSLPKAGTLLSKLGDDRTRYPSPAILQAVAGTCPVTNRSGKHSRVYFRSACDHEFCHIVQQWARLTLEASPWAATYYRTVRPHCKTDSDAIRRLANRWLEVLWRLWVDRKPYDEAFHLKQHVLRMQVH

SEQ ID NO: 480574 - protein, 333 aa, unidentified
MSKFKHFLGVDVSKEYFDAVVILDRNKEKSIHSQFVNDYKGIKSLCKWLKEQGSTFENTLVCLEHTGMYGKLIIKCLMIEKFSLWVEMSLKIIRSIGVQRGKNDKVDAQRIAFYAMKNVEEAVIFNAPRMEINKMRNLLSLREKLVATKASLLRNVKELKAFDLEVARLSEKLQKSTIKGIDLGLKNIEKQLDKTINDDENISRIFTLVTSVIGIGKVTALFLICFTNEFTMYRTPRQLACYAGVVPFEHTSGKSIRSKPKVHYVANKKLKKQLHMCALSAITSDPELKNYFNRKVEEGKNKMLIINNVRNKLVHRVCACIRENKMFEKRQVA

SEQ ID NO: 480575 - protein, 360 aa, unidentified
MNATTVAVDLAKSVFQLAVADASWQVIETHRLTRAQFERWFHNRDVDLVIMESCGSAHHWARWLNGLGIEVRLLPAQYVRAYVRRNKTDAADAAALLEAARASDMRPVRIKSVEQQALQGLHRIRSLWMGTRTSRINALRGFLREFGIAIPVGARTGLETISRVLVDPATAVPALIRGTMSLLVDEIRLLEARIGQLERELGELARQSPACTTLLSIPGIGLLTATALVAATSGDVSHFKDARHFASWFGLTPKEYSSGGSRYLGHISKRGDRYLRMLLTHGARSVLRAAAVAQGKGREVHGVRHWALQVQGRSNHNKAAYALANKLARICYATLRDKERFDETQSLSKKMNRQAFAIPA

SEQ ID NO: 480576 - protein, 417 aa, unidentified
MGKRRNRVCGADVHKDLIVATIQSAYGTEFQEKFGTTYSELERFRDWLITNNCEQVAFEATGVYWFPVYDALSPSIDTIVANPWMIKGIPGNKSDASDSRWIAENCLDGKIKRSRIFSKEDRNLRTMTRARSGYTKTRTQLRNRIHKYLALCGIKLSSCISDIFGKSGRHILDGLVEVKDIDEILDSIPSGKVKKKRDLIKAALGNGLDDVSRMLVKDTLELLDHLEKKMEKTSLEILSRLQKRAKDLAIVMSVPGIGFTSGSIILAEIGDYRDFHTPEQLAKWCGLAPGLNESAGKKKPCGITKQGSKSLRTVLVEIAQVVAKMSNNKFSRFFHRLRARKNYNVAITALARKLITIIYHLLINQELYQENNCNTATSKPVKKDLLYLSKEERLKDGVAAIVDAFYHLKNRYSEGGG

SEQ ID NO: 480577 - protein, 348 aa, unidentified
MKIVGCDLHARQQSIAMLDRETGELTEKVIRHEGNAVREFYASLGKPVVVGIEATGAMQWFLELLEELGIESRVGDPAKIRAAETRKQKHDRRDALLILDLLERDRFPAIWMPSSEQRDLRSLLRDRHQWVKMRARLQHTLQAIALNHALRKGSSLWSGTGQEALAKLPLPAYTCQRRNELMSLYAQLQRRIQQLDKQVEEQAQHRPQARRLMTHAGVGPVTALATDVFLGDPSRFTTANEVASYIGMIPSEHTSGKRQRLGKMSKQGNSLLRYLWTEAGMHASGKDPELKRFYRRKLIQKGMGKSRIAAARKLGIRLWIMMRDEIDYEEFCRRGKLRQIGESPCRSA

SEQ ID NO: 480578 - protein, 420 aa, unidentified
MPQPNDLSRSLVTLEQDSTLIAVIEMGQSSWLVAGIVPGIERQPLKKLTADQDGLLQLLNRWRKEAAQAGHTIKRIAVAYEAGRDGFWLARWLRAREIEVYVIHPSSVPVSREHRRAKTDRLDTELLKRAFLGWLRGEPKHCSMAAIPTVEDEDAKRPSRERESLVGECTRIVNRVKANLARLGIRGFRPRLAHAPKRLDTLRTPEGTTLPANTLAEMQRDMAHLRFVKQQIKEIETTRTKRLQQASEGGRDAMVRLLARVVGIGIETADLLVQEAFSRKLRDRKAVARYAGLTGAPDESGQKRRERGLAKAGNARVRHAMIELAWGHLLHKPDSALAEWYRRRTVHARSGTRKIMIVALARKLLIALWRLVTTGERRQVCSFVRLSDRLFEGKRNWAPAGRLPVDSELQMTDRGGGNPM

SEQ ID NO: 480579 - protein, 391 aa, unidentified
MSMYFIGIDISKYKHDCCIISAADQKVVSKVTIKNNKAGFNELLTIIHYLANPADIRIGFESTAHYALNLELFLENSLLTFMEVNPVLISEYKKSKTLRRTKTDSVDCESIARWLMTVEYKPHSKGFYHAYSLKSLTRLRDKLIRQRSFYLVKITNVLDHTFPEFKPFFNERLSKTALYLLENYGSAEKMARMNSASYEKLRSLSRGKFSPQQFLRLKELAANTVGVNNSIFDVELNSLLSLYKSLVKEINTIEKEINKLIEEVHPHYMSVPGIGPLSAAVIYSEYGDISNFTNPGQMLAFAGIEPGINESGTESHGGKMVKRGSSQLRYTLINCCLPLIRFDMTFATYYAKKRGEGKPHRVAITHVAKKLIRVIYTLESQDIDFNAQKLR

SEQ ID NO: 480580 - protein, 397 aa, unidentified
MIAVGIDVSKSKSTVAILNSDGSTLVKPYAMMHTQSDMCALTDYLRTFNEPITILMEYTGHYHYPVLKKLQQEGFPVCIINPYQMKKYADVEIHKAKTDKKDAIRIATYALEKSYKLVPYSSLEQKYEDLKFLSRQYNQRISSVSYTKVQLINLLDQTMPGITQILPLKSRNPEQCVLLLFIKRFKSFDEITKMGKTRFLSSYATLVKKTRDRHAPSKGLAIYELAKNSITTRGEDPYIQLAQSQCVDLLATSQNAADEIILQMQNIAETIPEYKVLRSMAGVGDRLGPIILAEIGDIRRFHSGKALNSFAGNDAPPYQSGQFESRNRHISKRGSAILRKACFEVMQALKMIKPQDDPVYQFILKKEQEGKPYNVAKMAGVNKFLRIYYARAMELYK

SEQ ID NO: 480581 - protein, 338 aa, unidentified
MKLYAGIDLHSSNCYLGIIDDKLEKVVGKRLRNSLPFIIDCLAPYKKDLQGVVVESTYNWYWLVDGLQEHSYTVHLANPAAIKQYEGIKYSDDKWDALWLAHLLKLGILPQGYIYPKETRPMRDLLRRRMLFVRQRTADILSFQSMITRNTGTRISGNNIRKLTEANLEQLFPNPDLLFMAQRYLSIIDLLSHQIKIMEKQAMGKIGLMEPFKWLSTITGVGKILAMVIMMEVGDIGRFKKVGNYCSYCRCVRSERISNGKKKGVGNKKNGNKYLSWAYVEAANFCIRHNPQAEKFYQRKKAKSNGIVAIKALSNKLARASYYMMRDQVPFDSQMLFA

SEQ ID NO: 480582 - protein, 428 aa, unidentified
MNCNTQNAKIASITEKTLIVGIDVGSETHYARAFDWRNYEYTKKPLEFSNTEAGFQTLKEWVEDIAAKHGKTAVIPGMEPTGHYWFALGKFLQDSGMRPVHVNPHHVKKSKELDDNNPNKNDRKDPKTIAALVNEGRFSYPYIPTGIYAEIRSLSNLRFQTQEELTRIKNRIARWFAIYFPEYKDVYGDYKAVSGRMVLKEAPLPEDIQKLGVEGVNKIWRDAKLRGAGMKRAKTLVSAAEHSVGSKEAPGAARMELKNLLNDMDVYTSRLEELLLKIEEKLKEIPYVDKLMGIKGIGLVTVSGFIAEVGDIGRFDNPKQLQKLAGYAIVANDSGKHNGESRISYRGRKRLRYVLYEAAISLIGKNAEFKAIHEYYRTRKENPLKKMQSVVAVACKVLRVFYTILTKGVDYDAGKLMGDIRRPQIQAA

SEQ ID NO: 480583 - protein, 316 aa, unidentified
MSAEPVFVGIDVSKASLDVAVHLPATRWTVDYTERELTPLVARLTALAPALIVLEATGGLEIRVVGVLAVAGLPVVVVNPRQVRDFAKATGHLAKTDTLDAAVLAHFAAAVQPAVRPLPDAATQGLAVLVTRRRQLVDMLTAERNRLSCAPPGLRTELQAHIRWLERRIAGLDTDLDQTIRTSPLWRAQDDLLRSAPGVGPVVARTLLAQLPELGTLSHKTIAALVGVAPLNRDSGLCRGRRQVWGGRAAVRAVLYMGTLAAVRHNPVLRAFYQRLRAAGKLPKVALTACMHKLLTILNAMLKHQRRWDPTYAQTH

SEQ ID NO: 480584 - protein, 363 aa, unidentified
MNCVIENTELSSHEGTRSQFNGSTGAIKLGIDVHQDYYVVVKQEGGTNPKPAQRFRKEAFLLWVAKLRSQGSDVHAVYEACGFGFGLQRQLSALGITCQVVCPQKLDERNKRVKTDGLDAKALCLKLDRFVQGNRDALALVRVPTEEEEQKRAIHRQREQLVKARKQLEAQGRSLMVNHGFEPTTSWWKPRTFALLQVPAWMKELLSNSQPILVALHEKIRTLTQRLQAAAEAGQARGIGALSSVVIDREVGNWNRFTNRRQVGSYTGLCPGEYSSGNTRLQSCVTKHGNPRLRAALVETAWRLVRFQPHYKPVAKWRQILAKGALATKAARKKAIVAVARELAVDLWRIRTGRVQVEALGLF

SEQ ID NO: 480585 - protein, 355 aa, unidentified
MNKGNSSTLSFENQIFFVGIDVHKKKWHVTIRSSNMELKTFVMDPVPEQLSVYLHKNYPDGSFKAAYEAGFCGFWIQRKLSQLGVECIVVNPADIHTDQKEKLSKTDKLDSRKLAIELQIGRLKSIHVPKFEDQLIRSLCRLRHSLVKDSTRIKNRIKGFLNLYGAKINKDSDRRWSGAYIRKLEMASQQLPGGETLKILTNNLKMIKLQIKSCTHDLRNSLHRSGKRDSVILLMSVPGIGFLTAATLCCELININRFPTFNHLAAYVGFIPTMHESAETKRSGELTPRGNAKLKYMLIEAAWTAVKKNPVLLNKFDKLSKRMKKQKAIIKIAKKLLSRIYSVWKNQTPYVLGTI

SEQ ID NO: 480586 - protein, 330 aa, unidentified
MEHKEFVGIDVSQATLDVVIRSMGVHKQIANTQTGRKQLLPWLKRMKVDPEQTLFCFENTGIFSLPLLGFLAEEKVHYVQISGLEAKRSMGIKRDKTDKVDAAALAQYAYRNREELQPDPPPNKILLAARRLSSLRDLLVKQRAGLKARLKVEVRMLDLPKRDLGVRMMQKSIKEFTQKIETLEKEILELVGSDQGMKRNYELAISVKGIGPQTATFMLITTANFTLFKDWRKFACYVGIVPFNHRSGTSIARKSRVSMMGNKHGKTLLSSAAASAIQSNSEMKLYFERRVNDGKHKMSTLNIIRNKLVSRVFAAVHRNEPYIDIHKFAA

SEQ ID NO: 480587 - protein, 427 aa, unidentified
MSERKSLELRVSVDVGCRRHSVAVGLSDGQVLEEFEIRHRREGFQEFFSRIEKHQKAQGCKVAVAMEGYNGYARPLERLVRQRGYRLYNINNLKLARFKEIFPGAAKKDRIDARKGLELFQLRDHLPLAKDVLQEVTGTPKENEILKRLTRRRRRLVNERVGVVNNLQADLQAVCPGLLEITTEASNQWFLHFVISGDTILQLARLRKSTLLKIPAVGRKYASLIQQWQKRAHFSEEAQWVSEMIQEDARRCLELDERIKTLETKIKEVAKSSKIANTLLSIPGFGAVCTSELAGEIGTVERFSKEGSLALYLGMSMLDNSSGKYQGTKQPKHVNTRAKAAMMTAVDRHRKYVPQSQKYYEKKRTEGKTHNQAIRALGRHLCRIIYKMLKEQREYRVRSEKGDTQGRVDSRSCVKTKMRRPKISATS

SEQ ID NO: 480588 - protein, 329 aa, unidentified
MQSEVHVGIDVSKFTLDVFILEVRSHRRFKNNSNDFPTILQWIEKCTKRQSAFICFEHTGVYSMALAAFLESQHIVFAMVSPLEIKRSMGIVRGKNDVVDSKRIAEYASRFRDKIVVTKLPAKDITRLHFLLTLRDKTARALSGYIMAVNEVQRGIGHEELPELFASYDAIITALKSEIKKIEAAIKHIINTNPDLKTSFKLITSLKGVSLIVGTYMIVYTCNFTKFATWRKFACYCGIAPFGHQSGTSVKGPAQVSPIANKQLKRLLHLAAVSAASHDPELREYYIRRQSEGKSKMSTLNIIRNKIVARAFAIVKRGTPYVNIKQYAT

SEQ ID NO: 480589 - protein, 416 aa, unidentified
MGKLKIVYPVCCGMDVHRDFLIACIASTNSQGVTQYQQRRFSTYSGGLRSLRNWLIANQCLDVCMESTGKYWFPVHNILEGACHVVVSHPKFVKAIKGKKTDKKDAQWIADLFKHDLVPGSFIPPNDIRQLRDLCRYWCKLTAYITGEKNRAQNCLTVSNFKLDGVFSNVFGKSASAIIDQLLAHPGAPFDVSPFVDGRCKAPIAQIQEAVDGSFDPSQANKLKIIRTHMESLAKLKLDVESEIWKLAKPYLPYIELLLTVPGIKEPMTAIRILAEIGVDMSVFETAMHLASWAGLTPQNNESAGKKKTTRIGKSGSYIKPLLVQIALAASRSDKHPEIKSKYQSLKKRRGGKKAIIAIARRLLTAIYHMLSNGEVYDPTRYIREEAVPKSRKITSEQALTLVASMGYFITDPLPV

SEQ ID NO: 480590 - protein, 461 aa, unidentified
MEEITEEAAELVARVAALDVGKASLVACVRVPHESKPGARRQEVRTFATTTRSLLGLQDWLVAQGVSLCVMEATSTYWKPPFYLLEDAVECWVVNARDVKNVPGRPKTDKLDAVWLCKLAERGMLRPSFVPPPWQRELRDLCRYRRTLIHERTREKQRAEKLLEDTQIKLSAVISDIFGKSGRDMLEALIAGQRDPYRLADLARGPMRGKKSVLQEALTGHFRDHHGCLLRMMCDRVDALTAQIEALTRRIEEVIAPFAHQVAQLDEVPGIGITGAQEMIAEFGVDMTRFPTAGHLVSWAKYAPSARQSAGKSKPGTTGKGNPWLASALGEAGIGASRTKTFLGSRYHRLARRRGKQRALVAVGNSLLVIAWHLLSDPDAHFADPGPTGMTGSPRSAASASSSPNSNGFPVRRSCSKRRPPPDPLAPTPAPLRSAGVLPRAQPSTDFRFSRRSVRSGRHRK

SEQ ID NO: 480591 - protein, 333 aa, unidentified
MKRRNVEEVAVGIDISKTYFDVAYEKDGVVQHQRFSNNKVGFRSMKKWLRKRKISMAHFAMEATGRYGLPLAKFLYAQGYAVSIVNPRQIKAYRESWLIRNKTDAADALLIAAFCRERELLHWQPPAPEVEALQDMERRKGMLQKMKTMEINRLKSGKQASVVEASIKRTLRHLNKEIARIEQEMENLNQRHASIQEEVALLTSIPGVGDHTAFILIGEVKDITHFSSGPALAAYAGVTVRIHESGDTVRKKPKMSKVGNARLRAGLYFSTMSAMQHNPVIKAFAQRLKAQRKPGKVVLIACMRKLLHIIYGVWRSGQPFDPEYEQRLLSSPI

SEQ ID NO: 480592 - protein, 341 aa, unidentified
MNQVSTVGLDHAKHLFQLHGADSAGAVVFRKRLRRGQLLAFLATLPPCTVAMEACGSAHYWGREIAKLGHTVKLIAPAYVKPFVKRQKNDMADAEAICEAAQRPTMRFVALKSANQQAAAVVFRTRDLLVRQRTQAINALRGHLAEFGVIASKGLVHTCKLIAALEDPASDLPQAARGILAVLVEELRSLDERVAVLDREIARHAKENAVARRLMTVPGIGAVTAAALTALAPPADTFRRGRDFAAWLGLTPVQRSSGGKERLGKTSKMGERSLRRLLIIGASAVARWAARKGVPAGSWLGRMLARKPPMLVRVALANKMARIVWALLAKGGVYRAPGAAV

SEQ ID NO: 480593 - protein, 407 aa, unidentified
MDLLKTVFGIDVSSRKSNVCIMVNGQKVNDYAISNDMVGFNQLLGDLKQVTNPQIIFEATGVYSRRLQAFLDMHELRYVMMNPLEAKRKTKDDLHQNKTDKLDAMYLAKMQSEHPQRLAYVQSEEYQELMANNRIYEQASHDLITNKNRLHKAIQLTFPEIEHLMVNPRGKNYWSIVLRFPHPDIVLETKEADIIDFLKGLTGIGKKRANDIAQSLIRLAKVACPAVKKNSAHIRGLKMAINNILNAEEECQTALQEMAKLAPKRDLEILTSIPGIGENTALRIISELGDIRRFNNPSQLNAFVGVDPQVYESGNLTAHLSISKRGTAIGRKVLYLAINQIQSAKKVGNPCHIADYYEKRKRSSETASHKKAAIASIHKLLRTIFALIKNDQLYSYDVAKHNQRLLS

SEQ ID NO: 480594 - protein, 407 aa, unidentified
MEVLYRTCAGMDVHKDSIVVCVRSMKGSKIEREVQTFGTTTSELIKLGDWLEGRGCTHAVIEATGVYWKPVWHLLAERLELILANAHEVRNVPGRKSDMNDATWLADLLAHGLVRASFVPPEPIADLRDLTRTRKQLAREIVEHTQRIQKVLETCNIKLASVATDILGKSGRAMLEAIVDGEDDPNKLAELSRGTLRAKRGLLVEALRGRVRAHHRLLISTHLRMIDSLRDVIQAIEKQVEDVLRPFAEAVALLQTIPGVGPTAAQTIIAEVGDDMTRFPTAGHLRSWAGLCPRMDESAGKRRSTRLRKGNVWLKTMLVQCAWAAIRKEGYLRALFLRIRGRQGAKKAIVAVAAAILTAIHGILRDLEPYRDLGAEHFNRHDRQRVASRLARRIRSLGYEIELRPAA

SEQ ID NO: 480595 - protein, 363 aa, unidentified
MADGICFAGLDVHARKTVAAAVLLGSGEVFRARLAGGAPEAIGWLRSLPGPVRAVYEAGPTGFGLARAARAAGIEMMVCAPGAIPRQPGDRVKTDARDALKLARLHAAGQLRPVVIPEPELEALRDLVRAREDLRGDLMAARHRIGKLLLRRGLVWAGPGETWSRRHLQWLSKLRVDDTLADVVLGEYLACHEVLLSRRDRLDALIADQADHGPWAATVARLRCLRGVDTLTAVGLVAEIGDFHAFEHPRQLASYLGLVPSERSSGENRRQGAITKAGSGHARRLLIEAAWHYRRPPRISMTLRHRQAGQPPAAIETAWRAQLRLHRRWSHLDAARGKRRTTVAVAVARELACFVWELARQPA

SEQ ID NO: 480596 - protein, 455 aa, unidentified
MKLLYRCCAGLDIHRDSVSVCVRRRVRGSSETTIEEAVFGTFTQELERLRTWLKQHRVRQVAMESTGVYWMPVWNVLEGGRSPFTLTLVNPATVRALQGQKTDRIDARRIAEYLQYGLLRGSFIPPKPIRQLRELTRMRVHIQQDRNRVISRIARLLETVNIKLASVATNIVGKSGLAMLRLLASGVRDAEQLADCALRKLRSKMPELILALDGRPDAHSRWMLSELLSKLDWLTEELARVDQRMDNVAAPHTDPLERLATIPGVDRTTALVLLAEFGTDMTQFPTPGHLASWAGLCPGNTESAGKRFSGRTRIGDRYVRRILVQSAWAAARTKDCFLAALFFRIAQRRGLKKAAVAVAHRVLMIAWHIIAEGTVYQERGGDHFDRRNPERTAHKLSRRLEHIGFEVTLVRRQCAAERPRPSVVDPLVCPKCARWRLPRCIHVIRRNAPPNPMSP

SEQ ID NO: 480597 - protein, 461 aa, unidentified
MELRLGIDVACRAAHQASLADEQGKFLWSGRKFRTTTGDLQRLWSMLPAGTAPSSVTVIMEPTRNAWVPLAAWFRRQGATVILVPPEQSADLRDYYCKHTKSDRLDSKVLARIPLLHPEGMHTATGLGPGDTMRRAVKLRSNLVKRRTSILARLDALLELLGPGWHAALGADLANKTPLRFLAHYADPHIVIRLGRARLTRFLARHSRGSWREEKADQLLAAARETLELWSDELDFPELADDIAIEARLALQLTEEIKELETRIAALLDKADPDGIVSSAPGVGPILAAQILGRLGDPNRFDSLAAIRSFSGLVPKLESSGLSGRHGGPTKSGDACLREALFMAAEQARRSDPSLAAKYHRLMTDSGKHHNSAVCHLSTTLLTRIAACWRRGEHYVIRDVDGSPLTSEQGRRIVADRYTVPADIRAARRTTSARTGRRHQESHSAPPIGPSTTKATSLPAS

SEQ ID NO: 480598 - protein, 335 aa, unidentified
MNLKRIGLDTSKAVFTLHGVGQDEKAVLRRDMRRAEMETFFAKLPPTHVALEACGGSHHWGRRLAALGHTVQLIPPQYVKPFVRRGKNDRNDAEAISEAAARPDMPSVPVKSAEQQAEAIVLSARELLVRQRTQLVNAVRGHAAEFGIVAAKTISQLPGLLEAVAAAETVPATAKEMLAFLGAQVAQLDSQIAELERRMKQQHKANPVSQLLAEVPGIGPVSALSLALTIDPGRFQSGRHFAAWLGLTPKEHSTGGRQRLGGISRAGNERLRQLLVVGAMAVIRYAKPGSKTASAWLLALLERKPRKLAAVALANKMARIVWAMMATGEAYRGSK

SEQ ID NO: 480599 - protein, 347 aa, unidentified
MRFYTKQHKFYCGIDLHAKKMYLCILDESGEIRLHRNIETARDVFVKVIEPYREDIVVAVECMFTWYWIADLCTEEQIPFVLGHALYMKAIHGGKAKNDKIDSHKIAVLLRGGMIPQSYVYPARMRATRDLLRRRNHLMRKRAELYAHIQNTRSQYNLADFLGRIAKAQNREGVVEHFEDTSVQKMIAADLAVITAYDPIIAQMERDIIRTANQHDPVAYALLKTIPGIGRILGLVILYEIENIKRFPTVQDFASYCRLVKCAKESNGKRHGSSGKKIGNAHLKWAFSEAAALFLKGNEQGKRYLDRLTSKHRKGKALSILAHKMGRAVYFILKNKEPFDQKKFLGL

SEQ ID NO: 480600 - protein, 356 aa, unidentified
MSRDIKYIGMDVHQEGIVIAVLNGSGKLVMETILETKASSLVQFLQGLRGELHVTWEEGTWAAWLYDLLQPQVEQVLVCNPRRNALLKEGNKSDKVDARKLAELLRTGMLRPVYHGENGLRTLRELGRSYQTISKDLTRVMNRLKALYRGWGIACAGTKVYAPRYREEWLSKIAQAGVRRRAELLYQQLDGLQALRRSLRPEFLAESRKHKATKLLVQIPCIGPIRAARLIALMQTPHRFRSKRQLWTYSGLGIETHDSAQYRYVGGQVQRSKKPQQIRGLNQNHNHEMKEIFKSTATRASCGTGPFHDFYAALLAKGMKPEMARLTLARKIAAITLTLWKKGGRFDAEQLKTQAA

SEQ ID NO: 480601 - protein, 427 aa, unidentified
MAYRIAGIDVHKKVLAVVVADVECAGEYEFERRRFGSNPEQLQLLSEWLIEQRVEEVVMESTAQYWQPVWGALERYWRPTCQKQEGAGAMSGKLHLAQAQSNRGRRGRKKDFPDAERLVKRLVAEELVLSFVPDPEQRLWRAVTRRKLQMTRLHVRMQNQLESLLEEAHIKLSGFVTDLLGVSARRMLQALADGETNPAALAALADKRLRATPAQLCDALGACTELNPVYRRLIKMALEELQFLEQQMDQLDQEIANLLRPHEDAVKRLAEVPGLGVDSAQQIIAEVGPMATSFASHKQLCSWVGVCPGDNESAGVNHSHRSPKGNRQLRRVLNQAANAAARTKGSIFEIVYHRQVPRMGHNQAIGVIAHRLCQLIWILLHQNVRYEERGPAVTETSKRKRTARMIRELRALGYRVEALNLQTAASM

SEQ ID NO: 480602 - protein, 322 aa, unidentified
MCKIIGIDISKQTFDVGFLKETTWQHFVLENNKKGFKELLKKVEDDDWLVMEASGPYYLPLALFFHKENKKVSVLNPLIIRRYSQTRLYRAKTDKKDAQTIAEYGVQYELEQWEPEIKEISKIKQLYTALELINKEIHQSERQLESFKSSGILDKDLELTLKSIVKFLKNKQNKLEKQIAQNAAKNYQPTLDRLKSIPGIGTKTAIMLTVITGDFEKFDNYKQLIAYVGFSPRLYQSGTSVRGKGHICKMGKSQIRKLLYLCSWSAKKCNKGCIEMYNRLKEKGKPERVIKIAIANKLLKQAFSIVKNQTYYAENFVEKACF

SEQ ID NO: 480603 - protein, 344 aa, unidentified
MEQIIRIGMDTSKSVFQLHGVDAGERPVLRKQLRREGMISFFRKLPPTVVGIEACGGAHHWGRLLASFGHRVKLLPPQYVKPYVKRGKNDAADAEALCEAMSRPTMRFVSAKSAEQQAAQMLAGVRDQLVRRRTQLTNAIRGYAAEFGLVAAKGLGKIEPLLARIRTDEVLPTLAKDLFEAQAREYARLQKELEALDAKLMAWHRANALSRRLVQIPGVGPIGATLLAIKVADASAFKSGRDFAAWIGLTPKNHSTAGKNRLGVITRAGDEMLRSVLVAGATALIQPVKRGRPASPWLVSLLRRKAPKLVAVALANKTARIAWKLMVSGECYRPNAAMSAAAHT

SEQ ID NO: 480604 - protein, 519 aa, unidentified
MIELVDGVIDLILAQVQQAALFGKELTYKPVSVLIGAAFPRTVRMGKVHLGLQAACNEAVLCELFSVVNAQWLSATLGSVHPLEYLHPKETFKMADIANSKSELHWVAIDVARNWNAVLIETAAGQRHRFKMANSASDFDRLIAFIKGLGGHCRAAMEPTGDYHRALAYRLLAAGVEVVSISSVAQSRFREAMFNSWDKNDPKDAFVILEMLKRGNVQTYVEPLIAGHHDLQEISKTYYQVSRARTKIQHSIINHHLPLYFPEMHRYWSCTRNEWWVRFMIEFPTPAHVRQLSLEEFTKMAWDLVGRKVGKHNKLQEMWELAGHSAALPHSPDSLAVETFRLTLRQYQSITALRDQIEKRSEQALIGNTDYENLKSLPGVGPIIALTILAEAGNIRRFAHHRQFLKYCGFDLAKSQSGSRRGREQLSKRGNARLRLAFWLAGTVAVRVKENSFRDKYERYVSSNPHDADLKRKAMTAVAAKMARVAYGIIKKNVPYRQFFEQSLPSGSIPLSRAVVAPV

SEQ ID NO: 480605 - protein, 322 aa, unidentified
MQGKMTSVGAAQAVYAGIDVCKAWLDVYLHPIGQSFRVPNSKDGCRSLASKLSSAAAGLVVMEATGKLHRLAHRLLSEAGFAVAVVNPSRSRKLAEALGMLAKTDKIDARLLAFYGAALGPSPTPVPAKSLAELQELVLARQAAKAEETALKNRIGAAESRVLKGLLEAQLKAHARLLARLEAAIAALVAKNAGLKRRCEILASIKGVGPIAAVTLVACLPELGRVTGRQIAALAGVAPMACESGDMKGLSRIKGGRPHVRTALYMPGLTASRCNPDLKAFFCRLREAGKPPKLALTAVMRKLLVLANTLIREDRHWTPDYA

SEQ ID NO: 480606 - protein, 387 aa, unidentified
MQKPHDNSKASPAAFMQDNTLIAVIELSLSSWLVAGLIPGVSREPLKKLEPNPEDLLKLLHGWRDEAIKAGRLITRIAVAYETGRDSFWLARWLRERGIDAHVIHANSVAVSREHRRAKTDRLDTAMLKRAFLGWLRGERGHCTMAIVPTMEEEDAKRPHREREGLVHEQTRVVNRMKSALVQFGVRNFNPKLRKASVKLETVRTPEGKSLPPNTIAALRRDMERLKIIKQQIKAIEQARLQQIEQKPEALANRMIYLLVRIYGFGLETADLLVHELLSRTLRDRKAVARYAGLTGSPDESGSKRREKGLSRSGNARVRKIMIQLAWRMVKFQPDSALVQWFKQRTENAKRSRKPMIVALARKLIIALWRYANDGVIPEGFRLHSAA

SEQ ID NO: 480607 - protein, 387 aa, unidentified
MPQPNDLSRSLVALDQNSTIIAAVEMSQSSWLVGGVVPSIERQPCKKLEPSPERLLSVLHRWRDEAVKAGRTITRIALAFEAGRDGFWLARWLAARGVEAHVIHPSSVAVSREHRRAKTDRLDTELLKRGFLGWLRGERGHCSMVRVPTLAEEDAKRPNRERECLVKERTRLVNRMKGALARLGIRNFKPTLRNAAEHLAALYTPEGSPLPPNVAAELERDIARLGLVISQIKQVEEARRQRLEEQPESRPHAMVRLLARVVGIGTETADMLVNEVLSRPLRDRRAVARYAGLTGAPDESGAKRREQGLAKAGNARVRRGMIPLAWRFLRFQKDSALARWYQARTADRRAGTRKTMIVALARKLLIALWRFVNTGETLEGVVLRPAD

SEQ ID NO: 480608 - protein, 361 aa, unidentified
MSIPHQNRPCIVVGVDTHKNTHVAVALNQLGAVLDPTTITVNRAGYARLRDWATGLSGDNDGAPVVFGIEGTGSYGAGLASFLRRAGDQVVEVNRGDRSVRHLRGKDDTIDAETAARSVLSGSATATPKTGEGTVEMIRQVKIAKDTATKARTQAIVTLKAVLVNAPAELREALEPLGDRELLEARRALRYESMDGPEDAARYTLRALADRHRSLDYEARRHERVLDTLTDRAAPTLTGQFGIAADCAAELLIVVGDNPERIRSEAALAKLCGTCPIPASSGKTTRHRLNRGGHRQANAALHRILVVRMRFHQPTIAYVERRGREGRTTKEILRCLKRHLIREIYQILVAPHKESKLALAA

SEQ ID NO: 480609 - protein, 427 aa, unidentified
MDVMHKRVGGLDVHKQVIVACVRIMASRKTGREVSRACRSFDTTTGGLQALLAWLTESGCTHVAMEATGVYWKPVWNILSDGEFELVVANAAHIKNVPGRKTDMNDAMWIADLMACGLIRASFVPEERFQDLRSLMRARKQLTREQTSHVQRLQKTLEEANIKLDSVISDILGVSGRRMLEAMIAGETDPSALAALAHRGLKASLEELTAALTGRLTDHHRFLLKLYLDQRDSADEAIRKIDREVDERISRMDAEVVAGQATFRSLVALLCTIPGVSVLAATTILAEIGTDMSRFSTAGHLVAWAGMCPGQNESAGKRRSSRLRKGAPWLKTMLIQCAWAAKRQKDSYYRAQFYRLQARRGPQKAICAVGASILTAIYHILKDGTEHQDLGVQYFDHRSTQEKTDRLVAQLAKLGFKVDLKPLAEAA

SEQ ID NO: 480610 - protein, 346 aa, unidentified
MQPVIGCDAHKKFSVFVSVDEHGQASRPVRIDHDRELYCRYLRSLPTGSQIALEATGHWYWIVDAMEQAGHHPHLANPFEAKRRMAKSNKTDALDAKGLAILLRCGTLPESWIPPGELRDQRELLRTRMALRDLRTSLKHRIHAGIDRYGLHADAISDLFGTKGRAYLASILKVLPPETAQMIAMQLHSIDQLEEKIEAIERRIAEMLKASPEIRLLRTVPGLGPILAPLVWLEVGDVERFPRAEHLASYAGLVPRIIASGGHVRHGGTCRNVNHYLKWAFVEAGNCAIRMKAHREDHVGLLYHRLYPNKGHGRAVVAVARHLAEASYWVLRKKQHYRAPQPRISG

SEQ ID NO: 480611 - protein, 372 aa, unidentified
MTKDTLNVGLDTDKNAIDIAIAEPLPKGEVRYYGKIANDKTALLRVVKRLQKDGRPLRVCYEAGPCGYAIHRWLTDVAGVTCEVVAPSLLPRRSGDRVKTNRRDCLSLAKLLRAEELTAVWVPDPAHEAMRDLTRARAAAVADLVRCRQRLGSLLLRQHVRYAGKPWTKKHRAWLGRLAFPAPAHRLLMVELLEALDQTQARRDRFNAHIAELAPRWSLAWLVDALQVLRGYALINATTIVAEIGDVRRFANPRQLMDYVGLTVSEHSTGERVRRGRITKAGNGRARKALVEAAWTYTHPAKGAKTTAAQATPALRAIADKARHRLSARYRKLRARGKLAPVAVTAMARESLGFIWAIAQAAAPAPAPHGRR

SEQ ID NO: 480612 - protein, 489 aa, unidentified
MSTARKQQGEKKDPMLNARAPQRKVRGSHCQQGKGNQRGSELTITHPDAAGIDVGSQVHYVAVPEGRAQESVRSFGAYTAQLDELVQWLKDCRIKTVAMESTGVYWIPLYQKLEEAGFEVLLVDARQAKHVPGRKSDVQDCQWLEQLHRYGLLRAAFRPEDSVCRLRTLQRHRKDLVESAAMWIQHMQKALNEMNLHLHHVLSDISGLSGLAILDAILAGERDPRKLASLAHYRVQKNQAQIAAALTGDYRPELLFVLRQSLQNYRQIQQQITQCDLSIEKQLAKMTDCQNPNQASEPTPPSPDLGGGKPRKRKSPAILEISLAGHLKRILGVDLTTIPGLNVLAILTLVSEIGTNMTKWRNEKAFVSWLGLSPNNKISGQRVLSSRTRKVVNRAATILRLAAMIVGKTNTPLGSFYRRKRAQLGGPKAVTATARKLGCLIYRLIKNGQGYHEPDLHTYELKYKDQILNSLRKRANTFGFDLVELPKAA

SEQ ID NO: 480613 - protein, 399 aa, unidentified
MDEGYEVYCGLDVGKSEHHATALNGVGERVFDKPLPQDEARLRELFTGLQQHGRVLVIVDQPNTIGALPIAVARDCGCTVAYLPGLAMRKAADLYPGKSKTDARDAFIIAETARTMPHTLRAVDRDSEVLAALKVLSGFDADLTHECTRAINRLRSLLLQIFPALERVFPGTVLTRGLVLELFIKYSGPTGLRTAGRGNVLRWARNHSRKDPVNLVDAIFTALGEQTVTVIGTEAVELVIPRVAAQIKELKHQRAIVAEEVEKLLDDFPLSQVLMSMPGVGIKTAATILLTIGDAGTFTSAGHLAAYAGIAPVTRRSGTSIRGEFPARSGNKQLKNALFRSAWIASCHHPASKAYYQKKRAQGKKHNAAVICLARRRCDVIYSMLKHGTFYEDKPALAA

SEQ ID NO: 480614 - protein, 366 aa, unidentified
MKKNSTVAVGRKQILKQARLTIGLDLGDRTSYYCILDAAGNVIWERSVPTTLNGIRQGFGRMPRCRIALETGTHSPWVSRQLSEMGHEVIVAHARKVQLIGQSSRKDDQLDARTLARLARIDPGLLSPVKHRSAQAQIQLTVIRARAALVSTRTALVNAARGLTKSYGQRLKKCGTEQMNRDSSEGLSQELREALDPLLREIESLNERIAEYNRRIEEIAKEVHPEVARLKQVQGVGTLIALTYVLTLDDPHRFRRSRDVGCFLGLRPGRRNSGQSEPQLHISKEGDRYLRTLMVQGAHYILGPFGQDSDLRRWGLKLAERGGKNAKKRAVVAVARKLAVLLHKLWVCGEAYEPLRNNHKGARAVA

SEQ ID NO: 480615 - protein, 342 aa, unidentified
MEKVSIIGLDLAKRRFQMHGARADGGVAFRKTLSRDRVLAFLAERPRCVVAMEACGSAHHWGRAIGALGHEVRLIAPIYVKPFVRRQKNDAADAEAICEAATRPTMRYVAVKTEEQQARAMLFRTRDLLVRQRTQLINALRGHLAEHGVVSPQGPANVKGLAEAIESDMTSLPLLVVELSRLLLDQLDGLSKKIIELEKATVQEATHEATLRRLQTMPGVGPITAMAIGTFAPPMAVFRRGRDFAAWLGLVPRQHSTGGKPLLGKTSKMGQRDIRRLLITGAMAVIRSASRKGRAEGGWLHRMLARKPRVVLAIALANKMARAIWAMLTKGEDYRVPAAAAC

SEQ ID NO: 480616 - protein, 312 aa, unidentified
MAQMVLTAGGDVSKHWLDIALWPKRAELRVPRDPDGYCELAAWLRQHGVSRIGVEASGGYEIEVIDALEDMGFEVVRHNAQRVRMFAKAKGRLAKNDRADARTIAQATAVLVEEAPSKRRRDLDPLIEHLTYRRRLQEWITDCDNQLEHLRQKVLRAKVTARKASLSKELAQLDKLIAELVEKQEDWRALAKRLRTTPGVGPVLASTLIALLPELGSLSRRAIAALVGLAPYDDDSGKHSGERHIKGGRATIRQVLYMAAVSAMQHNPVIAAFAARLVGKKPKVIITACMRKLLVTLNAMVRDGTDWQEKAA

SEQ ID NO: 480617 - protein, 387 aa, unidentified
MPSAISPPKAVLGIDVGKSSHWACLVTREGEVALNRRVRNSEGDLDGLFSQVACDTIVVVDQCRNIGLLAISRARLAGLGVAYLPGLAAHQAARLFAGDAKTDERDALVIAKTALGIPDALLPVPEPDEALEAARSLAAQRSHMVTCATRDKNRLRSILLESCPAFEALADLGDRHWLNMLEKLGGPWGCIDAGKPAFGAVTKGANRARMDAAWNAAMASTRPPKRRVDAENPQVRMLARRIREALEEADRIDREITALLAGDGTYECLVTIPGIGPRTASELVIGINIEDFPDHDHLASYCGIAPRNRQSGTSISSVSASRQGNRRLKNLLIFSCNSLVRSENRFGEYYRACRGRGMCHGEALKAVARKRLKVIYAIMRDKVPYSA

SEQ ID NO: 480618 - protein, 407 aa, unidentified
MDVIYPRCAGLDVHKETVVACVRIASDGPPEQAVQTYKTTTAGLLALADWLGSFDVKCVAMEATGVYWKPVWHVLEGHFELMLANAAHVKNVPGRKTDVNDAMWLADLLAHGLIRTGFVPPVAVQELRTLTRTRKQLVRQRSAHVLRIDKVPEDANLKLGVVLTDIMGKSGRAVLQALIDGQGDPESLARHVSLRVKASRAEVLEALRGHISSHHRFMLKLHLGQIDALDRAIADIEQEVGLGLRPFRQAADLLTTIPGVSDTSAHAILAEVGIDMSRFATPGHSLSWACLCPRNDESAGKRRSTRLRPGGKWLKTTLVQAAWAAVKVKGGYLQAQFHRLRARRGAKKAIIGVAASMLSAVWHMLRDGTVWHDLGAAHFDQADATKTANRLIRRLQQIGYTVHATPE

SEQ ID NO: 480619 - protein, 357 aa, unidentified
MRFYTQQPPFYCGIDLHARTMYLCILDQAGETLLHRNMTATPEALLKAIAPYRDQIVLAAECMFTWYWLADFCAAHGIPFVLGHALSMKAIHGGKAKNDKIDAHKIAVLLRGGMLPQASVSPAEMRATRDLLRRRMHLARKRGELLAHVHNTNRQYHLPAIGKNIADKTNRDGVAERFAEPAVPKSIEVALALITYDDALLRDVELTIVKTAKHHDAHTLYLLQTVPGIGQILSLVLLDEIHQSDRFPRVQDFASYGRLVKCAKESAGKRSGTSGTKIGNAHLKWAFSEAAVLFLRDNPAGQKFLARLENKHSQGQALTILAHTLARAVYYMLQHKTAFDMPTFLHSSGRGVGKLDA

SEQ ID NO: 480620 - protein, 421 aa, unidentified
MKKRTYRKIAVKEVDVESLIVELGSGRVVFAVDVAKVDMVAAIVAGDGRVVRTVAWKNPTENGLVLELLAGFVRVGLLVEAVMESSGTYGDVLRHQLVAGGVAVYRVSGKRTHDAAEVYDGVPSLHDAKSAAIIAKLHLDGTSRRWEPLSDEKRGLKAAIATMDLFRDQNQRLIHSLESSLARYWPEVTELLELGSATLLALLARIGGPKDVTRETVAARKLMLGMSHRLMSEEKIEAVLRSAQSSVGLAMLAPERAALMTLAGEAHRALKDFKKAKAEVERLSENTVAQILAPATGKTTAAVLVADVGDPRDFPCARAYLKAFGLNLREKSSGMLKGRLSITKRGAGRARQYLWLAVFRWIQRDPVTRAWYDSKIKRDGGKRAKGVIALMRKFAKALFHVARGAVFDSTKLFDISRLQLA

SEQ ID NO: 480621 - protein, 452 aa, unidentified
MQKRQSKNQVLSTECIEANAAGIDVGATEIYVAVPPDRDQRPVRSFATFTEDLRAMAAWLAQCRITTVAMESTGVYWIPPYEILEAAGLRVCLVNSKHVKHVPGRKTDVQDCQWLQYLHSVGLLDPSFRPDAEICAIRSLSRHRASLVETAAMHVQHMHKALTQMNLQIHNVLSDITGLSGLCIFDAILEGERSPTRLAELCHGSVRSSREIVVKSLVGNYRSEHLFTLKQSLAAYRSYQKLMAECDLEIERLMRQLNSKIDPDRKLPASAPRLRSLKRRKNQFHFEMGPELNRIFGVDLTQIPGISALTAHTLLAEIGPDLSRFHNPGAFASWLGLCPINKKSGGKVLSSSTRRTNSRANRALRIAAQTLARSQSHLGSFYRRVRGRIGAPQAITATAHKLARIVYHLITTGKPYDETVFRNEEQKQVQRHENRIRKQAKTLGFKLVPLTA

SEQ ID NO: 480622 - protein, 424 aa, unidentified
MKPHSDIEFTAFVGIDWSDTKHDICLQAAHSDEREFAVVPHCPAAIDAWASALRQRFQGRPVAVCLELAKGPLVYALQKYDFLVLFPVHPATLAKYREAFVPSHAKADPTDAQLALELLLRYRAKLKPLTPQSVPMRMLLRLVEQRRRLVGEQSRISNRLTDALKQYFPDVLAWFPDKDTLLFCDFLSRWPTLKQLKRTRRATLQAFFHDHHVRSQSRIDERLHAIKSATPLTDDLAVILPNQLLVLALVEQLRVTLRAIESFDAEIASISQTLPDYSLFRALPGAGATLAPRLLAAFGEQRERYQSAAEVQRYTGIAPVTESSGKKHWVHWRLQCPTFLRQTFVEWAGATIPRSFWAAAYYRQQRAKGCSHHAAVRALAFKWIRILYRCWQTRTPYDESTYLNALKRRGSPLLASIAATAKNT

SEQ ID NO: 480623 - protein, 412 aa, unidentified
MELLHRRCCGLDVHKETVVACLRLVSNGKVTTEVRTFQTTTADLLRLSEWLAANDCTHVAMEATGVYWKPVWHILDDGEFALVLANAAHVKNVPGRKTDVNDAMWLAELLAHGLIRASFVPDAQTQEMRNLLRTRKQLVREQSSHVLRVQKTLEDANIKLDSVLSDLMGKSGRAMIEALIAGETNPAKLASLADRRVKASPEEFREALRGRVTKHHRFLLRLHLNQIDALDAAMATLDAQVEANLGPFRTAVDLVMSIPGIKNLGAHVIVSEIGIDMSRFPSDAHLISWACICPRNDESAGKRRSNRLRKGGTWLKTTLVQCAWAAVKKKDSYLQAQFYRIKARRGPKKAIMAVVASILTAIYHMLKDGTMYKDLGCNHFNRRSTDQQKTHLIKRLADLGYTVEIKPVVAMA

SEQ ID NO: 480624 - protein, 416 aa, unidentified
MNAISVGIDVSKGQSMVAAIRFPGETVWGPRKVMHTAAALERLAYDIKALVYHDGAEVRVIMEATGRYHEPVAQELHEVGNFVSVINPKLIKDFGNNTLRKVKTDKADARKIARYGLQNWNDLREYTPVEAARVKLKQFSRQYNLYSKMKVQLKNNLIALLDQVFPGANEIFSSPAKPDGREKWVDFVTTFWHCECIADMGETAFIERYRKWCKRLSYNFSEEKAADVYIDSLGHITTLPKNANTKLLISEAAKQLTSISRMVEIFRAEMLRLAQTLPEYEVVMGLYGVGPTIGPQLMGEIGDVRDFLNRKQLIAFAGIDPGSDQSGKHSSGSESTSKRGSPLLRKCLFQTIETYVKKRPIEEPVYQFYAKKRAEGKKFYVCTTAAANKFLRIYYARVKEHLDKTLPEETRFPCQG

SEQ ID NO: 480625 - protein, 415 aa, unidentified
MEKVYDTCCGIDVHKKLMVACLKSGSKQEIRQTGATTRELLELADWLKANGCQMVAMESTGSYWKPLYNILEMNDIPAMVVNAQHMKAVPGRKTDVTDSEWIAKLVQHGLLQASYIPSKDQREMRELVRYRKSLVDDRTRELNRLQKMLEGANIKLSGTIKDINGKSARNVLEYLVAGGKFDEEKYEELYSQNQIAHNLKATKAQIIDDLNGVMSPLQRRVMKELLTHLDELNEHIQNLNDEINNYMKPEEHEAAEKLQGVPGIGKTSAQAIISVIGTDMARFPTDRHISAWAGLCPGNNESARKQGSGKTRKGNALLRATLTVCAHSAVKVKMSYYYAQYSRICAHRGKKRAIIAVAHSMLIAIYHILKDDVAYKELGAEYYNQFNRESKINACLKRLKALGWEAPTATIAALP

SEQ ID NO: 480626 - protein, 386 aa, unidentified
MQTVADRPEAPTAIRTDLGAIFVSLELSRSTWLITSLSPGGGEKMSKHVVRGGDVAGLLERFAQLREKTRARTGKVFSFVVIQEAGLDGFWIDRVLQNEGIESHVVDPASIATSRRRRRAKTDGIDGEALVRALLAYKRGEPRVCAMVKAPTPEEEDRRRLCRERKVLIVERVRHVNRVKGLLFSQGISGYEPLRRDRRERLVTLQTGDGRLLPDHLKAQVCRELDRLELLLEQIKAVEAERDVLLAAQQAPAPAAMLLDIKGIGPEFAAILWSEGLFRHFDNRRQVASYAGLAPTPWQSGSVDREQGVSKAGNPRLRTTLIQLAWLWLRHQPQSALALWFEERVRRNGNRLKKTTIVALARKLLVALWKYVTAGVVIEGAVMKAA

SEQ ID NO: 480627 - protein, 348 aa, unidentified
MLADQLDYIVGVDPHRDSHALAVVEVVTGAVLFEATVAADGDGYASALSLVDQHAPGRRAFAVEGTGSFGRGLTRFLSGRGERVLEVGRLRRERRSGGKTDALDAIRAARSVLASKRPATPRAGGDRQALQALVAAREGAVDAKRAALCQLRDLLITTPEPVRSEMRPLTRARLLQRLAATRPGNRHDPELRGSLLALRSIARRVLQLTAEERELAREIETLTRMLAPHLLDQPGVGPHAAAQLVLSWSHSGRIHSEAAFARLAGAAPIPASSGQTIRYRLDRSGDRKLNRALHMILVTRKRTHPATIAYIERRLAEGKTRREANRCLKRYLARSLYRLLEHGPPPAT

SEQ ID NO: 480628 - protein, 279 aa, unidentified
MKITTVGIDLAKNVFQVHGVDERGKVVLKKQLRRDQMATFFVNLPPCLIGMEACGSAHHWARKLQGMGHTVRLMAPQFVKPYVKTNKNDAADAEAICEAVGRPNMRFVPVKNVEQQAVLALHRVRQGFVKARTAQANQIRGLLGEFGIIIPQGIGHIASRVPELIEDASDELPGTFRMLVQRLLDHLKELDRQVDELEAQIQAWHRSSELSCKLAQVPGIGPITASALVASIGDAKNFDSGRQVAAWLGLVPRQHSSGGKSNLLGMSKRGDTYLRTRNR

SEQ ID NO: 480629 - protein, 366 aa, unidentified
MKKVSTAALKQSRNFSQPQLSIGLDLGDRSSCYCVLDETGRIVMEQKVATTPKALQAAFGAMPRSRIARETGMHSPWVSRLLAELGHEGIVAHARNVRLIGESRKKDDRLDAQTLARLARIDPGLLSPVKHRSAQAQADLTVIRARAGLVRARTARVNTARGLAKSYGERLRGCNVRHRNPEKAEGLSPELRSALEPLLAGIESLSERIHECTERIENLAREKYPQAARLQPIKGVGTLIALTYMLTLQDPHRFRKSRDVGGYLGLQPGRRNSGQSEPQMHISKAGDPYLRTLLVQGAQHILGPFGVDCDLRRWGLKLAERGGKSGKKRAIIAVARKLAVLLHRLWVSGEAYEPLHNGRTPMPVAA

SEQ ID NO: 480630 - protein, 271 aa, unidentified
MQVNTIGIDLAKQVFQVHGVDAAGAVVLRKRLRRSEVVRFFGMRPGCLMGMEACATGHHWACELSALGHEARLIPPSYVKPHVRRGKTDAADAEAICEAVSRPSMRFVPLKTAEHQSELMLHRSRDLLVRQRTMLVNALRGHFAEFGIVAAQGIRRVGELAALPIAEDATPLPPLAREVLRALLAQLQPLGERIARLEAAIVASHRKNEVSRRLASVPGVGPITASAIVASAADAHQFKSARHFAAWLGLTPRSHSTGGKERLGGISNNLL

SEQ ID NO: 480631 - protein, 370 aa, unidentified
MLDTTTFIGLDVHARSIKAVSLDVMTGEVRAATFGYDAGAVAEWVRSVDPRARCVYESGVTGFDLQKRLSGLGVDCVVGAVSKMIKPSADRRRKNDRNDAEFLARMLSVGNVVEVWVPDDECEAARDLTRALEDARDDLSRSKQRLSKFLLRHGLVFDERTPTGRRKGNWTRAHWSWIESIRFAEGADNDVLAYYVDAVRRAAEEKARLEGLVEAEARKPRWRKRVDSLRCLKGVDTASAADLVFEAGEFSRFRNARSFAAWVGLTPSEHSSGESDRRGAITKAGNKHLRKTLVEAAWHYLTCSGRPKDLARGQAPDRGARRHAAKGVRRLVERREALLARGVHGNKANVATARELACWVWAVGLMAEEA

SEQ ID NO: 480632 - protein, 452 aa, unidentified
MSASKHTKSNVEFAIVNEHAAAIDVGSRSHAVSIGAHPSQSKEYGVFTDELRQICEWLVASGVKTVAMESTGFYWKQLFLMLQSYGLEVYLVNASFAKNIRSRKPSDMADSRWIWQLHTAGLLPNSFQPDFFTDTLRSYVRHRRRLIQDAARCINRMQKCLVLMNLQLPIVLTDIMGKSGQAIIGAILSGERRGDVLAQLADPRVKADKQTISRALTGFWKEEQLFELEQNWDLYHYYQKQIAKCDQKIDASLSAQVQKKGKDELTYSPSKKKRRQKNDGPVPVEKYAYQLTGGVDLLQVDGISYQFIQTFLSEVGTDLSAFPSKDHFVSWLCLAPNKKVSGGKVISSKTRKSKHRLKVAFKNTAVAVGKQKNSPLGHYYRSMKAKKGKGTAVTATARKIAIIVYNMIKKSEAYDPKRLEPKQRSGHRKRKIKHIQRTIEQLNIKSEEIRFE

SEQ ID NO: 480633 - protein, 339 aa, unidentified
MTKATTIGLDIAKQVFQVHGADKAGRAVLRRKLRRSEVSRFFSEQPPCLVGIEASGSAHYWARVLGGLGHSVRLMAPQFVKPYVKSQKNDANDAEAICEAVTRPTMRFVPQKSIEQQDLQCLHRVRSRLVANRTQLINQIRGLLAEYGVVLPQHPGQVRRGLPAVLEDAESQLTGFGRELFQNLYEELAQLDEKIGDADARIQTAFQSTPDCRRIAAVEGVGPLIATAIVAAISNGHAFENGRQFSAWLGLIPRQNSSGGKSRLLGISKRGDPYLRTLLIHGARSVVYRAKAKTDKRSLWINDKQQRLGTSKACVAVANKNARIIWSLIAREQEYQRAA

SEQ ID NO: 480634 - protein, 409 aa, unidentified
MNKVDIAPFEVFCGIDVGKSLNHIVALDRYGDKPLINRKVPQEEAEIRAALEEAGDFGLALVIVDQFGAFGRLVVGVAKSMDIPVAHMSPRRFRQVAETYGEDKFDEKDAYILADASRTTPRNIEFVGNRAESMAEIKVLSSRRDDIVEERTRCYNRLHDFIHQVSPPLEELFSKRKLHNDLEIRLIARYGGPIGFRQAGRARASTWAAELKYHCVDGPKKVEQVFDVLDRQTVMLPGAAVIEEQIRSIASRIIELLAEEKRLNLMIEQRAKMIPEVDLLQSIPGVGPVYAALIAVEIGDIGRFRDSNHLASYAGVAPRKEESGTSVHKRRKRKGGNRRLKNALMQSSQRSVQCDPLARAYYERKRAEGKKHLQALRALARHRVTVIFAMLNEGTFYEPPVEVDENGRG

SEQ ID NO: 480635 - protein, 367 aa, unidentified
MAARERDRSQRSGSGSRKTVGQLGSSRSSGQQPEQLRGPRARIVQGRETRRCTMGAAIFVGMDVSQDTVDVAVQPGTTFHLANDESGVAEAVTRLQAVQPTLIVLEATGGLEVPLAGALAAAGLPVVVINPRQVRDFARATGQLAKTDRLDAQILARFAEAIRPPVRPIPNEQTQALAALVARRRQLIEMLTAEKNRVRLAARPIQKRVQAHITWLEKELEGIHTDLTTTMHHSPAWREKEEVLRSVPGVGPVLTTTLFANLPELGTLTRKEVAALAGVAPFPRDSGTLKGRRAIWGGRAHVRAALYMAALVATRKNPVIRTFYQRLCQAGKAKKLALTACMRKLLTILNAMVKSRTPRRVAVTQPA

SEQ ID NO: 480636 - protein, 414 aa, unidentified
MDRVNPRCAGLDVHKDSVWACARVDGGKPLVEKFGTTSRELLRLGDWLAGHGVTVVAMESTGVFWKPVWNLLEDRFALMLVNARHVKQVPGRKTDVTDCDWICQPDWLRQLLEHGLLKASFVPDRPRRELRDLTRQRTQLLGDRARVVNRVQKTLEDANVKLASVATDITGKSGRAILDALAEGKLPPEQMAELVHKRMEAKKPALREALAGKVTDHHRFMLKQLLEQVDHLDRMVGSFDARIEEVMSPLGREAVRRLDQVPGFDVRTGQNVLAEIGTDMSRFPSPHHLASWAGICPGNDKSAGKRRSGRTRKANRWLKAALTQAAWGASRTRRSYYSAQHRRIAARRGAKRATVAVAHALLVTAYCLLSDPRPYADLGAGYFDQPQSPQRQAERMVRKLQRLGYSVELKRPAA

SEQ ID NO: 480637 - protein, 322 aa, unidentified
MSQNRYKDYVGIDVCKRYLDVCVGSSGEYFRVENNADGFKVIQERLADYSPCLLIAESTGGYESEMVRVLQKKGFSVAVINPRQARDFAKALGRLAKTDKIDAGVLAHFGEALKPAAKAISSEDEESLSALAQRRRQLVDMLTVEKNRLRQAHGSIDKSIKKSVDFLKKQLKDVEKQLAEQVKNDEEWSRKTEVLESIRGVGRVIAVTLVADLPELGKVSHKEIAALAGLAPLNRDSGSMQGQRSIWGGRATVRTALYMGALVAVRFNPVLKAFYEKLCQAGKKKKVALIACAHKLLTIMNSMVKHDTKWRQNLNENITSNA

SEQ ID NO: 480638 - protein, 326 aa, unidentified
MQKVLGIDVSKEKHDLILTIEEKRYHKEISNDAKGFGYLKRWLEVHQVTHVHACLEATGQYGEAIAEWLYEQGHRVSVVNPARIKRYGQSKLHRNKSDKADADLIAEFCLREKPALWEPLGPQVKQLRALNRRLQALKANLQQERNRKKSGEKVVLVLNDLDIHIEFLKERIKAIKKDIRDLIKQTPKLKSQHDLLITISGIGHLTAVTLLAEIGNFSAFENAPQLAAYAGLNPQGHRSGSSVFKKTQISKQGRAELRHCLFMPALVALEWNPVIQSLDERMTKTNHHRMEIVIAAMRKLLHLAYGVLKTQLPFDPNYGKQFDFSS

SEQ ID NO: 480639 - protein, 406 aa, unidentified
MNAVGIDVSKGKSTVAVLRPFGEIIVSPFEVYHNPKELSELVTLLKSLDGDTKIVMEYTGNYYLPVALFLQNVGLFVSVVNPILVKEYSNKSLTVRKGKTDKKDSIKLAAFALDRWNELPVFSSQSDTRTLLKAFNRQYNQYNKLKIMLKNNLISILDQAFPGVNTLFNTPARKKDGHEKWIDFVLKFPHCDCISRKSYSVFSKCYLSWCRKYGYYFYETKAKEVYSFACNCAPSLVDSEAAHALVSTAILQLNTLNETLASLQKEMDLLASTLPEYDTVMSLYGVGSVLCSQLIAEIGDVSRFTNKKALIGFAGIDAPPFQSGNFNPQSRSISKRGSAALRKTLFQIMAVILQHEPSNEPVFLFMDKKRSEGKHFYVYMMAGANKFLRIYYARVMERLNSAQTAA

SEQ ID NO: 480640 - protein, 351 aa, unidentified
MIIVGVDYHPSVQQVAFLDTETGETGERRLNHSDGEAERFYRDLQRRQVKVRVGIEATGHARWFERLLAELKFELWIGDPARIKAARVRKQKTDRQDAQLLLRLLIEGRFPQIWVPSPENRDLRQLIWHRHRLVQMRTRAMNQIQAAAMNEGVRRKKTLWSKTGRRQLEALPLAPWATRRRQDLLELVDRLNTTIDELTAAAEQEARKRPEVLRLMTHPGVGPITALAFVLVLGSPDRFGCGHQIGSYLGLIPCEDSSGDRQRLGHITKQGSSLLRFLLVEAAQAAVRWDPDWRRRFVHLAMRRDRRIAKVAMARKLAVSLYWMWRKGFDYPQTLQFGSHAGEPGYVHGVK

SEQ ID NO: 480641 - protein, 391 aa, unidentified
MVFVGIDVAKDKHDCFILNSEGTVLADVFTIANNRIGFETLLSRIQSCSQGESKIKVGLEATGHYSYNLLGFLLDSGLATYVINPLHTNLYRKSLSLRRTKTDRIDARTIAMMLMSDVDLKSYSNTAYHNEELKSLTRYRFDKVKERAKLKSSVARLVNILFPELEKLVSSLHIAVVYALLSNYPGASYIANANTEELAETLCTASKGRYTKSKTAKIQVAAGVSIGSKMPAKSMELKHTIALIRELDKEISEVESAIDKITSQMDSPIFTIPGIGRHMGAMILAEVGDFSNFASADKLLAYAGLSPSTYQSGQLQNCYAHMEKRGSRYLRYALFNAAKYVCLWCPTFSAYLEKKRSEGKHYNVAISHAAKKLVRLIFAMQRSGKAFLADY

SEQ ID NO: 480642 - protein, 390 aa, unidentified
MIFSQWVGNAQAAIEALIVRACAGAVSVRWALDMTSGTAALLIALLHSGGQQVCYVPGKLVNRMSGAFAGEGKTDAKDAKTIAETARLRTDLTAITPSDRLIVDLQVLTSRRDDLKADWVRGVNRLRALLAGFFPALEGALDYSTRSPLILLIGFQTPSGLRMAGPDAIRDFLLEHRAFAKTTPTIVGKAIAAAEQTIAVATEAVSAPLVARLAGDLLDLDRQINDLDKQISERFGEHRHAKRITSVIGFGPVLGAALLADTGGDPQRMFKTPARLAAYAGLAPVPATPGEYAGTCTAPSATTAGYDMSSIWPRSPRSPSTDHRKCSTDANAQKGNATSKQSSPSPAASSTSSGHCYAMNASSSSPHRPAPPPPGGGVAAAAISPSARRR

SEQ ID NO: 480643 - protein, 343 aa, unidentified
MKLHVLGIDLGKTVFHLVGLDITGRVVIRKRCSRTQLLAFTANLQVHLIGMEACSGAHFLGRALREQGHEVRLMPAQYVKPYVQTNKSDYLDAEAIAEAVQRPRMRFVPIKTEEQLDLQALHRVRERWVMRRTAVVNQIRSLLLERGLTLPKGRSHLDEQLPRILEDAELNLSDSFRVLLAQLQLELEQLAARIEEMDRVIQKLARENEACQRLTEIPGVGPVTATALIAAVGNASAFGKGRNLSAWMGIVPGEYTTGGKQKLLGISKRGNKYLRRLFVQGARSVLQQRHKQAPGLSEWLAQLLARTHQNVVVVALANKLVRMAWAVLCKNERYRAPVFVGTT

SEQ ID NO: 480644 - protein, 404 aa, unidentified
MCHDKIVKVSRKNCDKFITPSTYDKSIVSGTLPELISNLLSPNIIRETMQTQVTKKIDFTGKQLFIGLDVHKKSWSVTIVVDGMEHRTFTQPPDPMTLFNYLQRMFPGGNYNSAYEAGFCGYGIHRQLNSLGIKNIVINPADIPTSQKDKLQKRDPIDSRKIARGLEKGQLRGIHIFDREIEELRSLNRTRFYLMRDLRRSKNRIKSFLQYFGISIPSEYDNNLWTLKYVSWLKQIKMQTMSGQDAFSNLIGSYEYHRQQLLTLSRQIRQRIREYDNELYSLLKTISGIGPLTSSALITELGDINRFPHIDHLSSFVGLIPRVRESGETIHTGGITFRCNSFLRTMLIEASWQAIRKDPAMMQYYQKHIINNKGHKVIIKVARKLLNRIRYVMKTRQAYVTGVA

SEQ ID NO: 480645 - protein, 344 aa, unidentified
MDYYVGLDVSLRTVAVCVINADGKLIFERSVACEIEDIVECLRDVPSIALHIGFEAGPMCQHLFRGLRAAGFDVVCMEARQVNAALSAMRNKTDKTDARGIAQVLRSGWFNPVYIKSREAHALRALLSSRKAIQKKCIDLANEVRGLFKIFGIRLPSRVEQGSFDERVRPLVEADPGLSHALLPLLDARAVLYTTYRELDRRVKQAASRDEACMRFMAIPGVGPIAALTFRAAVDDPSRFTSSRTVAAHFGLTPRRYQSGEKDNPGRISKAGDSDVRATLYSAANAMMMRSVAGSEIKSWGLRLMRRKGRRRALVAVARKLAVIMHRIWADGTEFRHEPLRGEA

SEQ ID NO: 480646 - protein, 296 aa, unidentified
MKHYAGLDLSMETTHVCVVDVDGRKIGAQCVDSTPEAIATALEQYGPIERAVIETGRMTPSIALGLRELGVAIVCIDARQAHQSLKAMRANKTDPHNAAGLAQLARTGFYKEVHVKSPAAHGVRSVITARGHLVEARVRLDNTIRGLCATFGIRLGVGQGERFLSRMQVAASVPGLGEAVASLLRARERLVVEIGQLDRQLKAISTASPICQALMSIPGVGVQTSAAFAAAVDDASRFKRSRTAGAYFGLVPRRHQSGELDWTGRITRQGDKLRVRCAPAIAAQGNRSGCEATPRS

SEQ ID NO: 480647 - protein, 298 aa, unidentified
MATLLNWVKNKAKCDDISAFHAVLEATGPYHEIAAEALFDAGCKVSVVNPAYTNASTTLSTRSFAQGLGVKTKTDHTDADSLARYALLVQPPAWQPPPPQYRQLQILQARKQALETDLQRERNRLEKQQATRGEPLVVESIQRMIQHLENERQVLEQALETHVQAHPDLSHDRGLLQSIQGVGPVVSTLLLPILQPGRFKDAPQAAAYLGLVPVEHQSGTSIKGRPRLSKAGNATVRAKLYMAAIVAARYNPDVKALYERLLAKGKSKMSALGACMRKLVHLCFGVLKHQTSYLPKSA

SEQ ID NO: 480648 - protein, 397 aa, unidentified
MSMFCVGIDVSKDYSSAQGLDREGKKLFYLEFVMNGEGFSRLLNILKTHCKDLSEVTVGLESTGCYHINLFAFLCSEGIACVVINPLLISNFARLSLRKTKTDKKDALTIAQFLLAHRGKLSQVSYSQNSQDLKDLARERESLAVMIAGLKNDVRRLLQMSFPELEHRCKLFTETMLRFLIKFPSARAIRTAKPKEISKALIHAEGKRKRVFISAEEIIKLANASVGTDSVAKEVILSEKIGTLLYLEEKQGRITEALVEACRSTRVDELDIITSVDGISAITGSTFLAELGGIELFSSSKHLIAFAGLDPSIHQSGQYEGISRISKRGNRHLRRVVFLMTLCAVRSQNAFREYFLRRKEEGLPPKKALLATAHKLLRVLFAMLSSKSYFRKEVVEV

SEQ ID NO: 480649 - protein, 354 aa, unidentified
MPRQSKDTIAVLGIDIGKNSFHLVGLNKRGAIILRLKLSRRQLEARLANLPPCLVGMEACVGAHHLSRRLKALGHDARLMPARYVRAYLKGNKNDFRDAEAIAETVQRPTMRFVATKTAEQLDLQALHRVRSRLVGERTAIANEIRAFLLDRGIAVAKGLHPLRTALSGILATRTDALSPRLVHIIEDLATDWRRLDQRIADVSLQIEALANLDPGCERLMTVPGIGPIISSATVAAIGTGDVFGKGRDFSAWLGLVPKQISTGDRTILGKISKRGNKYLRTLFVQAARVVLLRPGSWARHGLKPWIEAAAQRLHHNVLAIALANKLARIAWSVLHHDRTFEVRKMSEPVSRPA

SEQ ID NO: 480650 - protein, 342 aa, unidentified
MYYIGLDLHKKTISYCVKDAAGCVLQEGKIGSTRHELEAWVRTLPHPRMMAMEATIFTGWIYDYLLPHAEKVKVAHPLMLRAIAAAKKKNDRVDAGKIADCLRCDFLPECHMAPTAIRDRRRVLRYRNLVQRQAVQMKNRISGLLMETGVSYNKLRLHRMGYFQQLLSSNDEISDSVLPLLKFCREHIDRSIQLDRTLLRSLEQDPMLSERLQRLRTVPGVGPITALTWVLEVGDTSRFRSIKQAISYCGLCGAEKSSAEKVLRTPISKQRNKHIQRMLVEAARLAPRYSQELALLYERERQRGNANRATLAVARKMVAHMLAVDRRKTDFIPEGKLRPTAV

SEQ ID NO: 480651 - protein, 358 aa, unidentified
MNKLYLGVDLHKQSCWVTVLDADGHLRESRKLGTEKWELLEFFGQVEKPAAVAVEATFNWYYFLNVIEPLGLELHLVHPWKTRAIASARIKHDKLDSRVLAELLRTGFLAEAWIAPRAVREQRQLLRYRVHTVRWATRAKNSIHGILNRNGLRAPLRSAFGPQGRQFLGEVELSGTDRWEVDGQLARLDLLGQQLAELDREIRRHCRTSPLAQALETIPGIGPFIAWLLIAEIGDIQRFPSAKHLASYTGLVPSLYASGEHRWGGAITKQGSTVLRWALVQAAHRAALSPRFQAFYQRQRERHGAGKATVALARKLAVIAYYRWRQTLHEMSPLTPDRKVRERSCAGAWSEDRPLRSD

SEQ ID NO: 480652 - protein, 448 aa, unidentified
METVVERPAALDVHKEQVTACVRVPAGRGRREQHLAEFKTAVQGLLALRDWLQAHGATHVAMEASGVYWKPPGAILEDEFECLLVNARHLKQVPGRKTDVSDAAWLCQLLEAGLLRASFVPPKPIRTLRNLTRYRKTQIQERQREANRLHKILEDTGIKLDCVATDILGASGRAMLDALVAGTTDPAVLADLAKGKLRKKLPALREALEGRFDAEHGIVVSAILAHIDFLDEQITLLSDASEEQIRPFAPAVELLCTIPGVQRRTAEVIVAETGTDMSVFPSAGHLASWAGLCPGNDESAGKRRSGRTRKGSRWLSIALTEAAQANTRSRDTYLSAQYRRLRARRGHKKAIGAVKHSIIVACWHMLTTGELYQDAGGDYFTRLRPRQAGETLGRATRTPRPRGHAREGRRLTPAGFPIRLEVGGGKGWPPGRRVSSAAVATVTGSTPS

SEQ ID NO: 480653 - protein, 334 aa, unidentified
MEQVTTVGIDLAKKVFAIHGVDGAGRVVLRRTVKREELVELVAGLSPCLIGMEAGSGAHQWARRFQTLGHTVRLMAAKFVTPYRRNGKNDGNDAEAICEAVTRPGMRFVPIKSAEQQAVLTVHRVRQGFVEERTSTINRIRGLLAEFGVVLPLRSVTIRRQAREAAETLPDIARRAIEDLCAHLRELDARVLAYDREIAQQAHQSEAARRLMKIRGVGPLSALAIVATVGSARDFRSGRQFAAWMGLTPRQHSSGGKSRLGNITKRGDAYLRTLLILGARSVLNTAMRHKDRISRWVLALQTRRGYHRALVAIANKNARIAWALLSRNQELRTA

SEQ ID NO: 480654 - protein, 377 aa, unidentified
MKKDIRFVGLDVHAETIAVAVAEADGEARSLGVIPNRPESVRRLVKKLGPAESLQVCYEAGPCGYVLYWQLSGLGVHCDVVAPTLVPVKSGDRIKTDRRDALKLARSHRSGDLTPVWVPDAEHEALRDLVRAREAAKKDQLRARHRLQKLLLRRGLRPAEGIKAGTVRYLTWVKTLQLEPAALAATLLDYVAEVDHAHERIERLERAIDQAIEAAPEAIRAVIEGLQSLRGVARISAATIVAELGQLSRFGRAKQLMGYAGVVSSEHSSGERIRRGAITKTGNAHLRRILVEAAWAYRHRPYLGGELRRRQKNASENVKEISWKAQHRLHSRYARLMGRGKTKQLAMTAVARELAGFVWAVGVEVERQLASRPARAA

SEQ ID NO: 480655 - protein, 352 aa, unidentified
MLIIGCDFHPGFQQVAIFDKRTGEIEQKRLKHREEAEQFYRSLVGEEVRVGMEACGHYPWFERLLAELGQELWLGDASKIRACEVRKQKTDRRDAELLLHLLIEDRFPQIWVPSLEERDVRQLLVHRHKQVQARTRVKNQLQAMALSQGVQKKRKLWTQVGRAELEKLELLPYAAERRKQLLLNLDRLEAAIGELNRRVEEEVKQRPAALRLQTHPGVGPVTALAMVLTLGPAERFRSGKNVGSYFGLIPSEHSSGGRQQLGRISKQGSSFLRFLLVEAGQSAARYDAELGRFYRRLAVRKHRALAKVAVARKLATRLYLMLREDWDYAQLCRAVVQVSPSHSVVAKSAPTA

SEQ ID NO: 480656 - protein, 337 aa, unidentified
MQIPKHFVGIDIASASFTVAIHQARVKPVTLSNCGEGFEELLRWLKTNGVNPSNAIICMEATGVYTEHLCYFLHSKGFRVAVEAPQKVRRAFVNDIYKNDSIDSLRIAEYAYRFNDQLPLWAPSQEIVEQVKTLLAAREQLTGHLVANQNALKAIERKHVKTPLAEKVYLSSMEHIKEQIKLIDKELKNLISNHPTIGQAAALITSIPGVSTLLACNLMVVTQGFTHPLKARQLASHIGICPFERQSGASVYKRPRSRRYGPERFRKLLYLASLSLRTHNENFKRYFLRKVQEGKSKRLVLNNIANRLLKIITAVLQTGTPFIKGFKSLNPTLLYNA

SEQ ID NO: 480657 - protein, 312 aa, unidentified
MQNVNIGIDVSKESLEVFILPDETQLSVSNDGNGLKTLISRIKDMKLSKVVMEATGGMELFAAAQLAAHGIPVAIVNPRQVRDFARAMGVLAKTDSIDARVLASFAQAIKPECRPLPSATEQALRDLLSRRIQLMEMRISEANRLNTIRTPKAIKSINAVLRVINAEIKRLDKSIDQMIKDSPVWHAQATLYKSVPSVGPNTAAIMIGFLPELGNVDRRKIASLVGLAPVNKDSGTFRGRRMVSGGRQLVRTALYMPTINAIRFNPIIKAMYTRLIQKGKLPKVAITACMRKLLTILNAIAQNNTLWTYKNA

SEQ ID NO: 480658 - protein, 343 aa, unidentified
MHIAVLGIDLGKNTCSVAGLDDTGRVVVRRRLRRENIVKFTASLAPCLVAMEACCGAHHLGRILRAQGHQVRLMSPEYVRPYVKAHKNDDRDAEGIAEAATRPTMRFVELKSEEQLDMQTLHRARDRLVSERTALINQLRAVLLERGLVIPQGRRKLEQHLAAMLDEGGDVPLSPRVRALVEDMRAEWRQLDQRIRAFDDEFAGLARTNEAARRLATIPGIGVLNATALVAAIGTGAAFGRGRDLAAWLGLVPRQATTGGKPRLLGISKRGNGYLSKMLIHGARAALPSLANAQTGLSQWLRGLLARAHKNTAVVALAAKLARIVWAVLRSGQVFELRRGSAL

SEQ ID NO: 480659 - protein, 439 aa, unidentified
MILIREVADAPVIVGISKPAGLKSPCGEVKIMNPLFVGIDVSSRNNVAYLMKPDGSRHSSFSVQNNLGGAKLLSERIVSALGSMQLSDVVIGLEATSIYGDSLVYALREDGSLGRFQRKIHVLNPKQVRKFKEAYPDLPKNDWVDAFVIADHLRFGRIAKEVYMDDYRYQALRTLTRARFDVIQNLTREKQRFANYLFLKCSGIAQNKDIQNTSATTIALMERFETVDELANADLNELTAFISEAGRGRFADPDAIAKTVQAAAKGSYRLPRTVNDTVNQAMAVSIASMRALKEQVKVLDKAIEQQFEIIPNTLTSIPGIGKVYSAGIIAEIGDVHRFESQASVAKFAGLVWHKHQSGDFEAEHSQMIKSGNRYLRYYLLEAANSVRRCDSEFRRYYDLKFKEVNKYQHKRALALTARKLVRLVFRLLKDNRLYIQPEG

SEQ ID NO: 480660 - protein, 353 aa, unidentified
MSVWVSSMECVMSESQSTVSYNMFVGVDIAATTATVSWMRPGEKAGGPVTIEQSPEGDTGLERKLLATGKAPIEVLVVMEATGSYWITLATHLVHAGFQVSVINPAQAHHFAKALLKRAKTDAIDAQTLAQLAMMLQPAPWTPPPQIYYELQQRLAQRDALLDLQQQVRNQLHALDQLPEVIVTVRERFESLLATFTTPLATVEAEITEVWQHDATWATAAQRLQSIKGIGWGTAAWTLVTTLNFTTCDTVEGLTAYAGLAPVPRQSGTSVWHRPTIGHTGNGRLRTAFYMATLSAAQHNPMIKTFYTRLRAAGKPEKVARCAAARKLLHIAWAVVTKAQDFDPNYAPKMQRT

SEQ ID NO: 480661 - protein, 343 aa, unidentified
MQTVTTIGLDIAKSVFQVHGVDAAGQVVVRRQLKRRYVLAFFEKLPPCLIGVEACASSHHWSRELRALGHKVRLMPPAYVRPYVKRQKNDAADAEAICEAVTRANMRFVETKTPEQQSCLMLHRTRHLFIRQQTAVINAIRAHLAEFGIVAPVGRNGVEELLGVVADASDKRLPEIARACLAALGAQLRMLKAQILEFDRMINAWHRSNETSKRLDEIPGVGPALATALVASVADPRAFRSGRDFSAWIGLVPKQHSSGGKDKLGGISKQGDRYLRSLFTAGALAVIRYAKIHGAKHRPWLTALLARRPTKVAAVALANKIARMAWAMMARGERYKEPVALAA

SEQ ID NO: 480662 - protein, 346 aa, unidentified
MKVLLKQTVGIDVAQKELVVSLGRMDEQISIEVYAYKVFPNTKKGFLSLVSWVNKQTSTATEVRYIMEATGVYHESLAYYLCSTQKQISIVLPNKISNYARTLDIKTITDKSASQAIARFGLERQLEIWQPPSKIFNDLRQLCREREQLVQERTMLKNQLHAERTSATTSEKSVKRTNKRIALINAQEKEIQKEITKLINGDRVLVEKMKIISSIPGIGNLTAVTIIAETNGFELITNKKQLVSYAGLDVKEKTSGTSVKSKPRISKRGNRNLRKVMHFPALAAIRTDERFRYIFLRLVSRHGIKMKAIVAIQRKLLELTFILWKNNSYYNPGHEYQIIPFQEAAV

SEQ ID NO: 480663 - protein, 339 aa, unidentified
MKKVFIGIDFSKLTFDASLFHVDNQGHMAHCQFTNDVAGYARLLVWVKKQGCKDISLWLFCGEHTGLYSYQLTDYLNARNIDIWLESALQIKRSMGIVREKTDKIDSANIALYAKRFEDRARSSKLRAERQDEIKDLLAYRERLTKIVSMIKVSAKELKRVKKNASVDYIFKSSQHQIEDIENELKEIDKQIKELLKSDKELHDNCQLLMSIKGIGLQNAAMMLVLTENFSLFSDPRKFACYCGVVPFKQSSGTSVKKNDKVSGLANKKMKVLLSNAAQSAIRHNPQIRAYANRKLQEGKNKHLVANNVKNKLIHLMFAVVKNRTAYDLNYRYLLEQAG

SEQ ID NO: 480664 - protein, 342 aa, unidentified
MHATTVAIDLAKDVFEIAIARRSGAVEERRRLSRRQFQRFVTQLEPGTQVIMEACGTAHYWGRQCTRQGAVVRLLPPHYVRPYVRRNKTDRTDAEALLEANRCSGMYPVPVKTPEQQALQSLHRVRSQWHRTRTARINTIRGLLREHGLVLPIGARKLRERVVALLDERAPALPGLVTHMIGWLLEELAAIEQRLRDVDRDLHQLAQHHPVAVRLQEIPGVGPLTATALVGSVPHIHAFTRGRHFASWLGFTPRESSSGRRRTLGGISKRGDRYLRCLLAHGARSVLRAAVVRARSPQRLTRLHQWGLRLRERRGQNRAVIGVANKLARIIWAVWSRDLAFT

SEQ ID NO: 480665 - protein, 346 aa, unidentified
MEHYVGLDVSLKLTAICIVDQTGRIEREGVVGSNPEAIAAFIKSQAPHVARIGLETGATSTWLWTELNKMGLPVICIDARHAKAALRMQINKSDRNDAVGIARIMQCGWYKEVRVKDLDSHAIKALLVSRALLVKIKRDLENQIRGLLKNLGLVIGRAKMNVFALRAAELTEDRPELVGAVEPPLKAREAIERQIADLDRKVLRLARNDAQVRRFMTTPGVGPITALCFLATIDEPMRFKKSRSVGAYAGLTTRRYASGEVDWTGRISKCGDKMLRSYLYEAANVLLTRIAKWSALKAWGIKLAKRSGLRKAKVAVARKLAVILHRMWIDGTEFKWSSKEAANQPA

SEQ ID NO: 480666 - protein, 316 aa, unidentified
MQDDLVFVGADVAKAELAIAILPTARQLKLGNDRASISRWLRTLTPGSLVAMESTGRYHQLLAQLAVLAGMRVYILNARDVYFYAKALGVRGKTDASDAVVIARYLTQHHQQLHPWTPGTAAQQRLQEMLRRRAVIERHLSAIDDSLDGVHDLAQQRTSLASCAENLLAEVEQKIQALIACDIEMRQRQQQLQTITGVGPLISAVLVALLSRIEFANVGALIAYSGLDPRPNDSGNKRGRRALTKRGPASLRKLLWLAALSASHSKVFTAHYQGIKARGFSGTEALVILARKLLRIAWAVWRTGQPFDPSKVLKTA

SEQ ID NO: 480667 - protein, 351 aa, unidentified
MENPTTIAVDLSKNVFEIAVERQGRVCQRKRLNRRQMIEFFSQCEGATVLMEACGSSHYWGRKAQEFGHTVKLLPAQHVKPYRIGQKTDRRDAEAILSARHRESIVPVPVKTVEQQTICALHRVRAALMKTRTARLNTVRGLLREFGVTIAEGAERVLPAVHDALSESPSPVPEPLHASLLSMMAEAGELDERSRQVEKQLKALSRTVPLVEGLETIPGIGLLNATAFSAMVGNFARFKSGRKFASSLGLTPKESSSGKRRWLGSISKAGDPYLRTLLIGGARSMILAAHRTKRPHRLQAWALGVEKRRGRNRAAVAVANKLARIIWAVASRGVPFKPQFDIQNTPTSVPA

SEQ ID NO: 480668 - protein, 373 aa, unidentified
MPKYSTAFGMDVHLRSTTVCALDADTGEAVTRRFPGNPWGEIAGWMDGFPGPSLAAYESGYLGFAPQRELAGLGVECVVAAVSKIPRSAADSASKNDRNDAARMAKAILAHDISPAWVPSPEVEGIRDLAGAYDGATARLATARQRLLAFLARRGFVYGGTTPAGNPRKYRTYDFLRWLDKVRPEDDGGVRALAALRNEVEAAAEARADLLSEYRAAVDASPIAAEVAALQSIKGCAFALAAAFSAEVGDFTRFRSGRQVTAYFGLAPSQRSSGGSVRLGGISGAGNALVRKLAVEGSWCYAAARHQPKLMPRDTGVPLEIRMHGRKGSERLLRRREGMLARGMPAAKANAATAAELARWLWALGMMCREGAE

SEQ ID NO: 480669 - protein, 303 aa, unidentified
MQTQKNELNFNGHNIYVGMDVHLKSWTVCIMTEHLEHKQFTQPSNAETLYNYLVRNFPGATYHTVYESGFSGFWAHRQLEALGIHSIITNAADVPTAQKEKLKKNDPVDSRKLARSLRSKELDAIYTPTDSTLQERNLLRVRNTLVKELCRFKQRIKSLLYFYGIKALSIKEKYAVNVNLLKTIPGIGLITAMTLLTEIETIERFEDTDHFAGYVGLVPIRSSSGEVTKDGEMTFRGHDRLKKCLMESSWVAARADPALSLAYNKLAFRMEPNKAIVRIARKLLNRIYYVLKKQEKYVKGKVK

SEQ ID NO: 480670 - protein, 595 aa, unidentified
MLPQSPSASQAPRRFGVGIDTSRYGHYAAFLNEQLQPAAAELQFPESAAGYALLRGRLDSLTRRHGPAHFVVRLDAAGQYADNLRHFLHGLASPAAGAVGAARFSLTLSCGDPQRNKNYRAALFGSKKSDPVEARAAARFALAERPSTDIPLSQELRILRQVAGRLQAVVRQRTRLLNQFHHLLALTFPELALLTKELAAGWVLELVHRYPTAPLLAAAPPTDLGHIAYLPDRHIAPLLEHARASVASLAGATVAELVREQVRQLRDSGARQKRLENLLVTAYRALPEANHLDSIPGFGAVTAAVLTACTVAIERFATPAKYVAFFGVLPVEVASGVERDGQARAPRRWAMSRRGNDLVRRYLWMAALSAAQCNPAVKALYARVVAKHPQHKAVAVGHAMRKLLHLAFAVWKTGRPFNRDHYPWQTPTHVESSDNGMSPAPETSDNTRSQEGQAAGHKPVRMPAQPVVTAARTDTLADAAAVGEGTYLDFAHLKRQLPLARVLDQLGLTARLRGSGPQRRCACPLHRGDARGRTFSVNLDANVWQCFAQECGRKGDVIDLWAAVQGLSLRAAALELVQTFGLEPAPCGGTETRHG

SEQ ID NO: 480671 - protein, 368 aa, unidentified
MSHKSSKLYVGMDVHKESIDLAVAEEGGEVRHHGQIGGDMNALWRAVRKLESLGRELVFVYEAGPCGFGVYRGLIARGHGCWVVAPSNTPRRVRDRIKTDRRDSLKLAGLARAGELTPIYVPDVRDEAMRDLVRAREDAVVMQRQARQRLAALLLRNDVRYAGKTAWTAAHRRWIADLKLPQSAQRLAFEEYVQAVEEASTRVQRLSQCIEQELAHWRWRPVVGALQACRGIQLIHAVRMVAELGDLSRFRHPRQLMGYLGLIPGEDSSGEHRHQGAITKAGNSSARRALVEAAWAYQYTAKVSALIARRQVDVPKAALDIAWKAQVRLCARFRRLAARGVHRNKIVVAIARELAGFVWAIAQHVKPI

SEQ ID NO: 480672 - protein, 436 aa, unidentified
MILNALALKLKRQARGDFRGRHFEATLILQAVSWYLRYALSYRDIEEMLLERGLEVDHSTCADRDPVGGGAKLGCDAGGWAARSYLGEDAMAHYAAFDVSDKETAIHVLDEHGKLVWKGKRPSEPEALAAALRQHAPELVRVGLETGRLTPWLFHALKGLGVPVVCLDARHARAATALQRNKTDARDAETLAQLVRTGWFREARVKSWAAHAVRHLVGARAQLVGMATDLSNQIRSLLRTFGLRITGRAGGTFERKVREQITGSPEVAAVAEPLLAAWRAMRDQIAALDRKLIEAARSNATCRLLMTCPGVGVVVATSFAAAVAAPDHFRCSRAVGAYLGLTPRRHQSGESDHSAGVSKRGDKLLRSYLFEAAACLLIRVQRPSALKAWGVGLVQRLGFKRAAVAVARKLSVVLHAMWRENRPFQAWPTPAVAAAA

SEQ ID NO: 480673 - protein, 366 aa, unidentified
MKKHTTINQSLSADVSTCMNVAVDLAKKVFQVAGEDALGQVIFEDRIKSREAFQAFLQKLPASVTVLVETGPGAQAWARLLQAQGNPVRILPAQHVANHRSGPKNDRNDALAILRAGRDCTISAVPVKSAAAMAMQALHRARQGYIRRRTAVGNQMRGLLLEQGVSMAQGETAISQRVPRILEDATQPLPDLLRELIAELLGEWDQLGERVNVLTGRLETAAKQNETAKRLMTVRGVGPIIATALLAKQTEPERFANARQFAAYFGLVPSQHSSGEKIRLGKMSKQGDAYLRSLAIQGAHAVLRQVRPDSEQPDDQRLQRWISRLGRKEAAVRLANRNLRILWRLLQNDQTYRRQPGNSQEATMSH

SEQ ID NO: 480674 - protein, 420 aa, unidentified
MRNAGIHANSLLEVRRMYNAVGIDVSKGKSTVAVLQPGGTVIRKPFDVSHTSQNLNELADYLSSLDGTTKIVMECTGRYHEPMIKALSEAGLFVSIVNPHLIKNFGNNSLRKVKSDPADARKIARYTLDNWTELRQYSGMDNTRTQLKTLNSQFSFFMKQKVAAKANLIALLDNTYPGVNKLFDSPTREDGSEKWVDYAYSFWHADCVRKIGLKAFTERYKSFCKKHHYIFQQDKPEKLFNASKELVAVFPKEKTYKLLIQQSIQQLNLASEHVERLRREMNELASTLPEYSTVMGIYGVGKTYGPQLIAEIGDVSRFTHREALTAFAGVDPGVDESGQHKSKSNRASKVGSVRLRKTLFQIMTTLLQNAPEADPVYRFLDKKRSQGKPYYVYMTAGANKFLRIYYGKVKECLRNLEQTE

SEQ ID NO: 480675 - protein, 392 aa, unidentified
MKTNAIKEGTVEEAVQGRKTHQLIKLGVDVHWHEYVVVRQIDGSSPQSAQRFSPEGFVAWAAKQTQQAEQVWCCYEAGPFGFVLHKHLERLGVRNMVVRPRNWDEYGAKVKTDRRDALALCSSLDRYLAGNTQALAVVRVPTDEQERSRSQTRQREQLVSERKRLGAQGLCAARYYGYDLPDQWWRPRRFAAMQSQTPDFLLELLARWQRLLLAIDEELDSLGGLIESAQQQMLPTGLGALTAQILDREIGEWNRFKNRRQIASYTGLVPSEHSSGQTQVRGPITKHGNPRVRHILIEAGWRLRQFQPEYRAVKQRQAAFDSAKQKGNSPARKRLGVALSRQFIVDWWRIKTGRTTPAQLGLQMSWPTCPHLPSKSKPSSETSAQPPTQPIG

SEQ ID NO: 480676 - protein, 317 aa, unidentified
MENTPAADRFVGIDVSKSWVDVHVRPDGTALRCNTDGAGLAELVRRVRPLTPRLIVMEASGGYESIVAVSLAEAGLPVAIVNPRQVRKFAEALGQLAKTDAIDARVIAHFAEAVRPPPRPMPDPMITQLQELLARRRQLVVMINAEKQRFAKAESRITQRSHQAMLRSLEAEQARIDRAIDKLVRQSPLWCAKLDLLTSVPGVGDIVARTLIAELPELGTVDRHQIAALAGVAPFSRDSGRRKGKRFVRAGRVQVRAPVYMACLVAIQHNPPLKTFYRRLRAAGKPTRLALVAVMRKLLTMLNAILHGNQPWAFAHS

SEQ ID NO: 480677 - protein, 352 aa, unidentified
MEKGNKLNFSGQHIYVGMDVHKKSWSVSIQSEQFEHKTFTQPPEVEKLTGYLERTFPGATYHTVYEAGFSGFWLHDQLREKGIECMVVNPADVPTKDKERAGKTDRVDCRKLARGLRNGDMKGIYVPPRVKVEDRTLVRTRQSMVRKQTRCKNQITSILFFYGITIPEEGHWTRRFIHWLESIRMERASGDFSLKAHLEELNHLRQIIANLNRAILSLSRTEEYRSDVLLLKSVPGISTLTAMILLTELSDISRFSSLDKLASYTGLVPDIKSSGETEYATGITFRRNPALRALLIESSWVSVRKDPAMMMAFNKLSLRMKKTQAIVHIARKLLNRIRFVLKNRQKYVLAVV

SEQ ID NO: 480678 - protein, 369 aa, unidentified
MEKGTTYVALDDSKRKIVAGILRPGDAQPELREIANDPRQIRHLFERLKREGPVTACYEAGVSGYDLYRQLRALGLACDVIAPALTPRRPGQRIKTDRRDAAKLVRLFRAGELTAIHVPAEAEEAVRDLVRCRDDIRRDVLRWRHRVLKLLARHGRTYLTGKNWSQAHWRWIREQRFDLPPLQRAFEATMFALEQALARQAELDKELEAVAATAPYRESVGWLRCFRGIDTLSAIILLAEVVDFQRFRRPRELMAYLGLVPSEYSSGESQRHGALTKAGNSHARRVLVEAAWHYRHRPTIGRALASRSHGQPDEIVSQAWRAQQRLHRRYRHLVGHGKRTPVAVAAVARELVGFIWAAMTRHESRRAAA

SEQ ID NO: 480679 - protein, 410 aa, unidentified
MLKIVYPICCGMDVHKSFLVACIASTSERGVTTYKSKRFSTFTGDLRRCAVWLAENNCRDVCMESTGKYWIPIYNILEPTCEIVLAHPKYVKAIRGKKTDQKDAKWIADIFKHDLVSGSFIPPADIRQLRDLVRYHWKLTNFMSGEKNRAQNCLTVSNIKLDDVFSDVFGKAASAITSRLLESNEPFDVKPYLTKNHKASAEDIQAAVDGEICAEQAEKLRIIRSHMDSLELCKLNLESLILGTAEKYLPQLNLVLTVPGIQSFSAIAIISEIGVDMSVFPTSKQLCSWAGLTPQNNESAGKKKTTRISRAGAYIKPLLVQCALSAIRDKQNPEIRSRYLSLKKRRGHKKAIIAIARMLLTVIYNILKKNEPYNPVLYRNGDRPPTHREVSLEEAIFIIQRQGYLVSAPT

SEQ ID NO: 480680 - protein, 341 aa, unidentified
MQVTTIGLDIAKNVFQVHGIDAGEKVVVRRQLRRGQVRGFFEALTPCLIGMEACASAHHWARELSKLGHEVRLMPAKDVKAYVKRNKNDAADAEAICEAVRRPTMRFVRVKSAERQGQLMQHRSRDLLMRQRTQVINALRAHLAELGITAAQGREGIKELLAIVADDRDERLPMDARASLLVLAAQLQAVQTLIGTLEKRITAQHRANADSKRLQTIPGVGLIGATAIAATVTDPKAFRSGRDFAAWIGLVPREDSTGGKRRLGPISKQGDRYLRRILVVGAHSVLRRAKQSPEKYPWLTRLLARRPFRVVAIALANKMARIAWALLAKGETYRAPRLAAA

SEQ ID NO: 480681 - protein, 349 aa, unidentified
MPTTSLTDISAIGIDIGKNSFHIVGLDSRGAIVLRQKWSRGQVEARFANMPPCLIGMEACVGAHHLSRKLKMLGHDARLMPARYVRPYSKGQKNDFRDAEAIAEAVQRPTMKFVATKSTDQLDLQALHRVRERLVSQRTGIINQIRAFLLERGVAVRQGLRFLRAELPRILAAPPEVLSSRMGRLIEGLAADWRHLDERIDCLSGEITALARQDAGCERLVSVPGIGPIISSAMVAAIGTGDAFSKGRDFAAWLGLVPRQISTGDRTILGKISKRGNRYLRVLFVQAAWVVLIKPKSWERHGLKCWIEAAKKRLHHNVLAIALANKLARIAWSVLARGRGFEASKLQVA

SEQ ID NO: 480682 - protein, 414 aa, unidentified
MSNPLFVGIDVSSTENTVCCLTNEDEKRPLTRFNVPNNRPGIMGLKNRINQLIEQHSLDAIRFGLEHTGCFSTHAAMYLQRHLDFDCPDVKVYMFNPSLIKAFKKSHFLDAPKNDRFDAWFIAAKLKAGYLPHPFTWSEPMMALQRLTRARYHLVQALVRESNFLMTNLYLKWSDYTLAFDNRLSATSLAVMEEFDSVEDLAGISMEDLVDFLVQHGKNRFDEPLMVAKCLKKAARSSYRLPKAVNDSVNLAMASSIRVIRTIQEQLKSLKKAIEDHLDAIPQTLDSVPGIGPIFASGILAEIGDIGQFNSHKQLAKYAGLAWTQHQSGDFTASRTQLINSGNRFLRYYLVEAANSVRMHDSVFAQYYAKKKAEPKQFAHKRALVLTARKLVRLVFSLLKTNQLYRPEGGNQLR

SEQ ID NO: 480683 - protein, 327 aa, unidentified
MSLFVGLDLHKKYSEYAVMDIGGNLLRQGRIENTLDKMREFSESIPARSSMVIESSSTWYWAHRLLSERHDVLLSNPIKNKAIASAKVKTDKIDSITLANLLRGGWAAECYVPSKVTMEFRELVRFRANLVRQRTRMKNRIHAHLLMNNISIDAGPFTKGFVEEVRKIDDVRVQSYLRLIDGLNREIREASRTIRQKAGDNPDANLLMTIPGISYYSALLIISEIAEIERFEDSSSLVGYSGLAPSTHSSGGKTYHGPIMKTGSSYLRWILGQCTRVHMRAEPDGTVANFYARIARKKGDQKAIVAASAKLLKIVFWVLKEKRAYHS

SEQ ID NO: 480684 - protein, 348 aa, unidentified
MQFYTKQHKFYCGIDLHTKKMYVCVLDEKGEVREHRNMKTNPESFLSVIAPYREDIVVAVECMFTWYWLADLCQKEGIPFVLGHALYMKAIHGGKAKNDKIDSQKIAVLLRGGMIPMSYVYPEKMRATRDLMRRRNHLMYKRAELLAHIQNTNSQYNLDESFGSISRPYQRRGKDLIGAFDDPAVQKSMEVNLKVIATYDVLLEDLERSILKLAKDHDPVSYTLLQSVYGIGRIGALTILYEIENIKRFPRVQDFVSYARLVKCEKTSAGKSYGTSGNKIGNAHLKWAFSEAAVLFLRGNEPGQKYVERLTKKYNKAKALSILAHKLGRAVYFMLKNKEVFDQKRFLR

SEQ ID NO: 480685 - protein, 316 aa, unidentified
MNKTVVQNINVGVDTGKDFLDIHIRPLNEYFKVSNDKKGAAEATKRLRKLNIERVVIESTGRYEALFVSACAKANIPFSIVNPVHVKRFAGAIGRRAKTDKLDAALIAQFGEVIQPKLSRLKPENMQKMADIVRRRNQLIEMQTKEKNRLQIMSKAIQPNIKAMLILLKKQIEKMNDELAKLIESCPDYRAKSELVQSMPGIGKISAAALISYLPELGLMNSKQVASLVGVAPMNKESGKYKGKQVTQGGRHQVRTVLFMAMMSAMQCNQKFKAFYERLVEAGKPKKVAIIACVRKMVVILNSMVRDGVMWEEKTV

SEQ ID NO: 480686 - protein, 369 aa, unidentified
MDNDSTVFIGLDVHKDSIAVARVGSASSDPVIDVATIGTQQYAIDRMLAKLAGHGPLQFVYEAGPCGFWLQRYLTAKGQDCVVAAPSLIPRRPGDRIKTDTRDARNLALGLRAGTLTAVHVPGPEQEAFRDVVRAWQQSKRDVAKGKQRLKAFLLRNDLRYAGTAAWSAAHRRWLATLVLPSGAQQVVFQELVDTITEREARRARLEAQMAELAPHWSGYPAAQALLAFRGVQQAVAYGVVAEAGDFARFSHPRRFMAWLGLVPSEHSSGGTRRQGGITKTGNRWARTLLVEAAWAYRHHPKVSAIIETRAQQIDPAIRAIAWKAQLRLTSKYRRMQARGKPHNLIVTAIARELAGFLWDAARLANQTP

SEQ ID NO: 480687 - protein, 460 aa, unidentified
MANKAKKIETTKGLKLEIVNCNAAGIDVSSTEMQVCVPQDRDVDNNRRFGTFTCHLHQISAWLKTCRIDTVAMESTGIYWIPLYMRLVADGFDVLLGNAKAIKNIAEKKTDKVDAEWIMLLHSYGLLRASFQPCNYAREIRNLTRHRDNLLQSASKEVLHMHKYMELMNIKLSVVISDILGKSGQDIISAIIKGERNALKLASLADPRCKASRDEIEKSLVATWDENLIFMLKQSYQLYHYLQNQMVETEKQVETLINKYKANLPIQTVEEEQPQCIRSKKPESAKNKISVDIEQYAHEIWGVNLMRIPGIKKGSLLRLVGELGHDFVEKFDSYKEFCNWANLVPNNKISGGKLLSSKVPKRKNPVGQILRVAANSLKNDKSSLGIYFRKIQAKKGYQAAIVATANKLGRIIYTMVKKRTEYNGTLGRDKQVEILKKKIKRTQLELNRLQKQINECVKKE

SEQ ID NO: 480688 - protein, 415 aa, unidentified
MEPVLESCAGMDVHEKKVDVCIAHGPLDKSPKFEIRTFSTMTSDLEDLSSWLKKYRVTTIGMESTGVYWKPIFNIMEGEFKIVLANAQHLKAIPRKKTDIMDCKRIAKLLRYGLLPNSFIPPREIRELRDLNRTRRKLVGMMTSEKNRIIKVLESANIKLSSVVSKISGVSSLAMIRSLLEKDKLTKEEISQLAKGSLKKKVDQLEKALNGKLTDHHRFLLKMHLENLDHLARQIEKIDEEIKRKMIPFQTEAKLIQTIPGISEVSASAILAEIGTDMSQFPDERHISSWAGICPGNNESAGKKKSGKTQKGNSSLKATLVEAAWAASKTKGSSYSAFYHNIVRRRGKKRALVALAHRMLIDIFYVLKTGVPYQDTGAKAANEVAMKRREQLMIRSLEKAGYSVVKTYHAEMAVA

SEQ ID NO: 480689 - protein, 272 aa, unidentified
MDKYDGRQFVGIDLHRRRSVIVRQSESGEQLSAVRIVNDPVALALELEQAGPDPEVVLEATYGWYWAVDVLHACGARVHLAHPLGVKGFRYRRVKNDVRDAGDLADLLRMGRLPEAWIAPPATRELRELVRYRAKLVAIRSGLKAQIHAVLAKAGVLIAVSDVFGVTGRQRLAKVPLGPAYAQRISSLLELIDILDGHEARFAAMIAERLGAHRGYHAIQQLPGIGPVLAAVFVAEIGDVHRFADPAHLCSWAGLTPTHRESDTVVRRGHIT

SEQ ID NO: 480690 - protein, 344 aa, unidentified
MYYIGLDIHKKSIAYCVKNVGGEVHRQGEVHATRAALDAWLKSLPQPWTGAMEATLFTGWIYDHLLPHTASLKVAHPLMLRAIAASKKKNDRVDAAKIADLLRCDLLPECYMAPVETRERRRTLRYRNLLVRQATQMKNRMAGLLMETGVTYNKAKLHQKRYFADLVKDSEELPEGLKPLLKVGRDIVERAASSEVALLRALERDALLAARVERLRSIPGVGPVTALTWALEIGEVRRFASVKHAVSYCGLCSAEKSSAGIQKRSPISKQRNKHLQSVLIEAAKLAPRYNQDLALVHAKESQRGNRNRATLAVARKMVAYLMAVDRREEDFQGGTKKPLVEAAA

SEQ ID NO: 480691 - protein, 456 aa, unidentified
MKIPQSTIRLLTGRLVKILLNKEVSIMKSNTQNAKIEAITENTLVLGIDIGSETHYARAFDYRGIEYSKKPFKFSNTEAGFMSFKAWIQDMKEMHEKDKVVPGMEPTGHYWFNLGKFLQDNEMRPVLVNPHHVKKSKELDDNHPTKNDRKDPKVIAGLVREGRYMIPYLPEGVYADLRTASNIRFQLQAELTRIQNRISRWFSIYFPEYKTVYGKPDAKSGMMILKVAPLPEDILTLGIDGVNQIWRDAKMRAVGKARAKTLMEAAEHSVGSKEGAVSARMEIRMLLEDYESRNVRLQEVMALIEELVKQIPMAEKLLEIKGVGIKTVSGFLAEVGDISRFNNPKELQKLAGLALVENSSGKHKGETRISRRGRKRLRYLLFEVAMSLVSKNAEFKELHIYYTTRRINPLKKMQSLMAVAAKALRIFYAILTKGVAYDPKKMINDIKRPKIYLQAA

SEQ ID NO: 480692 - protein, 371 aa, unidentified
MRVISKAPDSVVIAIDPHKASWTAAAVDASLQPVETIRVPVSRDGYRALRRFASRWPDPLWAIEGATGLGAPLTARLRADGMDVVDVPAKLAARVRMLSTGHGRKNDDADAVSVGIAARSARTLTSVTVEGTVTALRAIVEHRDDLVKTRTQTVNRLHVVLTNLIPAGAQRDLTADQAAELLRGTRPRDVAGKTLRGLAADLVTEIRHLDRRIAKATADIETAVTASGTTLTELRGIGALTAGTILGRVGSISRFRSAAAFATYTGTAPIDVSSGDVVRHRLSRAGDRQLNRCLHVMALTQIRLDTPGRTYYLRKRTDGKGHKEAMRCLKRRLSDVVYRQLRSDANRLEAGPGGHSGAALESSAASSNPTD

SEQ ID NO: 480693 - protein, 380 aa, unidentified
MISVGIDVSKGKSTVCILKPYGEIVSKPFNITHTQKDLSELSSMLFRLNDEVKIVMEATGIYHLPVLTYLQEKGFFVSVINPYLMKSYRNESLRKAKTDKIDSRIIANYGIDHWFKMKEFQTSGEIYEELKLLGQQYRHYMKLHLLSLAELTHLLDLTMPGIKNLLASWNETNRKDKRSDFVERFWHYDVITSMSEQEFTEEYILWAKEKKYVPSQEKAKVIYTLAQESIPTLPSETSSVKMLVTEAVRVLKEVDATLGLILSRMQEIAKTLPEYSVVREMGGVGNTLAPKLIAEIGDVRRFRNGKALVAFAGIDPPPYESGQFVGCNRKISKRGSASLRKVGYETMRSLKMRSRPEDPVYRYVVKKESEGKSGSVNYSV

SEQ ID NO: 480694 - protein, 351 aa, unidentified
MAHRNLPRPAAVYGIDIGKNIFHVVGLSRDGTPVQRVRFRRDTLLQFFARADPSIVGMESCAGSQWLARKIQALGHKVRLIPAQFVKPYVKSNKNDIIDAEAIAEATTRPTMRFVTAKATDQVDLQALHRIRDQMVGSRTRLINQMRAFCLEYGVPLRQGAGLFKVDLPTALNDPESPAMRRLLGDLHVDLLRLEERIRQVTKEIEAIADREDVARRLMTIPGVGALGATALLAAIGDGQQFRKARDLAAWLGLVPRQYSTGGKQTLLGISKRGNRYVRKLLVHGARSCFRHLDRTRDRLGSWLDGLEARMHPNKAVVALTGGQDGTHRLGRSEQAGRTLRTQGSCFRLTL

SEQ ID NO: 480695 - protein, 349 aa, unidentified
MTIIDETQLVVGVDTHLDTHTAAICDQRGRQLAELQVPTTPAGYAHLVAWVSEAAEGAQVIWAIEGTRHYGLGLVRFLHARDQRVEEIDSSRHLGKRRKGKSDPIDAVRAAKELLARPEPSVPRADGDREALRLLMIDRDNAVDSIRSARTVLTSLIVTAPADLRERLRHLSRDRRVQVCSTLACPPDADRPTRVLHQSLARLGTRIVDLSKVVDELEAEISDIVEELAPGVVATEHGLGALSLAQILLSWSHAGRIKSEAAFAMLSGTAPLPVSSGRTDRHRLNRLGDRQLNRALHIVAVTRMRSHPPTIAYVERRRAEGRTDKEIRRCLKRYLARHLFRTLNHLDRT

SEQ ID NO: 480696 - protein, 408 aa, unidentified
MNAVGIDVSKGKSMVAALRPMGEVALLPQEFLHTGVGLEQMAYAIIALGEDTRVIMEATGRYHEPVAAALHEYGIYVCVLNPLFIKQSGGGSIRKVKTDKADAMKIAKYGLDNWVDLREYTPMDTVRQQLKLCSRQYNLYMKTVVSLQNNLISLTDKTFPGVNELFSSPERADGHQKWVDFVMTFYHCDCICRVSENAFAERYQKWCKRKGYHFSAEKAQDVYLGSCGHFTTLPKNDNTKLLITTAAQQLLAGKMTLAALRTEMTRLAKQLPEYDIVRAMYGVGETTAVQLMAEIGDVRRFPRRSSIVGFAGVDPAVDQSGKHSAKSVPTTKRGSPHLRKTLYQIVCTYLKKSPVDEPVYQFLDKKRSEGKPYFVYMTAAQNKFLRIYYARVKECLEAFDAQQDTSQR

SEQ ID NO: 480697 - protein, 346 aa, unidentified
MEHYVGLDVSLRLTAICIVDRTGKIEREGVVASSPEAIAAFVKLHAPQVVRIGLETGATSTWLWTELNKMRLPIICIDARHAKAALKMQINKSDRNDAVGIARIMQCGWYREVRVKDLDSHAIKALLVSRALLVKIKRDLENQIRGLLKNLGLVIGRAKMNVFSVRATELVADRPELAAAVEPLLKAREAVERQIADLDRKVMRLARSDAQVRRFMTAPGVGAITALCFRATIDDPTRFKKSRSVGAYVGLTTRRYASGEIDWTGRISKCGDAMLRSYLYEAANVLLTRVAKWSVLKAWGIRLAKRSGLRKAKVAVARKLAVILHRMWVDRTEFNWSSKEVAAQHP

SEQ ID NO: 480698 - protein, 340 aa, unidentified
MSLFAGLDISVKTTAICVVDKNGHVLLETSVDSHPQAIAERLVAAGSSFERIGLEAGPLSQWIYAGLADADLPAICVETRHMHAILSARINKTDRNDARGIAQMMRVGLFKAVHVKTPASQHRRFLLTSRKLLQKKIYDIENDLRGSLRNFGLKVGVVGAARFDHRVRELVTDHPTVAAIADPLLEARAVLRTQFDKLHKMLLQLVRADPICRRLMSAPGVGPVVALTFRTCVDNPARFSRSKCVGAHYGLTPRLYQSGETARTGRVSRCGDVMMRSSLYEAALVLLTGPGRWNPIKAWGLAVAKRRGMQKAIVAVARKLAIVLHRMWRDQTEFRWTATV

SEQ ID NO: 480699 - protein, 422 aa, unidentified
MKKIAQFHQPDKPSSKHLVLAVDVSSRLLDLYSRYRQVGREFELSESFLNDLPTIHQKLDEYHKQARVLGYNGLSIVVEPSGCYEKKLTHASLQRGFDVWTVNPERMYKAGVVHHGDDGKSDPLDGKVLFMMAQMGKVSRLVPLPSQWQKLRQFGLWMEDCTLAAADARIHIGAIRRQLFADWRQSGDLTWGPTGLAIQQLYGFDPWKITKGSFDDYIAKMRAHHKGLHQRCLVSIWQQAQSSCQAPLSPIQREAISGQLEYYWDTWNLHHSRKGNLGQKMIDVVEQFDPDHWIPPIMSGFTELTRAKILAETGPLEQFPHWRALLAYAGLKVRMRSSGKYRGQDKITKKGRVLLRKHLGQAAWVLARNDRVLGPYYHRKLSEGMPARKAKVACMRKLVKLLYGAAKSNQQFNPERVYRSAG

SEQ ID NO: 480700 - protein, 352 aa, unidentified
MNATTVAVDVAKNVFELAVADASWKVTGSARLTRGQFERWFDNREVKLVIMEACGSAHHWARWLQGRGIEVRLLPAQYVRAYVKRNKTDAADARALLEAARASDMKPVGVKSVEQQGLQALHRTRSAWKATRTQRINALRGFCREFGLVVPEGALKGLARIGQVLADEDSAIPTLLRGTMRFMLEEIRLLEARMGQLERELAEIATASAPCQRLLSVPGIGLITSTAMVGAIADPKSFASGRRYASFLGLTPREHSSGDRRVLGGISKRGDRYLRTLLTHGARSVLRAATVARRYGRPLSRLQSWALEVQARTNHNKAACALANKLARIAWAVWVKHEHYRSSSVEPVPAAL

SEQ ID NO: 480701 - protein, 421 aa, unidentified
MPNIEIGVDSMVKENFIYVGIDLHKETHTAVMIDCYNQKLGEITFPNRPAAFPKLVTKVKKCNTDGKEVVYGLENAYGYGRALAVWLIDKGYLVKDVNTAISHRQAKHRGAMYRKSDSDDAEAIALATLNMLDKLPDAYPNDAYWSLGQLVHRRDNIMKQRTRLVNQLHEQLCIAYPSYKQFFNDISRPTALYFWEHYPSRKYLKGKSVEDLRAELVPVSHNKCSTKTCEKILDAVASDKVKNNAYQDARDMVTLSIVSDLQHYDKQLAEVDKMLEQMYKMLGCTLTTIPGVNVITAVKILSEIGDIERFANANKLAQFAGIAPLHLSFSGKGKDVATKQGNRRLQATIYFLAIQMVQVSSKGTPRNPVVRAYYEKRKAEGKTSQQALICISRRLISIIYGMLKHGTEYRMPVVESAGENR

SEQ ID NO: 480702 - protein, 429 aa, unidentified
MEEIDDTDLVVERVAALDLGKAGLDACVRVPHTHHPGRRMQELRSYGTTTAQLLELAAWLRHWHVQRVVMESTSTYWKGVYYLLEAEGFDCWLVNAREVKNVPGRAKTDRADAVWLAKVAERGMCRPSLVHPPDIRRLRDLTRYRRALVQDRTRERQRVEKLLEDAQIKISSVLSDLHGVTGRAMMDALINGQRDPHTLARLAKGSARKKTARLEEALRGFFTDHHAMILQMMLANSDRLSAQIAELDGRIEEALSPFCAQSARLADIPGVDVMAAAELIAEVGVDMTRFPSAAHLVSWAKFCPQTHQSAGKSKSQSRGKGNPWLAGTLGRVVFANSRSETFLGARYRRLARRRGKQKAIVATGNSLLTVVYHLLLNSDARFCDLGPGYYESRINKHRRARDLATQLQALTGQHIVIRDGKAVITDTAA

SEQ ID NO: 480703 - protein, 342 aa, unidentified
MAPSTQPCYKYFLGIDVSKDTIDCLLRPSETYSQQANRDEGFGRLHHWLGNHHCSRQHTLICIEDTGIYSDRLLAGLTSRGWKCAVVKTTATQKVAPEHHRKDDRFDAGLLAEYAQRYSDRITLTNPPKEAVKQLQQLYAERQRLIKARGATQNRKQQAAYALVPSPLLARQWTQQLQLYSQQVETLEDHMRELVSSHPGLHAYYQSLRTIPGVGEVTAWLWLMLFYGEDHLNYKQIASRFGFAPHRHTSGSSVRGKTRSSGHGNSQMRSCMTMVARSVSHHYERFARYKKRKLDEGKPWPVVRNNLINKMIKIICAIWNSGRPYQKNYESRFDRQKKSFNT

SEQ ID NO: 480704 - protein, 404 aa, unidentified
MNNVAGIDVSKGKSMVSVLRPFGEVVAKPFSVGHTGRELKKLADYLKSLDGETRVVMEHTGRYYEPVARFLHEEGIFVSAVNPKLIKDYGNNTLRKVKTDRADARKIARYGLDNWVELRQYTPMDTIRMQLKTLNRQQGLYSKTKTMMKNNLIALLDQTYPGANSLFDSPVREDGSQKWVDFAMTFWHVDCVRGMSLAAFTERYRKWCKRHGYNFSQNRAIEIHMDAQNLIAMLPRNPLIKTMIRQAVDALNAVSKSLEQLKAEMRTLAAQLPEYPVVMAMRGVGDSLGPQLMAELGDVTRFTHRNAITAFAGVDPGADQSGTYEAKSTRASKSGPPELRKALFLVMDCLLKTQPADNPVYCFMDKKRAEGKPYLVYMTAGANKFLRIYYGRVKEYLASLEDSD

SEQ ID NO: 480705 - protein, 427 aa, unidentified
MKKIKIDYLSTLFVGIDIGSRTNVISALNFDQDFLIKMVPVANAQGGAEQMEEMVAEVLSQHHEFKTVIICLESTGFYGVHIANYLSTSEKLAPFSTKVYCLNPNEVKQYKKSFNSLDKNDGIDSFVIADFARVGRIHTEPWRGAQYLALQRLTRHRLHITECIAREKTYMLNNIFLKFSEFAMLNKDEHPFSDKYGATAEAVLTDYLSTEDIVDASVDDLVAFISSKSRGRISDPEQTTYLLQKAAQDSYRLDKCLYEPLTVSIGCSFNCISAFEKELKAINDAIQRSVKGLNPTEYQILTSVPGIGPVYASGILAELGTIRCFKSNDALAKYCGIVWKENQSGEFQAEDTPMNKAGNRYLRYYMIEAAGSVVQHCPEYKAFYDKKFAEVRTHQHKRALALTSRKLIRMLFGLLANSKLYSVEKSR

SEQ ID NO: 480706 - protein, 343 aa, unidentified
MGEVSTIGLDIAKSVFQVHGVDGTGAVVMRRRIGRSKVLEFFGGLSPCLVGLEACPSAHFWSRELQALGHTVKLMPPSYVKAYLKRGKNDANDAAAICEAVARPSMRFVAIKSEQQQCGLMLHRARQLLVRQRTMLSNAIRGHMAELGIISAKGRNGTAELLQIIGDVADDRIPPVARFCLELLARQYLSLVAEVASIDKRIHAWHRSCEESRRLEEIPGVGPIVATALVAEVGDWDAFRSGRNLAAWIGLVPKQHSTGGKERLGSITKQGNRYLRWLLVAGAMAVIRYARQHGTKRPWLIRIMDRRPTKVAAVALANKIARMAWAIMVHGERYREPKLLLAV

SEQ ID NO: 480707 - protein, 494 aa, unidentified
MATRRATTDTQTQPRSAYRRRKARARAKAARAHEAEERRVEGLPVTQAHAAGIDVGSRSHWVCVGAGAGDPAACVREFPAHTAGLHQLLDYLRQHHVTTVALESTGVYWIPLYELLESNGFEVLLVDPSYTKQVKGRPKTDRLDCQWIYRLHSVGLLAAAFRPDEKTCQLRSYLRQRANVIRYAGQHIQHMEKALEQMNLKLREIISDITGVTGQAILRAILKGTRDPQKLARLRNQKCKATEAEIAQALHGSYRDEHLFALRQAYEAWQFYQKQLDQVEEQIQQQLARMKQDRALPPLKPRPRTSGRKPNQPRFDVRTALYYVVGIDLTEIEGIAELTALTIISEIGPDVSKFATVKHFCSWLGLCPQLKKTGGRVKSSRTRPGVNRAAVAFRLAANSLYASKGALGAFLRRQKGRLGAPQAVTATAHKLARIVYLALKHGLAYVRQNQQEYAAKVREQQIKGVQRRARQLGLEVIEKQPSTSTAAQTAAVPC

SEQ ID NO: 480708 - protein, 340 aa, unidentified
MQYKFYVGVDVSKATLDVALIDDHHREVIHHIQVGNDDEGTEQMLIWLNTHQGFAVDQTLFCMEATGLYCNPLLQFLHLHEAATWVENAIQIKRSLGIQRGKNDKVDAKRIAQYASKNNDKVRLWQPRREVVEQLRALAALRERLVETRKRLLTPVNEFRQYSNEAMAKMLEKSMSKSIGAIEKDIKGVEQKLNEIIDSDDDLKRIFNLATSVVGIGFVTAINLIIHTNEFKMLTDVRKLACYCGIAPFEYSSGSTIRGKRRVHPMANRKLKTNLHMGSMVGVQVDPGLKAYYERKVAEGKNKMSVLNAVKNKMLARVLAVVKRGEPYQKNFSPKCFAVS

SEQ ID NO: 480709 - protein, 338 aa, unidentified
MAIVTVGIDLAKNVFAVHGVDESGKPALVRPEVPRAKLLELIANLPPCLIGMEACSGAHHWAREFARFGHTVRLMAPKFVAPYRMSGKRGKNDAADAAAICEAVTRPNMRFVPVKSIEQQSRLFVHRARQGYVEQRTALINRIRGLLSELGIVLPLKAATVRREAHKHLEDLPGWCNTVVGDALSELTRLDERIKQYDQHIDQAAKEDEQSRQLMQLAGIGPTTASAIVATVGKGHDFSCGRQFCAWLGLVPGQYSSGGKQRLGRITKAGDPYLRTLLIMGGKAVLAAAKNKTDPVSRWAISVQERRGYWRAVVAIAAKNARMCWAMLQRGDAFKIPA

SEQ ID NO: 480710 - protein, 388 aa, unidentified
MQVVADQAAAPTAIQTDLRAIFVSLELSRSTWLITSLSPGGGEKMSKHSVQAGDIAGLLKRFAQLKEKARARTGRDFPVITIQEAGLDGFWIHRVLQSEGIESHVVDPASIATSRRRRRAKTDKIDGETLVRTLLAYKRGEPRVCAMVKVPTPEEEDSRRLCRERKVLTAERVLHVNRIKGMLFCQGISGYEPLRRDRHERLEELRTGDGRPLPPHLKAQVNRELDRLELLLKQIKAVEAERDALLVAAHTPAAVPASMLLNIKGIGPEFAAVLWSEGLFRHFDNRRQVAAYAGLAPTPWQSGAVDREQGVSKAGNPRLRTTLIQLAWLWLRNQPHSALTLWFHERVRRNGGRLRKTTIVALARKLLVALWKYVTAGVVIEGAAMTTA

SEQ ID NO: 480711 - protein, 433 aa, unidentified
MICIGIDIAKRSHVASAVDEDGGTVVESFKFDNTANGFAKMLKRLRKADATPENSLVGMEATGRYWVALFDFLISHGYEAAVINPIQTDAFRGVWTVRKVKTDALDAAMIADLVRYKRYEPSALGDEATEELRNLARYRLSLVERSTALKNRATAILDRTFPELAGLFSNAYCPTHRELLQHCATPDQVLGTDVGTLERILREASRGRCGRAKAERLKALAKESVGVGFGSKTLAFEARLLMEELDFVQDQVKEVERELARLLERTQGKWLVTIPGIDVALASVIAGEIGDPNAFDDPHRLMGYAGMDPTRSESGETVRSDGHMSKRGPGALRWAFMQAADCARKNDPYFGDYYDRKRGVDGKHHYVALSGVARKLMGVALAVMKEGRPYEPAPPRNHRPGHPAWGRVLACAFLSRIHFSRFLSKSLGFPLDS

SEQ ID NO: 480712 - protein, 416 aa, unidentified
MKKGQDTRGYERYLALDIHREYILVGGWNEKKEWILTPRRVSIEKFPEWAKKNIREGDIVVLETTTNVWTVYDILAALASRVLVANAAEVWELAGARVKTDKEDIKRLLKLLIGGIVPEVWVPPLEVRELRAFISYRNRLVTTSTMIRNRLQSLLHKHNLLLSEAGLLDQTWWDAQKNISTLEKMQIRQELVLLQEVEKLKDAVDEELQRQSTSPTWGKQALQIMQLPGIGFVVAMTVLSAIGDISRFESAKQLVGYAGIGAGVHDSGKTHKEKKITKKGRRELRWALVEAAWRAVRMSPFWKEEYEKHLKRMRKPNQAIVVIARKLLIAIWHVLSKAETDIHASEEDLAYKMLLLSWSLSEDVRLGLTYKQFAKYALMKLGVETDITRFVRKNVPRRLAPREEVLARMTELSLTA

SEQ ID NO: 480713 - protein, 239 aa, unidentified
MFDETKEYEVPNKKGLKTFKKLLKKDYGKEWIETKLIYEPTGPYSNYLREFASTNKLKVYEVNPKKSANFAKVLGNRSKTDAVDAKMLYRFHLLLKESELFIPEIDKITEQLGSFIHSYEIIQKTRTMLSNHLHSMEYKSGADTKIKESIKKEIKHLCEMEENLEKETEAFVENNPETREDLNNLLSIKGIGVISAINLLYLFRKYSDTNRNEITALAGLDPVQRQSGSSLNGGRKITC

SEQ ID NO: 480714 - protein, 411 aa, unidentified
MRYCLGVDWADQTHAVWVVDESGTKITARTVAHTAEGLDEWGRELDEWRAQGIDLWAAIERPDGRVVDFLLDHGVVVYPVNPKALDRARDRFRQSGAKSDPFDARVLADFLRTDHAHLRPLQPSSEAAQELKLLTEDCQRHIRQQTRLVNQLTATLKAYYPRALEVAEVTSALAREFLPAYPTPEALTALTERQWQRWARAHRLPEARTGELWVVLRQPQVPVPAHVVRAKARLMQSLLEQLKPVVAAVAQYRKTIDDFFARMPTAQWARTLPIGKHGVTAPTLWARLGDAPGRWESFRHLQAHAGTVPVTKRSGKQRVVQFRFACDKALRYVVDQVAYLSLLSSAWARPYYDQQRARGHSHRQALRALGAKWLKIIFIMWQRQVPYDEQYHLATLARQHLQAASGGNRLT

SEQ ID NO: 480715 - protein, 343 aa, unidentified
MSYFVGLDVSQKTTVICVVDASGARIWRGQCGTVPDEIAQTLRCHAGEDARIGIETGAMTPWLVHELRSQGLDIVCLDARHARAALKIQINKTDQNDAEGLAHIMRTGWYRAVHVKSFDAHRARALLGARTQLVGMTTRMSNHIRGVLKTFGLLPGAMRGLRFDRRVEQMLTARPDVAMIVRPMLVAWRQLREQIAVFDKAVRAKVRADPVCRSLMGVPGIGVLSVLAFVSTIEAPERFPRSRSVGAHLGLTPRQYQSGEIDRSGRISKCGDRLARTLLYEAANVILSRVRRSCGLKDWAQALARRSGPGKARVALARKLAVILHSMWRSGEPFRWIQPIATT

SEQ ID NO: 480716 - protein, 362 aa, unidentified
MSDATTHIEEGKVTVGLDLGDKHTHLCLIDGAGELLEEARLRTTPAALRRRFGAMPTARLVLEAGTHSPWVSRLLEDCGHEVYVANPRKLRLVYQNDSKSDRVDAEYLARIGRLDPALPAPFHHRHGATQADLALIRSRDVLVRARVRLINHVRGAVKSVGGRISKCSRASFAKQAGSHIPAELAPALAPLLAMIEAMDVEIRAYDRKIEELARQRYPETALLRQVPGVGGLTALAYVLTIEDRARFASPRAVGSYLGLRPRRADSGDLSPQLHITKAGDEMLRRLLVGAAHYILGPFGPDSDLRRWGLALAARGGKRGKRLALVAVARKLSVLLLRLWMTGEAYEPLRNAVRTGRSLPEPA

SEQ ID NO: 480717 - protein, 334 aa, unidentified
MRVTIGVDKSTLAVAVLDELGKVVGSREFANDDRGHGALLEWIKVHDGERVIGIEGTGSFGAALARRLIEANEDTREVPALLPHRERKRNPSRGKSDPLDAIAIARVVARGERLSSPHRVDVLRDLKLLSDHRDQLVRARTQLINRTHKDLVVSHPGYEKKIPKLTSKKRLRETRGLLRADRSVRADLIRDRITEIARLMDKVAAAERQITQKVVESGTTLTQLHGIGFLVAAKILGEVGDPARLRSKASFAMLTGTAPVQASSGKTHRHRLNRGGNRQLNYALYMMALARWRGHPDTRSYIERLGNRGSPTRKRCAASSVSCRTWSFGSSFPT

SEQ ID NO: 480718 - protein, 386 aa, unidentified
MQRNDLSRSLVAFDQNSTLVAVVELSLNRWVVQGLVPGLSKQPLKALGPDASALLALVNRWQLEGTKGGGRIKRIVVAFEAGRDGFWLARWLRSRGIEVYVIHATSIPVSREHRRAKSDRLDTELLMRALLGWLRGERKHCQMVRIPTIEEEDARRPNREHQTLVGERTRNVCRIKSTLVLHGIRDFNPKRLKASERLEMLRCPEGGSLPPNTLAELRREMAQLRLISGQLREIEKTREERLKRAPRQGTHPMVLLLAKILGIGIETADMLVHEILSRELRDERAVGRYAGLTGSPYDSGAKRREKGMSRAGNARVRRGMVQLAWRWIRFQKDSQLTQWYNNRTESARGDIRKTMIVALARKLLVSLWRYVTTGEVPVGAKLKAAA

SEQ ID NO: 480719 - protein, 366 aa, unidentified
MKKNSTVAVGRKQIFKQAKLTIGLDLGDRSSHYCMLDEAGNVILERSLPTTANGIRQAFSRIPRCRMALETGTHSPWVSRQLSELGHEVIVAHARNVRLIGESSRKDDRIDARTLARLARIDPGLLGPVRHRSAQAQIHLTVIRARAALVSTRTALVNAARGLTKSYGQRLNKCGTEQMTRDRAKGLSQELREALDPLLREIESLNERIAEYNRRIEQIAKEVHPEVARLKQVKGVGTLIALTYVLTLDDPQRFRRSRDAGCFLGLRPGRRNSGQSEPQLHISKEGDRYLRTLMVQGAHYILGPFGQDSDLRRWGLKLAERGGKNAKKRAVVAVARKLAVLLHKLWVSGEVYEPLRNNHEVESAVA

SEQ ID NO: 480720 - protein, 427 aa, unidentified
MREEAVLEETQDEQEIIQRVAALDIGKAELVCCVRVPDPKGGSRRVQEVKTYSTMTRSLQVMADRLLDLGVTRVVMEATSDYWKPPFYLLEAHGFEAWVVNAKDVKNLPGRPKTDRLDAVWLCKVAERQMLRPSFIPPSPIRRLRDLTRYRVGLVSDQTREKNRVEKLLEDAQIKLSVVATDIFGVSGRDMMAAMIAGERNPQVLAQMARARMRTKIPQLEEAFVGYFTDHHRFLLAKMLARIDALNADIADVETQIEAQIAPFASAVARLDEIPGVGATTAAVIIAEVGVDMTRFPTPAHLSSWARFAPGVRESAGRKKGTGSTGHGDRYLARALGEAAVGASKTNTFLGERYRRIARRRGKKKAIVAVGRSILVIIWHLLGDDTARFNDLGPGYYDSRINPEHKKRNHIRELEALGYKVTLQPAA

SEQ ID NO: 480721 - protein, 353 aa, unidentified
MLTIGVDAHKGTHIAVAVDAAGQECGHWQGPNSAEGWVGLRTWAQELGTERRWGIEGAWNYGRGLAQSLVAAGELVHDVNARWTAKERRHARNRSKTDRRDAQAIALYVWREGQTLPLVVRDDDSAVLEVLVSQRDAAVAEATRLRNQAHQLLLQGDPSYREHVPALTTEQGIAALETYQAPEASVLAQTRAAMIRMLGQRLRLAVAQAEELKTQIEARARAGFSPLIQLKGINALTAGTLAAILGPGHRFRSDADLALYAGVAPLEVSSAGRVRHRLNRGGHRQLNAIVHRIALTQLRAWPDAKADVARRMSEGKTKREAIRALKRYLIRAIWRLWQECVPPPQSTPIAAVA

SEQ ID NO: 480722 - protein, 346 aa, unidentified
MSEIIRIGMDTSKYIFQLHGVDASEQVVLRKRLGRNGMHSFFAKLPPTVIVIEACGAAHCLARELGKLGHTIKLIAPQLVKPYVERNKNDGRDAEGLCEASSRPRMRYVPVKTAEQQAALMLLGVRDQLVMRRTQLSNTIRGHAAEFGLIEAKGLDKLASLLAAIEQGDSVPVLARELFAMLARQYAQVQVELKAIEAKLLAWHRANALSRRLAEIPGVGPITAAALVMKAPDPHAFRSGRLFAAWLGLTPKDHSTAGKTRLGKITRAGDERLRQLLVVGATSVVKQANGKHRRGSLWLLELVKRKTPKQAAVALANKIARIAWKLMTTGESYDGARMPKASAAAA

SEQ ID NO: 480723 - protein, 457 aa, unidentified
MRKKNRRTPGIEEAHPFRGMSRIHPQAAGVDIGAIEIVACVAGDEHTQIVKAFGNYTIDLQALAQWMKSHHIKTVAMESTGVYWIPLFEELERQGFECLLISSRSLRRVAGRKSDITDAQWIQTLHTYGLLEGSFRPQADLVALRTLLRHRSQLVEHRSPHIQHMQKALLQMNVQLSQAVTDITGLTGQKIIRAILAGERDPQTLAALREPGCKKSAEDIGKALTGTWREEHLFVLQQSVQLYDFYTQQIHACEEEIERLYGLTRPDWEAGEVEPFPRRKKDSHSKNLPQHAEEIRKHLKRISGVDLSVVDGFGVSLAQTVIMEVGTDMSKFPDEKHFCSWLGLAPKHEISGGKVLKNNTLKTRNRAGQAFRLAANSVKRADCVFGVFHRRLRARLGPSQATVATAHAIARVVYRMLKYKVDYEPLSVNEYQRQYEAQQLKYLKKRAAKFGFQLVPT

SEQ ID NO: 480724 - protein, 316 aa, unidentified
MNTIDHSEINIGIDTSQAVLDVFVRPQGQFQSFENTTEGIKSAISFIKPFKPSRVLIEATGRLEMGFFCAADKARLPVCVCNPVQVRQFARATGRMAKTDKLDATDIAHFGEALKPELTQLKPEKLRHISDLLTVRGQCLEMSTMQKNRLQRMPRSVHKPIRNILKSIQREVDSIDQQLSILIAEIPQWQARVDQLTSAKGVGKVIAYTLISELPELGHLNRKQIATLVGIAPMNRDSGCHEGKRYIRGGRHKVRTVLFVSMLSAIQCHPKLKPMYERLVAAGKPKKVAIIACMRKQLIILNTMVKNGTMWDENMV

SEQ ID NO: 480725 - protein, 412 aa, unidentified
MQTLVERGCGLDVHQATVVACLLMVRRDGKVQKQVRTFGTTTRELLCLREWLLAEGCTHVAMESTGVYWKPVYTILEGAFQIVVANAQHVKKVPGRKTDVKDAEWIADLLCHGLLRSSFVPPKPIRELRDLTRYRRKLVESQTAERNRLLKLLETANIKLASVATDVFGVSGLLMLEALVEGKATPQEMAELAKRKLRKKIPELELALEGKVEEHHRFLLHLQLDRLQAVEEDLARLEQRIEEKLKPYATQLALLDEIPGVDWTLAAVIIAELGVDMSVFQSVSQLASWAGVCPGNNESAGKRKSSRIPKGNIHLKVALVEAASAAAKAKGTYLRDKFYRLKARRGYKRAAVAIGHKILVSAYHMLSQNVSYNDLGDLYLDKLNKHHLTRNLVHRLQRLGYSVTLTPQEQAA

SEQ ID NO: 480726 - protein, 391 aa, unidentified
MSQYFVGIDISKYKHDCCIINAADQSIVAKFTIQNDKDGFNELLTSLQSLSTPDDIKIGFESTAHYALNLELFLEKAHHSFMEVNPVLISEYKKSTSMRRTKTDSIDCESIARWLMTVEYKPHLKGFYHAYSLKSLTRLRDRLIRQRSFYLVKITNVLDHTFPEFKPFFEERFSKTALYLLENYGSAEKMSHMNSASYDNLRRISRGKFTPQKFIELKVLAANTVGVNNSIFDTELTCLLTLYKEAAKQVSILEAKIIELIEEVHPHYMSIPGIGPISAAVIYAEYGDISNFSSPAQMLAFAGLEPGISESGTESHKGRMVKRGSSQLRYTLMNCALPLIRFDMTFATYYAKKRSEGKPHRVAISHVTKKLVRVIFALERQNTDFVATALR

SEQ ID NO: 480727 - protein, 358 aa, unidentified
MTTDAGPVTGGVDTHGQTHHAALIDGVGRHLGDREFPTTPTGYRALTAWLSSHHHLERVGVEGTGAYGAALARHLHSHGIAVVEVDRPDRRARRAKGKSDPLDAYAAARAALSGAAAGTTKQRDGRVEAIRTLRVARRGAVKARTQAMNQLKALLLTGPAELREQLRHLSATVLVTTCARLRPDDQELADPAQAVKTALRRLARRHQHLTEEVRDADTDLTTLVSDAGPQLLALHGVGIDVAGQLLTTAGDNPDRLRSEAAFAHLCGVAPVPASSGRTHRHRLNRGGDRAANNALHTIALCRLRYDPRTHAYVVKRTKDGLSKTEIIRCLKRYIVREIFTALQPLPAPNGLLHVLDTP

SEQ ID NO: 480728 - protein, 457 aa, unidentified
MRQRGRRTKGMEEAHPFAGMSQVHANAAGVDIGAEEIVVCVAGDEATQIVKVFGNYTVDLQNIGRWLHEHQAKTVAMESTGVYWIPLFEELERQGFACLLISSRSLRRVPGRKSDIQDAQWIQTLHSYGLLESSFRPQAELVALRTLLRYRGQLLEHRSPHIQHLQKALLQMNVQLSQALSDVTGETGLGIIRAIVAGERDPLKLAAFRDRNCQKSEEEIGKALTGTWRAEHLFIVKQSLELYDFYTKQVEECDAKIECMYALIRPDWEAGELKALTQKKRNSHSKNAPPNREAIRKHLKRISGVDLSVVDGFGVSLAQTVLMEVGTDMNKFPSEKHFCSWLGLAPKHEISGAKVLKNRTLKTKNRAGQAFRMAAQSVKRADCVFGSLYRRLKSRLDKAQATVATAHAIARVVYRMLKYKVEYEKIDVEEYEQKYKEAQIKYMKKKAGKLGFQLVPA

SEQ ID NO: 480729 - protein, 351 aa, unidentified
MMIIGVDYHPSFQTIAFFVEETGECGEQELNHSDGQAEKFYRDLQQRGIRVRVGMEATGYSRWFERLLAELGFELWIGDPAEIKAKRVKKQKFDREDSRLILRLMRENNFPQIWLPGPENRDLRQLLWHRHRLVQMRTRIMNQLQALAMNEGYRWKKKLFSEQGRAQLEKLALAPWASRRRQELLELLGRMNPTIAELTAAVEREARKRPEAMRLMTHPGVGPLTALAYVLIIGTPERFQRGKQIGTYVGMIPCEESSARKQRLGHISKQGNSLLRFLLVEAAQAAARIHPDWRRRYMHLAMRRHKSIAKVAMGRRLAIRLYWMWRNGCEYSPSLEFGSYAGQLGTGDGVK

SEQ ID NO: 480730 - protein, 444 aa, unidentified
MACSGMILIREVADAPVIMGISKPAGLKSPCGEVKIVNPLFVGIDVSSKNNVAYLMNPDGSKHSSFSVQNNLGGAKLLSERIVSALGSMQLSDVVIGLEATSIYGDSLVYALREDGSLGRFQRKIHVLNPKQVKKFKEAYPDLPKNDWVDAFVIADHLRFGRINREVYMDDYRYKALQTLTRARFDVIQNLTREKQRFANYLFLKCSGMAQDKDIQNTSATTIALMEHFETVDDLANADLEELTAFITETGRGKFADPDATAKAVRAAAKGSYRLPKTVNDTVNQAMAVSIASMRALKGQVKVLDKAIEQQFEIIPNTLTSIPGIGKVYSAGIIAEIGDIHRFDSQASVAKYAGLVWNRSQSGDFEAEHSRMIKSGNRYLRYYLLEAANSVRRCDSEFRRYYDLKFKEVNKYQHKRALALTARKLVRLVFRLLKDNRLYIPPEG

SEQ ID NO: 480731 - protein, 335 aa, unidentified
MFVGMDLHKNYLQIAVMNDKGKVLENSRINNDVKQVGRFFDENIKKLNEKVRVVMESSSVWYNIYSYLSEEKHLNVVLSNPVKTRAIASAKIKTDKLDAAKLANLLRGGYIAECYVPDRRIMDLRELVRHRTALVRMRTKPKNKIHSIVLMKGIQISSKHCSFTHLYNEELKELNDYRINGYLHLIESLDSEIKDVSKKILMLAKEDEMTSLLMTIPGVGYYSALLIVSEIGDINRFLDSYHLCSYAGLVPSTYSSGGITYHGSITKRGSKYLRWIMLECARAHIRTNKNSNITQFYMRLAKIKGNSKAAVAAASKLLKVVYWVMKEKRKYHHHS

SEQ ID NO: 480732 - protein, 424 aa, unidentified
MKVTYPTCCGVDVHKSFLVATIIKTTAGIEPSYQKKRFSTFNNSILDFKSWLLENECHDVCMESTGKYWVPVFNLLEDQINVTIANPKWVKAVKGNKDDTKDSKWIGDLFRLGLVKGSYIPCKSIRILREYTRYRYKLVSCRSSEKNRYQNALTVCNVALDSVVSDIFGKSSSSIIDYLLEQSGTTINHEEIASKLLKRLKSKEDVVIESIEGYQMTDAQKYRMRLVRAHIDYITAEINDVDKQIESLISSVPDYVKAIRFLTTIPGVKHDSAITIISEIGIDMSQFCNSKRLCCWAGLTPGNNESAGKKKSVRITRAGIYLKPALVQCAHAAVKSDKSPYYKKKYESLVKRRGKKRAIIAIARMILTAIYQMLSTGEVWNPSDLYKIDMPAPLVERQKAKAIKQAKKLLQKEGLLPPDEPLAS

SEQ ID NO: 480733 - protein, 446 aa, unidentified
MLPRDGAVIGIDLAEDKQAIAVIDHDVRVLARKTVRVKAFRLGEALDWAVGQARAKGFTQVTVACEPTGPRWLQVQRLCAERGLPLVCIQPLMSHIAREQQDYTTHKTDEADCVLIARLAVELHCYIPEELDETWAHLRHLGRRRQQLITAATASAQRIRDFLSVAWPVVTEACAEPFNSKTWLAALQVVTSRCGADPGKLAVMGQEAFTALVRGAVPGWGGKKGWGPICGRIFAALTDTEGVVVPSRRGLLRRCADELGDLQRTRAQLRVVEADMVAVLAELGLSRLADIPALSAVGAAAILAEAGDPRRYDSSSSLVKHAGMSPSDNASGAFYGDVHISRRGRPGLRLTVWRAVWPMLRFNPVMAAKYAAMTTAADAAQAATSRADAGSRQVTAAAAAARARRAKARVACAASLLRWIYSMVIHDSSWDPAVASGPASCPAEAA

SEQ ID NO: 480734 - protein, 341 aa, unidentified
MNKASTIGLDLAKQVFQVHGADATGAVVFRRRLRRTAVLQFFASQAPCRVAMEACASSHYWGRELSRIGHEVRLIPPAYVKPFVKRQKNDAADAEAICEASQRPTMRFVQIKSETAQAAAVVFRARDLLVRQRTQIINALRGHLAEFGLVVPTGPAHVGRLLAEAEDYARSLPQAVRPILGVLIEALHSLDEKIAVLDVEISRRAEEDEDARRLKTIPGIGPVTAAAISALAPPAQTFARGRDFAAWLGLTPLQRSTGGKQKLGGTSKRGERTIRRLLIIGASAVVRWAARKGAPAGSWLERMLARKPRMLVAVALANKMARIIWALLAKGGIYRASIVAT

SEQ ID NO: 480735 - protein, 427 aa, unidentified
MARGWKRKTKKAVGEERDWTLNLDVVHPNAAGIDIGNEAHYVAVPPDRDPESVRRCACFTEDLRRMAAWLRACGIETVAMQSTGVYWLPVYEILAEEGFRVFLVNARHTKNLPGRKTDVQECQWLLQLHTFGLLNDSFRPPEEICVLRAYWRQRSEHVAAASACIQRMQKALTEMNMQLANVISDLSGVTGMAILKAILAGERDRYKLADLAHPRIQASREEIARGLEGTWRKELLFILRQELNLYETYQRQIEECDQELQAHLKTLEDKIEPGDKLPPAKANKRPGDNAPAGFDLRGELYRISGTDLTRIDGINVMIAQTIIAEVGVDMSRFPTEAQFASFLGLCPDNQITGGKVFRRGTRRVENRAATALRMAATSLWRSKTYLGAKFRRFRMRLGAPKAITAIGQPALIRARMGISPGLGSPEH

SEQ ID NO: 480736 - protein, 344 aa, unidentified
MVTIGIDTHKATLAVSAIDEAVRERAAETFPNDREGHVRLLQWARIHGPERRFGIEGSGSYGAALARRLVASGEQVVEVPAVLTDRERRHLRRAGKSDPGDALAIARVALRGRSLGPAPMPGITEDLKLLVDAREHCLAERTRVANQLHAHLVVLTPGYKDEIKNLSAACYLAAVTRLLRRVGSVRAELARAELVRLRALDLESDALEGRIRALVQLSGSSLPTIRGVAALTAAKLLGETGDPRRIRSASAFALMSGTAPIPASSGQTSRHRLNRGGNRQLNRALYTIALTQARTDPRAKTYMARRIAEGKSWLDALRCLKRHLADVIWRTMLADAHRAAEFGA

SEQ ID NO: 480737 - protein, 341 aa, unidentified
MMTLTTIGIDLAKSVFQLHGVDAHGEVLFRKKLRRGAVLDFLRDLPPCLVGLEACATAHFWAREIGALGHEVRMIPPAYVKPYVKRQKNDAADAEAICEAVTRPSMRFVPVKSAQRQGVMMLHRTRDLLMRQRIMMLNAIRAHLAEFGIITAQGPHKLAALLEAMRGDDMPGLPDIARSALISLMAQLDNLAAEIRTLERRLMVWHRDDETSQRLETIPGVGLITATALSASIPDPSVFKSGRQFAAFLGLVPRQTSSGGKERLGRISKMGDGYLRRLLVVGATSVIRRVGTNTSATGNWVRRLLERKPARVATVAMANKTARIAWAVLARGETYRAPAMV

SEQ ID NO: 480738 - protein, 424 aa, unidentified
MNLTQNDRLKQVTSDTLIVGVDVGSQTHFCRAFDWRGFELSRRVFKFSNTGMGFLTFLRWTEELMNKTEMKKVIVGCEPTGCYWLTFQKFLQDHDIQLVTVNPFTVNRSMELDDNSPEKSDLKDPKTIALLVKDGRYSTSYLPSGVYAEIREASVCRDQIMKQHVRLSNQIQGWLQKFFPEYFECYAEWDSTSGLMLLKEAPLPQDILKIGAGGINQIWRDAKVRAAGIKRAQTLVEAAQNSVGLEAGEAARLEIWVLVNDYILKAEQLKRLDEYLEEKVKEVPNVEKLLAIKGVGMSTVIGFIAEVGDIGRFTDPKQIQKLAGLEIVKKSSGKKKGQPRISKRGRRKLRRTMYESARALMQWNPAFQDVFLYYRNRTRKPLGSMQAKIAVACKAIRVFYVVLQTGCDFDEEKFRRDIIRPEVA

SEQ ID NO: 480739 - protein, 421 aa, unidentified
MRKKNDNRQVEKRQRITDATLVIGMDIGCEFNAMCLMSKEGTILGRYPKIYNSRKGFDYFHGVIESMKKKRGFTDVLIGMEPTGHYWRKIAFFAMEKNYEVRFIRTTALKHQRELDESSSAKNDVRDAYTIANIVREGKYIDTVIEDGAFRQLRTLAHTRERVQRISTGAKHALKGVLEDYFPELKSIFWSMKAKGLLALLAQCPFPEDVLAITPDMVTEIIAHSTRRKAKAREKALMIYEAAQQSVGLKRIGQADRHRVATYLSEIRHSEGQLKEIELQMKTLLQKIPCAEYILSIPGIGVLTCGVFLGELGDPYNFKDPKQIVKYAGYDPKEHDSGQSIGRKIISKKGRWLLRKYLYFIAIRVVHRSPFFKEYYENKQKTMTKKEALCAVVIKLIKVIFALLRDKRTFTEKQRCLKQAA

SEQ ID NO: 480740 - protein, 351 aa, unidentified
MQIIGIDVSKDTLYVALAESKDARNDKVIASHKFANNETGFKLFVDWMKKRKADAGTVCLMEATGVYHEHLADWLHRHGVTVVIELPNKIKHYAKCLNVKTKNDKVDAGVIARYGLHNAWTPWHPMTENLYQMRALLRQVQSMTKERTRCKNQLHALMHSAHAPGTVVGNLMDIIANYDRLIESYHDEVVRLAKEDEAFYARVEMVCTIKGVRAITVLTVLCETDGFQLCQSARQAVSYAGLDVSEYQSGTILKDKRISKKGNARIRHALYLPAMVAGTTGGPVSLMNLYKRVKQKHPTAKKVAIVAVERKLLMLIYTLWKKQEPFDPEKDGKPPIHNAYRSTQAVGSQNQ

SEQ ID NO: 480741 - protein, 350 aa, unidentified
MLIIGCDFHSRFQQIAMLDPATGEVVERRLEHENGEAKTFYATLPSPARIGMEATCDAPWFERVLREHHHELWIGDAAEIRAAMVRKQKTDSRDALHILDLLLTDRFPRIWVPSPAQRDVRQMLRHRHKLVRFRTAVMNQLHALAMGQGLCRRKKLWAKVGRKELKGLVLDPWASLRREELLQLLDQFDPWIAKLDEAVVQAAESHPAAVCLMQQMGVGPVTALAFVLTIGPVSRFANSKKLVSYLGLNPSEDSSAGRQRLGAISKQGNPMMRCLLVEAAQTASRLDPELRRDYQRLKFRRGSSVAKVAIARKLAVRLYWKLREAEQPVPSARMQGSPVGPVVGESLSPN

SEQ ID NO: 480742 - protein, 345 aa, unidentified
MDHFAGLDVSVKETSVCIVDEIGKIVCEVKVASEPDALLRVLRNPAHHFKRIGLEAGPLSQWLYGSLAEAGLPVICVETRHMRAMLKAQINKTDRNDARGIAQMMRVGLYRPVHVKTLLSQKLRMLLTHRKLLQAKTIAIENDLRSTLRNFGLKVGMVGKVKFEGRIKELVENLPDLATLAEPLLIVRRVLHEQLSILHRRLLDIVRNDDVCRRLMTVPGVGPVVALTYRATVDVPARFRNSKAVGASFGLTPSRYQYGESDRPGAISRCGDEMMRVMLYEAAQVMLTRTSKWSWLKAWAVRIARRRGMKKAIVALARRLAVILHRIWVDGTEFRWTREQATAAA

SEQ ID NO: 480743 - protein, 337 aa, unidentified
MFVLGLDVGKSELYARLLQIPEPGKFVPLGTGKSVSNTAKGHEQLLAWLRKSGAGGEGTSVVMESTSVYWERVAMTLYEAGCRISVVNAAQIKFFAKSTLRRGKTDKLDADLIGRFGAVMHPARWMPPEADLVELRALLHARDNIVELSTVEAGRHHAMDHRYQPSSKALGFCEARQALLAQQLVEVNDKVNALVLTSVRLQTDVTLLRSIPGIGSLTAALLLVETMHLSEMESSNQWAAYAGLSPVPRQSGNFTGRTHISKIGNARLRRAFYLCALTASRMKNGFGNFYRHLTSQGKPKKVALIALARKLLRVAFAVLKSGQKFNPDYRRPSPMAA

SEQ ID NO: 480744 - protein, 389 aa, unidentified
MLRQDLEKSNGGRTVVGIDPSSKFLQLAILAPEKEVQLKKLPLSPSITAQIVKSTEPSMTQIAIESYGSYGKIFVYDLLKKGYDIREVNPFISKKMADLDGEEHSDTKGAERLVRALLLIPNLPMISITQKTQWLAKLIRTRGKLVKDLNGYVNRLHIALTESCGAVYKKLFRSLSSKKALQFFERYPTINDTCSRKKKVRELLGEKKWTLLREAGRWEADFYLETLRVEIRGLIGIIRSVNSTKFAIEEVIHDVTDQVEEMKILKTFPGIGDIAGATLLSEIGDIDRFGKESRLSAYSGVSPVIWQSGKGRIRTKQRKRYNRQLKGILYFISLCQIRINPESKAYYQKKRKEGKTHWQAMNALSRQLLKIIYYMLKHNVPYQRTPLVN

SEQ ID NO: 480745 - protein, 338 aa, unidentified
MESVSIIGLDLAKRYFQVHGADRSGQKLFSKKLARGQVLDFFKKQEPCVVAMEACASCHYWGREIRALGHEVRLIPAQYVKPFVKRGKNDAADAEAICEAAVRPNMRFVGVKSGEQHGQAMLFRARDLLVRQRTALINAIRGHFGEFGVIARQGEAGFGELKTAFEEGVLPANAQLPMQTLLDEVAGLDARIEHLEKEMKIVSKSDPKIKALRTIPGVGPITALAVRSLGADAKTFASGRDYAAWMGLVPRQNSSGGKEKLGRVTKKGNKTLRRLVMICAGSLVNAIARQQLDGEPWIQKLMKAKPRMVVITAVANKIARVLWALQVHGGVYKARTAA

SEQ ID NO: 480746 - protein, 392 aa, unidentified
MLPSIHHASTEQTASDSPDLTLYASLELSRATWLVTCLLPERDRMSKYSTPGGDGGALLGLLERMRARAQQLTGRPAKVVVIQEAGLDGFWVHRLLEANGIESHVVDPAFIAVPRRRRRAKTDAIDGETLLRTLLAWTRGEPRVCAMVVPPTPEEEDRRRVCRERAILLQERIRHTNRIKGLLAGQGITDFNPLHKDRRQLLAAARTGDGRPLPPQLKAEILREIELIELLLRQIADVEAAREVLAGPKAAKAPSPVVLLEQLEGIGPEIASVLYLEGLFRSFGNRRQLAAYAGLAPTPWRSGTVDQEQGISKAGNPRLRSTMIELAWLWQRHQPASTLSRWFHTRVGNERGRIRRISIVALARKLLIAVWRYVTQGEVPEGAVLKARIVRA

SEQ ID NO: 480747 - protein, 365 aa, unidentified
MSSVASPAGLVHLGMDTSKKTIVIATLWPGEEIPVTERIANEEAAVRRFFGRLGDPSVLRSCYEAGPGGYDLYRLLTSMGVACDVVAPSLIPKGGSDKVKTDKRDACRQARLHRAGELTPVRVPAQAEEAVRDLVRVRAALVDDRKRAQQRLTAVLMRHGSVWTGSYWTAAHRAWIDAQRFGEPALAAAIAHYRGTLATREAELAAIEAELAPWARRDPLAGPVARLGCYRGIAELGGLTLTAEIVDWRRFPAARAFMSYTGLVPSEYSSGERTRRGSITKAGSEPVRTTLIEAAWAYQHAPAIGATLRRRQAGADPGTLARSWKAQRRLNGRYRHLTSHGKARGEAITAVARELAGFVWAEMTA

SEQ ID NO: 480748 - protein, 324 aa, unidentified
MNGLVYVGVDVSKDSLEVALGPDAQSFSITNDRDGIGKFLPRLPQPGACVVVLEPTGGYERTLISELLQAGHRVACANPRQVRDFANGVGVLAKTDPLDAGVIARFGEVVKPRCLDVPQGPLDELQQLVERRRQLISLRTAENNRLGQATSKATRKSIREVMKTLEKQVASIERQIEDLVGKHDDWQHKVDLMTSVPGVGPTTATTLLADLPELGQLNRQEIAALVGVAPYNRDSGQLRGARCIWGGRAPVRNALYMAALSAKRFNATIRRFAERLAENSSVRPGKAPKVVLTACMRKLLIILNTMLKNDTAWNPHLVGASPNA

SEQ ID NO: 480749 - protein, 312 aa, unidentified
MTNIICGVDVSSEWLDAWVGRDGPSERFANDPDGTAALAGFCRRHGVGLVAMEATGGYEKRPFMLLWAQAIPAAIVNPRSVRRFAEAMGLLEKTDRIDAGVIAWYAEVKRIKPCEPASEAQQHLAALVTRLRQLTELKTAQTNQRRLVSDPMVLRSFEDMLGLLSRQLRELEREIADQIDRDPLWRKLDETFRTIKGVADRTVARLMADLPEIGTLSGKAIAKLAGLAPIANDTGKRTGKRSIRGGRSTVRAILFVVAEIVRRCEPDFAAFHKRLSDAGKAKKAIRIALAHKLLVRLNAKARDARGQLACAA

SEQ ID NO: 480750 - protein, 416 aa, unidentified
MKQSKDSEVLSVVHPVCCGIDVHKELVVACVLTSAKGGSIEKVIKEFRTFTDALFELREWLLEFQCPIVAMESTGIYWQPLHNVLENDFEIVLVNARHMKNVPGRNTDVSDSQWITELLRHGLLKSSFIPPKYVRQWRDLSRLKKKQVSAVSSYKNRVHKLFESANIKIDSVVSDLFGMTGRNLIDLLLSGQTVNFEAVKSCTRGKLKPKVNELYRSIKGFFTDHHRFLLESLMRTVSHLEEEIGLIHSHMQHLLSDRKDIIDRLIEVPGIQETAAFAIISEIGDTLKTFENSAALCSWAGVCPGNNQSAGKRKTGKIRVRGQLLKSTLIEVAWAAVKKKDSFFKEKYRRLRPRRGPKKAIVAIAHKILKVVFDIIRNGNRYVELGSIQFEKRKERSLSKLILELEKHGMKAVPAS

SEQ ID NO: 480751 - protein, 322 aa, unidentified
MKYIGIDVSKATFVVAYSSDKSGDIRTFDNTTTGIRQFIGTLPKDGSIHCVMEATGNYSALLLYILNVAGIIVSMENPLKIKNFARAMLSTVKTDKIDARLIALYGEKMNPQPFKMQGEAILRLRQKRTVIRQLTKQVTAMSNLRGSLACLPVPDKGAIHAADETIKFLEKKRDRLQSELTDLVEVEFSRQLTLLTSIKGIGITLATALIITTGGFTYFQNAKQVSRYLGICPTYEQSGTSVNIRGHINRNGDAYTRGLLYVAAWTASRRNAQCLETYTRLRKNGKSGKLAMIAVANKLVRQAFAVVANDKAYIDGFVSNRP

SEQ ID NO: 480752 - protein, 355 aa, unidentified
MIIIGVDFHPKFQQIAWVDTDSGELQERPLAHREEAEKFYGALAAAGQQVRVGREASGHARWFERLLGELNFELWIGEAAEIRAKRVRKHKTDRQDAQHILGLLLENRFPRIWVPSGENRDLRQLLWHRHRMVQARTRVMNQLQAIALNEGQRCQKGLWRERGRQQLEAIQLAAWASRRRRDLVELLDRLNPTIAELSQAIEQEVEKCREAQRLMTHPGVGPLTALAFVLIIGKVEGFPSGKQVASYLGLVPVEQSSGDRRRLGHITKQGSSMLRFLLVEAAQVTVRSIPEWRSHYVHLMMRRGRKIAKVAMARRLAIALSWMWRKGWSYEQSKSSVRTRASSEQAMVCSTTPRH

SEQ ID NO: 480753 - protein, 369 aa, unidentified
MVEYSEAFIGIDAAKSRNAIAIAEAGREGEIRYLGEVEATPQSMRKVVARLAAKYQRLHVCYEAGPTGYGLYRQLTALGHDCIVVAPSLIPRKPGARVKTNRRDAISLARLLRAGELTEVWVPDEPHEALRDLVRARDAAVEDLRRKRQSVTSLMLRHGRIFPGKTTWGARHARWLQEQHFEHPAHQIVLQELVLAIQHAHERLERIEAAIAEFVPGWSLAPVVEALQALRGVNLISAVTFLVEVGDLRRFESPRQLMGYLGLVPGERSTGDTVRKDGITKAGNSRARRTLVESAWTYRYPPRIGKVKLYHLQRVTPVIRDIAWKAQSRLCSRYRALAARGKKSTVAVTAVARELAAFIWAIARAVPAT

SEQ ID NO: 480754 - protein, 315 aa, unidentified
MFAGIDVASERHMLARLDATGVPLGKPVPITEDREGYNTLLRLLGPPPVLVAMEATGHYWKNLYAALVAAGHSVVLLNPLKTRRFQDSALERTKTDAIDATGVARFAFEKRPEATQLHDAAAEALRELVRHRDRIRQDFDDRVRQLHRLVDLGFPEFTRYVRGLDSMLATALLAESPTAHDFARATPKWLAKLRYDGRHLVGAERAAQLIEAAKRSIGQHHGPAYRLQARHICQDLDMWRRRLVEIERDIDGLLESNEVGQLLLSIDGIGPQTTARIIAAVGDPARFKSAAAFAAYVGVVPGLKQSGKNGSRRAA

SEQ ID NO: 480755 - protein, 342 aa, unidentified
MHHAAIDLGSKEPQICLRQPDGAIVEERKHPTRKLTELVKTWPTSRVVMEASAEAFTVADAALAAGHQVRVVPGTLVRLLGVGERRIKNDQRDARQLSKASWQTDVPSVHIPSAAARELKSICGARDLLVATQRSLSNNVRGWLRTQLWKLPGGRMTTLPERLRTHARASERELPEHIERQLTMLTQVTEQVNAATKQTRKLAMERPLCRRLMTVPGVGPITALRFVAAIDDPSRFSTAHRVQSYLGLTPGEHSSSERERRTGITKAGPSELRRCLVQGAWAAMLARRPHPMLEWARQIAERRSRPVAAVALARKLAGILFALWRDGTTYEPQRAARKSAPM

SEQ ID NO: 480756 - protein, 337 aa, unidentified
MKNSSQSMEFFVGIDVSELTLDVTAIHTASKSKKYIQVENNDSGLNVLNHWLHDMPGFAHAQTVFCFEHTGMYTRVLLDYLLSQSANVWMESYLQIKKSLGLNRGKNDKIDSCRIAAYAYRFSDRATFVENNSPEILLLKDLLSARNRLKKSLQQISVTIKELTKVDFPQGKEIEALNLHAIRGLKASIEQIEEKIHQVITSDKHLKEVYQLITSIPGVGFILSVKLLVYTKVFTCFDNVRQLACYCGVAPFEYRSGTSVKGKTGVSKFANMDLKATLHLAAISAIQHNVELKKYYERKVEEGKCKMSVINAVRNKLLARIVAVVHRGTPYVQLTNG

SEQ ID NO: 480757 - protein, 323 aa, unidentified
MQGKVSFQEDAMPVVYAGVDVSKEWLDVHLHPLGESRRFSNDKTGIDQLKRLLAGHRPKSIVMEATGKFHRPAHHSLWLDGFAVAVVDPLRARMFARACGYLAKTDRLDARFLALLAESLRPPADTPPSPHIEALQELVNARSAAKCDITALQNRSKAATTAFLRGELNRLVRRLEQHVERLDKEIERCVGEDPQLCRKAEILTSIPGIGRVTALALMAGMDGLGTCSGKQAAMLAGLAPIANDSGARTGRRSIRAGRPTPRRALYMAALSACRYNPALARFADTLKATGKPAKVILVAIMRKLLVLANCLLSQNRLWTPNPP

SEQ ID NO: 480758 - protein, 350 aa, unidentified
MIIIGVDFHPGSQQIASVDTDTGEFEEKRLAHREEAEKFYRDLVSRGAQIRVGREASGYARWFERLLAELQIELWIGDASEIERKRARKQKTDREDAQHILQLMLKDDFPQIWVASWENRDLRQLLWHRHRLVQARTRIMNQLQAVALNEGLQCKKRLWRASGRQQLESFRLGPWASRRRRDLLELLDRLHPTIAELSQAIEQEAERCPEAQRLMTHPGVGPLTALGFVLIIGNAERFPCGKQVASYLGLVPLEKSSGKRRRLGHITKQGSSIVRFLRVEAAQAAVRGDPQWRSKEMRLLMRRGRKTAKVAMARRLAIGLYWMWRERQDYRQSRSFGSHAGPPGNRDGVH

SEQ ID NO: 480759 - protein, 341 aa, unidentified
MKRFIGVDLHKNSFTVCYMQNKGEHGLKTFKVSPNDVEAFKATLTEQDEVAVESTGNTGYFAREVKGAVSRVRIINPIQFKIISESVKKTDEHDAITIARYLSKGLIPEVRMRSKEEAKLASLIGTRDKFVKLRTTLKNKIHNILNASGIVTTKEMFSGDKSLDKLLSMGLDQADLFEIRIIVDQIKSLNKSIDEINRELTDRGKKLPGHKNLTSITGIGDLSATILLNTIGNVDDFGDDKKLAAYFGIVPRVAVSNDTSHYGKITKRGNKIARTALVQSTLIAIRYNHYLRRFYFKLKAKKGSGKAIIATARKLLTIVYRTLKNDWVFEDFNKFKLAVTV

SEQ ID NO: 480760 - protein, 341 aa, unidentified
MQITTIGLDIAKNVFQVHGIDAAEKVVVRKQLRRGQVLKFFAALPPCLIGMEACATAHYWARELTKLGHEVRLMPAKDVKAYVKRNKNDAADAEAICEAVRRPTMRFVGAKSAEQQGRLIQHRTRDLLMRQRTQVINALRAHLAELGIVAAQGREGLKQLLTIIADEKDARLPIDARGSLIVLAAQLQALQTMIGSIEKRLTMQHRANEASKRLESVPGIGTIGASAITATVTDPNAFRSGRDFAAWIGLVPRQDSTGGKQKLGPISKQGDRYLRRILVVGAHSVLRRAKQNPEKYPWLTQLLARRPFKVVAIALANKMARVAWALLARGGTYRVPALAAA

SEQ ID NO: 480761 - protein, 455 aa, unidentified
MSTEPVVVADAEHEETVERVAAVDVAKATGKVCTRQPDPDHRGRRVTRVWEVPATTNAIIELGDHLLVEGVERVVVESTSDYWRPFVYLLGAAGLTVWLVNAREVKNVPGRPKTDKIDAIWLAKLNERGMLRPSFVPPAQIRELRDYTRLRSDLTAERARHKQRLEKLLEDALIKLSTVASDIFGASGRAMLEALIAGHRDPHQLADLAKGKLRIKHAALIEALTGRFDDHHAEIARMLLDQVDALQAQIDKITARIDQLITAIPESLEAGSTTTTSPGGTGSDPARWEASQYYPASQRLAEIPGIGPKAAQVIIAEIGLDMRQFPTAKHLVSWAKLSPRTIQSGPRNRSGQTGKGNPYLKSILGEAAAAASRTNTFLGERYRRLVKRRGKLKALVAVARSILVIIWQLLTDPTARFHDLGPGYYNNRIDKNRKTRNHLRQLQALGYHVTLTPAI

SEQ ID NO: 480762 - protein, 421 aa, unidentified
MPAAKEREMEPLDDVFKTPCAGIDVHKKELSVCVDWWGADGKLKREVRSYDTKRKSVRAMGVWFKELGVTHAALESTANYWRPVFDQLETICVVVLLNPYFVKQMPGRKSDVADCIWIATLLRKGLLRASFIPPREIRDLRDLTRLRTVRIEHAVKVGNELRQCLEKAHIKLDSVVSDLLGVSGRAMIRAMIEGETNPEVLANLAQRRMRGKIPELRAALDGRLNDHYRFLMRQHWDLLETLEKQVGKLEQQIEQRVIPFDWAVRLLMTAPGIKKIAAATILAEIGDNMDCFETARHLTSWAGVCPGNNRSAGRSRSGRNPRGNRFIKGILVQVALAASRTKQAYARALYQRIARHRGKKRALLAVANSLLQAIWYMLKHRQEYKELGVNYYEEQSKEQLTKALVKRLERLGHQVSLRQAA

SEQ ID NO: 480763 - protein, 354 aa, unidentified
MEQYVGLDWAYRRARWCAKAPDGAVLAEDWAPADEDGLARLVARLGPDVTACVEMMSGAAWVRDRLQAGGWTVQVADARKAKAVASLAAKTDKLDAHVLAELARRDLVPEVWVPSFGDRELKERLGRRMHLVRLRTSAINRAHGVLTQFGIRLAFDRLRRPDAGELLERRGVPEVWRRSVAEAVAVVDHLDARLAPLERELRPLARADGRVSLLVTIPGVGELLGLTIAVCVGDIARFASAKKLVGYSGLTPRIAQSGERSRTGKLSKAGSKVLRWAAIEAAQQAWRPTNPWNALYRDVKARSGGQGNPAKAAVARKVLIAAWHVLALEQPFTPARPRVATDPVPASSGCVLVD

SEQ ID NO: 480764 - protein, 339 aa, unidentified
MNQSNLISIDLAKNVFQVCGMTDRQSVVFNRQLKRKDLVAFMINQAPVEVAMEACYSSHYWGRHFEAMGHQVKLIPAQHVTPFVRGNKSDHNDAIAIGEAARRPNLIPVPIKTIEQSDIQCIHRMRERYVRDKTGLTNQTRGLLSEYGVIGATGHKAFSKLIREVSAPEYEGLSPLLKDQLNSVADEYCYQNLRIQEYNRILSEMAHQHPLCQILLSIPGIGPINATAIYSAIGNGAQFNSGRQFAVWMGLTPRQSGSGDKFTSGGITKRGNRYLRKQLVHGARAVLFRSKGKKDLLNRWAHAVAERRGVPKASVALAARLARLAWTLMQKNTMYQSRF

SEQ ID NO: 480765 - protein, 414 aa, unidentified
MPYKIAGIDVHKKVLMVVVIDATTPDEKPERRRFTTMPSEMGRLSVWLREQGVEEAVMESTAQYWRSVGLELEPYMRLHLAQAFSNRAPRGRKHDFKDAERLVRRLIAQELILSFVPDGEQRTWRNLTRMKLQLRRDRVRLQNQMECLLEEMRIKLSIVVSDLLGASGLRMLLALAKGESDPKKLAQLGDERLRCTEEQLVDALTGRPQPMHREMLALQLERLQLIDSQIAKLNALIGQAMKPHQEAVMRLAEVPGLGVDSAQQIIAEVGAQASTFPSAADLTSWVGTCPGKDESAEENHSSRSAKGNKYLRRVLNQAAHAAVKKNGSYFQAVFRRLLPRLGYQSAIWAVAHRLCRVVWKILHEGVRFIEQGREPDPRAKKKRAQMLARALRKLGYEVTITPINPAIAENGIQI

SEQ ID NO: 480766 - protein, 360 aa, unidentified
MKIVGCDFHPGHQQVSMLDTETGELREWKLSHGDGQAERFYRELEAPALVGMEAVGNSLWFEQLVERLGHQLWIGDAARIRASYVRRQKTDRRDAGHLLTLLVEGRFPRIWVPSGPQRDQRQLLVHRHRLVEMRSRIKNELQHLALNQGVQKKRGLWSARGRAELEKLPLEGWTARRREDLLHLLAMLEAQVSELDQAVGEAARRNPQARLLMTQPGVGAITALAFVVTIGEVSRFPRSKQVASYLGLIPSEHSSGSQRRLGAISKQGNVFLRTLLVEAAQSAVRHDEAFRQEYRHRCHHKPKGVAKVAAARKLAVRLYWMLRTQKPYPQVVHNEGSPSHPVVGASWPDRPVEWAPSHPA

SEQ ID NO: 480767 - protein, 409 aa, unidentified
MNQLFVGIDVGSRNNAVYIMLPDGSKHSSYSVQNNLGGAQSLSKRVVAALMEQGLSNVILGLEATSVYGDNLVCFLREDGSLSRFNKKIHVLNPKQVKKFKDAYPELPKNDAIDAFVIADNLRFGRISAANYMDDYRYKALQNLTRARFYAVQNLTREKQRFMNYLFMKFSGLAQEKIFSSNYGAAALAVFEEFESPDDLAAISLDALTTFITEKGKNRFPNPEKVAKAVQAAARGSYRLPKTVNDSMNQVLSISISSMRAIQVQIKALDKEIERQFENIPNTLTSVPGIGPVFSAGIIAEIGEINRFKTHAAIAKYAGLAWSQHQSGQFEAQNTRLIRSGNRFLKYYLCEAANALVRCDTEYRCYYDLKYKEVNKYQHKRALALTARKLVRLLFRLLKDNRLYIPVMA

SEQ ID NO: 480768 - protein, 334 aa, unidentified
MKQPQVVGIDVSARLLSVCMEDGSGTTQQLEVPNTSTGHQQLIKRLSHKRNTARVCLEWTGNYSLDLALALHHAPAIEVMIVNPKAAHNFAQAFLQRAKTDTIDAQILMEFAKRMPFQAWQPPTLNRLQLRALARRSGALTQMKTQEKNRLHSTEFGQDLHRAIRSDLKAHIRHLERQIQKLEQAALDLIWDEPSLRKDLLLLTSIKGIARTSAIQILSELCVLPSDMTDRQWVAHSGLDPKTHESGTSVHKAAHISRIGNRHLRAALYMPALSAAQFEPHIRAYYQALLQRGKLPMQALVAVMRKLLHSIHAMLRDGADFKGQLFFALETPDT

SEQ ID NO: 480769 - protein, 351 aa, unidentified
MKAKMESNQASLAVIGVDIGKEVFHIVGLGVDGKIAFRRKIRRSGLRDAFEKLPPCIVGMEACLSAHFVSRLLRALGHKPRIIPAIYVKPFVKGQKNDYNDAEAIAEAALRPNLRVVEEKSQDQLDLQACHRVRLVSRRTTTINQIRAFLIEQGIPVRAGARALRNSLFAILENRRGEISPQTASLILGLYEDWCRLDKRIETVTGAIEELSQVEPKCRRLMSVPGIGPIIATGIVAAIGRGEAFERGRDFAAWLGLVPRQHSTGGRTILGRISKRGSKYLRTLLIQAARVLLMRPHNWSRYSFGAWLKTASQRLHKNKLAVALANKLARIAWSVLHNEKAFDTQPEAVAI

SEQ ID NO: 480770 - protein, 344 aa, unidentified
MELFTMGIDLGKTTFHLVGMNQRGEVMLRKRFSRAQLLHFTANLKVKLIGMEACGGSHFLGRALREQGHEVRLIPAQYVKPYVKTNKSDYIDAEAIAEAVGRPTMRFVPVKSEDQLDLQSLHRVRERWVMRRTAVVNQIRGLLLERGTTLRKGRRYVDEALPGILAGTSSKVSGAVLILLTELKQELKQLGEKIDLADKSMEKIARENESCRRLVAMPGVGPVTATAIIATIGNGAAFRKGRDFAAWLGVVPEEHSTGGKQTLWKIPQRGNQYLRRLFVQGARAVMQHRTKQSSGLSAWLAQLTARTHHNIAIVALANKLARMAWAVLAKNEVYRPPILADSTV

SEQ ID NO: 480771 - protein, 359 aa, unidentified
MAKRVTKKTDILKNKKFTKRDRLYIGFDVHKDKHHVAFWLNGTIVDTRVMLADNVKVAKMLEPYRIAIKEIVYEAGPTGFHLARFLRERGFPTEVIAPSETPEIRNVKAKSDRLDCRKLATFSAKGLLKSIGIPTAQQESDRQLSRHRDQLISKRKRAKQQIKGLLLQYGIKEPKSLLNFSRVGIAELKNMKLCEQLRFCIDSLIDELLYFEGKIKETEKQMTAMFKKPENKKAFDIVHSHPGIGNVTGRQYILEVHNPRRFTKSTEITSYLGLCPKVNQSGKRRKDGNIVMTSRATLRANLIEASWAWIRKDSHARAVFTRLVHNTGESKKAIVAMARRLAIHLWKMLCNQEYYRSAT

SEQ ID NO: 480772 - protein, 344 aa, unidentified
MDNHTQYLGFAGVDLAKKVMQIHFVTEDGEITDKSAKRAEFLDFFRNRGKCLIGMEACGSSQDWARKLEAMGHEVHLMSPKAVKPFVSGQKNDHNDAIGIYKAMFNGVRRVPVKSTEIRDLQTLRRIRSQVTKDKVKEINHVRGLLAEYGIVMGKSITAFNKGISSALESLKERGDVSPLVAEELQTTVESIKTKIERQKRLDREIEQLARGCKNYENFLKTPGVGLFTAAMLCVLLCDPAIFANGRQFAAYIGLAPRSRGSGGKNFIIGIPSKFNCDSESRAVFVECAQALARYKNKSPWVDGILRRKPKKVAVIAIANKLARQVWAMANKGESFKQMTVLTA

SEQ ID NO: 480773 - protein, 277 aa, unidentified
MKHSIRCGIDIAKLVFQIHGVNANSGETTMVKKLARGEMLRYFANKPLMLIGIEACGGAHYWARELTKLGHTVKLMTPQYVTPYRRGGKNDANDAEAICEALARPNMRFVAVKSESQQAVLVMHRMRDQWVRERTSLMNQIRSYLHEFGIVINQGRSALGKVLPLVAEDETLPLLFRQSMTDLADRLTDLETRIDALNKRIESWSKQDSTAKALLELCGVGSITASAAVATAGDVSVFKNGRQFAAWLGLVPKQNSSGGKTVLGAITKRGDRYYEHY

SEQ ID NO: 480774 - protein, 345 aa, unidentified
MQTTQVAVDLAKSVFQVAVSHAPGRVDKQHRLSRQRFRTFFLHHPPTHVLMEACGSAHHWGRELQTLGHQVSLLPPSHVARYRQGNKTDRADAKALLEAARNEDITPVPVKSLDQQAINALHRLRSGYLGTRTARINAVRGLLREFGIPVPQGARTFLAKAHFALDDDTLPAYLRAALTQALTEIKELQAKADDLKSQLEHLAPLIPGVPFLMTVPGIGILSATALVASVGDVHRFPSGRSFAAYLGLTPRESSSGGSRRLGPISKRGNRYLRVLLIHGARAALLAAHRTQKPDTLQAWALHTAEARGHNIATVALANRMARIAWRIWRDQRPFQRRFTAQEDAA

SEQ ID NO: 480775 - protein, 341 aa, unidentified
MDKTLYCGVDLHSNNAMYVITDHQDRPLFKRRLPNALAVVLEALEPFREHLKVVAVESTYDWYWLLDGLLDHSYPVVLANPSKIDQYDGIKEADDLTGAAFLARLARLNILPTGYIYPAADRPVRDLLRRRRLWVRHRVALMLSLQTLAMRQSGQSVGWRALRRLSEDQRRLLVGDHDCLAFVTDQQIELVELLNERIKRFEDKVLEHACLRPAYECLLTMPGVGVILGLTIMLETGPIERFKTVGDYTSYCRCVRATHRSNGKIKDKHNERNGNPYLAWAFVEAVHHAIRSCPSAKRFYDRKLAQRNGALATKALAAKWTKAAYYMLRRQESLDEARIFG

SEQ ID NO: 480776 - protein, 359 aa, unidentified
MKTKVQKNKINFKGKMVSIGVDMHKRSWHITALADGEIVLTISLSRPNYDAFEKLLSQFKGNYVRIVYEAGPGGFDLYDRLTADGIECIVTPPSLIPTQSGSRVKTDKKDSLKLATLLESNILKKVWVLSPEERAHRQLVRTRRQIVNHRSDVMRQIKSLLLFHSIEVPFSSRQQWTGPFIRWLHEVELGNKYLNGSLKALVDLFDYLSAEKKRLTHEVVELSREEKYVQSVKLLKTIPGIGCLSAMEILVELQDITRFQTADELAAYLGLTPSQYSSGEHIRMGHITHAGNDRVRTTLVESSWLLIGKDPHMKCKYEDIKQRRGGKKAIVAVARNLSIRIRRMLLDHVPYEIDFQKAA

SEQ ID NO: 480777 - protein, 337 aa, unidentified
MAFLMEETGECGEQELNHSDGQAEKFYRDLKQRGICVRVGMEATGYSRWFERLLAELGFEVWIGDPAEIKTKRVKKQKTDREHARLMRKLLLENRFPRIWVPDPENRDLRQLLWHRHRLVQMRTRIMNQLQALAMNEGYRWKKKLFSEQGRAQLEKLSLAPWASRRRQELLELLDRMNPTIEELTAAVEREGRKRPEVQGLMTHPGVGPLTALAFVLIIGTWERFPCDKQIGNYVGMIPSEDSSAGKQRLGHISKQGNSLLRFLLVEAAQAAARINPEWRRRYIHLAMRRHKSIAKVAMGRRLAVRLYWMWRNRCEYSQSLEFGSYAGQLGTVHGVK

SEQ ID NO: 480778 - protein, 346 aa, unidentified
MMIIGCDFHPSWQQVSWLDTETGETGERKMVHASGDAKTFYQQLAAPALIGVEATGNSQWFIELVQDLGHEIWIGDAAQIRASYVRKEKTDKRDAAHILKLVVEGRFPRLWTPDREQRDLRQLVLHRHKLVMIRSRVKNELQHLSLNKGMQRKQKLWSQAGQKLLRELPLKPWAACRREDLLGLLAMLNQQIGKLDQAVQQAADQHPQAKLLMTQPGVGPNTALAYVLTIGDVSRFPRGKQVASYLGLIPREESSGGRQKLGAISKQGNRLVRSLLVEAAQIAVRFDPGFRKQYLHCCHQKPKGVAKVAAARKLAVRLYWMLRTQTAYPEIVRIESSPRVPLVGAS

SEQ ID NO: 480779 - protein, 382 aa, unidentified
MQRITRKETRFVGLDVHAETIAVAIATKDGDVHTLGSIPNRPESIKRLVTKLDAGGTWTACYEAGPTGYALYWQLAKLGRACEVIAPTLVPMKAGDRVKTDRRDAERLARCYRAGELTAVWVPDAAHEALRDLVRAREAAKQDQLRARHRLGKFLLRHGKRPPQNMRAWTQQYLEWIKREVKFEQCAQQATLEDYVNEVEHCALRIVRLEKTIDVVVEQAPESMREVIEALQALRGVAKVTAVTIVAEVGTLSRFEHARQLMGYSGAVSSEYSSGERTRRGGITKTGNAHLRRVIVEAAWSQRYKPLISRAARKRQEGLSAEVQEIATKARQRLHSRYVKLLGRGKSKQQVVTAVAREMLGFIWAIGVTVERSHVQKAKGAA

SEQ ID NO: 480780 - protein, 425 aa, unidentified
MEKHELMLKENVEIAAFVGLDWADQKHVITLQEAGSDQRHRFTLDHTPEAVQNWIQLLRHRFGSRPVAIAVEQKRGALIYALMHVEFLHLYPVNPATVAKLREAFRPSGAKDDPSDADLLLDILISHRRHLRVWIPDDALTRSIQLLTEDRRHVVDERTALTNQLTAVLKTYFPQALDWFGDLHTARACAFLQRWPSLQQLKQATPSSIRKFYKALGYRGDDKREQLVANIQKAQPLTQDSAVLLASSMKVQILVTQIPLLTEAIERYDQKIAALFDQHDDSTLFGSFPGAGSALAPRLLAAFGSNRNRFEFASEVQELSGIAPVTEKSGEGIWIHWRLACSTFLRQTFHEFAGCSIVQSDWARAYYDQLRKRGKSHHAALRAVAFKWIRIMFRCWKNRTPYDEAVYCNSLKIRRSPVADALPSS

SEQ ID NO: 480781 - protein, 419 aa, unidentified
MEQTEVNKQTYWVGIDWGKKQHTVAVADARRAVVKRFTVPATLEGLARLHETLQALGPVEGVAIEATHNPVFYYMVKKGYVVYPINPKLSKNWREGSSVAGGKSDARDGRVLATELARRHEELRPHHDADPATAELRGVCEKQRALIDQRTALVQQLRDAVSVYYPAALDFFSDLTAPTAWAFLKRFPNPQQLARARKDTLIAFLRAHHIGLKPVWLERIDRRQEATAWPTPPAALADEGLALACVAQLQALQAHINRFSRLIAHRTQTLPEASLVGSLPGAGQRLTPELTALVRTADVAASGVAGLRCIAGVAPVEDQSGKHRGTHIRRRCNKHARNTLHLFAWCSMRCCPWAKAFYDLCKERGDRHGTALRKLADKWLRILQAMLRTGRPYDEARYLKNLRNAHSPVYARLCGQSGG

SEQ ID NO: 480782 - protein, 387 aa, unidentified
MARKRTLSTLDTSIAYEAVGLDLAKTDVALAAFDSDHKEPYLIDRIPYDKLYELLANMAPTLVAMEPCSGAHQIAEQIQELGHEVMMISGRHVQAWVKDHCNGQKTDLNDAFAILNLAYDRWLTPIRGKTREECRLLALQASYRQLKGQRTKTMVHVKATLHAWGFPIRAGSFNQKALHELIDANREAFGDEVVETLHLMINRVHDLDHDIATVLKLLTEATQRDPRASLLRSIPGFGVLTTSRWCAVVGDIARFDTPKQTMAFIGLVPNNRITGHHTETSSGREARGQGKMSKRGDKMLRSLCILGAGALCLMVRNDRLPDCPFVASIKERLASPRPWFKVLVYVAAKLVRIATALLKYGETFSFEKAGISKAVLKQWELEQAKAA

SEQ ID NO: 480783 - protein, 402 aa, unidentified
MNAVGIDVSKGKSMVAIMRPFGEIVSAPFEIKHTNSDINSLVELINSVEGESRIVMEHTGRYYEPLAHQLSAANLFVSAINPKLIKDFDNDSLRKVKSDKADAVKIARYALDKWQNLKQYSVMDELRNQLKTMNRQFSFYMKHKTAMKNNLIGILDQTYPGVNTYFDSPARSDGSQKWVDFASTYWHVDCVRKMSPKAFISHYQNWCKRKKYNFSQSKAEEIYGKAKELVPVLPKDDITKLIIRQAAEQLNSASATVESLRTLMDETASKLPEYPVVMAMKGVGSSLGPQLMAEIGDVSHFTHKGALTAFAGVDPGVNESGSYEQKSVPTSKRGSSNLRKTLFQVMDVLIKTHPQDDPVYQFLDKKRAQGKPYYVYMTAGTNKFLRIYYGRVKEYLASLPES

SEQ ID NO: 480784 - protein, 499 aa, unidentified
MPSTNVAAAPIFGAMKRKNIFRNESQKLDAAFIEAGLPERVLLVPLDFAKITHYACFCDGRGTYIRKAFTVKNTKEGIDYLVDQIERTRAARSVKSKRHVIIGGEDSASYTRNFMDRLFELGYLTVRLDSKEVHRQAESVDSSTDKTAVRAIAKTLLNRDALHTGGTDLYAQMRGLTRQRRRIVHLSTAVKNRIHTHADRLFPGFLSKESAVSAFSQASLELMANKFSAVTLARKSEKTLTRMLARQGVRGASEVAAKLKEQASNAICADDASVRLSSQLIESELSLFQTLQANLNDLNIECARILLRLPEAFAVSIKGIGITLAASIFAETGSLRQIQRSDQINAYAGIAPKVKQTGGPESPARIGGKRRQFNRILKDYTLQAGNHLYLHGPTELLHDAARRKLAGKAVDTAMARRFLRIARALAKSHCIYLPSDLRAGQHGTDAESQARAQYIVQIWPDLLLKWKRLGLHEEAFAPETPLGDWRIIVQEIYEIDLPF

SEQ ID NO: 480785 - protein, 344 aa, unidentified
MKYFTGIDVSLRFVSICVVDEVGVVQYEAKVPAEVDLIVASLRRVSLEIRQVGLEAGTLTQYLTYGLQKAGFEVVCLEARQTAATLAAMRNKTDRNDARGLAQILRSGWYRTVHVKSLESHQVRALLASRKAILTKCVDLENELRGLLKIFGLRLASHVAHGSFDRTVRAAVMATPELSTSLLPLLDARTVLYQTYLKLDNAVKNVVRHDPICQRLMTVPGVGPVTSLTFKAGVDAADRFRSSRNVAAHFGLTPRRYQSGETNNPGRISKAGDADVRQALYTAAHALMTRSYAWSTLKAWGLRLAKVRGLQRAVIAVARKLAVILHRMWMDGTDFRASRLQRTT

SEQ ID NO: 480786 - protein, 341 aa, unidentified
MNSIYYIGLDIHKKTIAYCVKKVDGTLVRQGTVCAERKALYQWQSELPGPWYGAMEATIFTGWVYDFLKPYAVDLKVAHPAMLKAITAAKKKNDRADAEMIADLLRVNLLPESQLMSEELRELRRILRYRNMIVRTAVKMKNKMSGLLMEVGAQYSKKRLCGKKYFNALLDRVEDVPDSVKELLKLSRSGFDLYYGIQKKLVSALRENELIQERVQRLMSIPGVGEVTALTWVLEIGDLTRISSSRHAISYCGLCSAQHESAGKEQRGPISKQRNKHLQTTLIEAAKLAPRWNEQLAILHEKELTRGNRNRATLAVARKLVEFMMAVDRRESAFETTKLAA

SEQ ID NO: 480787 - protein, 483 aa, unidentified
MKSDSKEKSKKTTNHPTRPHWDEMNRKQRRETMRKIQSEDLNLEVLHPDAAGIDIGNESHYVAVPPSRDKQPVRRFGCTTAELKAMAAWLKQCSIQTVAMQSTGVYWIAVYDILEQAGLEVYLVNARDTKNLPGRKSDVQESQWLMKLHTYGLLRNSFRPSQEIRTMRTYWRQRNDLVQSASRHILRMQKALTQMNIQLANVLSDVSGMTGQAIIKAILRGERDPHKLAEFRDPRVKANEEQIARSLEGNWQSDLLFVLKQEQDGYEFCQKQIAECDRHLAQYLQQKKDRSQDATLPVEQRKGRLKKTKRYVPQFDLRERLFCLTGTDLTQIDSIDVMTATTVISETGYDMSKWQTENHFVSWLRLRPDNRISGDKITGKGRLPTRNRAAIALKMAATTLRKSNTYLGAQFRRLRTKLGAPSAIKAMAAKLARLIYRMLRYGKKYIDQGAAFYELKHRELQVHQLKRKAASLGYRVTPIPAAA

SEQ ID NO: 480788 - protein, 362 aa, unidentified
MAESTTIVAFDQHAATTVAAVLLPGQRTPALHPMTSELGELRRFVRRLQAHGIVHCCYEAGPCGFELQRALTADGVSCEVIAPALIPRRPGDRVKTDRRDASHLAVLYRAGALTAIHIPTDQEEAARDLLRCREDIRADLLRARHRLSKFLLRHGRRFTGTKKGWTRRHDVWLRAQTWSLAALTQTHQAYVRTVDEAVARLRAVEADLQALLTLAPLQARVVRLRCFRGIDDLTALTIAAELGDPRRFGTAPATMAFVGLVPSEHSSGGKRAQGAITKTGNAHLRRVLVEAAWHYRHHPFVGQAVRRRQIDAPPDVVARAWTAQQRLHRKYARLAARGKPKQHIVTAVARELTGFVWAALTQ

SEQ ID NO: 480789 - protein, 409 aa, unidentified
MEILYPRCAGLDVHKETVAVCVLTPGPGAEPSKQIEQFGTTTGELRRLRDWLRESGVTHAAMESTGVYWKPVFNILESACQIILVNARHVKQVPGRKTDKADCAWLASLLRHGLLQASFVPELEVRELRDLCRGRATLVRECVQVGNRLRKVLEDANIKLDSVASNTLGVSGRDMIGALVRGCNDPAELAELARGRLRAKLPELEQALEGQVTAHHRFLLRELMRQLAFLEGQVARFEKQIERHMPPFEWAAELLMTMPGVDRTAACALIAEIGADMSRFASSRHLASWAGLCPGNNESAGKRRSGKSHRGNRWIKGLMTEIAWAASRKKDSYSRAQYRKLAGHRGKKRALVAVANSLLQAAWYMMTNRQSYHNLGADYYERLNRKDLERSLVRRLEKLGHKVILQDAA

SEQ ID NO: 480790 - protein, 317 aa, unidentified
MAVPACFVGIDVAKATLDVVVRPSGEHWSAANDDGGIAALVKRLRPLTPALIVLEATGGFETAAVAAVVAAGLTVVVANPRQVRDFARATGQLAKTDALDAQVLALFAERVRPEPRPLPDAAVQGLDALLTRRRQLLEMLVAEQNRLGFAAVAVRRDITQHIHWLERRLRDVDGDLEQAVRSSPVWRLKEDLLRSVPGVGPVVSRTLLGELPELGTLTHKQIAALVGVAPRARDSGSLRGKRMVWGGRASVRAALYMGALVASRRNPVIRAFYQRLRAAGKPAKVALVACMRKLLTILNAILRTGTPWRLVGAGATS

SEQ ID NO: 480791 - protein, 311 aa, unidentified
MTDDTIGIDISKATLDIHRLSDGKMMSLSNCPTGFKALSKFCAQTAVIRVVYEATGAYHSGLERALGAHLPLVKVNPLQARRFAQAQGVRAKTDAVDAKMLAVMGDAFALEPDEPVTKIQHDLSELRTFRSGLIKDRTRIMSRLKTQTLSIICRQSKARLVHINKQIAEIDAEIDRLINSNDTLAHSMKILRSIPGIGAICASTILIEMPEIGSMDRKQVASLTGVAPMTRQSGQWRGKSFIQGGRKVVRDALYMPALVAMRHNPDLKAKYQAMIKAGKPPKVALTALMRKLIELANALIKANRNWVKKEA

SEQ ID NO: 480792 - protein, 340 aa, unidentified
MGEVTTIGLDLAKHVFQVHGVDAEGATVLRKQLRRAQVLAFFSRLPHCLVGLEACATAHYWARELGALGHEVRLMPAQYVKAYIKRNKHDAADAEAICEAVGRPTMRFVPVKTAEQQASQLLHRGREQLVRQRTMLVNALRAHLAEFGMVAAQGLRNVGELVAIVRDDGDRRLPAVARQVLQVLANQIEQIEAAVTALERQLLVWHKTNPVSQRLASIPGIGPIIATAIATTVTDPNVFRSGREFAAWLGLVPRQNSTGGKIRLGGITKRGNRYLRRLLINGASANLLRSRATKADPWVIGLRRRRPPLVVAVALANKTARIAWAVMLRQKEYQPRAVAA

SEQ ID NO: 480793 - protein, 540 aa, unidentified
MSALIIGVDLAQAHFELALRDPQFRNQRRLRLSRERFAQFCRRLPPSLIVMEACGSAHYWARTLQAWGHQVRLLPVQYVKAYVRRNKTDAADAAGLIEAIRCGEIRPVPVKTIDQQLLQQLHRLREQYKITRNARINFLRAALRELGIVIPVGLQRGIHALRTAVHSSPSGLPEGLPEICARVLQEIDQLQRGMADLERTLHALTREDPVVRDLMTIPGVGLLIATALRAAAGDIQRFPSGRHLACWLGLTAREYSSGERRRLGRIRKRGDIYVRTLLVNGARSALLAANRASTQGEQQLDRLRTWALRTQQRCGLNKATVALANKLARIVWATWRYQRPFNGDWHDSAASSGEPSPRGPPHTRPRARDASFRKGPLPSRSRTAAGAAKPSGLLALRGRTSGLDPDRYTPDSLNSRSLPWLSQRLASRGLRSGTACAQPRPPQHLRIRCVRPTPWDPRPRGEAEWAGIQQRFGSFAEALFPLDRGRDWGDFVGPKKRDSSLKFRAYSCGRSDGYRRARAALSIMMAVGRRHAPRSTVFPI

SEQ ID NO: 480794 - protein, 463 aa, unidentified
MSVGKQHRGVTPKAVPSQFQAINRYAAGIDVGAEEHGVAVPADSEAQPVRRFGACTADLEALADWLRQCGITPVAMESTGVYWIPLFELLEAHGLVVVLVDPREVQRAPGRPKSDVHDCQWLQRLHTYGLLAAACRPAEQVCVLRSYLRQRAMLVTYAGQHIQHRQKALTQMNLKLQHVVSDVTGVTGMAILKAILAGERDPHKLAQLRTRHCKHDAGEIARALQGNWRAEHLFALQQAVELYEFYHRQIAECDRQIEAHLQTFTARSAGKVLAHRRRQRKRGANEPRFDARPPLFRVTGVDLTAIEGIDESTALVLISEIGTDMSRWPTEKHFAAWLGLCPHHKISGGKVLSRQVRPSANRAALALRLAACCLPHSHSAVGAFLRRLKARLGTPKASVATAHKLARLVYRLLKYGDDYVARGMEEYEQVYRERIVQTLGRKAKALGYRLLPTTDATLQEAVT

SEQ ID NO: 480795 - protein, 321 aa, unidentified
MSHTTSTPSFVGIDVSSGTLDVCSIPEKQLWTVGNDPAGRAALAKELQSRGVALIVLEATGGYEVPIVAELADAALPVVVVNPRQIRDFAKALGITSKTDRLDASVLARFAQDIRPEIRPLPTEEERFLRELLTRRRQLVQLQTQESNRFQQAASAKVRHSISNVLQFLEKQRRQIDADIDRLIRQSSVWREKEEILRSVPGVGPTTARTLLAELPELGRYGNRQISSLAGLAPRNRDSGKFRGRRSIGGGRGNVRKALYMAALTAVKYNPSLHEFYQRLRNEGKKFKVAITACMHKLLIILNTMMRKNTPWNSKFNPQIT

SEQ ID NO: 480796 - protein, 346 aa, unidentified
MENIALDVHKKYTWARVEDAKGERLYESRLAHTHGNIKNFVQRWSAGSAVAVETVGNWYWVVDEIEAGGGKPQLVNARLAKLMMGMVNKSDKLDARGMNRLQRTGTLPTVWIPPSCVRDARELPRTRMVLSRQRTQLKNRVHATLGKYGHVVEGATDAFGKRGRQIVMELISKLPPHTQWALTPVLDQLDHLRENLKAIEAEMTKVFAPCPETTLLKTLPGVGEILAVVIWTEIGTIERFSRAEQLASYCGLVAREHSSGGKFRYGPVRRDVNVYLKWAFVEAANSSILNRERSGYDHISQLYPRIKARRGHGKAKVAVARHLSEASFWILKKGEPYREPLSSTQR

SEQ ID NO: 480797 - protein, 341 aa, unidentified
MLIIGCDYHPSVQQIATMDSETGESLERRLTHRAEAEQFYRTLRQQSASVRVGIEATGHSRWFERLLAELGFEVWIGDAARIRAKQVRKQKNDRKDAAHLLHLMLKDDFPRIWMPSPENRDVRQLVWHRHRLVQMRTRVMNQLQAIAMNEGIRRKRGLWTQKGRAQLEGLSLPSWTSRRRQELLELLDRFDPNIERLTEAIQQEAERRPEVERLQTHPGVGPITALAYVLVLGTPDRFGCGKAVGSYLGMIPCEDSSADRWRLGHISKQGNGLLRFLLGQSALSATRVDDDWRRQYAHLSMRRNHAVAKIAMARKLAVRLFWMWRREWDFEQWKKFGSHAG

SEQ ID NO: 480798 - protein, 279 aa, unidentified
MTQVHILAIDLAKRSFQVCGTDRGGAVLFNRPLSRARLQQPLNEQSPCIVAMEACATSHFWGRFTQGCGHNVRLIPPIYVKPFVKRQKNDAADAAAIAEAAQRPNLHYVEVKSAEHQARAVAFRTHQCFVTQLINALRGHLGEFGIVVAQGPANLTTVVGILADQTNHLPDGVREIGQLYLDQISLLTEKIDGLMLKLREATNANEDMRRLCTVPGVGPVTAGAILAFAPDLRAFKSGRNFAAWLGLVPRQHSTGGKTRLGGVSKMGRPIFESSSLSEP

SEQ ID NO: 480799 - protein, 398 aa, unidentified
MKTSGLDVHKDKIFCAIYDGKSYFGVKEFSTTTNSIRSMGEYLQSEKVKKVAMESTSTYWVPVWDILYEMGFEQKLVNPLHIKQMPGRKSDVKDAQWIAKLLYQNMLNGSLVPSPLIQELRSYTREYRILTQEVTKVLTKIDRVLVMCGIRLSSCISNMNSKSAIQTVEALIDGKTDPDKLVALVYGNRKNKESGKLKECLTGNMKEHHRIKLMTCKQQYDLFEGQISLYLRKMQELCDAHFSEDIANLTTIPGISLISAMIIIAETGGDMSAFENSGKFTGWTGLRPRNDESAGKFKSTATTKGNKHLRAIIVQVGWGAARNRGTYFMDKFQKLVIRKSRKKALVAIGRKILVIIWHVLKEKTQYNPQLVPVYDPVKVEQKIKYHEREIEKAKKLIA

SEQ ID NO: 480800 - protein, 352 aa, unidentified
MTSSVTALPPKLFIGIDIHKKSWRVHFCTDLFDGDTKTFAPLPAAFKEYVDRYFPDHQVHCVYEAGCCGYSAARAFQSFGWEVCVVNPADVPRPAKQAWTKTDTVDCINLAKELKNGQLRAITIPSVQREQLRSLFRRRFNLVKDLRKIKTHIKSFLLYHGIEIPSNLDNPNWPHAFIDWLIDLEWDYATAQKTLDSMIFHYRFLQKEIQVVSNDIRAYCRKVYKKDYYLLRSVPGIGPLTAAAFIAEAGDLRRFSSLKQLAAFVGLVPGIYQSGETVKTLGMTPRANHILRSYMIEAAWIAIRKDPVLQAYYRKHLGKNSKTIVVKVARKLLSRLLAVIKTETPYEIGVLA

SEQ ID NO: 480801 - protein, 346 aa, unidentified
MVTLGTDSHKATHTFVAVDEAGAQLSQSTFRADEEGHLKALKWAGQWCDRRWALEDCRHLSRRLERDLLGAGEKVVRVPPKLMAGARNSARTRGKSDPIDALAVARAAQREPGLPAAELDGPSRELRLLVAHREDLVAERTRVQNRLRWHLHELAPGTEPAGRTLDRRKVLEALEIQLANYDGVVADIARELVDHVRRLSERIDQLEREIRSRTARLAPSLLSLSGCAALTAAKLVGETGRASRFKSRAAFAMHNGTAPIPVWSGRADRFRLNRGGNRQLNVALHRIAITQMRLEGAGKTYIAKRLSHGNTKTEAIRALRRRISDEVYRRLWQDEQVAAACAEQAA

SEQ ID NO: 480802 - protein, 347 aa, unidentified
MQILKQVLGVDVAQKELVVTLGKLNMDLSIELYSYKIFKNTSPGIESLVKWVKKLTNKDIAVQYVMEATGVYHQKLAYYLDENGFEVSIVMPNKISNYMRTLENKTITDKTCSEAIAQFGLERKLDRWHRPDQVYKNLQQLTRERDQIVTERVMVKNMLHAEQTEAEPNPNSLKRLKARIQFLNKQEYQVKKEIELCIENESGLKKNIQNICSIPGVGILTAVIVLAETNGFNLIRNKKQLTSYAGLDVKEKLSGTSVKGKPRISKMGNTALRKAMHLPSLSAIKHDERFKELFVRLVSRHGVKMKAIVAVQRKLLELIYLLHKNNTTYQKDYENKERVQLQVADTL

SEQ ID NO: 480803 - protein, 372 aa, unidentified
MSQSSTLYVGLDVHKDSIEIALAEAAREVEVRRLGTVAGGTAAVTKALRRLVSAGHRLHIVYEAGPCGFVLQRHFAALGWHCEVVAPSSIPRPSGERVKTDRRDACKLARLARIGELTPVRVPDAGDEAMRDLVRGREDAVREQRNARHRLKALLLRNGIVYTGRSAWTGAHLRWLSTVKLAHAAQQVVFQEYLHAVSEAAARIARHEQALREALPDWTLAPVVAALQALRGVQLIAAVTLVAEIQDFWRFASPRQLMAYLGLVPSEHSSGPKRRQGAITKAGNAPARRILVEAAHLYRYPARVSPVIARRQAELPKAVTDIAWAAQVRLCARFRRLGARRVPHNKLVVAVARELCGFVWAIAREVTPAPSH

SEQ ID NO: 480804 - protein, 342 aa, unidentified
MQVTTIGLDIAKNVFQVHGIDAKEKVVMRKQLRRSQVIAFFSALPPCLIGMEACATAHYWARELRKLGHEVRLMPAKDVKAYLKRNKNDAADAEAICEAVRRPTMRFVQIKSAEQQGQLMQHRTRDVLIRQRTQIINALRAHLAELGIVAAQGDAGVNELCAIVADDRDERLPIDARASVIVLAAQLEALQTLIGSIEKRIKMQHRSNETSQRVETIPGIGVLGASAIVATVADPTIFRSGRDFAAWIGLVPRQDSTGGKQKLGPISKQGDRYLRRILIVGAIAVLRRAQENPGKYPWLTQLLARRPFKVVAVALANKMARTAWALMAHGGTYRAPELAEAA

SEQ ID NO: 480805 - protein, 347 aa, unidentified
MRGAIHMQITTIGLDIAKNVFQVHGIGAAQKVIVRKQLRRGQVMAFFEALAPCLIGMEACATSHHWARELTKLGHMVRLMPAKDVRAYVKRNKNDAADAEAICEAVRRPTMRFVRIKSAEQQGQLMLHRARDLLMRQRTQVINALRAHLAEFGITAAQGREGIKELLAVVVQDEGSRLPVDAHASLTVLAAQLQSVQTMIGTLEKRIVAQHRSNEASKRLETIPGIGVIGATTIAAVVPDPRVFRSGRDFAAWIGIVPRQDSTGGKQKLGPISKQGDQYLRRILIVGAHAVLRRARQQPDKYPWLTQLLARRPFKVVAVALANKMARIAWALLAKGGTYRTPQLAAV

SEQ ID NO: 480806 - protein, 340 aa, unidentified
MEKRYIGIDLHRNRFTCCLRLENERTYVTQWGLEKLARFVEKLRPTDEVAVEITSNTRLFYDAVAPHVARVVVVDTNQFRVISRSVKKTDPNDARLLSLYLSKGLLPEVRMKDKELAQLASLTQTRDTLVKQRSALKNKVNNILSARGLNLAKEALSSEKKLAEVLELPFEEIVRIELRVIVAQIRSLNQSIAELDQTIGEEGSKLEGHQSLSSIKGIGKITGAILLSVIGDVNDFPDEGRLASYFGIVPRVSNSNETERSGRIHKRGTKLGRTALVQSALIAANYSPYLKRFYEQVKARRGAGKAIIALARKFLGIIYRTLKNKWVFEDFPNFVLAEES

SEQ ID NO: 480807 - protein, 338 aa, unidentified
MKEIATIGIDLAKNVFQIHGVDMQGRTVLRKTVTRGKLLETLVNLSPCLVGMEACGGAHHWARKITEMGHIVRLIAPQFVAPYRKSGKNDANDAEAICEAVTRPNMRFVAIKTPEQQAVLTLHRVRESIKADRTALINRIRGLLQEFGIVLPQGAARFPQRLLEAITDADMPLDAIGIFAALRGDLMRLNERLAECDQRIARLAREETAQRLVTIPGVGPVTATAIVATVGDARLFRNGRELAAWVGLVPRQSSSGGKTRLGRITKNGDSYLRTLFVQGAMAVIHHMGDKGGPRFEWIRALVARRGIQKAAVALAAKTVRTAWVLMARGESYRMAVAV

SEQ ID NO: 480808 - protein, 311 aa, unidentified
MMDVTFVGIDVSKDRLDVHVRPSGEAFVVARDDKGLAALVERLRPRPPQLVVLEATGGLQVRVAGMLAAEGFPVAVVNPRQVRDFARSLGRLAKTDRLDAAAIALFAERIQPAPRPLPDEQTRALQALVARRRQLVEMMVAEKQRRSQVTNQRARTSLQAHLDWLRKAIEEIDADLDGAVRASPLWRASEDLLRSVPGIGPVLTRTLIAELPELGELTRRQIAALVGLAPLNRDSGKMRGRRTIAGGRATVRHVLYMAALVATRYNPVIAAYYARLLAAGKAKKTALVACMHKLLGILNAIMRDQNPWKVA

SEQ ID NO: 480809 - protein, 323 aa, unidentified
MKNHSSIDQSLSSSDLSACTTLAVDLAKQVFQVAGEDVLGQVRYEQRIKSREAFYEFLQKMPPHVVVLMETGPGAQAWARQLQDQGNLARILPAGLVATHRSGPKNDRNDALAILRAGRDEKICAVPIKSVAALAMQALHRARQGYVRRRTAVSNQMRGLLLEHGVVLAQGDVAISQKIPRVLEDATQPVPGLLRELIDELLAEWRHLGERIRVLTGRLEVAANADMTAKRLMTVRGIGPVTATALVAKETKPDRFPNARKFAAYFGMVPDQHSSGETVRLGDMTKRGDVYLRSLMIQGAHAVLQQLRPDSQPTRSTAACCAG

SEQ ID NO: 480810 - protein, 451 aa, unidentified
MVLNFGFEIKRAPPYDEVVQPDNKNKRKVLLFMKFKQSDKQNQRIERISTNHLIIGIDIAKYTHVARATDYRGIERGSYLAFSNDFEGYEKLLHWMKSLMFEFNKTDVIVGVEPTGHYWLNLAFWLKEKQLELVLVNPFQVKRNKENRDNSPTKNDIKDALVIADMVKNGYYSEVYFASEQFRALRVLVTSRESLVKQVAGVINKIHRWTDMYFPEFHHVFKDPKSKTALATLVEFPHPSDICQLTVENIREGWKKHLKRNGARSTAAALIQAAKQSSALPGCEDEAKLSITLLMQQLDLFNEQLAQLEEKLESLIQCIPTSKSLLTIKGINTVTLATLYSEAGDFSRLDHGNQMLRLAGLHLSENSSGKHKGEVKLTKRGRPGLRKVLYQAVFQMVSVNPEFKALHQYNKQIKKMKGMKSLLKLCGKLARMLVAMAKGNIAYDMEKVRIA

SEQ ID NO: 480811 - protein, 337 aa, unidentified
MNKSESNFVPCGMEVSFQTLLVALGSKAPRAFPNTSAGHQAVLRFLDQAGGRVRVCMEATGRYGLDLALTLHGAGVAVMVANPRAVRHFAIADMRRSKTDRVDAAVLVEFAARMRFRPWQPPSPTALKLVAVARRLQALTEMITAEKNRLHAASLSEALPGYVRLEIRGHLQILARHVARLREAAEQFIADDLELTARYQLLQSIPGFGPTSALQVLAELSLLGPDLDVRQWVAAAGLDPRQYRSGSSVHKKTRISKLGNARLRRGLYMPALVAVQHEPHLAAFYQKLLARGKAKLQALTAVMRKLLHAIFGMFKHHQTFDGAKLHALTPQPEALCA

SEQ ID NO: 480812 - protein, 345 aa, unidentified
MSNVPVFVGLDYHQDSIQVCVLNQQGDVLLNRSAKNDCREVGRIVQPLGVVERVGIEACCGAADFGEELVQELGWNVSLGHPAYIARIKSSPDKTDFSDSRLLADLTRVGYLPRVWLPPANIRELRQLVNHRQRLVDHARSLKLQVGAVLREQRVKIDRDRGSRWSKAWTLSVRDNERLSKHARWIVNALLEEISHTVGKIAQTAERLGEATLDDPVIKRLKEQPGIGEVTAWVLRAYIGRFDRFKTAKQLSRYCGMSPCNTSSGNKTADSGLIDGCNKLLRMTVVQAAHRLMRTVERWSRLAASLEKRGKPTCVIVGAVGNRWLRNLHHAMKHQPTERDPVAMK

SEQ ID NO: 480813 - protein, 330 aa, unidentified
MKNWDFTLGVDVSKLTLDVHCVETNIHLKISNGAEGFKMLQKWCKEQGVDLKSSMIAMEYTGGYEYKLMQFCEAKNIQYCRIPGLAIKNSLGIVRGKNDKVDAKRIAQYATEKRSTLPSQNPINPTIVKLRHLLSFRKRLVRESAGYKATLQERKAMYSLKNNDILIRMMTKKIKENEVLIAKLETEMASLIQTDQSILRNYHIITSIKGIGQINALMTIVYTENFTCFNNARSYAVYVGVVPFDHSSGTSLNGRKKVSSLANKELKQELNQAARIAIGWNKDLKQYAENKLKSKPYKVVLNNVKFKLILRMFSLVKRGAFYVDNYQLAA

SEQ ID NO: 480814 - protein, 341 aa, unidentified
MTIIAVVGLDIAKHVFQVHAVDESGAVVDRRQLRRGKLMAYFGKLAPCLIGIEACATAHYWGRELGALGHEVRLIPPQYVKPYVKRNKTDAADAEAICEAVARPSMRFVGIKSVDQQAILVLHRSRDLLVRQRTMLSNAIRGHMAEFGVIAKQGMAGTLLLAEIIGDESDDRIPDLARQVLALLVGQLRDVVAKIDNLKRQMLTWHKQHEISQLLESIPGIGPVIATALTATVPDASVFSSGRQFSAWLGLVPGQHSSGGKQRLGRISKRGDGYLRRLLVTGATAALERSQSTRAQPWVQGMLKRHPKKLVAVALANKMARIAWAVMNTGEVYRSAKPTVS

SEQ ID NO: 480815 - protein, 356 aa, unidentified
MGEVTLIGVDTPKPVFTLHGVDGSGGCVLRRELRRGQVEGFFAGLAPLEVALEACGGSHHWGRRLSALGQRVRLIPPQYVKPYVKRGQENDRRDAAAIAEAAQRPEMSVVAVKSAEAQAGLMLLKVRELLVKQRTQAVNALRGPAAGFGLVAAQGTGKVAALLVAVASDPGVPDAAKALLALLARQIEHLDEQVKALDDQLLALHKGNDLSRLLAGVPGIGPLTAVGPALTVDPAQFRSGRHSAAYLGLTPQQNSTGGKTRLGGISKAGNTRLRTLLVVGASAVIRHAKPGRRQAESPTGAWLLGLLARKPKKLAAVALANKMARIVWASRLRRAGAMMSRGEAYRHRPTPVPVPA

SEQ ID NO: 480816 - protein, 475 aa, unidentified
MANLGGRAQKGVPMKKQEAEGSTSRRRQLQGLPLIRTDVAGIDIGSERHWVCAPTIDGQGREIASFGATTAELIRLAEWLQARHVKSVAMESTGVYWIAPHEVLEAKGLEMRLVDTRQLARVPGRDKKTDPTDCEWIQRLHSCGLLRGCFRPPEAICKLRTLVRDKGVLVAESGDWLRRMQKSLDQMNVRVHRAVSDINGTTGLAIIRAIASGERDVQKLAELRDPRCHKSVEEIAEQLRGHWREDHVFSLCQALKMYDAIAERITAYEKEIQGKLEAMEQPGQSGQTAPPLSSGNKAKKIKSRGQEDKRQALFRMSGVDVTQIDAVGVETVEVVISEYGCDLSRFPSEDEFASHATLAPHVPKSGGHPIKKKKRRNSASTRVAGALRMAAQSLRQSNTALGAYFRRLAQRKGADIATFATARKISKLIYRLLRWGQPYIDEGASAYEKRHKEQTFKNMASKAKRMGYRLVPADV

SEQ ID NO: 480817 - protein, 358 aa, unidentified
MQYKVKTISFQGQNIYIGIDAHLKSWKITIMLDHSIYKTFSQDPGAGILYDYLRRNFPGGNYYSAYEAGFCGFSIHRELEKYGIKNIVVNAADIPTTDKERKQKEDKRDSRKIANSLRNQELEAIYVPNRDMEELRSLVRYRKTLVKDIGRNKSRAKSFLHYYGIHIPTELDSASQHWSARFTTWLKSVETTTACGGFVLSEIISTTEHLRLRLLKVERQLREISKSGTLAKTIKLLRSIPGIGLIVSMTLLTELGDVKRFSRLDNLCSFVGLVPTTKSSSDKEKTGNITPRSNKILRNSIVESAWVAIGHDPSLALRYNELCKRMKPSEAIIRIAKKLLNRINYVLKNEKEYVYSII

SEQ ID NO: 480818 - protein, 359 aa, unidentified
MSTKIKQLDFSGQNIYVGIDVHKKHFTVAIQGDHLFYKTFNQPPSPQVLVDYLNHNYPGASFAAAYEAGFAGFWIQEYLKNHGVNCIVVNPCDIPTTDKEKKQKRDPLDSRKISRALKNGELSAIHVPEKCNQQDRGLLRMRQKIIGNQTRCRNRIKALLYFYGIEYPERFQQSGTHWSKRFMVWLNTLKFDQESGKATLLLLIKEAISLRELLLESNKLILKLSQQERYIENIKLLLSVPGIGRLTAMILLTEIENINRFRGLDHLCAYIGLMPNVYASGEKEIVGDITKRGNKHLRSYIIESSWVAVRIDPALGLKYHQLCSRMPGNKAIIRIARKLLNRIRYTLVNKEEYIFSVAA

SEQ ID NO: 480819 - protein, 420 aa, unidentified
MGRLKIVYPVCCGMDVHRDFLIACIAATNAQGVTEYQSRRFSTYTGSLRELRDWLLANDCKDVCMESTGKYWFPVHNILEESCHVVVSHPKFVKAIKGKKTDKKDAQWIADLFKHDLVRGSFIPPKDIRQLRDLCRYWVKLSSYMTGEKNRAQNCLTVSNFKLDDVFSNVFGKSASAITTQLLEHPGEQFDVAPFVDGRCKTPIAQIQEAVDGIFTYEQAEKLKIIRGHMDSLEKHKAELESLILEIAQNYLPQIELLLTVPGIHDAFTAIRILAEIGADMTVFDTSKHLCSWAGLTPQNAESAGKKKTTRIGKSGAYLKPLLIQVALAASRGEKHPEIYGKKQALQKRRGKKKAIVAIARRLLTAIYHILSKNEPYNPAAYIQEDKNPMARQISQEKAFEMLARMGFIVSNPSPLSSSG

SEQ ID NO: 480820 - protein, 370 aa, unidentified
MKKSIMYVGLDVHKNSIEVAFADAGRHEEVRSYGKIEGNLSALDKVIRKLEAKGTELHFAYEAGPCGYEIYRHLSSNGYDCIVVAPSMIPRQSGNRIKTDRRDAQMLARLHRAGELTSIYVPALEDEAMRDLTRAREDARSVERKAKQRILAFLLRHGYRYSGKTPWSKAHFRWIAILKMPHPAQQIVLQESLDALSECTDRVNRLTEQIQRLLPEWRLYPVAQALQTLRGVSLIVASTTIAELGDLTRFASPVELMSYLGLVPSEHSSGEQTKRGSITKTGNGHVRRVLVEAAWAYRLPARVSTALHLRQEGMPQNICAISWKAQLRLCNRYKGLLAKGKANQLIITAIARELCGFMWAIANEVEAQTA

SEQ ID NO: 480821 - protein, 425 aa, unidentified
MNYKQNEKINQVKESTLVVGIDIGSTTQYARAFDWRGIELGKVFTFSNSREGFEAFKAWMRHLQDKYRKSDVIAGIEPTGHYWFDLGAYLEDEGILLVMVNPYAVKQTKELDDNSQSKNDRKDPKVIAKLVTEGRYSAPYTPDGVYADLRIMVANRKRLIREMTQIKNRFARWFAIYFPEYTDVFGDYEAQSSMLLLKKVCTPEAIVELGAEKINQIWRDAKLRAVGMKRATTLCETAKRSIGLKKGSSAAQYEMKLLLEDYEYKKAQLDAVMEEIEKLCRKIPESEQMLAIKGIGVITVAGFLAEVGDVRRFESPRQIQKLAGLSLRENSSGKHKGQTTISKRGRSKLRAVLFNAAIPLIAKNPEFKSLHEYYTTRANNPLKKKQSVIAISCKLIRVFYAILAKGVTYDAQKLISDIHRQPQVA

SEQ ID NO: 480822 - protein, 454 aa, unidentified
MSLEDRPVEQPHAAGVDIGAREIFVAVPHDPEGQPVRKFATFTEDLWRLADWLQGCGVTTVAMESTGVFWIPLYELLEQRGLKPCVVNARHMKNVPGRRTDWHECQWIQFLHSVGLLRAAFRPEEQVCAVRAIVRHRQQLVEMAAQHVQHMQKAMTLMNLQLQHVLSDITGTTGLAIVDAIVAGERDPKELSKLRDPRVKASSDVIEKSLCGNWREEHLFTLGQSRQFHRFYQEQIVICETNIERLLQQFDPRVDPQQTPLPPDNKCNRSGAKRRKKAGHVESQFDLRTEAYKLFGVDVTQIPGLETNVLPLFGEVGRDLSRWPTASHFISWLSLCPDNDISGGRVLWRGMRKTNNRAGQIFRLAAQSLHRSPTPIGEYLRRLKAKLGPAGAITATARKIATLFYTLVTRQVEFDHTLWHANDAQRQQRIQSRLTRQARRLGYQLVPLEVSSCT

SEQ ID NO: 480823 - protein, 406 aa, unidentified
MELVPIHKRVIGLDIHQAQITACAIIEESGGETRIEQRQFGAFKRDRRELAVWAAALAPDEVVMESTGIYWKSPYAALEAVGIRATVVNARHVKQVPGRKTDVGDAQWLATLARAGLLRGSFVPPARLRELRLIARQRQKLVGLLSSEKNRMHKVLTDAGIRLGVVVSDIHGQSARAMIKGILRGQAPHEVLQLASRRLKASREELHDALQGELTASHVFVLDELLRHIEELEARIARFDARLLAELASEHNALALLQTLPGVDLIGAAMLLVEIGSDMSVFGTSDRLASWVGLCPGNNESAGKRKSGRVRKGNPYVRRLLCEFAHAASRTKSAFQAKFQSLIVRRGHKRAIVALAHKMLRTIFFMLKRGEHYRDSATNYEQLSVQRNASRWIKALTRFGFIPAAA

SEQ ID NO: 480824 - protein, 324 aa, unidentified
MFYLGIDVAKAKIDCCLILENSANKKKTKTFSNTPKGFEQLQTWLKQHAATSTQTIILMEATSIYHELLVKYLFDAGYQVCVTNPARARYFAQSMSKLNKTDKVDSEVLARFAMTADLHFWQPLPKHIQLLNALLDRRAILCEDLQREKNRLEKAESTFTMEPVLQSIHKSIEQLNKHIQGIDQQIDDHINQNPDLKNDKELLSSIPAIADRTSLLMLSFLRSHTFERASQAAAFVGLVPIQKQSGSSIHGRSRLSKAGSSKIRAGLYMAAIVATRHNPHIRAMNERLLANGKTKMIAIGAAMRKLIHLCYGVLKHQQPYQADY

SEQ ID NO: 480825 - protein, 321 aa, unidentified
MAHSRDVVGIDVSKQNLDVYVLAHQESRAVANTAAGHVELAGWLKSFGVQVAVMEASGGYERAVAEVLRQAGFDVRIVDPKRVRHFAKAAGRLAKNDRIDARMIAEYGAVFMVTERCEIAADGKREHLAGLLAARQALIDHQIGLRNQISASSAGEARRALAGAFRPIAGAIKKLDRLIAAAIAAHPPFATLAARLATVPGLGSVAIAAIIAWLPELGRLDRRAIAALVGVAPFDNDSGKRTGQRYIRGGRCKLRNVLYMAAMGASTRHNPVLNAYYTALINRGKLPKVAIVACLRKLLTILNAMVIKQRDWNPEPATHLA

SEQ ID NO: 480826 - protein, 385 aa, unidentified
METISMIQTNAEAKKRRAPKRQPAKNTTNAVVDPKRKVTVVGVDIGDKYLQFCEIDSNGEISDFRIPNNEKRIRENYQGKVARRFIVEMGSQTRWIAELLQSLEHEVIIVDPRKLKLISQSLYKDDRCDAMTLATLGTQAPGLLITVPLRKLEDQRILTLVRARATAVAGRTRLVNGVRGMLKPYGIRMPKFTSKDSFNLGMIDVTDNELRRAIEPLLNLIDAFSSEIELYDDEAERLLSTIPPDAARLTEIPGVGALTALFFASIVGDPARFSRARDIGPYLGLCRRRNDSGDYKSELGITKAGDPYMRALLANCANQILGPFGKDCDLRTWGLKKTGGKSRAEKKKAKVATARKLAVIMLTLWKTGKPYEPLRQAKEQLPAQA

SEQ ID NO: 480827 - protein, 417 aa, unidentified
MKKHNNSAKKSEPTSKRAKSRGPVQRDTKEVLAELVGKLREKLDPKVGAASAGEKNQRGELRPNLDRLTVGVDLGDQWSHYCILGLEGETLAEGQLRTTQPDVAEFFRALNAARVAMEVGTHSAWVREVICSYGHEVLVANPRLMEGSKRRKRKNDRIDANKLARLGRVDPESLQPIEHRSAEVRQDLVMLRARDALVAARTELINATRGLVKSMGARLPKCSSPSFAQKVEEAVPAQVREALLPLVHMTAALSDCINGYDEKIEKLASEKYGHTGLLRQVKGVGPITALAYVLTLENPERFVKSRDVGPYLGLVPKQEDSGESQPQLGISKSGDTMLRKLLVGSAHYILGPFGPDTDLRRYGLRLCERGGKNAKKRAAVAVARKLAVLLHCLWVSGEVYEPLRQGMSATIAPAVAA

SEQ ID NO: 480828 - protein, 426 aa, unidentified
MNCTQNYKIDQVTEQTLVVGIDIAKRTHYACFVDDRGRVLRKSFPIFQSKEGFQQLYKAIQGAMQAFGKSEVIVAVEPTGHYWLNLAYFLEEHGIPLVMVNPAHVCRSKELDDNLPTKHDAKDALVIARLAKDGRFLVPRLLHEIEADLRVGSTLKEKLRKEQTAVKNAIVRWTDRYFPEFWTVFRDLGKTALSVLEWTPLPADMAGRTVEELLEVYRQSEGMKCPQKAKIQALINTAKDSIGVTEGTAMARFEIAALVRRYRQLEAEIAALDAELKALVQMTMEYQWLKTVDGLGDATIIDLLAEIGSFAHYRDPRQLVKLAGLTLKENSSGQRKGQKHISKRGRKRLRSVLFRAMIPLIRHNEAFRELHEYYTTRSVNPLTGKQSIVALCRKLLNVLFAICTKKQAFDAERMKQDVLSQVQRAA

SEQ ID NO: 480829 - protein, 391 aa, unidentified
MTKRKTETVNDLSRCLDPLDMDATLIGVIEMSQSSWLVGGIIPGVERQPLKKLAIDEHALLKLLTRWRGEAEKKGRRITRIAVAFEAGHDGFWLARWLAAQGVEAHVIHASSVAVTREHRRAKTDRLDTGLLKRGFLGWLRGERGHCKMVAVPTLAEEDAKRPSRERETLVGEATRIITRVKAAFVRLGIRRFNPKLKTAAAHLETLRTPEGEPIPPNTLAALKRDLERHRIVKQQIREIEETRLERLAQAPSNGPHAMVRLLARVIGIGVETADMLVQEVLSRNMRDRRAVARYSGLTGSPDESGAKRREKGLARSGNARVRRGMIQLAWRFLMFQKDSALAKWYRQRTANAPSTRKTLVVALARKLLIALWRLVRDGVVPEGVRLRPAA

SEQ ID NO: 480830 - protein, 346 aa, unidentified
MEQISRVGMDTSKRFFQLHGVNAAEEVVLRKKLRRKEMVEFFQALAPTVIGIEACGSSHHWARLLRSFGHEVKLIAPQLVKPYVKRGKNDGADAEALCEAMSRPTMRFVPIKTAEQQAALMLIGLRERLIGNCTQLSNAIRGYAAEFGFTAAKGMAHLDPLLERIQADESLPLAARELFAVQSKEYAQLRGQINEVEAKLKAWHKSDECSQRLIKIPGVGPIGAVLLKMKTPAPEQFRTGRQFAAWIGLTPQDHSTAGKVRHGGITRAGDEALRAVLVAGATAVIQQAVRYGGRASLWLDALLKRKPPKLAAVALANKMARVAWKLMVTGDSYSTKSAPAALASRV

SEQ ID NO: 480831 - protein, 332 aa, unidentified
MSWLDTETGETGEQKLVQAAGDAERFYRQLPAPALIGMEATGNCHWLVDLLAELGHELWVGDAAQIRASCVRQQKTDRRDAEHIRILLQEGRFPRIWMPWSEVRDLRQLLLHRYKLVTIRARVKNELQHLCLNQGVQCKHKLWSQAGQKVLRELPLKPWAARRREDLLGLLAMLDQQIEPLDRAVKEEAQQDKMALLLQTQPGVGAITALAYVLTMGDVSRFPRGKQVASYLGLIPREHSSGGRQKLGAITKQGNRMLRMLLVEAAQIAVRFDPGLRKEYLHRCHQKPKAVAKVAAARKLAVRLYWMLRTQKPYPEVVRIESSPRVPLVGAS

SEQ ID NO: 480832 - protein, 315 aa, unidentified
MAMPVATTQSIIGVDVAKDELVIYCAESDQLETISNTKAAIKKWLKTVAKPVAIAIEATNIYHQEFADLAHADGCVIYMVGGYELSHYRKGVNVRAKTDALDARLLARYLTNEGDHLRPWTPPSPLYCRLISLFRRRAALVQARVSLKQSWENEPLLKTAFKNQINAMQRLEILLEKTILTQIDEAGLGAQLKRCMKVEGIGTLTGARLLASFQRGDFRNADAFIAFLGLDLRISDSGKKKGRRCLTKRGDSEARRLLHNAAMAASRTSAWKGFYEALRERGLSTTQALVALARKLARVVFALLKNQSEYSPKAV

SEQ ID NO: 480833 - protein, 331 aa, unidentified
MNTLMMPAAAARFNHVIAFDVAKASLSLHILPSGETLSLQNDGAAIRRLLKREEKRNRKQGLGRMLVICEATGGYEDAVLKAACELGLDCHRAHGSGVRAYAKFRGRHAKSDPIDAALIAEYGRDKLDLELYQPPRPEEAALRALMGRRAELKDMIQAETCRIEHASLKAVRVSLESHLAALKEQLALIEKEIRTLTRRDEAFSHDSRLMQTLAGIGAVASQTILAFLPELGHVPTPTAVALAGLAPYDRDSGKERGKRRICGGRGQIRPCLYMAAVAAIRSHAHFRDFAQRLTRKGKPFKVAVTAVMRKLIVILSAMIRNDQPWKHAQTA

SEQ ID NO: 480834 - protein, 388 aa, unidentified
MNLARDKLLSTLIPNTQDGAAIIESKLLELLNKHVLSKIIVILESTGVYSAHLATYLSNSKYLAPYDSNVYIINPKISKNYRKSFADMDKTDPKDAFILADIARVGRTSELTPFKGSQRLALERLTRHRLHIAELLSTEKVYALNNVFLKFSEFETLFSNNFGKTAVELLLEYKTIDDIIQTPLEELASFITISSKNRFDDSIDMASKIQAAARASYRLDRVSYDPINLSLASSINVINCYEAEMKEIDKAIKRQVVGFNQNHYTILMSIPGIGKVYAAGILAEIADINQFESDDALAKYAGITWRKNQSGKFDADDTHLTRTGNKYLRYFIIQATNMARQLIPEYRDFYQKKFHEVTTHQHKRALALTSRKLIRLIYGLLSANRLFQ

SEQ ID NO: 480835 - protein, 340 aa, unidentified
MFTNFVGIDVSKSKFDLALIKGQDKEHIIHGVYDNTPKGIKSMSKFLEKEHHVQLSDTIFCMEFTGIYCRPLTTFMTHNECNVWLEMPVNIIRSLGLQRGKNDRVDAHRIALYAYKNREDIKLWKPQRDVILRLRDLLALRERLITAQKSLKMPINELIAMGDKKGAELVRKGCQKSLFSIENEIGQIDKNLDDIIKDDLQLKELFRLAKSVPGVGKFTALFMICFTNEFSMYINPKQLACYCGVAPFEHSSGSSVRGKTRISHMANKVLKHLLHMGAMSVISRDPELRDYYQRKIAQGKNKMLVINAVRNKIIHRLCAVIKRGEEYQPQNIFKERLVLS

SEQ ID NO: 480836 - protein, 408 aa, unidentified
MANPRKKKVVLLPEAHASGTPARSETQSMGEMEDDMRSVALDLGSRIAFCEVSNGTVVARATVPQFESLQRWLGPKTPKARVAIESCREAWWAEKKLREWGHEPLVIDTTRSRKLGIGQHGRKTDRIDAEVLARAVEARLIPRAHVLSEHRQQLRFQMGVRRALVETRAQFTTTVRGLARAHGVRLPSASPYGFAAAVRDVELDEALRELVSPLLDVIAQLDVLIAKADATLEALAEKEPVTAVLKTAPGVATVVAAAFISVIDEAKRFRRAHEVESYLGLVPSEDTSGKRRLGAITKRGNSYTRTLLIQAAWAILRSKGDDPLARWGRAIALKRTKRVAAVAVARRLVGVLWAMWRDGTVYEAPKLGRAMAQGAEQQAQSALLRATALRRAARKPFYSSSARLRAGR

SEQ ID NO: 480837 - protein, 387 aa, unidentified
MPQPNDLSRSLAALDQDSTLIAVIEISQSSWLVAGIVPGIDRQPLKKLAAEPTALLALLDRWRAEATKAGRVIDRMAVAYEAGRDGFWLARWLQRQGIEAHVIHPTSVAVSREHRRAKTDRLDTELLKRAFLGWLRGEPRHCSMARIPTLEEEDTKRPNRERENLVSERTRIVNRMKSALARLGIRGFKPTLRKAPERLARLLTPEGAPLPPNTLAELQRDMARLRFTMEQIREIEATRAARIAQHPEQANHAMILLLARVIGVGIETADMLVHEILSRPLRDRKAVARYAGLTGSPDESGARRREKGLAKAGNARVRRGMIQLAWRFLMFQKQSALVQWYQRQTADARGGTRKTMIVALARKLLVALWRLVTTGEIPEGVVLRRAA

SEQ ID NO: 480838 - protein, 433 aa, unidentified
MTEKTAVQFAAWVGIDWADRKHDICLQPGSEGKRELLVLEHRPEAIDEWANALRVRFAKQPIAVCLEQRKGALITALRKYEHLVLFPVNPRLLAGLRRAFSPSGAKDDPSDAEIALDILLQHRDKLKAWAPEDARTRQLQALVETRRRVVGQRVRTSNRLSANLKGYFPQALTCFDGFETVLACDFLTRWPSLGEAKRAREETLRAFFLTHNVRGQALIAERIARLKNAMALTSDAGVILPALLATRTLVAELRTLIGGIAEYDTAIANAFKAHPDAFIFASLPGAGPTFAPRLLAAFGRDRARFASVRAMQEYFGIAPVTERSGRSTWVHWRWSCPKFLRQSIVEWAGMSIRYSCWANAYYRQQREKGKKHHAAIRALAFKWLRIIFRCWKDRRPYDEAKYLLALCYVPPLNRLSLLRNPRVRQDLAWNILR

SEQ ID NO: 480839 - protein, 315 aa, unidentified
MAKQLPLVNVGVDVSKDQLDVYLLERDLLFSIPNDEQPIAALIKRLARYRLERIVIEATGRLEHAFVSAAIAKGLPVVVVAPLKVRRFAQAAGQLAKTDAIDARLIARFAAALKPATRPPIDANSQIIKDLVVRRGQLTSLRTTEKNRRSVMPEALTPSIDRIIESLDREIASLEQLIQNAVEQHVTWRHKRDLLTSMPGIGPSVASTLIGDLPELGSLSRRQIASLTGVAPFNRDSGNFHGKRRIRGGRAHSRTALFLSAMVAIRYNPDIKRFYQRLLQTGKHKKVALTACIRKIVTALNAMLRDNKPWQSSFA

SEQ ID NO: 480840 - protein, 410 aa, unidentified
MEVLHQRCAGLDVHKKTVVAAVRLVEGNKVITEVRTFATTTAGLLALSDWLTQNGCTHVAMEATGVYWKPVWHVLSDGEFELVLANAAHVKNVPGRKTDVSDAVWLAELLAHGLIRASFVPDGQTQELRALLRTRKQLVRERSRHIQRIHKILEDANIKIDAELSDMLGKSGRAMLNAIVAGETDPVRLAALAHPNVKSPQAKLAEALRGRVTHHHRFLLQLHLQQIDGLDTALGTMDGEIEANLAPFRTAVEIVSTHPGIGKLSAHAIVSETGTDMSRFATAGHLLSWAGLCPRNDESAGRRRSNRLRKGAQWLKTTMVQCAQAAKNKKGSYYQAQYLRLRSRRGPQKAICAVAASILTAIYHMLKNGTVYQDLGADHFNRRSKITQTQRLVKRLEHLGYAVEIQPLAA

SEQ ID NO: 480841 - protein, 297 aa, unidentified
MSVYVGIDVHRKRSQVAVVTEDGKVQLNKNVVNGMEPFLRLIGDLPSGTPVAFEAAFGWSWLADLLEDYGFDRHLVHPLRCKAIASARLKNDKVDAAILAQLLRADLLPEAWIAPQPVRQLRALIRHRISLVRLGTQLRNRIHAVAADHGYDRSASYWTGPGRGWLAELDLPAASREIVTDCLAVIDGLAPLTDRIDGELHAHAKADPRVKVLRTLPGVGEFTALVMLAEIGDISRFGSARKPASWAGLTPTVRGSDLTVRHGHISKMVCAGGTVPLRRPGGVRWRWLEDSICTGVS

SEQ ID NO: 480842 - protein, 350 aa, unidentified
MITLGIDAHKRTHTVVAVDEVGRELGKKTTTATTSEEHLDLVCWSERFGPERTWAVEDCRHLSRRLEADLVRAGERIVRVPPKLMAHARDAARTYGKSDPIDALAVARAAQRHPDLPAAQLDGPSRELRLLVDHREDLVAERTRIINRLRWHLHELDPTWDPNPRGLTIYKTLDAIAKRLESEYESMVARIAGELVVHIRALTVRERALQSEIDRRVAHIAPSLLALVGVGPLTAAKLVAETADVRRFKHKDAFARHNGTAPLPVWSGARERHRLSRTGNRQLNAAIHRIAITQARCHEDAISYLKRRAEMGNTPTEARRALKRRLSDVVFRALLLDANQLPLACVGQAA

SEQ ID NO: 480843 - protein, 369 aa, unidentified
MNKFSKYVGLDVHQETIAVAVADTAGEVRYMGEIVNTPEAITKLVAQLKRSTGRLAFCYEAGPCGYTICRQLRELKQDCQVIAPSLIPKKPGERVKTDRRDALSLARLHRADELSPVWIPDEAQEALRDLTRAREDMKHLQRQAKQRLLSFLSRHGHRYSGRSRWTQAHWRWLEGIKFARPEQQIVLQEYIDTVQACSRRVASLDREVETAAHASPVWPVIEALMALRGISLLAAVTVVAELGDLARFANAPQLMAYLGLVPSEHSSGKRERRGGITKTGNGHVRRVLIEAAWTYRHAARKTAILQRRAERTPPEVQEIAWSAQKRLCQRFRNLMARGKLKNQVCTAIARELVGFIWAIGQYVIPLSRA

SEQ ID NO: 480844 - protein, 387 aa, unidentified
MTPVIIGMDPHKRSATVEVIDGQGRILAKGRFDTDRSGYRQMLGLARQHPDRVWAIEGCSGVGRHLAQRLVADGETVLDVPAKLSAQVRVLATGHGRKTDAVDAHSVAIAALRSNALRKVGPDDTTVALRLLVDRRDVLGRTRTETVNRLHRLLLELIPGGAKKSLSTAQARSLLATVRPRDIVGRTRRQLAADLITELVSIDKKIKTANGQLTELLAQTGSTLQQLPGIGPSGAARLVGDIADIARFASPGHFASWNGTAPLDVSSGDQRRHRLSRAGNRQINRVLHVMAVTQLRYDGDARAYFKRQLAAGKTRAEAMRSLKRHLSNVVYRHMINDAKQARTSPGGHTGATLTSSAAGPIPTAGSSDKSLPGPVNRHPTTLLPTAS

SEQ ID NO: 480845 - protein, 363 aa, unidentified
MPTEAVTKLYAGLDLHKSNVFCAIKDQTGQPIYRQRLPTDLPTILQALEPYRPHLQAVAVESTFNWYWLVDGLQAAQYPVRLANPAAMIAYSGIKQTDDESDALWLAELLRLGILPEGYIYPAAQRPVRDMLRRRLLVVHQATQTLLSLQSMVTRHTSQSVSAAKLKEWTLQEVRAAFTDPYSQQTAVALLELLNEQRRIQHCLEKQVLAVVKLTGPFQRLVSIPGIGNILGLTIALETGPIARFAGAGQYASYCRTVNSLCTSAGKKKGENNRKNGNKYLAWAFVEAANFAQRYSPKAQAWFARKAARKGRVVAVKALACKLAKAAFYVVRDEMDFDEQKMFGEDGGGDGKPGVGLVQNHQS

SEQ ID NO: 480846 - protein, 364 aa, unidentified
MKIVGCDLHARQQSIAMVDTETGELTEKRLMHEGNAIRDFYTSLEGPVVVGIEATGAMQWFLELLEELGIECRVGHPAKIRAAETRKQKHDRRDAEVILDLLVMKDRFPDIWMPSTEQRDLRTLLRDRHQWVKMRARLQHTLQAIALNHALREGRALWTAAGRRALQDLALPPYTHQRRDELLALYTQLEKRIQQLDKQVESEAQQRPGARRLLTHPGVGPVTALATEVFLGDPTRFATANQVASYIGMIPCEHSSGKKQRLGKLTKEGNALLRYLWIEATLHAVIKDAELKRFYRRKLIQKGMGKARVAAARKLGIRLWIMLRDEIDYAEFCRRGKLRQKGEAHAGMPDYDSGPARAVTGSTE

SEQ ID NO: 480847 - protein, 404 aa, unidentified
MKKVSTVEAKQSRKISQSKLTVGLDLGDRTSWYCVLDEAGRVLLEQRVSTTPKALREGFGGMLRSRVALETGIHSPWVSRLLSEVGHEVIVAHARKVRLIGESRKKDDRLDAQTLARLARIDPQLLCPVKHRSAKAQADLTVIRARAGLVRARTALVNTARGLAKSYGERLRGCNVRNMNPEKAEGLSPELQAALQPLLGALESLSERIAEYNQEIETLAKESYPQVALLKQVKGVGTLIGLTFLLTLEDPRRFRKSRDVGCYLGLQPGRRISGQSEPQMHISKEGDPYLRTLLVQGAQHILGPFGVDCDLRRWGLKLAERGGKSGKKRAIIATARKLAVLLHRLWVSGEVYEPLHNSKQSAMLANFLWKRVVPALLEKKRVSTAHSVSPTRLSPAHLLLVAYH

SEQ ID NO: 480848 - protein, 470 aa, unidentified
MEDNRVRRKRSKTKKAKQLSPAMLARINPNAAGIDCGSAHHHVAVPVDRDAEAVRRFKTLTPDLYRLADWLAACGIETVAMEATGVYWIPIYDILEARGFEVVLVNARHVKNVPGRKTDVVDCQWIQELHSFGLLRGSFRPSAEIVSLRAYLRHREKLVQEAATHIRRMQKSLVLMNVQLHNVISDITGKTGMQIVRDIASGVTDPIALASHRDSRCRASEDEIAASLTGNYRREHVFVLRQNLELYDTYQHQIQTCDAEIESLLQSLAAKQAPPEAALPPARCRHRLQKNDPRFELRSPLHRLSGADITQIDAIGPYTALRLISEIGTDMTCWPTEKHFTSWLTLAPKNKITGGRLISSKTQPSANRAAAMLRMCAMAVGKTSTALGAYYRRIAYRIGKPKAITATARKLAILVYRVLRGDIDYSDPGAEAYEAQHRTRKLRNLRNRAQRLGFGLVDLETGELTQQGVS

SEQ ID NO: 480849 - protein, 375 aa, unidentified
MVNHSEAFVAFDTSKLHNAVAIAEAGRTGEVRFFGEIENSATATAKLVKKLAAKYRRLTFCYEAGPTGYGLYRQIKSLGHECMVVAPSLIPKRPGDKVKTNRRDGVGLAKLLRAGELTAVWVPDRRHEAMRDLTRAREAAMMDLRSKRQQVSAFLLRQGLHYPNDKQTWTKTHMSWLASQKLEYPEQRIAFEETMLAVRQAQERLERLEQAIRVAVPDWSLAEVVTALMAMRGIDLIAAATLLAEIGDLSRFQTPHQLMAYLGLVPSEDSTGETIRRGPITKAGHRRARRILVECSWSYQHPPRVGRAKQPKVDAAPPAVREIAWKAQCRLNARYRALIRKGKRKTVAITAVARELAGFIWAVNREITPAHVAAS

SEQ ID NO: 480850 - protein, 486 aa, unidentified
MKHKRTKSKTKSQGTKPLHEPNPDAGGIDLSPTEIWVAVPPERAQNSVRKFEAFTKDLIELVQWLVQCGVRTVAMEATGVYWIPLYQLLEDSKIKVCLVNARHVKNVPGRKSDVRDCQWLQYLLSVGLLRGSFRPPQAICAARSIWRYRQELISTAGQYVQHMQAALDQMNVKLHYVIDDLTGLTGQAIIEAVLKGQRDPVQLAKLRDKRIKAPEATIAKALEGDWRKEHLFVLQRAWESYHQIQRQIQQCDQELVAYTRELEAATQVIQPPRTMRLRAELMSTEPDSKVSVPKPPKVRKKTSKNQPLGPWKEELERFFGVDLTAIPGISVLTGLTLMTELGNDLGAFKTEHHFASWLCLCPDNETSAGKVLRRHTRRSQNRVRYALRMAASSLHHDKSYLGDKYRRLRTKLGAPKAIVAMAHQMARIIWTLITRQVPFDLSVFAFEQQLNERRRLKRLQSSARQMGYQLTPIAASKQEPGSERSV

SEQ ID NO: 480851 - protein, 360 aa, unidentified
MRYSTIVGIDTHSKKNAVCAIVPATGEMREAVLSEDPGQLLSWISGQGFPEPVGCVYESGPAGFGLARALEAGGVACTVAATSKLSYRVDRQKNDRADAKWLARQMLAGGVRAVRVPTPEEESLCHLSRLRGEVAADLRKAKQRVSSFLLLTGTEYTLTKKKWSKTFRKWAESHEFDQPADTFTFRCKMSAVLRLEERLAEGEAEILRTIASSPKLSERMSRFTCIHGIGKVSAFSLVCEVHDFDRFNNGASFASHLGLVPSESPSGKKVSRGAIAKQGNSHLRRILVEAASCYSKQFKAVRSEDAAVPEAVRAKAEKCAARLRKRRAALKMRGVSANKAKVAVARELAEWIYHIAVMPA

SEQ ID NO: 480852 - protein, 387 aa, unidentified
MPTEAATCAAVIGLDVGKFSHWACHVTRQGEVLRSEPVANTEHDLDGLFAQAEAGTLVVVDQVRNIGSLAISRARLAGLPVAYLPGIAAHGAAKLFAGDAKTDERDAAVIAKTALGIPDSLLPVPKHDERLEAARSMAAQRSHMATCPARDKNGLRSILLESRPEFEALADLADPRWLRMMESLGGPWGVVDAGKAAVGAVTRGANRARIDAAVAAAAASTRPSEYRVMAENPQVKVLAGRIRESAEEAARLDAEITALLAGDGTYACLPTIPGIGPRTASELVTSIGIGDFPDHDHLASYCGIAPRNRRSGKSISSVSSSRQGNKRLKNLLIFSCNSLSRSKGRFGDYYRSCRERGMCHGEALKAVARKRLKVIYAIMRDKVPYSA

SEQ ID NO: 480853 - protein, 451 aa, unidentified
MGKKKMSLEVVNPDAAGIDVGSKSHWVAIGQDAEDIREFGVYSDDHRELCRWLSDNEITSIAMESTGTYWQTLFSALSAAGFEVILVNGRQTKNVKGKKTDIKDCQWIQKLHCLGLLSHSFLPDSITEIIRTYSRHRQNLIKQTGQTVLKVQKYLRLMNMRLDVVVNDVVGLTGTKIITAFIAGETNGKNLAQFRHYNCRKPEEEIAKALQYNGRADYLFALKQEWETYLHIQKHIDQVDAQIKKLLEDIIDQDDNKKQHVTNKKPYKRKNKNAIRGTDMNQISYKYFEGVDLMDIEGVNDATIMALISEIGLEGIKKFPSGKQFTAWLRLAPNNKISGGKVLSHHIPKGSSRLKIALRNAANAIGNQKEGHLADFFRKINYKKGRPTAINATARKLAIIIWNMLVKGENYNPPTQYMFLDEKRRLGLVKRLRKQITKFEIQPEQLGFATT

SEQ ID NO: 480854 - protein, 344 aa, unidentified
MNISMIGLDTAKSVFQVHAVDPSGKVAMKRKLQRGELIPFFEKHEACTVVLEACGAAHHWARVLTGLGHDVKLIAPEAVRPFVKKGRKNDAADAAAICEAASRPSVKFVSAKSLEQQSVLTLHSARCLLVKQQTMLANALRGLATEFGLTVPKGIGKLEELAALVNADEAFPETARHVLTGLFDHCRATAASIETVEAEIVVQARQDETARRLATIPGIGPITASLIAATVGDIGMFKSARHFPAWLGLVPRQYSTGGRNRLGRITKTGNREIRRLLVLGATSMVYRAPQWKSAAGLWTRAVLERRPVRLVTVALANKMARIAWALMTRKEVYHAKGRAAAAAA

SEQ ID NO: 480855 - protein, 348 aa, unidentified
MQFYTNLHPFYCGIDLHARMLYVCILDERGEILVHKKIKDSPEQLLNLLAPYIGNIVVGAECMHCWYWLSDFCEHHNIDFILGHALYMKAIHGGKTKNDKIDAYKIAKLMRGGNFPLAYVYPKEKRAIRDLLRRRTHAMRHSAELKAFIKNALSQYNLPVPDKSDLSYTTGRDAMRGYFSNPQVQRSIDMNLRLIEVYDHEVSSIECHVEKLTKHDNGRDYYLLRSLPGVGRVLALTILYEIGSIQRFDSVQKFASYSRLVKCKAESAGKSYGTQGNKIGNAHLKWAFSEAAVLFLKGNPPAQAYLAMLQKRMSKAKALSALAHKLGRCMYFMLKNQTVFDSERFLAG

SEQ ID NO: 480856 - protein, 390 aa, unidentified
MRKPKQRKPNDLSRSLAALDVDHTLIAVVEMSLSSWLVAGIVPGVERQPLKKLRTDACTLLELLHRWRAEAVRAGHNITRIAVAFEAGRDGFWLARWLKAHGIEAHVIHASSIAVSREHRRAKTDRLDTGLLKRSFLGWLRGERDHCKTVAIPTLEEEDAKRPNRERESLVGEQSRLVNRMKATLVRLGIRGFNPKLKRAAGDLEALRTPEGAPIPPNTLAELKRDMERWRFICDQIRKIEQARIERLERAPNTGATAMVRLLARVIGIGVETADLLVHEVLLRNMRDRRAVARYAGLTGSPDKSGTLSREKGIARSGNARVRRGMVQLAWRFLLFQKQSALAQWYRQRTENAPKARKTMIVALARKLLIALWRLVREGVVPEGVAMRSA

SEQ ID NO: 480857 - protein, 316 aa, unidentified
MSEPSRAMGIDVSKATLDVAVWPSSERWQEKNDPVGWTALAEHATRLRPEVIVLEATGGYEVAAAAALVAAGLPVVVVNPRQVRDFGRATGKLAKTDALSAALLAHFGAVMKPPRRPLPDALTQELRHWLARRRQLVEMATAEQNRLPGAPPAVQKLIRAHVGGLRRQQKRVERMLKELLQRSPAWREQEHALVRVPGVGPMLAQTLLIDVPELGQLNRKQIAALVGVAPLNRDSGTRRGQRMIWGGRAPVRAVLYMATLTARRTNPLIRPFYERLIAKGKPKKVALTACMRKLLTILNAMFKHRTAWDPTFALNA

SEQ ID NO: 480858 - protein, 419 aa, unidentified
MRQKTKVCGIDVHKEFLQACILSKSGETTYHRFRHTHDGILALKDLVLAEECEIIGFESTGIYWYKLYLMLEQDIPLIVANAYQIKNIPGRKTDIRDSQWIAELTLNGLIKPSRVFPRRDREFRDLTRNREILVRTKTTFKNRIHKILDSSGIRLKPLLKDIFGRSGRHIINGIVSQMDRETILSTIPSCVIKRRNDEIREVLRESLSDLQLHLLRTQLALLDEVDAKISEIDALIIATLGDEQQDDMAICTSIPGIGNTVAVTILAEIGDYHDFSSADRLASWTGLAPSVYQSADKLITGRITKRGSTHLRWILVQAAHAASRSKNTVLSKFFHRIAYRRGRHKAVIALARKILCILWHLLTNRERYSESGFMKKIKSSARIALPDISIDDAVSVLMNAGYQIFSPENDALNLKGVRN

SEQ ID NO: 480859 - protein, 421 aa, unidentified
MQEEASAFAAFVGIDWADRKHDICLQVSGADAVELSVVEHRPKAIEDWAQKLRERFAGRRIAVCLELSQGPIVSALLEHDIFMIFPVNPSTLAKYRRAFTPSRAKDDPTDAAIALELLVRHREKLKPLRHESPNMRALRRLVESRRDLVQDRVRLTNRLTFTLKAYFPQVLDLFRDKETEVFVAFLERWPSLLDAQRARRETIVDFFHAHSVRRAAIINRRIDAIKSERPLTSDAAVIEPARLLVEALLPQLRAVSAGVARLDEEIARRCQQLPDFRLFENLPGAGRVFSARLLAAFGEQRDRFADASAFQKYAGIAPVTERSGNKHWVHWRWSCPTFLRQTFVEWVASSVPHSFWARAFYESHRAKGASHNATIRALAFKWIRILFRCWVDRTPYNESRYLAALQKRQSPLLKFAAQAPS

SEQ ID NO: 480860 - protein, 368 aa, unidentified
MTKSITFVGLDVHKNSITVAIADAGRNAEVRNYGIIGGGLDDLDRLVKKLSARDKELQFVYEAGPCGYEIFRFLTAQGIECSVCSPAHTPKSAADRIKTDGRDAMMLARLHRAGELTYVFVPRADDEAMRDLTRCREDAKKAQRVAQQQLGGMLLRLGYRYEQDNWTKAHFGWLADQKMPTDSQQVVFQEYINAIKETTDRVDRLTKQIETLVPAWRMAPVVTAFQALRGVSLIVATTMVAEVGDISRFENPKQLMSFLGLVPSEHSSGEKKRRGKITKTGNGHARRVLVEGAQAYRHRARLTRPLLKRQDGVSKEVTDIAWKCQVRLCARYKRLVEKGKSHNATVIAIARELAAFMWAIAKKTPIAA

SEQ ID NO: 480861 - protein, 355 aa, unidentified
MTSTKYIGMDVHKESISIAVRNAAGKIVMECVIETKANMILQFFDGLRGDVHVTFEEGTWAAWLYDLLKSHVAKVLVCDPRRNALLQEGNQNDRVDARKLAELLHNNPLRSVYHGDHGLRTLKELVRSYLTITQDLSRVMTRVKAIYRSWAIPCTGKQVYAPRHRAEWLAKINETGVRRRAEFYYQQLDALRCLRQEVRRELLAESKKHQAWKRLCGIPSIGPIRAAVLLGILQTPHRFRTKRQLWTYGGVGIETSSSADHHVVKGQLERKKKKVEIRGLNRNYNHDLKNLLKGAAIVAATKPGPFAEFYAELLAKGMRQEMARLTLARKIATIVLIVWKRGVSFDAQHLKPQTA

SEQ ID NO: 480862 - protein, 402 aa, unidentified
MQLWAGIDAGKAHHHCVVIDGDGNRLLSQRVPNDEPALLQLTANVLELAGGDDVVWATDLNHGGPALLIALLVGHGQNILYIPGRTVHHASKIYRGEGKTDAKDAAVIADQARMRTDLQPLRAGDEISTGLRILTARRADISADRVRAINRLQAQLLEYFPALERAFDYSRSKAALTLLTKHRTPDGIRRTGQARIHAWLKKQGARSSAAVAEAAVEAAKSQHTTVPAQHMGEAIVAALAREILTLNEELSELDALISEKVTAHQHTEVLLSMPGFGPVLAAEFLGATGGDLTVFQSADRFAGVVGLAPAPRDSGRVSGNHHRPRRYDRRLLRVFYLSGLSALKSCSASRGYYDRKRAEGKSHIQAMLSLARRRLNVLWAMLRDGTTYTPAHIPALAPPRAA

SEQ ID NO: 480863 - protein, 329 aa, unidentified
MSEATQLKRFSQSPDPDALYAHLVRNYPEAEYHSVYEAGFCGFWIHYRLVGLGIHNIVVNPADVPTTTSEKLRKTDAVDSAKLARSLRAGELKGIYVPGSESLETRSLIRLRDSITKDQTRLKNRIKSHLRYLGIEIPEEFSGPGRCWNRRFVVWLKGAETGTAYGRQTLDFLVRQYEALRGQRLEMLRAVRALSRTERFEKPLENLMTVPGIGQLTGMSLLSEIDDIRRFKSAGQLAAFIGMIPMCHSSGEREGVGDITVRRSARLRSVLVEASWVAVRQDPALSMAYGNYCKRMAPGKAIIKIARKLVNRIYFVMKRNQPYVKCVVA

SEQ ID NO: 480864 - protein, 438 aa, unidentified
MKVLRPCCAAIDVGSIMMMVAYSDRNGNQHLMEVDAFTEDLRGLADKLKAAGVVQVAMESTGMYWVVVYEILEEQGFKVTLVNARHFKNVDGQKTDVKDCQWLHQLHAHGLLRASHIAKENFRELRSYLHERNTLQVQKSDTLNRIHKILTQMNVKVQHLISDIEGVAGMKLLRGIASGIHDPKKLLLLINVDRLKADKEELLKSLDGIYKRQFIVILQNYLKAYDFFKNQMQSYELLIEEVLKKLLVESASANVPVIKPKRTAARKNQYGINIQEYLKHIIGVDVTKMDGLDEISVLEIISVTGLDMHKWPTAEHFTSWLNLSPRPKKSGGKTIGYEKRFTHNKATQSFRVAAQTMWQNRGALGHLYRRLSARKAAKKATKAVARKLAIIFYNMIKNQTEYDKDRLRVNTERLQARKLAYLKKEARKYGYVLQNETT

SEQ ID NO: 480865 - protein, 341 aa, unidentified
MKPAMNVLGIDIAKHVFHAVGMDNTGEIVFRKRLSRHDLIPFMAKLPPVLIGMEACGGAHYWARRFREHGHNVKLMAPQFVKPYVKSNKNDSRDAEAIAEAVTRPTMRFVPIKDVDQQDIQALHRVRERLIGERTALVNEVHGLLHEYGIVIPKGVAKFRQAVIGKLESAKDKLTSLSQEMLWKLIEEFAGLEKQLAYYQEKLEALATTHPECQRLMTIPGVGPLTATALVAAVSDASAFKNGRQFAAWLGLVPRQHSTGGKDRLLGISKRGDSYLRKLLVHGARTTIRWVGRKTDRRSPWIRQLVERRGKNRTAVAVANKNARIVWALLTSHQDYQLATG

SEQ ID NO: 480866 - protein, 340 aa, unidentified
MNATTYGLDVAKQIFQMYWVDAQTGEVSNRRFRRDELITFLAQRPAGLVALEACGSAHWWARKIQALGHEVVLLHAKFIRPFVQTNKTDAADARAIWTAVQQPGMRTVAMKTEDQQAMLGLHRMRSLLIKFRTMQVNQLRGLLYEFGVSFRAGRVAGLNEIRARMAELECLLPGIMISSLQDQLRRIDGIEQDIEQLEKRIGVWHKQEAACRAIAEVPGIGRLTATALVATIGDAKTFKSGREFASFLGLVPRQSGTGGKIRLGSISKRGDPYLRTLPIHGARSVMCHTKVPTAWQKGIRERRPANVVAVALANKIARIAWAILARGSTYEKHHVSVKSV

SEQ ID NO: 480867 - protein, 341 aa, unidentified
MNNVAIVAIDLGKHTFHLHAQDDRGHELYHKKFNRAGLARHLANLEPCTVAMEACGGAHYMAREAAKWGHVPKLIAPHLVRPYVKSNKNDFADAMAICEAASRPTMRFVAPKTEAQQALAMLNSQRDAYIKERTASVNRIHAGLLEVGVSLSPGFHAIKELPALLETCSFSAQIKQILLGLRDHFNYLDEQVKALDKQVERQAAEDDLACRLMTIPCVGPITSSVLAAELGNGQQFKCGRDYSASIGLVPKQHSTGDRTVLLGISKRGDRNQRRLLIQCARVYLMGLERQTGALADWVRQLLARHHCNRVVCALANKLARIAWSIAAHHDEFKAGPSAMNA

SEQ ID NO: 480868 - protein, 356 aa, unidentified
MGEGSWVGLDVHARSVVAGVIDAGSGEVRSLRVPQGSEATVAWLRTLPAPVRVAYEAGPTGYRLARGCAEAGISCVVAAPSRIRPAADRVKTDRRDAERLARLLRLGEITAVRIPSLEEEAARDLVRAREDARGDLMRARHRLSKLLLRHGAVYDATAWTRAHDAWLRKQRFRGGPLAIVFDECYSRMIDAKTRRDTLDKAIRELAASEPYVDVVERLVCLRGVSTLTAFALTVELGDWSRFRPESLGPFLGLTPSENSSGQRRRQGGITKTGNTHARRLLIEAAWHQRSAPRLSVTLERRRAGNSLAVRAQADSSARRLHGRWQALEARGKPRLIVVVAVARELAGHCWALATME

SEQ ID NO: 480869 - protein, 439 aa, unidentified
MSFDYLQTKRHFISGKVVVGIDPARKNHQAAIIDSDGISMCKPFRFKPDYHGFNKLFEELSILQVKINPNNCVFAIERSCNLWQTLAYFVYQAGYRVVLVSPVTTKRSRPFFNHDFSKTDPKDALLVASNAQSGYFDYFQNFSDPVRARSQLSLTYDKLRKNLVQNKQRLRDQLQLVFPEFLSVINSDIDTARLLLHDYFLPRHYLNLNVEKVVEQMEAASRKQHGKETLNKLIELAQKSVGIPVADELEQSVHLTIHSWITMIETVQTQMKGVMTQLITLAQQTSYFEILTSLKGIADTTAAFFIAETRELAHFGHYKKLEKYAGHNLRQTQSGDYVGRRHISHIGNHRLSWAIYKMTEETAKYVPEVRMKFLRRQLKQPQYRKNIVAACSHLLKLIVALVRDNRVYEWDEDNLRALEVLEQQYREKKAGKRSYRLAS

SEQ ID NO: 480870 - protein, 426 aa, unidentified
MAYRIAGIDGHKRMLAVVIVDVSVDGEYPFQRRKVGTSPSELCRLADWLVAEQVEEVVMESTAQYWRPVWATLEQRWRPQRLQEGAGARSGQLHLAQAQSNRGAAGRKKDFPDAERLVKRLVAQELKLSLVPDGEQRLWRTIMRRKHQLTRNRVQFQNRLECLLEEAHIKLSSLVSDLLGKSARRMLQAVAQGATSPEAIAALADHRLRATAQQLCDALGACRDLHPVYRQLLKMALEELNLIEEQIDRLEQEMASLLSAHQDVVQRLAEVPGLGVDSAQQIIAEVGPAAAAFPSAKQLASWVGVCPGEEESAGVNYSHRSPKANRQMKGLLNQASNAAVKTKGRLFEFIYRRLVPRLGHAQAIGAIAHRLCRLIWMILHQAIRYEERGPAVSRSKTERRAARMIRELRRLGYRVEPIACQTGVSV

SEQ ID NO: 480871 - protein, 315 aa, unidentified
MEAMIERCAGLDVHQETVVACVLFGPLDKKPNTSIETFSTTTTGLLALSDWLTTLRVSDVVMESTGVYWKPIWNILEDSFHLVLANARHVKNVPGRKTDVKDAEWLAKLLRCGLIESNFVPPEDIRDLRDLTRYRKKLIHHRTSEQNRIHKILQDANIKLTSVLSDIFGVSGRRILEAILNGEKIETDGLRKMVDWRTKASITDIASAINGRIRRHHRDMLRYHWEHMSYLEKAIEELEKQIDQLLSPYRKEVELLDGIPGVNKAAAATFIAEMGVDMSVFKSAKHLASWAGVSPGNYESAGKKKRVKPHKVTKL

SEQ ID NO: 480872 - protein, 346 aa, unidentified
MEYVALDVHKNYTWARVENSQGARLYESRLAHGHGTIKNFVNRWSGRSPVAVETVGNWYWVVDEIEAGGGTPQLVNARLAKLMMGNVNKSDKLDCQGMNRLQRTGTLPTVWIPSSSVRDGRELARTRMVLSRQRTQLKNRIHATLGKYGYTVKGASDAFGKKGREIIEELLLKLPPHTQQALRLILDELDHVTDNLKAIEGHMIEIFSPCPQTQWLKSLPGVADILAVVIWTEIGTIERFNRAEQLASYCGLVSRENSSGGKIRLGPVRRDVNVYLKWAFVEAANSALLNAGRCGYGHISRLYERIKPRRGHGKAKVAVARHLAEASFWMLKKGEPYREPMPSTQR

SEQ ID NO: 480873 - protein, 387 aa, unidentified
MPKAFAQPEVPAAIQINLTAIFVSLELSRSTWVVTSLSPGAGEKMSKHTVPAGDVPALLLRFDELKRKAKARTGTSFPIITIQEAGLDGFWLHRLLKSEGVESHVVDPASIATSRRRRRAKTDRLDGEALLRALLAFKRGEPRVCAMAVPPNPEEEDRRRLSRERKTLVAERVEHVNRIKGLLFSQGIASYEPIGRDRRKRLDELTTGDGRPLPDNLKSAITRELDRLELLLDQIKTVEAKRDALLAELRTDTPPLAGKMLLDFKGVGPEFAAVLWTEGLFRHFDNRRQIASYAGLAPTPWQSGSVSHEQGVSKAGNPRLRTTLIELAWLWLRNQPTSALSLWFKARVEGGRGKKTTIVAMARKLLVALWKYVTFGVVVEGAVMKNA

SEQ ID NO: 480874 - protein, 415 aa, unidentified
MIKEEHIYVGIDLHKETHTAVILDCFNNKLGEITFANTPAEFPKLVRKVKKYCTDGKEPVYGLENAYGYGRALAVWLIDRKYIVKDVNTAISNRQAKHRGAMYRKSDSDDAQAIALATITMLDKLPDACPNDAYWSLGQLVNRRDNIMRHRIRLTNQLHEQLCIAYPSYKVFFTDIGRPTALYFWSKYPSQKYLKGKGVEDLREELVPISHNRCSTKTCEKIMDAIKSDKVKDNEHQDARDVVTKGIVSDLQHYEKQLQEVDTELEKLYHSLGFTLTTIPGVNITTAVKMLAEIGDIKRFSNASKLAQFAGIAPINNSSAGKGTDKASKQGNRRLQATIYFLAVQMIQVSAKGKPRNPVFRAYYERRIAEGKNGQQVLICISRRLVNILYGILKSGTEYRMPEIKESNIDTDKSN

SEQ ID NO: 480875 - protein, 360 aa, unidentified
MKRQRTSVGLDVHARSVLGCALDGDTGEVFQRRLCPDHGEIVAWLGELPGPVAVTYEAGPTGFGLARALAAAGITCEVAAPSKLIRPPGDRVKTDARDAAHLARLLHLGQITAVTIPSASQEAGRDLVRARDDCRGDLMTARHRVSKLLLRQGIVYSGGKAWTSDHERWLRTQRFDNPALQLSYEAAFDAMLACLDRRHRLDRAITAMAADSEFTPVVHRLGCIRGVATLTAFGLAVEIGDWHRLTGRTIGAYVGLVPSEYSSGDTRAQGGVTKTGNGHVRRLLVEAAWHHRSRYRPGAELRRRWDLASPAARARGQAANRRLHNRWTGFDARQKRPVIANVAIARELAGWCWSLAVMPD

SEQ ID NO: 480876 - protein, 337 aa, unidentified
MTVYVGMDLHSTNTYVAMIDAANKALYKHRHRNDLSHIVSALEPYREQIGGIVVESTYNWYWLVDGLMDEGFQVHLANPSAIKQYEGLKSVDDKRSALWLANLLRLGILPTGYIYPKEERPIRDLLRKRLHLVRHRTSHILSVKNILSRSLGLQMKSDEVKKLDASQVERLFPRKESFRAVMASVGLITHFKEEIDGIETIVRRELKLKEGFGKLLAVPGIGDILSMTVMCEAGDMRRFPTVQNYSSYCRCVKSIRSSNGKIIGHGNRKNGNKYLSWAYIEAAHAARRYHEKIRSYYERKAAQTNKVVATKALAHKLARASYFVVRDNVDYDEARLF

SEQ ID NO: 480877 - protein, 425 aa, unidentified
MQNNLGGAKLLSERIVSALGSMQLERVVIGLEATSIYGDSLVYALREDGRLGRFQRKIHVLNPKQVRKFKEAYSDLPKNDWVDAFVIADHLRFGRINREVYMDDYRYKALQTLTRARFDVIQNLTREKQRFANYLFLKCSGMAQDKDIQNTSATTIALMEHFETVDDLANADLEELTAFITETGRGKFADPDATAKAVRAAAKGSYRLPKTVNDTVNQAMAVSIASMRALKGQVKVLDKAIEQQFEIIPNTLTSIPGIGKVYSAGIIAEIGDIHRFDSQASVAKYAGLVWNRSQSGDFEAEHSRMIKSGNRYLRYYLLEAANSVRRCDSEFRRYYDLKFKEVNKYQHKRALALTARKLVRLVFSAAKGQPPVYPAGGLRAQLATLTHRPCFKNFSGTGLWLVLPFCCLHSAFYSVSLKNFLASPT

SEQ ID NO: 480878 - protein, 321 aa, unidentified
MPTPQIKDRTVTLPQTDIGVDVAKDWIDVFDPSTSRHERIPTDNRSLRRFAAVVGHSIVVLQASGGYERPIMEALSEAGRHATCVNPRHAREFARATGRLAKSDRVDATVLAEMGRALQLAPASPRSAGRQRLSDLTAHRNDITVMIVAEKNRLRTTTDQWIRRSILQHIRALQGSQVKVEAEMEAVLQEHDELREQSARLRCVKGIGPVVSATLLSQLPELGQLDRRRLAALAGLAPHANESGHRRGKRSIWGGRGTLRRCLYLAALTASRFDPRFRAFKERLIATGKAKNHVIVACARKLLTVLNAMTRTGTAYHDAPT

SEQ ID NO: 480879 - protein, 347 aa, unidentified
MRRVAYLSIDVHARNCVLGDMDGNGKFRGNRSFTTCEINIIKVLKTVKAKRKYLVMEAGPLSNWAAQVANDHVTEAIICDPRENALIYKSSQKRDKVDTKKLCRLLRLGEYKAVYRPENDQRAIFKAAVQHYSDLRDQLVALKNKIKAMYRQWGVIDVFTDSVYSASGRDKFLNQLTQRPIYLQLKRLYDLMDHTAAVKQDAEKSMIALGRSYPEIKEFKKIPGMGPIGAHTFDAYIQTPHRFAKKSRLWRYCRLGVTDHSSDGKPLGYKRLDKSGVSELKALSYRAFLSAMKSDNEVKRFYLNSLQRTHDRKHARLNTQRKILSVMLSIWKKGQAYRPDLFLDLSI

SEQ ID NO: 480880 - protein, 341 aa, unidentified
MSDFSYFCGIDLAKNHFSLHAVDQNGKVILHKSVTRSKLLTTIANMPLMRIGVEACGGAHYWARTLNKLGHDARIMAVKYVIPYRTKGKNDLNDAVAICEAVQRPSTRFVPVKSPEQQAILSVHRMREHWVRERTALMNRMRALLSEFGLIIPVGRSSLMKHVPLMLEDAENELPHLARTVIADAYHHLGELNQRIADTEQVFDSFAKVSANVQRVMKVRGIGPQTATAILASIGNGSQFDKSRDFSAWLGLVPKQYSTGGKPRLGRITKHGDKYLRTLLVHGARTVIANLGDKQDKLSQWCRGVLERRGMNRAIVALAAKNARIIWSLLHNQTEYENYAA

SEQ ID NO: 480881 - protein, 444 aa, unidentified
MLRFVGCDVHKRTAVFTILQEDGRLLASYTVPVTREALTAFAERQLTSEDHLVMEATTNTWAVAGVLRPFVGEIVIGNPLRVRAIAEAKIKTDKVDSRVLAELLRCDYLPRVWQPDAETQRLRRLTHRRAALVSDRTRLKNRLHSILHHGLIPLPEFDLFSKRGITWLKGIPLPAEERMARDSDLRLLEQTELEIAEMDQLLVREAWQDEKVRLVMSIPGIDYTVAQTCLAAIGDISRFANAKKLAAYLGLNPSTRQSGPHCYHGPITKQGNAHARWLLVQAAQHLGQYRGPMGQTMRKIIQRKNRSVAVVACARKLAVLLWHVLTTGEPFRYALPKTLEAKYSRLRVRATKQRRRGGVAKGTPRSARYGMGRTRAVPSLPQVLAGNGLPQVAPLARGERIMLERKRLDGFYKELQTPSRIEVNAPKPQVEEREEHVKSQLTQS

SEQ ID NO: 480882 - protein, 461 aa, unidentified
MGKSRAKSSSKASKKKSLDSLKPINLNAAGIDIGADSHWVSVPPDRDEQNVREFRCYTADIYALADWLKQCQVETVVMESTGVYWIPVFQILETRGFEVLLVNSHHVKTVPGRKSDVLDCQWLQQLHSYGLLAGSFRPRDEICVLRSYIRHRDNLIRSAGTHVQRMQKALTQMNLQLHRVISDITGKTGLKIIRAMLAGERNPETLASLKDGRIRRTSEEIAAALTGDYRAEHLFVLQQELQLYEMYQQQIAQCDQQIEAYLASLDSQIELEDIEEVKKSPPTKNYSSNTPAFDLGTHLYRISGVDFTRIDGLGVLTVQTILSEVGLDPSRFPTVKHFTSWLGLCPGSRVSGGKVKSSQTRPVVNRAANAFRMAAHALRRSQTALGAFFRRLRARLGTPKAITATAHKLARIFYCLWTSGGKYNDPGIDAYEKQYQQLVLKNLQRKADQLVFELVPLSNES

SEQ ID NO: 480883 - protein, 341 aa, unidentified
MSVASIGLDFAKSVFQVHGVDASGHAVLRRKLARGGLIAFFTKQPRCLVTMEACSSAHHWARELVRLGHEVRLIPPQYVKPYVKRNKTDAADAEAICEAAGRPNMRFVPIKTREQQSVLVLHRVRALLVRQRTAAVNAALGEFGLVVGKGIRKVDELRQRMDKLEPELLPDEARSAIGCLFDHIDGLGERIGAVEARIIAWHKSSEVSQRLASAPGVGPMTATALVAAVGDGRQFRSARHFAAWLGLTPRIQASGGKERIGRISKGGDRYLRTLLVHGARAIVGTTFRKDVAPRPWLKALIGRRPVNVAATALAHKTARALWAMLTRAETYRRPSAVPAAA

SEQ ID NO: 480884 - protein, 310 aa, unidentified
MAAVYVGVDVSKEHLDVHVRPGGESFRVSREEEGLEELLRRLEALGPSVIALEATGGFEAVVAAKLGAAGLPVVVVNPVQVRAFAQALGKRAKTDLLDAAVIAHFAEAANPEVRALPDTATRLLGDLLTRRKQIVQMIVAERQRAQVLIAPRLKKSVERLLKALKKELAMLDKEIDDTIRNTPLWREKEDLLRSVPGVGPTIARTLLAELPELGGLSRREVASLVGLAPFTRQSGQWRGKSFIGGGRSTVRAALFMGALVAVRCNPALKRFYEHLLARGKEKMVALIAVARKLLTILNAILRDHRPWLPT

SEQ ID NO: 480885 - protein, 336 aa, unidentified
MMLYSAIDLHSDNNFIVIIDSNDSILFQRRLPNDLGTVLSVLEPYKGGLQGVAVESTFNWYWLVDGLIEAGYTTRLVNTAKVKQYSGLKHTEDRYDAYWLAHLMRLGILPTGYIYPRKQRAVRDLLRKRRQLVNHRTIHVLSIQNQYWRNTGIKLKAGYIKRSNDYLGEFEDSNIHLALVSNYEIMQALDEQIGRIETSVKQQIKLRPEYELLLGVDGIGFILAVTIMLETGEISRFEEVGNYASYCRCVESKHTSNTKKKGEGNAKNGNRYLAWAYIEAANFAKRFSAKARRFHQRKKAKTSNVVATKALAHKLARACYYIIRDQVPFDENKTFG

SEQ ID NO: 480886 - protein, 370 aa, unidentified
MLKQFVFRNDAEGFEFLKKTLTKLAPTEEIKIGLENTGVYGSNLVQFLRRNGYKTYTFNPLLINKSIQATTLRKTKTDKADAKFLAQYLTWDNSQSDHDVSYHISELKSLSRLRFSLVQQRSKCKTQAKGVLAQVFPELTQVFSDVFGTTARTILSLCPSAQHIAAYPVPQLADLLRTTSRGQLGLEKAELLHALAVHSVGNSSIALELQLQIYLEQITQLSFHICRCEAALRTILAQMDSPITTIPGIGTVLGATILGEIGDIFRFSSPAKLLSFAGLEPSITCSGKSVSAPGRMVKHGSHYLRWAFGQAARCIILRDQTFAAYASKKRAEGKHFNVVCSHVAKKLVRLVFALLKNHSSFIPNYSSLAA

SEQ ID NO: 480887 - protein, 445 aa, unidentified
MKKDGDAPKMSKSQNPTKEVIPIMKKRIYRRIPVNDFQPQSISLADLGGKLVFAIDVAKVDMVAALASADGRVLHTICWKAPEENPTVLSILRSFRAAGVTVEAVMEPSGTYGDVLRHQLEQDTFPVFMVSGKRTYDAKEIFDGVPSLHDAKSAAIIARLHADGLSTRLADEVPERRQLKAALAIMDLHQERYLQLVHRLESWLARHWPELPTLIDLTSSSLMALLARIGGPADVAAAPDQATKLLRGISHRLIADDDVAAVIASAKTSVGVPLVGLERDALMAIADDAYRAHRAFATAKTQVEKLAATTPAATLTPAVGPTTAAAVFAEVGDARSFPCARAFLKAMGLNLKEKSSGTVHGQIKITKRGPSRVRQLLWLAIFRWIQKDPIANAWYQRKKQRDGGRASRAAVALMRKLAKGLYHVGRGGTFDSSKLFDTRRLQVAA

SEQ ID NO: 480888 - protein, 358 aa, unidentified
MVDKVTEAAVVGGVDTHKDLHVAAVVDQNNKVLGTQYFSTTRQGYRQMLAWMTSFGTLKRIGVECTGTYGSGLLRYFQNAGLEVLEVTAPDRMERRKRGKSDTIDAECAAHAAFSGIRTVTPKTRDGMIESLRVLKTCRKTAISARRVALQIIHSNIISAPDELREQLRNMTRMQLIRTLGSWRPDASEYRNVTNVYRISLKSLARRYLELHDEIADLDVMIAAIVDELAPELIKRNAIGYESASQLLITAGDNPQRLRSESGFAALCGVSPVPVSSGKTNRYRLNRGGDRAANSALHIIAIGRLRTDAKTKEYVARRVAEGHTEMEAIRCLKRYISREVYTLLRNQNRRINSIPITA

SEQ ID NO: 480889 - protein, 411 aa, unidentified
MDKVYDKCCGIDLHKKLIVACFKQGNRQEIRDFGATTRELLEMADWLKEGGCEMVAMESTASYWKPLYNILETCELKAMVVNAQHMKAVPGRKTDVKDAEWIADLLQHGLLTASYIPDKDQRELQELVRYRKSLVGERARELNRLQKMLEGANIKISGTIRDINGKSARNILEHLLSGKQIDSAEYDILYEKKVIAHNLKATKEQIIDDLNGVMSALQKKMMRIILNHLDELNAHIRELDDDIDNFMKPEEKEAAKVIQDIPGIGNTSAQAIISVIGADMSRFPTDAHIASWAGLCPGNNKSANKRKSGKTRKGNGLLRDTLIVCAHSAVKNKSSYFHAQFARISAHRGSKRAYVAVAHSMLVAIYHILKEGVVFKDLGADYYNQFNRERKINAYLKKLKALGWEVPVVAA

SEQ ID NO: 480890 - protein, 348 aa, unidentified
MAVVAQEFEYVIGVDTHAATHSLAVVAAATGAMLSKGQFPTSPAGLARAADWIARHAPGRRLVCIEGTGSYGATLTRLLIARGQEVCEVKPPARTARAGKGKSDDIDAVAAARSVLSVEADHLISPRADGLRAAVSVLLAARKSIDGRRTADRNTLTILLRTHELGVDARRALTQAQLEQIAAWRARPSDDAPAATIRGEARRLAKAVLSADIDLEGNHKALEVHVRQLVPGLLEIPGLGPVTGGIVLAAWSHHGRIRTEAAFAALAGAAPLPASSGNTVRHRLSRGGDRQLNRALDVIARVRMSNDPATRAYVERRTAEGRTRREIRRCLKRYIARQIFRQLHALTA

SEQ ID NO: 480891 - protein, 343 aa, unidentified
MDHFAGLDVSVKETSVCVVDETGKIVREVKVASEPQGLLAVLANPAYHFKRIGLEAGPLSQWLYSALAEAGLPVICVETRHMRAVLKAQINKSDRNDARGMAQMMRVGLYRPVHVKTLRSQKLRMLLTHRKLLQSKAIAIDNDLRGTLRNFGLKVGIVGAARFEARIKELIENIPDLAVLVEPLLVVRRVLREQLGILHRRLLAVVRDDDVCRRLMTVPGVGPVVALTYRATVDVPARFRKSKSVGAVFGLTCVKYQSGEIDRRGAISRCGDEMMRTMLYEAAQSMLFHSTRWSWLKAWAMKIARHRGMKKAVVALARRLAVIMHRIWVDGTEFYWTRENVPA

SEQ ID NO: 480892 - protein, 347 aa, unidentified
MDHIGIDVHKRESQICTLAEGGELVERRIRTEPERFAAVLGNRPRARIVIEASTDSEWVARCLEALGREVIVADPNFAPMYTTRTRKVKTDRRDARALADACLLGAYRRAHRLSDPQRHVRGRLLVRDALVRTRTRYISLIRALLRQQGYRVPSGGAEAFPTRVRTLALPGPLLSLIAPLLAVMRHLNRQLAYSDETIERVSAHDERVQRLRSVPSIGPVTAAAFVATIDDVQRFPHAHQLEAYLGLVPREYSSGDTQRRGPITKAGSGRTRWLLIQAAVSILRRRPPETEALRAWALRIAARRGKHVAVVALARRLAGILYALLRDGTVFTPRRSPLPVDPATLSV

SEQ ID NO: 480893 - protein, 366 aa, unidentified
MRVGADLAKRVIQVHAVDAAGRRVVSRALKREQFMAWCAQLPAGCLVAMEACSSAHHWARKLRLLGLDARLIAAHFVSPYRMEGKSGKNDMTDAAAICEAASRPSMRFVPVKTCEQQGVMSLHRVREGLKEERTGCINQIRGVLAEFGLVFNKSPKALRAALADVIEDASNELSAMARRVLQRAFDHWCELDEHMRWCDSQVGQHVRSSPAAQRAAKIIGIGELGASACTAGVGDFHQFKGGHQLGAWLGLVPRQNSSGGKTSLGRITKRGDDYLRTLLIQGAKAAVMSAGKRDDPISRWLVQLTARVGWQKACVAMANKNARILWAVMTRDAGFDPRHVSDKPQARRSAAERLAASTPNMTPCPA

SEQ ID NO: 480894 - protein, 321 aa, unidentified
MNKYSEIYGVDISKDVLDVVNSQGAYMQYSNGLKGFGQLSKKLPKGSLVVMEATGYYHYRLAQYLYEHGHFVSVVNPLSVKRFIQMKLSKVKTDKSDARAICEYACVNEVPLYTAKNKDQAECLQLLRLMDTYLKHSTAIKNKLHGERTLGIPSKMVYRSLSRSLKSLQKEICLLEARLLSLVKEHQQGQLTLLKSIPGMGNKTAMVLLVLTDGFTKFENAGQLCCYAGITPTIRESGSSVRGRSRISKVGNRKLRNLLFLCSFSACKHNKACREIYERITSKGKSKKLALIAVSNKLLKQSFAIAKSGLPYDEKYVSRLT

SEQ ID NO: 480895 - protein, 369 aa, unidentified
MADRITYVGLDVHKESIVVAVAAGGLRGEVREYGRIANTAAALDRLMRKLSGEGVGLRFCYEAGPCGYGIQRHLSAHGHECMVVAPSLIPKRAGDRVKTDRRDAASLARLHRAGELTAVWVPDAGHEAMRDLVRARLDAVHALRRARQQLSGFLLRQGCHYRRPAWTKLHRRWLAGLKFEQAVHHIVLEDYVQAVEAAAARRDRLTAQIEAMLPDWSLAPVVAALQTMRGMALVNAATLIAELGDLSRFANPRQLMAYLGLVPSEHSSGASVKRGGLTKAGNSAARRLLIEAAWCYRFPARVSRELLLRQEEQPKPIREIAWKAQLRLCARYRKLARCGKPANVVTAAIARELAGFIWAIARRVLPAAG

SEQ ID NO: 480896 - protein, 451 aa, unidentified
MKVQATEIAVEEEAGDGIRALAATNAEARNKKSDDVFTTPKKAPLGRTKGTVWPTVKNLLDVHDAPPRQHPCCRSAPPCISHLPAGAKPARLRTQASPSPLRVSEPACELGAACVRLSECPNSRKGRSSPHLQGRVMDEPRRVTTCVGIDVSKDRLDVHVLPTGEAFAVARDGKGLESLVERLGTLEVSLIVLEATGGFETTVAAALASAGLPLAVVNPRQIRSFAKALGKLAKTDAIDAEVIALFADKIRPQVRPVASSDARALGELVARRRQVVEMIGMEANRRRHAAGKRLAKTIDRHLAFLEKELAAVDADIDTDIRASPAWREAEDLLSSVPGVGPVTARTLIAELPELGGLDRRKLAALVGVAPFNRDSGAWRGHRMIAGGRTSVRNVLYMAALSAIRHNPVVRATYQRLVNRGRPKKVAIIACLRQLLTILNAIARTKSRWKIA

SEQ ID NO: 480897 - protein, 346 aa, unidentified
MQPVIGCDAHKHFSVFVSVDQHGKASRPVRVDHDRELYCRYLRSLPTGSEIALEATGHWYWIVDAMEEAGHHPHLANPFEAKRRMAKSNKTDALDARGLAILLRCGTLPESWIPPGELRDQRELLRTRMALRDLRTSLKHRIHAGIDRYGLQADAISDLFGTKGRVYLAGILKALPTETAHMIALQLNSIDQLEEKIAAIERRIAEQLKTSPEIRLLRTVPGLGPILAPLVWLEVGDVERFPRAEHLASYAGLVPRIIASGGHIRHGSTCRNVNHYLKWAFVEAANCAIRIKAHRYNHIGLLYQRLFPNKGHGRAVVAVARHLAEASYWVLRKRQAYRAPQPRIAG

SEQ ID NO: 480898 - protein, 347 aa, unidentified
MVTFGGDCHKRNHTLVAVDENGLPLGELRVAATPDGHLEALDWARRWPERRWALENCRHLSRGLERDLLTAGEVVVQVSPKLMGTARRSGREAGKSDSIDAVAVARAALREKHLPLAQLEGRARELKLLVDHREDLIGERTRIQNRLIWRLHELEPGLKLPPRGLVRQVVLTEVGARLQRHRGTVAEIARDEVVALLALTKSVKELQRRIEALVAEQAPNLLRLQGCGALSAAKLVAETADVRRFRSSAAFAMHNGTAPIPVSSGNHLRHRLNRGGNRQLNAALHRIAITQLRLGGAAKLYVARRLSNGNTKTEAIRALRRQLSDEVYRRLRLDAQGPIAMPNAEAA

SEQ ID NO: 480899 - protein, 387 aa, unidentified
MEVRMENTPSAGSNNDPVRCFVAIELSKSSWVLGFQTLLTKQTSRYQVKACDAKALLELIERVRSRVVRELGRPVEVMSCYEAGYDGFWLHRVLEAHGVHNHVLDPASLQVNRRARRPKTDRIDADRMVRALIRHLRGEPEACSVIRVPSPEQEDARRLHRERDRLIAERVAHVNRVKGLCATQGIYDYEPLRRDRLKRLDNLRTGDGRALAPRLKAEIVREIKRLEVVLEMIATVEAERDAILKEKKSTHLNADKIKMLAKLKAIGAEFSTTLVGEVFYREFANRRQLGSYVGLASSPFCSGSLDRDQGISKAGNPKARTMMIELAWTWLRYQPESALSRWFRERVGNLKGRPRRIAIVAMARKLLVALWRYLQTGVVPIGAELKA

SEQ ID NO: 480900 - protein, 402 aa, unidentified
MRFFVGIDWASRAHAVCIIDQTGRVRWQDSVPHTAEGLPELVGHLRRFRGRGGLRVALERPSGLLVDTLVDAGFEVVPIHPNALKATRPRYSAAGGKSDPGDAFILADLLRTDGHRFPALRPPSDETRALRALVRGRDDLVTQRVALANQLRALLERFWPGAAAIFVDVDSAIALAFLARYPTPHSAARLGEKRLAQFLGQHAYSGRRPVVELLARLRTAPASQVGEAEAEASGDLVRALVAVLTPLVGQLQQLSAAIEAALAQHPDGRLVQSLPRSGAVNAAQILAELGDDRARFPSDEQFAAEGGLAPVTHASGQHKAVVFRWACNKRLRRALTTFADNSRHASRWAALVYQRARARGCRHQHAVRILARAWARILWRCWQDRAPYDVSRHRAAQALAAA

SEQ ID NO: 480901 - protein, 382 aa, unidentified
MSSPSESIATRSMIYLGMDVHKESITIAVLPAGAKTPTRLDRLANDLPKLKRWLDRIARDGELRICYEASGAGYVLHRAIQEWGYACEVIAPSLIPKRPGVQRKHDKRDATDLARLYRAGELTAVRIPSESDERVRDVVRCRETFQCEILKSRHYILKFLARRGFVFREGTNWCTPHLKWLQHLTTEASPLAQHDRLVFREYHALLMYKLQRRDELDRQIEQLALLPALAPMVGRLQCFRGISLHSAMVLATEIVDWRRFERPAQLACYLGLISREDSSGDRMRLGSITKAGNSHCRHVLVQAAWSYRHRPQTSVDLARRQQGQPPAVITHAWKAQQRLHKRFNHLSYRKRPQIAVVAVARELVGFLWATMQDVDVSEYQAA

SEQ ID NO: 480902 - protein, 336 aa, unidentified
MVSVATYAGLDYHQHSVQVCVLDEEGRLLGNRSVENDAAVVAQAASRYGRPRRVAVEACCGAADLADELAATHGLLVQLAHPGYVNRLKQSPDKTDWGDARLLADLTRINYLPRVWLAPEAIRQLRRLMRHRTQLVQRRKDVKLRLRGLLRENRLKCDQANAWTKAWLAWLATAPLGETDRWLAEDHLEEIAWLTQRLKAVQAQIVQRVKDDPVVQRLMTLEGVGLVTAATMRAEIGDFSRFDTGKQLARFCGVTPRNASSGQRQADSGLVKAGSPELRRVLVELAHRLMRRPGDRWGRLGHDLVRRGKPKNVAIAAVANRWVRQLHHRLREQPTA

SEQ ID NO: 480903 - protein, 306 aa, unidentified
MVIHILPAGKQSFSANKPKAIREALIAEMRRNAEASLGPLLVVCEATGGYERHVLEVCQKLGIAAHKAHGSRVRYFARYLGLLAKTDPIDARVLALYGLKTTDLRLYVPPAPEALALRDLRTRRDQLQQMLFAESNRLEHARHLSVSRSLKAHIASLRKALAALEAEIAACLKASETLARKARLMQTLKGVGPATVAAILAYMPEIGAFTKAGAACMAGLAPIDDDSGKLKGPRHIEAGRAAVRKALYMPALVAIQHNPVMRLFADKLKRNGKPAKVVIAAVMRKIIVTLNAIVRSGEPWSHAKIA

SEQ ID NO: 480904 - protein, 427 aa, unidentified
MAGVVIGIDPHKGSHTAVALDVHEKQLGRLRVRASSRQVDGLLEWASGWPRRRWAIEGARGLGQLLAQQLIASGERVLDVPPKLAARVRLLDSGQINKNDPNDARSVAVAALRAHELPELAAEDQAMVMRVWARRYHDLARLRTQVVCRLHAVVCELVPGGVRKYLRASQATDVLDRIVADSPVAQAKLELARELVADLERIDAQRREAKGRTARAVAATRTSINDVYGVGPIVAGTVLGYVRDIRRFPTRDRFASYNGTAPIEVSSGDRKIYRLSRRGNRQLNHAIHMAAISQIRHHDSGGRAYYEKKIAEGMTGKTALRALKRKISDALYARMIDDARRLAAKDPGGHTGNDSASSAAGSHPETPALRKSHSRATANSKTGTGQRPLRLRPAPDRRRTSRRATGVQVEPAWVCTAGAGRTDLMGR

SEQ ID NO: 480905 - protein, 391 aa, unidentified
MICVGIDVAKDKHDCFILSSEGEVLADVFTIPNNAEGFDTLLQTIRRCARPADKIKVGLEATGHYSYNILGFLLDKGLATYVINPLHTNLYRKSLSLRKTKTDRVDARTIATMLMSDVDLKSYTDTSYHNEELKSLTRYRFDKVRERAKLKTSISRLVCILFPELEKLVPTLHLASVYALLSEFPGSKQIASAHLTRLTNLLHEASKGRYGREKAIEIRDAARNSIGSAMPAKSLELKHTIRLIGELDAEIEEIEKEINSIMDAVHSPITTIPSIGNRMGAMILAEVGDFSNFDSPDKILAYAGLSPSTYQSGQLTNCYSHMEKRGSRYLRYAIFNATKYVCIHDPTFASYLARKRAEGKHYNVAVSHAAKKLVRLIYAMEKSQQPYRLAA

SEQ ID NO: 480906 - protein, 347 aa, unidentified
MTYFTGIDVSLRSVSICVVDDRGEVCREAKIDAHVDVIVDWLRSFSPELNSVGFEAGALSQYLTYGLQAAGFEVICLEARQVKNTLDAMRNKTDRNDARGIAQILRTGWYSRVHIKSLHSHRVRALLASRKAILAKCVDLENELRGLLRVFGIRLAPRVGHRSFDAQVRSTFADDETLSCALVPLLDARTVLYKTYLKLDNAVKALTKADPLCVRLMSIPGVGPVTALTFKSAVDDPARFKASRTVAAHFGLTPKRYQSGEMDNPGHISRAGDADVRSALYVAAHSLLTRNAQWSSLKAWGMRLAKTRGHRRAVIAVARKLAVILHRMWVDGSEFRWGAQEPVAVKA

SEQ ID NO: 480907 - protein, 340 aa, unidentified
MGQYIGVDLHQKNTYITRVNDRGKVLEQINLKSEPEIIKGFFGKQPESSQVVVEASGHWYRFYELIEDRFPELVLAHPLRTKAIASAKIKTDKIDSGILAQLLRADLVPRAYVPDREVRDLREILRYRASLVRFRTQVKNRMTSVLTKAGLKTPTQNAFGVKSFKYLADVEVRPCYRLEIDGYIRTIGEMNKEIEKSNQVIRGLAEKSEEARLLMTMPGVGAFSALLVLSEIGEISRFPDAEHLCSYGGLVPCTWSSGGKTRRGPITKQGSKWIRWILIENSVHAIRKTRRFGSVYMRVSKKHGHNAGRTAVARAMLKSIFHMLRKKEAFQDYPASSERV

SEQ ID NO: 480908 - protein, 324 aa, unidentified
MNKDIIFFGIDISKDVFDVAASNEKYYQFSNSYKGFKSFLKLLDNTSHCVMESTGYYHYRLAYFLLEHHIRVSVENPLSVKRFIQMKLSKIKTDKSDAKMICKYAQQVTLNLWEGHSKNQLASFQLMSLLEVYIKQSTSLKNKIHGEQTLGTPSKLILTSLKRSLKNLEKEMLLIEKKLVELVKIEHQEMLTRLESIPGLGRKTSIMLIVLTDGFKRFSKANELCSFSGLTPIIRQSGTSVKGKSRISKIGNKKLRNLLFMCSFTACKHNKSCKSLYDRIVAKGKSKKLALIAVCNKLLKQAFAIAKSGLMYDETYRSILPNLN

SEQ ID NO: 480909 - protein, 460 aa, unidentified
MSQRRKKQKRAGQGGGAVPSLSCIEPNAAGIDVGATEIFVAVPQDRDPSPVRSFETFTEDLQRLKNWLQQCGITTVAMESTGVYWIPLFQILEKAGMEVCLVNAQHVKHVPGRKSDVIDCQWLQYLHSVGLLRASFRPEQRICAIRSLLRHRDSLVQMAAAHVQHMQKALTQMNLQLHHVLSDITGQSGLAILDAILAGERNPAVLAQLRHARVQASEEIITKSLVGDYQREHLFTLRQSLQAYRYYPSLITACDQEIEEQLQNLDSRTPPDASPLPPERYPHRPRKNEFRFDMRSELYRIYGTDLTAIPSINALTGYTVLAEVGTDWSKFRNGDAFASWTCLCPQNKKSGGKILSAHTRRSANRVNRALRLAAQTLERSTSYLGAYYRKMRARHGAPAAITAAAHKLARIIFHLVTTREAYDESLFAAEEQRQRKRMENKLKRTAKQLGYQLIPLGQTA

SEQ ID NO: 480910 - protein, 360 aa, unidentified
MTQHTFIGLDVHARSVRAAVLDGATGELRSCAAPVTAAELVPWLRAQGESVSVAYEAGPTGFVLARACAEQQILCLVAATSRIPRAPAERVKTDQRDAVKLVRLLRLGELTAVRVPSLTEEGARDLVRARDDARADLMRARQRLSKLLLRRGLLWAGVKTWTCAHERWLAAQRFEERPLQVAYEEAQAAMLSVKARRDALDAAIAVEAQGERWKGVVGRLCCLRGVSTLTAFGLATEIGDWERFDGRSIGAYLGLTPSESSSGERRHRGAITKTGNSHARRLLVEAAWQQRRPLLRPSRELARRREGQPALVRARAEAAGKRLNQRWQSFDARGKRSTVSAVAVARELAGWCWSLATMEA

SEQ ID NO: 480911 - protein, 398 aa, unidentified
MSEIKKGNVPQGTAGRVIGLDMHPDSFTAAALEGNNALNSHVLWVHDNLPQQRLEAWVRKHVQASDLIVIEASGNTFHTVERIRECGRNAVVLEPLRASQVRKTYCTTDKISAVKLARVYFSGLAVEVWTPDDTCRERREVLHAHRRAVQDTTRGRNRIRSWMNQFGIRRRTGLRLAQPSAREWLIEQREWTDTQRLLIDQMFHDLWQAEARRKKLRQVMAETVAADPELLKLNRLFGLHVIGAYALAAAIGDIHRFRNPKKLAAYLGFSPNINRSGKSKKDGGSASWGCGEVRRILTQSAQTIMRYQNNSPLHRWGLALAYRKGRSLATFAVARKLVTAVWYLLKGFFTPLTEETAVLQRKLREIGEEIGTARLKELGFKHSGEFRKEKMKILMKTI

SEQ ID NO: 480912 - protein, 371 aa, unidentified
MVKLTRTMNKCHSNTELSSHEETRCQFNGSKADIKLGIDVHQDFYVVVEQVGGSNPKPAQRFGKEAFLHWAAKLKSQAGQVHAVYEACGFGFGLQRALSALGMRCHVVCPQKLDEQNRRVKTDGLDAKALCLRLDRFVEGNRDALALVRVPSEEEEQLRAIHRQREQLVKARKQLEAQGRNLMVNHGIEPVKNWWKPRKFALLPLPQWMRELLSNSQPILIALQQQIGALTVQLQSSATPQQPRGLGAMSSVIIDREIGDWHRFNNRRQVASYTGLCPGEYSSGNTRLQSCVTKHGNPRLRAALVELAWRLVRFQPNYKPIRKWNATLRKGALATGAARKKAIVAVARQLAVDLWRIRTGRLSAETLGLIS

SEQ ID NO: 480913 - protein, 341 aa, unidentified
MADVTTIGLDIAKASFQAHGADASGAVVFRKTLSRGRLLAFFADQPRCIVAMEACAGAHHWGRELMKQGHTVRLIPPAYVKPFVKRQKNDAADAEAICEAVQRPTMRFVPVKSTEQQASGVVFRARDLLVRQRTQILNAIRGHLAEYGRVAPKGICYVDRLIAEIDDPASELPSAARTSLQSLVAMLPALDEQIARLDREIARRAKEDPTARRLMTVPGIGPITAAALVALAPEPHAFRCGRDFSAWLGLTPVQRSTGGKQKLGQITKAGERTLRRLLVIGASAVIKQALIRGAPPGSWLAQMLARKPRMLVAVALANKMGRIVWALLAKGGIYQAPALAV

SEQ ID NO: 480914 - protein, 341 aa, unidentified
MNVKTIGIDLAKNVFQIHGVDEHGKRLFNKQLRRAQMASFFANIPPGLIGMEACASAHFWANKLISMGHNVKLMAPQFVKPYVKTNKHDAADAEAICEAVTRPNMRFVPVKTAEQQAVLALHRSRQSFIKQRTAQANQIRGLLAEFGIVVPRGIQQLQRRLPELVEDADNPLPVLFRTQLSLLQHHMAYLFDVIATLDKQIEQCYRQNALCQRIGKIPGIGPVTASALIATIGKANNFENGRQLAAWLGLVPRQHSSGGKQVLLGISKRGDTYLRTLLIHGARAVLQSAKHKQDAVSSWANQLMARRNNNIASVALANKNARTVWALLAKEREYCAPIISA

SEQ ID NO: 480915 - protein, 389 aa, unidentified
MYFVGIDISKYKHDCFIVTDSGEIIANSFSFNNDRDGFNHLLTVLNTLIPKGDIRIGFEATGHYAFNLKLFLEEAHYSFMEFNPVLLTKFIKSQSLRRTKTDAIDAMSIARWLMTVEYKPYPIGFYHTYALKSLTRLRDTLIKQRSFYIVKLTNILDHTFPEFKPFFSNRFSKTALYLLENYVTAERMAHMNSASYEHLRKISRGKFSMQKFFKLKELAKNTVGEDHELFTSQLSSLLSLYKLAAQEVASLEAQIESLINDLKPRALSIPGIGPQSAAIIYAEYGDLSKFQSPAQMLSFAGLEPGYYQSGISEHGGHMVKRGSSHLRYTLMNLCIPLIQYNMVFAEYYQKKRHEGKTHRVACSHLVKKLIRVIYTLEKNNIDFDSSKLR

SEQ ID NO: 480916 - protein, 312 aa, unidentified
MDAMVVGIDVSKDWLDVALRPTGESFVFKRTPAGIEDLVERLKDLSPALVAIEATGGFEAVVAAALAGAGLPVVVVNPAQVRAFAVALGKRAKTDPIDAAVIAHFGEATKPQLRQLPDEMTRLLADLIARRRQIVEMLAAEGQRARRISDHRLTRSIARLRQALERELAELERLIGDHMRGSTVWVEKEKLLASVPGVGKTIARTLIAELPELGSLDRRQIAALVGLAPWTRQSGRWRGKSFIGGGRKTVRSSLFVGAMVAARHNPQLKQFRDKLVAAGKPKLLALVAVARKLITILNAILRDRRPWQPNPA

SEQ ID NO: 480917 - protein, 316 aa, unidentified
MSENKTPCFVGIDVSKDKLDLCILPERIFWEEANTGDFKELIEKLKSYSPKLVVMEPTGGHEKAVLKALIQANIPSAREHALRIYHHAKSRGKRCKTDPIDAESIAHYAQCYCEQIQVIQEMPECREELQQLMRRRLDLVELSTQEKNRFQSPQLCERVKSSSETILKALEEELKKIEVELEQRISDDKAMSKKKELLLGVPGLGEVSANMLLIHLPELGQQSHKSIASLVGVAPYARQSGQYRGQQKISGGRAEIRSVLYMAALSAARFNPVLRAFYLRLKERGKKPKVALIACIRKLLHILNAMIAKQEAFKAT

SEQ ID NO: 480918 - protein, 316 aa, unidentified
MSKDITVCAGIDTGKHKLDIAIDGIAERLQVDNNSDGRRSLSSWLRQHQVERIGIEASGGYEQAVVLSLRADGFVVIVFQPMQVRAYAKFVLQHAKNDAIDAVLIARCTAEATDIREPPDARLALLAQHLTLIEQLTQDVGQLKTRREGSREQRIREFWKQEINRLKVLLNSELKQLVAVIREHRDLADRLDLIASVDGVGLRTAVAILVRMPEIGRVTREQAAAIAGLAPYDDDSGLRRGSRHIKGGRQRLRQSLYAAALPAVFYWNPQLKAFYKRLLSAGKSHRLALVACARKLLIFVNTVVARGTPWTSAATT

SEQ ID NO: 480919 - protein, 312 aa, unidentified
METKHPVYVAIDIAKDSLQIQTDHAAWSVPHTDNGHRQLLERLQPLGPVQVVCEASGGYEQPLLAVLHQNGVPVSLLNPARVRAFARSEGQRAKTDPLDAAMLLRFAHEKRPVPTPPPAPQQAELAAWLDRRAQLSEQLAREKNRLQKSPALLHPGIRAMITFVEDQLAEVDGQLHRVVQADATLRERAAVLQSVTGIGAVTTWSLLAYLSEIAAADWHRNQLVALAGLAPWNRDSGKWKGKRSISGGRSKVRRCLYMAAQSAAQHNPVIREYVQRLIARGKPYKCAIVAAMRKLLIHLQSLLKHHQNALAS

SEQ ID NO: 480920 - protein, 444 aa, unidentified
MDVHKDTIVVAVTATGDVGKATACGTIPNTAAALEKLANRLHQAGSGSLKFCYEAGPCGYGVHRTLTRLGEDCMVVAPSMIPRKRGDRQKNDKRDANALAVLHRGGLLTAVWVPDAAHEAMRDLIRSRLAAVRAVRTARQQLSAFLLRHERIYRNGRKAWTKAHRGWLADQSFAQPAQQIVLEESIEAVRLGEHRRDRVDGFLRAQIPTWSLFPVVQNLSALRGLDTIASAGLAAAIGDPSRFASAPDFMAYLGLVPSEHSSGPKRRIGAITKSGDIHARTLLIEAAHSYRFPARITRHQLAGVDTVPEAIREIAWKAQTRLCQRYRRMMAKDKPTPVIVTAIARELAGFVWSIACITSDPPAKSSAATTTCDEVCPTESTGRRALRRRSLQAAGARPDQTGAPIELRYVTVDRTHPEADNPKVGTPTSRTRRSAAAPAQRKAG

SEQ ID NO: 480921 - protein, 393 aa, unidentified
MVYVGIDVAKDKHDCFIVNSDGEVLYDVFTIQNDMDGFEDLLFKIKTASRDLSKVKVGLEATGHYSCNILGFFKSKGLYTIVINPLHTNAYRKSLSLRKTKTDKADARAIASMIMSDVSLKPYSDTVYHNEDLKSLSRYRFDKVSDRSKLKQSVSRLVNILFPELEKLVSSLHTKAVYELLSEFPGAHQVASANLKHLTALLSTASKGHFGREKANEIREAARRSISSYLPAKSLELRHTIKLIHELNAEIAEIETEIKKIMDSIDSPTLSVPGISYALGSVIVSEVGDFSRFDNPDKLLAFAGCSPSTYQSGQLYSTHAKMEKRGSKYLRWALLNAAKYVCKWEPTFAVYLRKKLAEGKHYNVAVSHAAKKLVRLLYHLETTGEKYIPQTLS

SEQ ID NO: 480922 - protein, 397 aa, unidentified
MYIVGIDIAKRKHETAVIDGEGAVIIKPFSFTNNCSGYNRLLAMLTKAKLPLDEVSFAMEATGHYWLALFTRLQKEGFRVQVINPVQTNSIRNFYIRQAKTDPRDALLIAEVIRFGHFSESTLHPENIYELRELCRGRHAIVSMQADVKRKVVALLDQVFPEYETAFTNMFSDTSMAILQTCPTPKELSEMPLEELCHLIEVSSHKRFRMAKARELQELARNSFGFAMAGDVFSTMIRLYAKHLDFLKQQVREMDRKIAEIMDTLDTPITTITGIGPTLGAYILSEIGDISRFSSAAKLAAYAGIDPTMRQSGEYNGVRNRMSKRGSPYLRHAIWLAASSAVLHDPALKLYFQKKRDEGKPYMASVGHACRKMVSIIYAVMRDNKTYTPHIPNEISA

SEQ ID NO: 480923 - protein, 309 aa, unidentified
MKQSVVYIGIDVAKTHLDVAWAGTFRRWPNERSGHAALVRWIKQSATPVQLICEASGGYEQALLESLEKSEVKVTLVQAVRVRQYARAAGILAKTDRIDAKVLAAFGSAMQPQPTPPLSAEQKRLRQYEAQRRHLSRILVAKENRLAQLSCAELRSLSRCLISKIKTQIKTLDRGISDLIAQDQTLCVKAQKLTAISGVGIRTAALLLAQMPELGQLNRRQAAALAGLAPFNRDSGSLRGKRAIFGGRPALRSGLYMAALSAARFNPILSNFYQRLRAKGKPHQLALTAVMRKLLLALNHTLKPIPCTT

SEQ ID NO: 480924 - protein, 352 aa, unidentified
MNDTSIAWLGLDAHSKNCLLGQLDDHGTEVKWWQFATQPQLLIKYIQAIPATDKRLMLEESNLARWLSQLLKPHVQQLVVCDARRNRLISQDHHKHDKRDAFALARLLRLNEFKPVWQPTEDQRVLFKRVAKSYENAVQRQTRLKLQLKSLFQHWGLFPAGSTVFTKSGRNDWLKKLPHDTLRSQALLIYELLDQALVGQAQFRRLMCQTGRQFPEVQRLSTTPGIGVVGSHLFVAYIQDPKRFAKFSRLSRYCRLGIRKRTSDDKPLGYQQLDRQGIGTLKAISYRAYLQAAKRRTGPVWEFYQLSLRQTGSTTHARLNTQRKILLTLWTLWLTGREFDPKQFFRAQPIDV

SEQ ID NO: 480925 - protein, 364 aa, unidentified
MNKCDSNTELSSHEGTRCQFKGGRCAIKLGIDVHQDFYVVVMQEDLANPKPPQRFAKEAFLHWAAKLKSRGGEVYAVYEACGFGFSLQRQLSALSINCYVVCPQKLDEANKRVKTDGLDAKALCLRLDRFVQGNSDALAIVRVPMQEEEQLRAIHRQREQLLKVRQQLEAQGRSLMVNHGLEPVQQWWKERAFSKLPVPGWMKELLGNTQPILIALQQTIAALTLQLQSAASAEQPRGLGKMTSVVIDREIGDWHRFNNRRQIASYTGLCPGEYSSGNSRLQSCVTKHGNPRLRAALVELAWRMVRFQPNYRAVRKWKQLLLRGALTTGAARKKAIVAVARQLAVDLWRVRTGRCKAQALGLVI

SEQ ID NO: 480926 - protein, 312 aa, unidentified
MAMGEVNVAIDVGKHQLDVALGSEGDLFSTPNEPGTIARLCKRLAGIGCARVLIEGGSYQNLLVAGLRGAELPVVIINPRRVREFAKSIGRLAKTDRIDARVLALYGERVEPPLRELPEEQTQVLRALWVRREQLIEMLVMEQNRLEHAPKALHRSLRAHIDYLRKQMKQADDDLDREVRNSALWDKYELLSSVPGVGRVLCAALLSDLPELGRLNRREIAALAGVAPFNHDSGTLHGQRKIEGGRPRLRRVLYAATVAAARCNPVLKPFYQRLRAAGKKPKVARVAVMRKLLTILNVMLKTHSAWRPPCPA

SEQ ID NO: 480927 - protein, 424 aa, unidentified
MNFKQNHKINQVSENTLVVGIDIAKRTHYACFVDDRGRILQKAFAVSQSNNGFHLFYQKLLAAMSEHGKTEIIVGIEPTGHYWLNLAYFLDEYGIPLVMTNPMHVRQSKELDDNLPTKHDRKDALVIARLVKDGRFSYPRILKDVEAELRVGSTLRGKLTEEVGAVKNQMIRWLDRYFPEFTQVFPSFGKMAMAVLECTPFPSDLQGKEIEDLLAIYRTSEGVKSPQRPKTMRLLEVASHSIGITEGHQMARFEIATLVRRYHELNRDIARLNEELTALIQTSVEYEILSTVPGLGDSTIVDLLAEIGSFSHYENPRQLIKLAGLTLRENSSGMHKGQKRISKRGRRGLRALLFRVMMPMVRHNEAFKQLHEYYTTRQVNPLRKKQSMVVLCGKLLKVLHGITTKHQAFDAQRMMRDVSSLIGD

SEQ ID NO: 480928 - protein, 422 aa, unidentified
MLNTLDDCAALIGLDWADQKHDLCLKAKGADKPEYSHLKHCPRAIDEWARALQQRFGGAPVAVCLEQRKGPVIHALLKYEFLVLIPVNPQTLARFRRAFKTSRAKDDPTDAALMVELLERHADKLCAWQADTPGVRQLQLLVQMRRTAIADRVRITNRLTAALKSYYPQPLSWFKDHDTVLFADFLLRWPQLDKAQRARSNILEKFFRDHNARYAKIIESRIEQIADSVALTEDPALISSYRLQVQHLARQLKLTLETITEYDQAIAECFNPLPDASLFASLPGAGPQLAPRLLAAFGSDRAHWPQVQSFLQYTGIAPVTERSGKKSWVHWRFSCPTFVRQTFVEWAAQTITRSFWAKAYYEQQRAKGKPHQVAVRALAFKWIRILHRCWLDNKPYDEAQYLMALQRKGSPLVAGLGQAHDA

SEQ ID NO: 480929 - protein, 456 aa, unidentified
MNPRTPTHVRLPPQPAEPLRVVNPDAAGIDIHSDQHWVAVPPDRDPEPVRMFGAFTCDLEAIADWLVRCHVATVVMESTGVYWIPLFELLERRGFRVLLIDPRQAQRASGRPKTDRYDCQWLQRLHAYGLLAGAFRPDDQVCVLRSFLRQRQMLITYAGQHMQHMQKALEQMHVKLAEGISDITGTTGMRILTAILGGQRDPQHLATFRDRHCKHDAATIAKALQGNWREDHLFELRQALELYAFYHTKLAECDRHLESHLGTFADQRDGLPLPPKPRQRARKANEPHFDARDLLHRMSGVDLTAIEGIDATTALTILSEIGLDLSRFPSLKHFCSWLGLCPQHKISAGKIKSRHIRPGANRVAQALRLAARSLHHAKTALGGFFRRMKSRMGTAQAITATAHKLARLVYTLLTHGTEYVQQGLQEYEARYRDREVRHVARKARELGFELVPATTC

SEQ ID NO: 480930 - protein, 338 aa, unidentified
MTILTVGIDLAKNVFAVHGVDGAGSVLLRQPKVARAKLNALVASLPPCVIGIEACSGAHHWARLFAAHGHSVRLIAPKLVTPYRMSGKRGKNDAADAAAICEAVTRPNMRFVPVKSVDQQSRLMVHRARQGFVAARTACINRIRGLLSEFGVVMPLKAEVVRTQAREHLEDLPGYANLVIGDLLSEVSHLDERIKHYDKHIRAMAKDCTAAQQLMQLMGVGETTATAIVAMVGNAAEFSSGRQFAAWIGLVPGQYSSGGKARLGRITKAGDAYLRSLLVLGARAVLNAAATKTDSLSRWAMAVRQRRGYWKAVVAIAAKNARMAWAVLTKGEAFKLPA

SEQ ID NO: 480931 - protein, 364 aa, unidentified
MKQRLSNEHKWLKNIHLTADDDLYIGIDAHKKSFHVALWLNDAPAIDFVATAETAKLIETLDKLRPAIKRIVYEAGPTGYSLARALEKAHLAVNVVAPSKTPRKPAPDSKTDSLDARKLAEYAAKGLLRNIAIPTKQQEAQRQLTRLREQLVRKQSRLKLQIKSFLLQHGIKQPPALRYWSAEAVDQLRNIRLSAHLRYCLDTLLEELIFIDARLKDAKDKIKEAFAKTPLARKVNILTTHPGVGRVIATQFATEMFNPKRFKHKTELAKYVGLAPSVHQSGQTLRDGPITKTGRPQLRSNLIQGAWIWINCDPYARKTFNRLVRNTGHQNKAITAIARKLAIHLWKMACRNEPYDPVIDKFDS

SEQ ID NO: 480932 - protein, 350 aa, unidentified
MTDRRSTVRLKAVQVMKKIHVGIDISKEKCNLCFRSGLEIVREEECSNDVKALKKAFKAALKVLGASVDEVLVCAEYTGRYIYPLTVACQELDIFLWLDDPTRIKNSMGLARGKNDVIDAARIAEYAFRYSDKAVRYCIPDAALVSMKNLLADREFLLIDRKRYQSQLTDQKKYMAPGDFKHKSGRWKKVIKSIDEQIAAIDTEIETLIAADPVLTRQKELLVSIDGIGERIAINMIAITGGFTRFQNARQFCSFAGLTPYKYDSGTSVRSKAKISKRANQTMKALLHLAAVSAATHMKEGEYKDYFERKTKEGKHVMCVLNVIRAKLVHRMFSVIKRDTEYTKEYKPAC

SEQ ID NO: 480933 - protein, 415 aa, unidentified
MEVLVDRAAGLDVHKDTVTACVRIPKPAGGRDQQVREFRTFTHDLRRLRLWLSEQRVTHVAMAATGVYWRPVWHILEDLPGVELLLVNAHHVKNVPGRKTDVSDAAWLAQLLECGLLRGSFVPPPVIARLRDLTRYRKKLVEARASETQRIQKLLEDAGIKLDSVVSDVLGKSAREMLDALIAGVRDPAKLAGMARTRMRPKIPELRLALEGRFSEHHALMLEMHLAHVDHLTASIGRIDDQVDEVMSPFGDEAQRLQTIPGVGKRTAEVIVAEIGVDMSRFPTAGHLASWAGMCPGNYQSAGKRRSGKARKGDQALRAALCEAAWAAARTKDTYLSAQFRHLRRRFGKKGDNKAVFAVGHSILVIAWHLLANECDYHDLGGDYFAQRNDADARKRYLIRQLEAMGQRVTVGSAA

SEQ ID NO: 480934 - protein, 438 aa, unidentified
MSNKVIFNLDELFISVGIDVGADFSWMSIALPNQQFVGKPYKILHNSIDSLTTAVSKIKEAEELYSLESRIFLESTGIYHYPLFCYLRDKGFNCSVINPIITKNSTNINIRKVHNDRFDSKKAALVGLKPDLKVSLMPSDLALNCRNLCREYYDLMDNRSAYVNKLQGELRMAFPQYLGIFSKVTINTSLTLLETYTSPSAFLKADKQEIIDIIKSTARFGLTYAQNKYNAIIQAATDANQFGYIIDSNIKRIRLYISFIRKYDEEINSILESLHELVDANEDSDFVKQIHLIETFKGAGFLSAVSIMGEIGDFSAFSKPKQLFAYFGLDPAVKQSGKFEGTKVQMSKRGSAIARRVIHTLTLQSISISRNREAKNPVLREYYLKKCDSKPKLVAMGAVSHKVCNMIFAILRDNKPFKIIAPQEHIKQYNAAKCDMAA

SEQ ID NO: 480935 - protein, 335 aa, unidentified
MAGLLKQLERWKAEAQRAGRTVRRTVLAYEAGRDGFWMARYLQAKGIEVQVMHPASIPVERRGRRVKTDRIDLDMLLRTLLAWLRGEPRVCSMVRIPSVAEEDMRRPERERERLVSERIALENRIENLLCLHGVAGFKPRLKKAAARLDELRCYDGTQLPSDAMDELKRIMVRHHILSDQLKEIEAARERMVTAAEPDCAAQQIQMLACLFGLGLATATGLVREVFCRTFRDRKAIASFVGLTGTPFSSGGTEREQGISKNGNPRIRRLLLQLAWRWQRMQPDSALSCWFAERTAGAKGRIRKIMAVALARKLLVALWRYVETGEVPAGARFVAA

SEQ ID NO: 480936 - protein, 409 aa, unidentified
MEVLFERVAGLDIGKASLTVCVRTPGPRGRRSETRTYPTTTRSLQVMRDWLIEREVTIAAMESTSTYWKAPFYCLEEVVETWLLNAAHIKAVPGRKTDVRDAEWIAQLLECGLVRPSFVPPPDIRRLRMLTRYRVQLMGDRTREVARLEGMLEDASIKLSSVAASLTSVSARAMLTALIEGERDPRVLAQLAKGKMRIKIPQLVEALTGHFNDQHAQLARTMLHRLELVELALAELDAVIAAACRPWAHQLELLQTIPGVGPKVAQVILAETGGDMSRFPTAEHLASWAGVAPGVHESAGKRTPVGAPHGNKWLTSMLVEAAGSVGRMKGRNYLSAQFARLTTRRGMSRAAVAVAHSMLVSVWFMLTRDEPYSDLGADWLRRRNDEAHTRRLVAQLERLGHTVVLDPAA

SEQ ID NO: 480937 - protein, 351 aa, unidentified
MLIVGCDYHPSFQQIAWVDTESGECGELPLSHSNGEAEKFYQNLKEQGVKVRVGIEATGHARWFERLLAELGHELWVGDAAEIKAKRVRKQKNDREDARLLRTLLVEDRFPRVWLPDVGNRDLRQLLWHRHRLVQMRTRVMNQLQAMALNEGVRRKRGLWSKTGRAQLESFQLMPWATRRRKDLLELLDGLTPRIAALTAAIEKQVEQYPEARRLMTHPGVGPLTALAYVLIIGSPERFRCGKQIGSYLGLIPCEDSSAGRQRLGHISKQGNSLLRFLLMEAAQAAVRSNPQWRREFLHLTMRRGRQIAVVALARKLAVGLYWMWRKGRDYEMSSQFGSHVGQPGTRYGVK

SEQ ID NO: 480938 - protein, 346 aa, unidentified
MAFFGGLDVHKEYIYANVVDEKGKTVTERKFMNTPQALDYFLEQADESTQFVLEACGMFEPIYDRIEQQGFAVKVAHPLKTKAIASAKIKTDAIDAKVLANLLRTDLIAESYVPSKEVRELRSLVRRRASLVRQRSHLKHQSHSILLKNGINAPMTDIFGKLGKKFLQQVNLPYAERLALDNLLAIVESFDERIDLSNVAITGVVKSNPTVNRLTSLPGVGDFSALLVFADIDNVKRFKSAKHLCSYAGMVPSVYQSGNTTRRGHITKNGSKLLRWVLVQGAHKAVKSDPNLSKFFEHLQKRVGKNKAIMAVARKMLTYIYIMLTEGIEYQALRVNRKKRQHPIVH

SEQ ID NO: 480939 - protein, 322 aa, unidentified
MTRIICGVDISSASLEARIGRDGAASSFANTAEGIAALAAFCLTHQVELVAMEATGGYEQKPFALLAEQGLPVAILNPRAVRRFAEGMGLMEKTDAIDAGIIAWFAQVKRCPAQSPASASHQQLRALVTRLRQLTQVRTAQRNQRRLVTDAAVQAGFDELLAVVDRQIKELETAIAALISEDPLWRQLDPVFRSIKGVADRTIARLMAEMPEIGALPNKAISKLAGVAPLARDSGKHQGKRMTRGGRASVREILFVVAGVAGRYEPDFIAFQQRLSAAGKPGKVIRIALAHKLLVRLNAKAREVRRQLAGASVHSAPVPVTS

SEQ ID NO: 480940 - protein, 344 aa, unidentified
MNSTTIAVDVAKSVFEVAVSEYPGQVRERHRLSRGRFSRFLAEHPPATVVMEACGSAHHWAREAQSRGHRVILVPPHTARPYVLRNKTDRTDAKGLLEAFRNDALRPVPVKSETQQALAALHRLRSTWVATRTARLNTVRGILREFGVVIPTGAHHVVPHVRALLEDADAGVPRLLRVPLSEAIREIGELEERILAIERQLARTAEPALLIGRLRTIPGIGILTATALVAAVGDVQRFPSGRHFASYLGLTPREHSTGQRRRLGAISKQGDTYLRMLFIHGARSVLHHAKSKTAPATDRLRTWALQVERLRGHNKAAVALANKLARIAWAVWRSGNDFTAAAAV

SEQ ID NO: 480941 - protein, 342 aa, unidentified
MTEYKITGIDLAKTKFHIAALDFDHKLVLKKALHRDDVLSYISTTFPKGSTFAMEACGGCHFWGQSLESLGFQVILLKPKDVKPYAKAKQKNDINHALAICKAALDPELKHVHLKSQEEQTVAYLHKARQNTIQQRIQRSNSILTSLMEFGVVVKCSKSAFGKEAETYLINAFEKGAILKTIFDQMMLDALEIKTLLKRESVLDKEIRAYNSKSEVAKILETIPGIGTVNASILSIQDMKGYASGREFSASLGLVPKQFTTGGEIKLASITKQGNRYIRTMLIQGARAILMRTYKDNIPQNRIYDFATKLKDKKGFNVACVAIANKLARIAHACATKRQVYS

SEQ ID NO: 480942 - protein, 366 aa, unidentified
MEKGTTFVGLDVHKEAINVAVLLPGERRPVEWQTSNDAAAIRRWVRKLQRSACGDLRLCYDAGACGYAVQRVLRGLEVSCVEVAPSLIPRKRGKQIKRARCDARKLAELLRADLLTEVHPPTEEDEAVRDLCRAREDAHGDLVRGRHRVSKLLLRHGWTWSGGKKAWGQGHRLWLRSLRFEHEADQWVLEEYLLALEHIEERLRSLDEKIERVSLDPRYASVVAALRCFRGISTLTAMTLVAELHDFMRFDSARGLMAYLGLVPSEHSSGGKEHRGEITKAGNCHVRRLLIEAAWHYRHHPSVLSLRKRREGQPARIIAIADRAMHRLHRRFNRMLERGKPRPKVVVAIARELTGFVWAAMRHYAA

SEQ ID NO: 480943 - protein, 342 aa, unidentified
MLYAGIDIHKQVFHAVVLDPVTGELCECRFQPSRERLAEWAGEWEGKLAGVAIEATTGWRWVTRELQARGFKVHLLDAGRASALRGRRRKAKTDKLDAKWLAMILARDLLSECEAWIPPAEIQQLRDQTRLRKSLVESRTDWAQRLHAMLTHEGWPCSRGRLLTREGRRWVTALDLDPAARVHVDVMINVIEGLDEQIGIVERDLRRFSRSDSRCLALQTIFGVGAILSCHLLAEIGEATRFKRSRQLVRASGLDPTVLESADSKRRGHLSKQGSPHLRWALVQAGNQGVRTASPDRTLYATVATRCGARRAKLTVARKIARRAYHVLAAVETANVDPVTVA

SEQ ID NO: 480944 - protein, 343 aa, unidentified
MQIAVLGIDLGKNSCSVAGLDATGRVVLRRRLHRNSVIKLAADLPRCVMAMEACCGAHHLGRVLQGQGHQVRLMSPEYVRPYVKAQKNDDRDAEAIAEAATRPTMRFVDLKSVDQLDMQSLHRARDRLVGERTALVNQMRGVLLERGVTVPQGRRRLERYLEMMMVDAAVALSLRTRALIEDMRAEWRDLDRRIAAFDEEFVMRARTDETTRLLTSIPGIGALNATALTAAIGNAQTFGRARDLAAWLGLVPKQMTTGGKPRLLGITKRGNVYLRKMLIHGARAAFPSLSTSDTPLGVWLRGLLTRAHKNTAVVALAAKLARIIWAVLRNHRKFEMSVAMATA

SEQ ID NO: 480945 - protein, 351 aa, unidentified
MNTQQTACPKLYIGIDIHKRSWKVHCATDLFAGKSFSMSPDPKQLHSYVSKHFKEYEVTVAYEAGCCGYHAHRCFESYGWRSLVVNPADIHRKGKEKHTKTDKIDAQLIARELRDNRLRSIIVPDRKREELRSLFRRRNDLVKDFRRVKSYIKMQLLYFGIREPEEFDNDHWSHKYRNWLDDIMFEYPTAKATLESRMRFFRFVDQELRDVSTQLRRYCKVNYKKDYLLLRSIPGIGGIVACGILCELGDLRRFNNIKHLAGYVGLAPSMYQSGNSQRTMGMTPRANRLLRSYFVEASWQAIRADPVMQAYYRKHQGKNVKSIIVKVARKLLSRTLAVIKTEVPYTIGVIE

SEQ ID NO: 480946 - protein, 403 aa, unidentified
MEGPLISLDVSKGKSNYRFFENGTDKKGKKGVIRHDIQGFDSIRDEAEKMEERLRIKPSVIFESTGVYSDVVEKYFTDKGFDVYVISPLLSASMRKEGVRPAKNDSLDTLSIAKVFYSKDDLRKCSENDKKAERLREMSYELDMMNRRIRPMKCQFLRLLDKVWPCLDEVSDYSSRFMLDFIIAFGHPENIKTVKGVLSVIRKSEMGTAGRKDKIAQDLFDYCHTHLSAVSKDSSYVELLKRMAIELKAMAKKKSELIDRMAEEARNKDEFARLLTIPAVAKTTALKIMARVGDVSRFRNAEALVAYCGLDPRVYQSGKMTGEHRTITKKGDCILRSTLFLAVKLMVMLYPDTKVARFVAAKAKNGLSYKQAVVAGSAKLARIIYSMLTHHENYVEFNADIVA

SEQ ID NO: 480947 - protein, 283 aa, unidentified
MRFYTKQHRYYCGIDLHARRMYICILDADGQIRVHRNGPATPEHLLATIAPYREDLAVAVECIFTWYWVADLCAREGLAFVLGHALYMKAIHGGKAKNDKIDAHKIAVLLRGGMLPMAYVYPRAMRATRDLLRRRCHFMRKRAELLTHIQNTATQYLLPPFGKKIAHKSNRTDVAEQFTAPEVRKSIETNVALLDHYDRLLTDLELYLARTAKVHDVHTFARLRSVPGIGQILALVLLYEIHDIRRFPSVQDFVSYCRLVKCGKESDGKHSGYSGAKIGNAHL

SEQ ID NO: 480948 - protein, 399 aa, unidentified
MKTIEVGIDWSKEFVDLCATLNGEVLIEERITVNAVGFNRLEKIMLSLKRKVRSIRVAIESDRHAVAGFLMRKGYAVYAINPLALSRFKETFSFSGRKDDRFDAFCLALYLRQNGNRLRPANKPGPECEELACHLSALHQIEENRRRQINRLRALLERYFPAYSAFFKHVSDSALELLRTVRTPAELRELTQEKFLEKVKYITRLTGKRKIQFFETMRKEMLPDNAPLAAALAFDADLIIEQILFFGQQIKRLEAEINRIYTAQPLYEIFNSIPGCGPGLGPRLLSEMGDNRDKFVSFRNFQAFAGTSPVTMQSGKQRASVSMRRSCRKSLRHTLFWLAFTSMNVEPWAREYYDAARARGMSHSGATRALSNKWAKIIFSMWKHGETYDREKFMEKRAA

SEQ ID NO: 480949 - protein, 317 aa, unidentified
MDAIFVGIDVSKDRLDVAVRPSGEHFVVARDTQGLRELVARLAALAPMAIGLEATGGYETVVAASLAAAGLPVVVVNPAQVRAFAQALGKRAKSDPIDAAVIAHFVEATKPPLRSLPDADTERLADLLARRGQIIEMMVAERQRQKRLMAKRIQKSIARLLAALQKELSALDADIDDAVRGSPAWRDKEDLLASVPGVGKIIAHTLIAELPELGTLDRRSIAALAGLAPWTRQSGQWKGKSFIGGGRARVRAALFMGAMVTARHNPVLKAFRDKLVAAGKPKLVALIATARKLLTILNAMLRDRKPWQEAEHEAASN

SEQ ID NO: 480950 - protein, 315 aa, unidentified
MADTIAQSVGVDISKDTLDVHLHPAGTARRFLNTRTGRSGLIAWLAKFTIVRIVFEPTGPYHHAFERHLAEAGLPLAKVNPRQARRFAEAIGRHAKTDRIDAAMLARLAALLEPPIRPAPSQTLDDMAELIVARRARVKDRVAALQRDSVHRSTLLKRQAVQRLAQIERQIAAIDTALRERLAGDLTLRARFDILASIPGIGETTALIMLVEMPELGTLDHRCAASLAGLAPIARDSGQHRGKRFIRGGRSHLRQALYMPALAAVRFNADLKAKYKALRHAGKPPKVALTAIMRKLIILANALMRDGRTWSLKPA

SEQ ID NO: 480951 - protein, 321 aa, unidentified
MSTHTPRFVGIDVSKDHLDAHVRPDETAGRFDNTPAGIAALLAWVEPRAPGLIVLEATGGYERPVLAALSLKGLPVCVVNPKRVRDFARALGQGAKTDALDARVLAEFADRVRPSVRPLADAGTQDLQALVARRNQLIEMRTMESNRLAGVTSRAIRRSIEAILRALNKEIGKADQELTAAIEESPVWKAKDELLQSIPGIGPVTSRTLLADLPELGTLTREQVAALVGVAPVNRDSGRWNGKRFIAGGRAAVRRVLYLGAHAARQGNAVLAAFAARLEKAGKAPKVIRIAIARKLLIIANAVLRDQKPWQNRAENDIAAA

SEQ ID NO: 480952 - protein, 363 aa, unidentified
MSDGICFAGLDVHARATAAAAVKLGSGEVFRARLSGGPAATIDWLRSLPGPVRAVYEAGPTGFGLARAARAAGLEVIVCAPGAIPRQPGDRVKTDARDALKLARLHAAGQLRAVVVPAPELEALRDLVRAREDLRGDLMAARHRISKLLLRRGLVWAGPGTTWNDGHLRWLGRTSLGDPLADVVLGEYLACHEVLLARRDRLDALIAEQATHRPWAQTVARLRCLRGVDTLTAVGLIAEIGDITAFAHPKQLASYLGLVPSEQSSGERRRQGAITKAGSTHARRLLIEAAWHYRRRPAISLTLRRRQAGQPPAAIDAAWRAQLRLHRRWAHLDAARAKKRTTVAVAVARELACFVWEIAHQPD

SEQ ID NO: 480953 - protein, 343 aa, unidentified
MTDISILAIDLAKHSFQVCATTAEGVVIYNRKFTRGKLEQLLTEHPTCLVAMEACATSHHWGRFATELGHDVKLIPPIYVKPFVKRGAKNDANDAAAIATAVRQPGMRFVRIKSQEQQSHAMLFRSHQTFTRQRAQLLITLRGHLAEHGIIVAKGNAALLAFAETLEAEAGLVPDLVLESARLYYHHIDQLAQTVVTLERQMGEATKRDKDMRRLRTMPGVGPISAAAFLAFAPPMESFRRGRDFAAWLGLVPKQLSTGGKTKLGRVSKMGQSDLRRLLITGATVCIRWARWKGIKSDSWLGKLLERKQGTLAAVALANKMARILWAMVTKGQDYRGGLVEYA

SEQ ID NO: 480954 - protein, 418 aa, unidentified
MIDDVQWFVGIDWATQSHRVCLLDIEGRQVNERDFAHGGAGLTELRDWLLEKTKAAPGQIAVAIETPHGPVVEMLLDHAFQVFAINPKQLDRFRDRFTVAGAKDDSRDARVLGGSLRTDRQAFRRLVVDDPLVIELREWSRIAEELQQERTRLANRVRHQLWRYYPQAIELTDDVADDWFLALWQQVPTPATAAKASENTITRILKDHRIRRLDAATVLQTLRKTPLFVAPGTTEAACAHIRSLAARLHLVNQQIKEAHRALDGLCAKLEASKESPSGQNREQRDVTILRSWPGIGRIVLATLLTEAPEPLRARDYHALRALAGTAPVTRRSGKQCFVIRRHACNKRLQNAVRHWSRTAIQHDAAARRRYDALRQRGHGYARALRGVGDRLLYALCTTLKRQTPYNPNYQTAQVTAGR

SEQ ID NO: 480955 - protein, 368 aa, unidentified
MKMNAIKAAPAASAIALKNEKSAKAKRILIGTDVHLRGYQAARKVDNGVIGVVENFRSEEELLLHVEKQCERAEQVVVVYEAGPLGYTLYRKLTARGVLCYVCAPDSSEQKRKRRKNNKIDARNLTSKLFNYLNGDEGALQLARVPTEAQEQLRLASREHDQMVEERKRLGAKGNALLLTQGFGSWSNWWRPKAWAQLSSLVPEWLLERLKIWVDVLKMLDEKICLAKVALARTCSGPRPKGVGALSQIQLQSEVLDWSLYTNRRKIACLAGMVPSEWSTGDTERRGSITKVGVPAIRRIIVEMVWRIVLFQPQYKPVQKWQKVLQGTNPALKKKAVVAIGRQLIVDLWRLQTGRVTAQELNLVMVGA

SEQ ID NO: 480956 - protein, 347 aa, unidentified
MRFYNRQHQYYCGIDLHVKTMYVCILDGAGQVLVHRNVPSTPTAFLEIVKPYREDLVVAAECMFTWYWLADICAAEGITFVLGHALAMKAIHGGKAKNDKIDSHKIAGLLRGGLLPQAYVYPSAMRSTRDLLRRRLHLVRKRGELLAHIQNTRAQYNLPAFEKRLAYPGNRDGVVEHFSDPSVRKSIEVDVVLIDQYDALVNDLELTIVREAKRHDGDAFHRLRSVPGIGKVLALTILYEIHDIARFDRVQEFASYARLIKCHKESAGKKLGTSGAKMGNVHLKWAFSEAAVLFLRHTTGGKKLLARLEKQHGKGKALSILAHKIGRAVYYMLSRGTVFSMEKFLAA

SEQ ID NO: 480957 - protein, 385 aa, unidentified
MQKRHDDSKACLTAFVQDNTVIATIEMSLASWLVAGMIPGVNREPLKKIAPDPEVLLRLLYRWRDEAIKAGKEITRIAVAYETGRDSFWLARWLRDRGIDAQVIHATSVAISREHRRAKTDRIDTAMLRRGFLGWLRGERGHCSMAVVPTIAEEDAKRPHRERESLIKERTSTINRMKSILVQFGVRNFKPTLRKAVEKIDAVRTPEGIPLPPNASAALRRHIERFRLLNEQIKTVEKKRLQRLREHPAGKFNAMVFLLVRIIGLGVETAEQLVHEILSRKLRDRKAVARYAGVTGSPDESGLSRREKGLSRSGNGRVRKILVQLSWRMLQFQPDSGLVRWFKNRTANSQRSRKPMIVALARKLIIALWNYVNTGVAPDGFKLAK

SEQ ID NO: 480958 - protein, 342 aa, unidentified
MNHVAIDLGGRESQICVRQPDGTILDEGKHPTRSLISKLQSWGPSRVIVETSAEAFRIADAALAAGHEVRVVPATLVKTLGVGSRGVKNDQKDARVLSEVSCRIDLPSVHIPSSQARELKSISGSRELLIDLRTALINNVRGWMRTQLWRVRSGATSSFPERVRGHAQRLEQTLPPHVERNLVILEQLDVQIRQADRQVEQFAKQDPICRRLMTVPGVGPVTAVRFLAAIDRCERFESAHALQSYLGLTPGERSSSDRERPTGITKAGPTATRRMLVQAAWSAWRRRPNEPMVRWATKIGERRGKHIAIVALARKLAGILFAIWRDGTTYRASRGAAPEATT

SEQ ID NO: 480959 - protein, 360 aa, unidentified
MSENRTFVGLDVHAWSVTGHALDGLTGEVWQQKLAPDPVGILGWLSGVPGPVTVVYEAGPTGYGLYRHLNDHGVRCVVAAPSKLQRPSGDRVKTDARDAELLARLLKLDEIVEVTVPSVEQEAARDLVRAREDVRGDLMRARHRLSKMLLRQGIVYTGGNPWTGVHDSWLRSQRFDHTGQQLAFDSAYETMIMTSDRRDRLDAAIVAMAADSDYTGLTRRLCCLRGVSTLTGFGLAVEIGDWTRFTGSTIGAFVGLVPTEHSSGGSRSQGSITKTGNTHARRLLVEAAWHHAKPYRVPGKTMRDRWEQAPAAARLRSHDGNRRLHHRWQTFTARKKKPAIANVAIARELAGWAWSLAVME

SEQ ID NO: 480960 - protein, 390 aa, unidentified
MERPMQKLNDFSRSLVALEPDSTLIAVVEMSLSSWLVAGIVPGVERQPLKKLAADESALLKLLHRWREEAEKAGRRIERIAVAFEAGRDGFWLARWLKARSIEAHVIHAASVAVSREHRRAKTDRLDTELLKRAFLGWLRGERDHCKMVAIPSINDEDVKRPNRERENLVSEQSRIINRMKAALIRLGIRGFNPKLKRAAGRLDDLRTPEDEPIPPNMLAELRRDMERRRLVRDQIRQIEQARLQHLDHAPGDGPHAMVRLLARVIGVGIETADMLVHEVLSRNMRDRRAIARYAGLTGSPDESGRKRREKGLARSGNGRVRHGMIQLAWRFLLHQKDSALAQWFRARTENARGTRKPMIVALARKLLIALWRLVRQGVVPDGVVLRSAQ

SEQ ID NO: 480961 - protein, 418 aa, unidentified
MAKVQKVFDQLHERVAGLDVHKAQVTAAVRVPGEAGARVQEVAEFKTTVQGLLALRDWLCAHGVTYVAMEATGVYWRPIWAILEDDFECILCNARDVKQVPGRKTDVSDSAWLAQLAEAGLLRASFVPPKPIRALRNLTRYRKTQIEERQREANRMHKILEDTGIKLDCVATDILGASGRAMLDALCAGTTDPEILAELAKGRMRSKIPALREALEGRFDAQHALIVSAILAHLDFLDEQITLLSDAIEEQIGPFEPAVELLCTIPGVQRRTAEVIIAETGADMSVFPSAKHLASWAGQCPGNDESAGKRRSGRTRKGSRWLGIALTEAALAATRQKNTYLGAQYRRLRGRRGHKKALGAVKHSIIAAAWHMLSTGELYNDPGADYFDRRVDPQKKIKRLIAQLEGLGQRVVVEPAVA

SEQ ID NO: 480962 - protein, 367 aa, unidentified
MMGWMAPLRHLSAKLLSDRISSEWEPSMGEVTTIGLDLAKHVFQVHGVDAEGATVLRKQLRRAQVLAFFSRLPPCLVGLEACATAHYWARELRALGHEVRLMPAQYVKAYIKRNKHDAADAEAICEAVERPTMRFVPVKTADQQAAVLLHRGRERLVRQRTGLVNALRGHLAEFGVIAPQGLRNVGKLIAIVRDERDARLPDLARQVLQVLAAQIEQLEAAVAAIEKQLMAWHKSNPVSQRLASVPGIGPIIATAIAATVVEPSGFRSGREFAAWLGLVPRQNSTGGKHRLGGISKRGNQYLRRLLINGASANLLRSKATNADPWVIGLRQRRPSLVVAVALANKTARIAWAVMHRHENYQRVAAAA

SEQ ID NO: 480963 - protein, 422 aa, unidentified
MANYALFVGIDWAAEEHQVALVEPEGNQLKQLKVKHDGEALKRFVMELLTRVDGDVSRVVVGIEMTADAVVEVLLERGIAVYGLNPKQLDRFRDRHSLAGAKDDRRDAFVLADALRSDLRLFHRMQLGDARIVTLRELSRARSEIVDQMQALNNRLWQQVHRYFPQMLELGSFHTDPWLLDLFELVPTPRLLKCLKRPKVEALLKKRRIRRFDADTVMTTLGKTALPVAPGVAEAASEHARMIVAVLRAAIAQREHADRRIEEVLAELEPAPADDDAPPRTRDVDIVLSLPGVGPIVAAILLAEATSALLQRDYATLRTRSGVAPVTSQTGKQRPVALMRHACHPRLRNAVHIWSGVAIQHDERLRALYARLRGAGASHGRALRGVGDRSLAMLVSMLKSNTVYDPSRRASAARPAAPAAHP

SEQ ID NO: 480964 - protein, 352 aa, unidentified
MSRKSLPCDITTIGIDIGKNTFHLIGLDGRGAIALQLKVSRAQLERRLANVPPCLIGMEACSGAHHIGRQLEALGHDVRLMPAQYVKPFLKSHKNDYRDAEAIAEAVQRPTMRFVRIKTPEQMDLLALHRVRSRLVGQRTAVTNQIRGFLIERGITVRQGLMPLRKALPEILSSNSGALSPRMVALIADLAADWRRLDERIATVSADIESLAEHDGNCQRLMTVPGIGPIISSAVVAAIGNGTGFKQGRDFGAWLGLVPRQESTGDRTILGKISKRGNKYLRTLFVQAAHVVLVRRPGAAMRGLWPWIVRASKRLHRNMLAIALANKLARIAWAVLARGHAYQPRIAVDAAS

SEQ ID NO: 480965 - protein, 353 aa, unidentified
MTSEKYIGLDVHQATISVAVLDSSGKLVMESILETSAATILQFFAGLRGRLLVTFEEGTWAAWLYDLLKPHVGEVLVCNPRKLQNQGNKSDRIDARKLAEWLRGGQLKPVYHGENGVRMLRELARSYLATVKDVTRVMDRLKAVYRSWAIPYEGRDVYSARHRVDWLAKIPHAGPRRRAELLYQQLDALEPIRKQAKRELLQESRRHTATGRMLQIPYVGPIRAALLVAIIQTPHRFRTKRQLWAYGGLALETRISGEYRYAKGQLQRSKKRLAIRGLNKDHNHDLKGLLKSTAMQASTRPGPLRDFYQALLAKGMKPTMARLTLARKIAAMVLVLWKEGASFDAEKLKSQAA

SEQ ID NO: 480966 - protein, 328 aa, unidentified
MKLIHIVGADISKKSIDLFCHGLHEHFKIKNDVSGFKEMQLWLKKLELKIKGLVIVMEHTGYYSFHFENFLHQNEICFCKVSALAIKRSMGLVRGKTDKIDAQRIATYGYEKQDNLRAQIPMDAELHRLQILNSSRNLLVKQRSSLLCTLKEYQVILKQSDPIIRMQLQLISELTRQIKDLEKQMKDVLSKPGAIAENFRLLTGIKGIGLIVATATLIKTKNFTCFTNRKKFSCYCGSAPFEHSSGTSIRKNTRVSHLADKSMKTLLTQSAKTAIQHDKELKEYYQRRTLMGKSKQSTINIVRNKLIYRMFAVIKRQTPYIHQDQRTA

SEQ ID NO: 480967 - protein, 355 aa, unidentified
MTKISTIGLDLAKNVFQVHAADAAGHVVLRCRLRRREVIAFFEKLAATNGPCLVGMEACGTAHHWAREIERLGYKARLMPPAYVKAYLKRGKSDALDAEAICEAATRPSMRFVPIKTLEQQSLAMLHSVRAKLVSQRTQAYNALRGHLAELGLIAPKGEVGQARLIAMVMDEATPLPPASRFALSSLVAQIATAETEIDRLDRALIAEHRASETSQRLATIPGVGPVTASAVRARIGDPERFETGRGMAAWLGLTPLEDKSAETVRQKRISKKGDRYLRRLLVSGAMGLIKQARRKPDKWPHIVRLLARMKPKQAAVAIANKTARVLWALLVKGGTWQPDHRPSPYLPAEPAAAA

SEQ ID NO: 480968 - protein, 385 aa, unidentified
MTQPASSFAPALDYGATIIGALELSGKSWVLAVQLPGVKRHSKHVLEPRCEDLVALIERLKARSSAAGHKIERVILTHEAGQDGFWLARFLKQRGIGVHVMQPSSVPVDRRARRAKTDAIDVEMLLRTLLAWLRGEPRVCSMVPIPSEADEEARRAHREREDLICERRSIVNKMGGILATLGVKGFKALRRDRREQISLLRQPGGDPIPQLARGRLERMLDRLELVLQQIEKVEKVRDAVLAKPAPANEAERMIRSLAELRSIGADFATILVREAFVRDFRSRRAVAGYAGLGGTPFSSGGSEREQGIGKDGNRRLRTAMVELAWLWLRWQPNSGLSAWFRRRTEQAGSRTKKIMIVALARKLLVALWRYVKDGVIPEGAEMKAA

SEQ ID NO: 480969 - protein, 338 aa, unidentified
MASVKGDIIMYYVGIDISKRFVDVCLLADGMKGKRKTKTLPNGPNAVQALAEWLTRQKCDPGQAHIIMEATGVYHEHLAYGLHQSGIAVSVINPHRLREFARGMGILTKTDKVDAYVLACYGGLRQPEGWSPPSPEIRKLKALLQHRDSLLSDKQRIENRLSTLASTQAPEEVVASLDSMVRHVKSELERIERLIEDHIDKHPGLKNDLKLLKSIDGVGDQIGWNMLATIRGGHFRSAEQVAAYLGVIPVERRSGTSVRGRARLSKIGPPAMRAKLYMGAIAAISHNRHVKAQYERLLLKGKAKMLAVGAAMRKLVHLCYGVLHTQQRYDKNYGVVAS

SEQ ID NO: 480970 - protein, 366 aa, unidentified
MKKISTRAIEGIEIFKPNQLTIGLDLGDRTSRCCILNEAGEVILEQELATTPKGFEQVFSKIPRSRVALETGTHSPWISRQLTELGHEVLVAHARNVQLISQSTRKDDRLDARTLARLARIDPSLLGPVRHRSAKAQIHLTVIRARAVLVSTRTALVNAARGLTKSYGARLPKCGTEQMTREITKNLKPELRDALDPLLAEIESLNERIAEYDTRIEQIAKQVYPEVAQLKQVKGVGPLIALTYVLTLDNPYRFRRSRDVGCFVGLRPGRRNSGMSEPQLHISKEGDRYLRTLLVQGAHYILGPFGQDSDLRRWGLKLSKRGGKNAKKRAVVAVARKLAVLLHKLWVSKEVYEPLRNNRQAMAQVA

SEQ ID NO: 480971 - protein, 346 aa, unidentified
MSNHNAKNDVAVLGIDLAKTSFQLHGVDSLGVTVLKKKLTRKNLCEYIAQLPVCTIGIEACGGAHHWRRVFSKFGHAVHMIAPQFVKPFVKSNKNDAADAEAICEAVQRPSMRFVPAKSIEQQDIQSLHRVRSQAVARRTAQANQIRGLLMEYGLIIPQGISHIRKSIPGMLEDAENELTTMFREILSELYDELVHLDKRIKTLEIKLETLCAQNEDCQQLLTIPGVGLLSATALVAAIGDISAFKNGRELSAWLGLVPRQHSTGGKPTLMGISKRGDTYLRTLLIHGGRTVVRGADKHQDKRNAWITKLDERRGKNVCAVAVANKNARVAWAMLSNKSTYQASAA

SEQ ID NO: 480972 - protein, 315 aa, unidentified
MTSDVYVGIDVAKDTMFVAILPTGETWEERITEDGLKRLVAKLRPITPQLVVMEATGGYEAPIFEVLWKHNIPVAVVNPRLVRSFAKALGRLAKTDKIDATVIARFGEAVKPKPKVRNDQQEKILGDLVARRRQILRMIVAEGNRKKRAVGEVQKLIEKHIKWLNKALEEIEKKLEAYISKTVEWRERNEILQSVPGIGKIVAYSLMAELPELGKLNRKQIAALVGVAPLNRDSGNMKGKRSCWGGRASIRTALYMATVVAMRFNKTIKAFYERLCQNGKHKKVAITACIRKLLCVLNAMMKNHIRWGEFKPAET

SEQ ID NO: 480973 - protein, 313 aa, unidentified
MYYIGIDVSKKALSAYDGEHDLEFNNTEGLKAFKRHLKKRFPDFDKLGIIFEATGIYSETLKAFCALHQIKAFILNPKQSHNFAKSLGRRSKTDTIDARTIYAYRKLIPKEKIQVPVLNPEAKKLSGYLTSYQFIQKQRVSLSNHLESIQDKALLKLLKQELKRTQGLEVKLFVEIKAYIQEHPNLKDDFKRLLAISGIGEKAAFGLLTLFHTYQGTNRAQMTALAGLDPIQKESGTSVKGKAKISKNGNRYIRKMLYMPTLCAIQNNQKIHIFYNRLIDRHKPKKVAVIACMRKLLLVAHAIHRNQTEYVAI

SEQ ID NO: 480974 - protein, 424 aa, unidentified
MVALRSRREQLDDLSSLSKEVTVMDPQIRVGIDVGCKAHRVGIANPDGKVLEEFDISHTAAGFCDFFRRIDHHKQELDLPVAVAMEGFNGYARPLDRMIQEHGYTLYNVNNLKLARFKEVFPGAAKTDAIDARKILELFHLKDHLPLAKDALQKVVSAPLVNDKLKRLSRRRRQLVNEKVRVASRIQSDMQAVCPGLLAITNNANNLKFLRFLTYRDDLTQLARLQSTTLLKIPGVGQNYARIIQEWQRKASFSAEVEYVGPMIITDARRILELLDQVHILDEAMAALADQSELARRIGSIQGFGKTCIAELAGEIGTTERFAGERSLALYVGMSPLSKDSGQHHGSKCPRSVNHRAKAAMMTAVAHHIRCVPESRAYYDKKRADGKKHNQAIRALGRQLVRVLWSMLKNERDYELREVIPSVT

SEQ ID NO: 480975 - protein, 484 aa, unidentified
MNNTTPALPVLDPSAAAIDVGSEQLYTSIAGGPPKVFGTTTGELYALRDYFKEQGVRSVAMEATGIYWLCPYEVLEQAGFEVVVVNGKYVKNLPGRKTDMSDCQWQATLHAHGLLRPGFVPPEHIRRLQDYLRLRSDHITLAGSHEQHMQKALERMNLKIHDVISDLTGVSGLKMVEAILAGERNPVALIALCDRQIQKRKTDRLRAALEGTWKAEHLFALRQAYELWQFYQKKIAECDHQLAAVLQELVGPAEPPVAELPVAPAVPSATEASPAAQAVPADQPSPVPAAPPTAQPLPARKVPCAIKRGGVNAPQIAGLHALLLRLCGGKDPTTLPGIADYVLLQLLGEVGTDLKKHWPSEKHFSAWAGLAPGSRQSGKRRGSAPRHRNRAGRLFCVIARSVGRSVDKALGGFYRRIKGRRGGLVANLALARKIAELFWRLMVHGRAYVEAGLQKYEEKVAQTEQRLLQKLARKYNLVLQPKAT

SEQ ID NO: 480976 - protein, 363 aa, unidentified
MRFYKNQHQFYIGIDLHARTMYICVINNIGETVFHKNMECSRDNLELVTNTFGKDIVVGVECIFTWYWVADFCAEQGIDFALGHAYYMKSIHGGKTKSDKIDSEKIANMLRGGMFPIAYAYPKEKRAVRDLLRRRLFFVRQRAELSVHLQNTNHQYNINDPLTSSRMRSEVYRNTIPQKFTDPATLKMVNADLAMFQAYHDIITKLEFQIEDSMEVQDPVSYSIINSVPGLGFILSLTILYEIDDIHRFSDVGKFISYCRLVKCSHESAGKKEKGSHNKIGNVHLKWAFSEGAVLFLRNNERGQRWHDKLVQRYGKAKAMSIIAQKLGRTVYYMLRRKEAFNPDKFYGDVKIENKDSGGEHLA

SEQ ID NO: 480977 - protein, 408 aa, unidentified
MNPLYVGIDVSSKSNVIYLMLPDGAKHSCFSVANSQDGYSQMVKRILSAVTSRSLDTVVIGLEATSVYGDNLVFFLREDASLAPFNRKIHVLNPKQVKNFKEAYNDLPKNDYMDSFVIADCLRFGRINKEVYLGDYRYKALQNLTRARFFAVQNLVKEKQRFINVLFKKYSTMTQEKVFSDTFSTTALAVYEEFESAEALAAMDLQELTDFIMEKGKNRFPNPDAVAKAIQKAARSSYRLPKTVNDSINQVLSISITSIKALDAQIKEFNKAIEAQMELLPNVLISIPGIGPVISAGIMAEIGDINRFPGQAQLGKYAGLAWTQNQSGDFEAENTKLIRSGNRFLKYYLCEGALSLVRCDTEYSSFYHSKYKEVNRHQHKRALALTARKFVRLVFRLLKDNRLYRAAE

SEQ ID NO: 480978 - protein, 385 aa, unidentified
MRGNSFIPRDYDVFSGLDVSKKSISVTFTNHQGFIRSLNMPHKAEHLLKYVRKHFGDQKIAFVYEAGPTGYGLYDGLAAQAYPCLIAAPSMIPRAPGQRVKTNRLDSKALSENLRGGQLKSIHVPSPTYRQLRHLTQLRDVLVSELAGMKQRIKSLLLFEGIEFPPAPPGSQWSFLVKDKLRKLPCSGTVRFKLDQLLDSLEFNEKQVLKTITEIRRFCRNDPELSGCIKYLMTISGIGWITASQLLARIGDWRELKNIRQLAGFLGLVPTEHSTGERIDRGSITRTGNERLRSKLIQASWSAIRQDSELREFFRSVCRNHPREVASRVAIVAVARKLSVRISVVLMKQRPYEVREKVHSAPLTQEETSPQGTTRRLGEPGEKNS

SEQ ID NO: 480979 - protein, 409 aa, unidentified
MNKLFVGIDVGSRINAVYIMLPDGSKHSSFTVQNNLGGAQSLSKRVVAALKEYNISTVILGMEATSVYGDNLACFLREDGALGRFEKRIHVLNPKQVKKFKDAYPDLPKNDAIDAFVIADNLRFGRITAAIYSDDYRYKALQTLTRTRFSVVQNLTREKQRFMNYLFMKCSGLAQEKVFSNTYGSTALALIEEFETPDDIANMDVDQLVEFLVEKGKNRFPNPSEVAKAVQAAARGFLSFAKDVNDSVNQVLSISISSMRAMQEQIKALDKEIERQFENIPNTLTSIPGIGKVLSAGIIAEIGDINRFPNHAAVAKYAGLAWTQHQSGMFEAQNTRQIKSGNRFLKYYLCEAAFSIVRCDTEYRRFYYLKYKEVNRYQHKRALALTARKLVRLVFRLLKDNRLYKPSVA

SEQ ID NO: 480980 - protein, 382 aa, unidentified
MQSIDNVNPTIHLAIELSASSWLIAARVPGSEKPHLHRIDGGNTAALLALISSLRARVARRLDAAIGVICCFEAGRDGFWLHRLLTAHGITNYVLEPTSILVNRRARRAKTDRLDAIGMLRVLAAYLRGDRQSCSMVRVPTPEEEDAKRIHRERENLVQERLRIENRIEALLFAQGIRKRPSLRSWERDLANLRTGDGREMPRHLRAELNRLRRRLVTILELIREVEAERDELVVTTPQDRTSRKIVALCRIRGLGENFAAVLTREVFYRSFGNRRQIASYVGITPMPYQSGGMDRDRRISRAGNPRARTTMIQLAWLWLRYQPGSELAEWFRKRVGTLAGRTRRIAIVALARKLLIALWRYVETGVVPAGVEIRTETVVAA

SEQ ID NO: 480981 - protein, 359 aa, unidentified
MNFTSQRALQATKKTKKHSIKKDAVIIGIDTAKSVFQIHGVDEDGNVVLRKRVNRNQFMEFMAQLPAAKIGIEATGASHHWARELIKHGHDVRLMNPNKVKAYRDSDKSDRNDAEAICEAVGRKKMKFIAVKTLDQQGMQGLHRGRSRLVKNRTALVNQARGLLGECGIVMNKGIRVFRTELPTKLYEQAERIPELLGAMLQEMYSELQELDEKIEQFDKQFERITDADPMCRKLKKLKGIGSLTALALVSKIGDAHAFKNGRELSSYFGLVPQERSSGDTKHMFGISKRGDRYLRTLLIHGARSAVWSAEGKDDSLSLWINKIKAKSGPNVAAVALANKNARIVWAMMTRDEEYREAA

SEQ ID NO: 480982 - protein, 339 aa, unidentified
MQQVTTLGIDAAKNIFHLHGVDAHGKVVLKKRLGRTKVLAFVARLAPCLIGLEASGSAHYWARELTKLGHTVQLISPQFVKPYIQGNKNDPNDAAGICEAVSRPHMRFVPIKSVDQQDMQALHRIRERQIKARTALVNQIRGLLAEYGLVMPKGVAQVRQKLPFILEEAENGLTMLAREWLQALAAELQALDQRIRETDAQIQRVFECHEACQRLAQLEGVGPLTAPALLAAVGAASTFKNGREFAAWLGLVPRQHSTGGKPTLLGISKRGDRYLRKLLIHGARAVVRTVEGKQDGRSRWLQGLIVRRGKNRAGVAQANKTARIAWVILAKGERYRPAA

SEQ ID NO: 480983 - protein, 327 aa, unidentified
MNYIGVDVDSKYLVCQIQRGEKQFPVAQFDNNPPGHRKFIKWATKRHQPARVTMEATGVYSLPFALALHETANIDVSVMNPRAIKNFAVAQMQRGKTDALDAAAILEYNLRMEFKSWQPPREEVLELQHITRRIVQLNTELTRERNRHKAASRLGVIGRVVANDTAVNMRHLQRRIDTMAQASLDIVRHDPELNPKLELLMSVTGIAEKTGPRLLAELASLPHDMSGPQWVAYAGLDPRPYESGTSTNKPRRISKAGNRYIREVLFFPALVASQKDKHVKAFYEKLLSKGKKPMQVIVAIMRKLLLAIWGMFKNNSNWDGEKFSKIA

SEQ ID NO: 480984 - protein, 360 aa, unidentified
MEFCVMKLHQSVTQFNCGIDLHAKNMYLCVMDKEGKKLLHKNIETHDRECFLELLAPYRHDLTVACESTFNWYVVSDMCEDAGIPFVLGHAFYMKAIHQSKVKNDRADSETIASLLRGNLLPVGYVCRRQVRSVRDLFRRRAYLVRQRAALEAHLTEMGYLYDFKATSQDFKRRTGRFQAYARQLPDDFGVQMSAAADLRLIEALRVEILSIEKAVKRHAKGFDRELLDLLQTIPGAGAIISMGILYEADDFSRFADCGHFVSYCRLVTPLHESDGKVTGGGHRKSGNPYLKWMFSELNAACRRHSSELNAFAQRLVSRHGPRKASCMLTHKLGRAVFHIATERVPFNLEKFLGGPMKKR

SEQ ID NO: 480985 - protein, 392 aa, unidentified
MFYIGIDIAKRSHQAAVTDVSGNIIVKPFNFKNTAAGFTQFLSVLETNSVSKDNCVIGLESKGHYWYPLYFFLVEQKFSVKVFNPIQTAAFREITIRKVKNDNLDSIMIADFTRFGRYSETYIPSENMLALKNLSRFRLSVCDICGSLKKRTIVLLDLVFPEYSTIFCDIFGSTSKQLLEKYSTPDEFSEISTTKLANFILKASRGRNGREKAELIKTAAQNSIGISYAIDTFSFEIKQLIEQIEFMENQLSEIDAEMAKLLAESEYSVITTISGVGPTLGSIIVSEIGDIERFETSSKLVAYAGLDASVKQSGEFNSSRNKISKRGSPYLRRALWMAAFMSLQCDPALYDYYSRLRARGKSHRLATTAVARKLCIIVWAIMKSKQPYSPHI

SEQ ID NO: 480986 - protein, 357 aa, unidentified
MNRDTNTNANALKNAPSDPSSTPAATATAVPAPAPARAVGIDVSRDKLDVALPGTDAVQSFANDAAGVTRVVGLLSALSPALAPSYVVVESTGGLERPLVGALLEAGLPVALVHPGRVRYFAKGLGVLAKTDRIDALVLRRFGELAAPRLLEKRSRSEAELRDLVACRRQLCQTRAQQLNRRATTASKAALRSIDAVIAALDKQVESLERRVRELLDADDDFKHLDGLLRSVPGVGPALSATIAAELREAGHTDRRRVCALAGVAPFADDSGNTRGRRRIRGGRTAVRCVLYMGTLAAMRFNPVIRAFADRLKAAGKPGKVVVVACMRKLLTLINAMLRDGLRWDQLDVAKKLAPTG

SEQ ID NO: 480987 - protein, 346 aa, unidentified
MKKSTTIAIDLAKNSFQICKLVRDQVASEKALTNQKLKSWLQKQPSSHVVMEACGSAHHWGRFCQSLGHDVSIIAPKNVTPFRANQKTDKNDALAIAIAARQPNVHSVGVKTTDAQALQSIERVRQHLNDLIVATSNMVRGLILEFGIVIPKGVSAFNKTIPQILENGDSELPDILRPYLHHMYNLHQGLSEQKVRVEKELSYYINRHSECKKLLELEGIGPINALGLYLALGHTGRNFKNGREASACIGLTPKQYSTGGVTTMLGISKKVANKRLRANLIQGALSVVRLLQYREPKNGKESWLKALIVRAGLRRAAVALANKSIRTAWSMLKHDTQYSTSFKHAA

SEQ ID NO: 480988 - protein, 356 aa, unidentified
MTIIKQSAGIDVGKNDFYIRLLRQEAGQDDFRKHRGVKKFLNTPAGFTELDTWLKKYTIKGLSLPIAMEATGVYHEELAYFLKDKGYRVSIELPTKIKAFAKSLNQQSKTDEIDADVIAQLAFERNLREWTPPTKSMRQLKALTRQHQAITEAKTVTKNQLHAVSHSAFPMKKVLKRYEQIIKLQDEQLDMIEKEIKRLAKGDAALDRLINLLTSIPGIALKTASAIIAETGGFQLFASRSQLIKYAGMDIKSKTSGTSIRGRSTMSKAGNSRIRRALHMPSLQFVNRDDMIGQLYSRVLDRTKIKMKALVAVQRKLLIIMYAVVKSGVPYDKKLHRARCQNGVGEPELAYSDSMS

SEQ ID NO: 480989 - protein, 391 aa, unidentified
MFYIGIDIAKHNHEVSIIDDNGKALGKSFSISNSQKGVDKFNTYLDSFNITSENCVIGMESTGHYWINLFSFLVNLKFNVFVINPIQSDAFRKMYIRKTKNDSKDSYIIAQIMRFGEYSSSNISDENIFALRQLSRYRTSLVDECSSWKRKIISILDQVFPEYSKLFSDTFGVTSKELLSKYPLPENMLELSTEELTNLLNKASKGKLGNEKAQEIKESAKNSFGVSFAKQTFSFQIKQIINQISFIESQLKELDNEISNMLKELNSEITTITGIGDTLGACILSEIGDISRFEKASQLVAFAGLDVAVKQSGEFTGTEMKITKRGSPYLRRAIWLAATVASFKDPALSIYYKSLIARGKKHLTAIGAVSRKMCNIIFSVLKNKKAYTPNI

SEQ ID NO: 480990 - protein, 334 aa, unidentified
MEFRNFIGIDISKNTFDFALVKDNNVSLPISDEVSNDPSGIVKLEEFLKKQDLNMEETLFCMEHTGIYCRLLSHYLTERKYHVWLEMPVQILRSLGIQRGKNDCLDAKRIAEYAYLKKDKAVLWQPPREVVIQINDLLTLRDRLIESRKSLKQPIKEFKDAGFKDTAKLIESRCIHTLKAIDKEIQQIEKDLDDLINKDSNLKKLYKLATSVPGIGKITALTMLYFTNEFKLYSNAKQLACYCGVVPFEHTSGTSIKGKSRVSHFANKRLKKLLHLVAMSTLSSNREISQYYARKVGEGKNKMLVINAIRNKILQRLCAVIKRGTPYQLEYHFA

SEQ ID NO: 480991 - protein, 327 aa, unidentified
MMYLGIDVAKAKLDCALLNPLTDKRKTKVVTNDSSGFKLLAEWLVKQNVALNEVHAVLEATGVYHEQAALWLTDAGLLVSVANPAQVKDFARGLAVRTKTDGVDSVVLARYGALLKPQPWQAPPLEVRELKAFLARLEALEADLRRELNRREKATVSGVPKLVQESLDTHLALLEKEIARLQAAIDDHIDRHPNLKADRERLLSIPAVGEKTANRMLAVLHSRKFKSAEQAAAFLGLVPVEHQSGSSVQKRPRLSKNGDAKTRAVLYMAAIVATRYNPDVKAMYERLCARGKAKMAALGAAMRKLVHLCFGVLKSQKPYQPHYVKMS

SEQ ID NO: 480992 - protein, 399 aa, unidentified
MLAVGIDISKSKSVAAILNQDGSMHTSPFEFHHTQPELDAFIKYILNSKQSATILMENTGHYHYPVLKAFQEAGLPVCMVNAYQIKKFGDMDLRKAKTDKKDAVRIARYALEKSYSLVPYTSMEQKYEDLRFLARQYNQRMLTLKTNKVFLLNLLDETMPGITNILPLTTRTPETSLSVLFINRFKSYDRIKKMGKSRFLDAFEKIARKSRNRQTKTYGLAIYEAALRNITTRGENEYTLAAQDQCLELVCESQKAADSIILKMKTLAETLPEYAVLRSMAGVGNRLGPLILAEIGDIRRFHSGKALNAYAGNDAPPYQSGTFESHNRHISKRGNAALRKYCFEVMQALKLTRPQNDPVYLFLLKKEQEGKPYNVAKMAGVNKFLRIYYARAMETLKQQ

SEQ ID NO: 480993 - protein, 346 aa, unidentified
MKITTIGIDLAKEVFQIHGVDEHGKIVLRKQLRRGKMAKFFANLEPCLIGMEACGSSHHWARKLGEFGHTIKLMSPQFVKPYVKTNKHDMADAEAICEAVSRPNMRFVPIKNIEQQAILSVHRARQGLVKARTAQANQIRGLLSEFGIVMPQGIRSISKRMPDILEDAENGLPGILRKLLERLNDHLKELNRQAEELELQIKLWHKENEASQKLEAIPGIGPITASAIVATVGNATEYKNGRQLAAWLGLVPKQRSSGGKQLLLGISKRGDTYLRTLLIHGARAVIRFAENKAEPESWLRKLIMRRNKNIAAVALANKNARIIWALLAKDTTFHPNHASAANAAVA

SEQ ID NO: 480994 - protein, 351 aa, unidentified
MSHKTAATVAHTIGIDTGKNTLHLIGLDDQGAIVLREKIARGRIAARLANVPRCLIGIEAGMATHYVARELGALGHDVKQVPPAYSKPFRQGHKNDFRDAHAIAEAVQRPSTRCVPVKTDDQLDLQALHRVRSRLVGQRTAVINQIRGFLLEHGIAVRQGLRFLRQQLPDILGKRGDVLSPRMTRIVEDLSGDWRHLDERIKHITEEIEVLAHGSESCRQLMTAPGIGPLIASAMVAAIGNGTAFAKGRDFAAWLGLVPKQMSTGDRTILGRISKRGNRYLRTMIMQGARVILLRPANWAKHSFGPWLTAAAQRLHHNVLATALANKLARIAWTVLAQGRSYEARVEPKVA

SEQ ID NO: 480995 - protein, 350 aa, unidentified
MISRATVTSNESNIIVRMGVDLSKNVFQVHGVNNHEKVILRRKLTRDQFPKFTANLSPCIIGMEACGGSHYWSRILESQGHTVKLMAGQHVKPYVKNNKNDMRDAEAICEAVSRPTMRYVTAKTIEQQDIQSLHRIRQEAIKMRTMQINQIRGLLLEYGIAIPIGSTKVRKEIPLILEDADNNLSMLFRVQLSGLYDMLCVLDQQIECVTDELEKIVQTNDYCKRLKTIDGVGTLSATALYASVGTGNQFKCGRDMAAWLGLVPRQQSSGGKTVLLGISKKGDRYLRSLFVHGGRAIVALRDKKENKRNLWLRELVNKKGANKASVALANKNIRIAWAILQSGEEYRCAA

SEQ ID NO: 480996 - protein, 459 aa, unidentified
MGNRKEKQEAAKIDWKALDVVHRDAAGIDIGGKEHWVAISPERDKQPVRCFDCFTSDLEQMADWLAARGVRSVAMQSTGVYWMPVFEILQPRGMEVYLVNARHTKNLPGRKSDIAECQWLLKLHTFGLLNNSFQPTDAVRAMRTLWRHRGGLVAQASSAIQRMQKALVEMNIQLRNVLSDLSGASGMAILQAILAGERDPRKLAALADPQVKASKEAIPKSLQGNWRPELLFVLGQEMEIYRGCQDKMAACDRQLQKQLRDMESKVDLRKQPISPRPKRKRGGRGNSPKFDLRTELYRLTGVDWSQVDGIDVQVAQSVIAEVGVNMQAFPSEKHFANWLGLCPTNETSGGKVLKRRTPKVVNRAKVAFRQAASTLIRSQSYLGAQYRRLRTRWGAPKAITAMARKLACLFYRLLTKGQQYVDRGAAYYEDRHREQQIRSVLKRAQQLGLQVIQSERQAA

SEQ ID NO: 480997 - protein, 345 aa, unidentified
MRDYAGLDVSLEETVICVVDETGKVIRELRAASEPDALVETLAATGLTFERVGLEACSLSSWLHQGLTRAGLPALCIETRAAKAAMGAMPNKTDRNDARGLAQIIRTGWYRAVHVKSTPCRSARALLGARRTMLNKQHDIENAVRAVLRDVGLKLGTPSRKLFAGQVRELASVDAAISDIVEPLLAVLDTMARQIEPLTKRVLDAVRVEPICRRLMTVPGVGPLTALAFRATVDQPERFRRSRDVGAHLGLTPRRYQCGETDIQGRISRCGDELARTALYEAAHALLTRCQKWSTLKAWGMRVAQRRGMAKARVAVARKLAVILHRMWSDQAEFRWSTAPALAAA

SEQ ID NO: 480998 - protein, 406 aa, unidentified
MDLVFPYAAAIDIGKKKSLACVQTPQHKELRTIGMMTSDLLDLADWLAAHKVTHVAMESTGAYWKPLYNVLEAYDFELWLVNARDVKNVPGRKTDVKDAEWLVDLLRHGLVRRSFVPERAQRELREVVRYRRKLIEERTREFNRLEKVLEGANLKLGAVASTLTGKSVRRMLWAIVEGQDDPERLADLALGRLKEKRPALIQALRGFVGEHVRFMLSEQLGHLDELDGRIARLSAEIAERLRPFEAELVRLETMPGWGRRTAEEVVAEIGFDMSRFPSQAHLSSWGKMAPGNNESAGKRKSGRTGKGNRYLRCALVEAARAAGRRKGTYLHAQYHRLSARRGKKRAAVAVGHAMLVIVYHILRDGTAYQDLGANYFDERKETRVVARLQRRLERLGYAVSLSKQAA

SEQ ID NO: 480999 - protein, 344 aa, unidentified
MEAYAGQQFVGIDLHRRRSVIVRTTASGDPLETVRISNDVDSLIKVMAGAGVSPEVVLEATYGWYWAADTLADLGAVVHLAHPLGVKGFSYRRVKNDVRDATDLADLLRMGRLPEAWIAPPVTRELRELVRHRAKLVAIRSGCKCEIHAVLAKCGIQVLMSDLFADAGTALLERLDAPAPYLARVGSLRRLIDDLDVEIDLFARLIRGRLAADDGYRAVQTIPGIGPTLGAVFVAEIGDVHRFPGPTQLASWAGLTPKHHESDTHVHRGRITKQGSRLVRWAAIESVQALGPGTGAGRLKHRVGDRRGRNIGKTAAARQQLGYVYYALRDGHVRSLTRRPRVAA

SEQ ID NO: 481000 - protein, 328 aa, unidentified
MSINVGIDVSKGSLDVCLLSDQTKSGQRYRKFKNDKGAHSDLSSWLLKTAKCKAEDILITMESTGIYHESIAFYLHMAGFLVFISNPGKAKKFSQSLGLVHKTDKSDSYMLALYGGAQGSRAHLWTPDSPNVRNIKSLSRRLSALEKDRLRESNRLEASEIADAHERVICSIKSIISLIDEEIASIEEEIDLAIRSDPSMNKNHQLLQSIVGVGKVMSRELVYLFSAKQFSNAKQAAAFVGLIPKLNESGNLKGRTTLSKVGPSRVRAKLFLAAVSASTHNPDIKAQKRRLLAAGKTKMQALGAAMRKLIQICFGVLKTQTKYQPKTI

SEQ ID NO: 481001 - protein, 571 aa, unidentified
MGTKKKRAPASTAAVQEASPAERTRQARQLLGRLSVVRLRRLLVEKKVLYRSKCKTKSAMIHALQGVVEVSEIESIVEQLPAPLATPVQEASPVQANLDLVLRAEGKRWDDPIMAIDVHKEPLAWAVATPEGIEDEAMTENNTGGIGTVIAACRNHGVKMVAMESTSEYWLLPYWLLTEAGIPVLVANPLQVKAVMGVKTDKLDARRIAFALRDGRLRPSVACTREEYALRKDMRQLVEQVEYATQCEQRIQQIFHKADVPDLVGNAMNSQRGRSILVSVTGCRTRDELLGVVTAEYSMYKGRITDPVELEIVTDTYWDFSNRVRANGDMERLAMELDSFLAHEDKALVLERNGIMYAKQHPAFLQDLKYLLTFEGIGRRTALPILAELVNIRYFPTAAKLAKWTGLVPGVYQSGHRKRANGKIYKGGNKYLRRAVWLVAQRCFGMRENIIKQFIQHLIRDKHKSKMVAITEGAHKVLTIIHAMLTRQEPFTVIANEEVIKRQERNTKRKWSEVERMMMGLAEEEIVPRLVPRLKARLEACTNMERIVAELAASLLGNIDADQIVSEPGGG

SEQ ID NO: 481002 - protein, 379 aa, unidentified
MDIQPVFRCAVGMDVHLTTVSVCVIVAEPGSEPEVHRRQFGAFQRDRRAMADWIAGFAPDVVVMESTGIYWKSPYVALEKVGIRALVVNAQHVKKVPGRKTDISDAEWLAMLARAGLLRGSFIPPESLRNLRQLSRYHNRTTAMLAAEKNRLVRVLSDAGIRLSAVVSDAHGVAARAMIDCLLDGGTPEQALVYAGRLQAPREELLAALQGELSEHHLLVARMIRRHIDVLEAQLADLERQLFDALQPYEAAFQLLLTIPGIDRLAAAKLVVEIGLDMTAFGNAGRLAKWAGVCPGNHESAGKRRTGRTIPGNRYVRAILCEIAWAATRTTSQFKSRYQGLVIRRGTKKAIIAIAHKVLKTVFVVLSRGVPYQDSTVDY

SEQ ID NO: 481003 - protein, 386 aa, unidentified
MKKNSTAKKSPKKALAKGQKKQICQLAAKQRLTIGLDLGDRTTRYCILDEAGDVVSEDQLPTTKTGLESLFAKMPSSRIALEVGTHSPWMSRHLSGMGHEVIVANAHKVKLITQSVHKNDRIDARQVARLARVDPQLLSPIRHRGEEAQRDLAVVRARAELMEARTKLINGARGLVKPMGERLKPCDADQVRVGLAEGLSEEARRVIEPLLKTVEAMHEQIGKYDEQIEEIAKRYAEVKLLKQVYGVGVLIGVTYVLTLEDAERFAHSRDVGPYLGLTRKQRDSGESQPELGISKAGDGLLRSLLVQGAHCILRKGAPESDLRTWGLEKAKGGKRAKKRAVVAVARKLAVLLHHLWVTGEVYDPQYNRKAAEAAAAKAQGKAKVAA

SEQ ID NO: 481004 - protein, 330 aa, unidentified
MFDHYIAVDWAQSNMAIGRMTKESSQVKVIDVPADLKELKLYLSRLHGKKILTFEETTTSQWLYVELKGCVDEIVICDPYRNHLLSEGAKTDRLDAERLAQLLRAGLLKPVFHSTDQLISLRKLASGYEDLVKAGVRLKNQRAALFRAQGKAKKEKDLEDPAEVFVLRGIVQRIEAYETEKKRYESEIQKLGRKHAIIRHLDQLSGIGAIGAFKIASRVVDPKRFSDKGRWLSYCGLVRHEKLSGGQSYGWRGSRYCRTLKSVFKTAALSVIVSEGTGPFKDYYRFLLEKKRYAEHQARHALARRIAVVAWGVMKSGKVFDAERILKKRA

SEQ ID NO: 481005 - protein, 414 aa, unidentified
MEVLYPRCAGLDVHKETVVACVRLVVDGTVKTEVRTFPTTTAGLCALAEWLVENGVTHVAMEATGVYWKPVWHVLSDNPLTVILANAAHVRNVPGRKTDVNDATWLAELLAHGLIRASFVPPRPVAELRTLLRTRKQLVREHASHVQRLQKTLEDANVKLDSVISDIMGKSGRAMVEAMIAGETDPHKLVELADRRIKAPRATLIEALTGRIKAQHRFLLRLHLGQIDALDRATAQIDAEVEAQLGPFRDAVKLLDTIDGVDVLAAEVILSEIGLDMGRFATDRHLLSWSCLCPRNDESAGKRRSNKIKKGARWLKATLIQCAWSASRMKGRYLSALYHRLRGRRGPKKAIVAVAAAILTAAYHMLKTGTPYRDLGPNHLEPRSKSALTSRLLKRLAGLGYAVEIKPLAAPDPA

SEQ ID NO: 481006 - protein, 354 aa, unidentified
MIIIGADYHPGFQQIAFVDSDSGEFQERRLQHREEAEKFYRELAAQRMEVRVGMEASGHARWFERLLAELQIELWIGDAAEIRTRRVRKQKTDRQDAQLILKLMLKNDFPQIWVPSWENRDLRQLLWHRHRMVQARTRIMNQLQAVALNEGLRCKKRLWRKHGRQQLESFRLAPWASRRRRDLPELLDRLNPTIAELSQAIEQEAEKFPEARCLMTHPGVGALTALAFVLIIGRADRFQCGKQIASYLGLVPLEDSSGNRRRLGHITKQGSSMLRFLLVEAAQVTARNLPEWRSKYFHLAMRRGRKIAKVAMARRLAVALYWMWRKGWDYERVKKFGSHAGQLEPGHGVQSNTE

SEQ ID NO: 481007 - protein, 387 aa, unidentified
MYFVGIDISKFKHDCAVIDELGDVVTPSWSFSNDCGGFSLLKELLANLDSDIKIGFESTGHYGQNLKLFLESNSFTFMEFNPLLISRFVHSKSLRKTKTDSIDALIIAQYLMTVEYKPYPASFYHMDKLKSLTRFRDSLIRQRSRQLVELTNVLDKIFPEFKSFFKGRFSVTAMYILANYSTPEKISNMNSRSYDALRRLSRGKFTMSSFVQLKMLARDSVGHCNDYLLHEMGVLLDIYNQMDSRIQELDEQITACIKGIDPPILSIPGIGALSAAVILSEYGDMNTFDSPAKLLSFAGLEPGYYQSGQSEHTGRMVKHGSSHLRCALMNCCLPLVKNEPVFAEYYAKKRTEGKPHRVAITHVAKKLLRVIYTLQTKGIPYNADLIR

SEQ ID NO: 481008 - protein, 421 aa, unidentified
MPTILCVGGDIHQDELHLRATDKTDGHEVGQRLTVKNNRPGADQAIAHLVQLLTQHGYTHLEFGLEATGLFWLPFYVYLQQSTALTPFQPTWVCFNPKLVAKFKEGVTLSEIKDDDHDALAVAERLRFGHLPVSYVPSSEWLALRMLTRYRYRLSRQIAQEKLRALTRVFLKASEWHRGQPFSDVWGATSATLLTEFTTAEIAAMSLSQLTDLIQEYGRKHFDDPQATARQVQRTLHNSFPVTPDLDAALTVVLQVAWTHIRDLEKLMRRLDRKIAQRMERITNPLLSVQGLGPVITAGILAEIADIHRFPDEPQLAKFVGLVWRKHASGQFVAEETRLVKAGNVYLRYYLIEGANLMRQHNLEYQAYYRRKFAEVPKHQHKRALVLTARKLVRLAFALLTKNQPYVRPQAVQSQEATPVQ

SEQ ID NO: 481009 - protein, 324 aa, unidentified
MVQPVLGIDVSKRTLDVSIVVRNKPRHRQFANSDEGYRDLLAWLKQGRIGPVHACMEATGRYGLAAALALHDAGHRVSLINPAQIRDFVRSRLGRNKSDKVDCAHIRDYGAMFAPPAWTPPSPALRRLCELQTMRAGFVASMVEWKNRAGSCVGDATASGLAQATIKHFEAQIAAVNAAIAETIEHDDDLRGKRDLLLSIDGVGEILAAVILAELPSPDVISTSAQAVAYAGLNPRRFQSGTSIDAPTRISKIGNATLRSALFMPAMSAMQYNRAVAALVARLRAQGRLKGKQIVVAAMRKLLVLCFGVLKTRKPFDPAIAMPS

SEQ ID NO: 481010 - protein, 456 aa, unidentified
MARRSKAKGTRRRTKLHIIYTRAAGIDVGSTFHVVAVPPELSAEPVQTFQSFTGDLYRLAHWLVDIGVTTVAMESTGIYWIPVFDILEAHGLEVLLVNAQHVKTVPGRKTDVNDAQWIQQLHTYGLLRGSFHPAQDWSALRVYLRHRERLVEYAAAHIQHMQKALMQMNLQLHHVLSDITGTTGMKIMRAIVAGQHDPAVLATYRDARCKASAETIRAALTGHYRREHVFALRQALELYDSYQARIEACDQEIQSTLESLQHDEISMDTLPAARHKKRQSHEPQFDVREALFRVLGVDLSQIDGFSAYTALKLVGECGMDMSRWPTEKHFTSWLTLAPGNKIAGGKVLNTKTRRSANRAAAIFRLSAMNVGQTNTAFGAFYRRLASRSGKAKAVTATARKLAVLCYNTLRYGMAYEDPGAAYYEDRYRQRVLTGLHRRAKQFGYKLTEVSALEGVS

SEQ ID NO: 481011 - protein, 333 aa, unidentified
MSSVTWFVGLDYHQAFIQTCVMDASGKQVLNRRCANSVAALQDALRPFPGELSLAIESCCGAADLAEELVAAGWQVSLAHAAYVHKLKQSPDKTDWSDARLLADLLRVGYLPRVWLPPHDLRQLRHLVRHRQQLAQSRRAAKLRVTALLRAERVAFLVSPWTKVWKQAVRECRALGEQGVWVVNQLLDEVERLQQKIQEAEQRLEELTADDPFVQKLREQSGIGLVTAVTLRSELGTMSRFRSGKQLARFCGLTPRNASSGLRQADAGLINAANTALRSVVIEAAHRLMRFDPRWSQLGQSLRRRGKPGSVAAAAVGNRWVRWLFHQLKDIAV

SEQ ID NO: 481012 - protein, 377 aa, unidentified
MKRILRIGMDVHSTNYTLCAMEPIIGEDDRIFANIQVTPDYKNILMFIENLKMKLGLDNEYDIQCGYEAGCLGYSLYNQLTAAGVKCVILAPTTMLTPQGQRVKTDARDALMIAQCLSYGGYHAVYIPTEEDDSVKEYLRMRDDHKTALKKIKQQINALCLRHGYHYEGTKWTIKHAAWLRKLELSPLYRETLDEYMASYDEQTAKIERFDKRIGELASGESYEEKAKKLGCFLGIKTHTALSLLVETGDFSRFAKGNTYAAFLGLAPGESSSGDKVNRTGVTKAGNRHLRQLLIEAARGICKGAVGHKSKELRARQSGNTAEVIAYADKANTRLRSRYYKLIRHGKKKNVAVAAIARELACFVWGMMTDNTGMKMA

SEQ ID NO: 481013 - protein, 344 aa, unidentified
MVYVGLDVHKEFCQAAVIDDSGRVLSNEKFSSTQEELDRFLARFKRARFALESTGIWEFIYEGIEKKGFDAQLAHPLKVRAIAEAKVKTDKVDAETLAQLLRADLIPRSWVPSKDVRDLRQLVRQRAYLVKQSTSLKNRIHAELLRRGVRRPEKFKEPFSLKSIDWMRSLGLPTVNSCLNCLENVQAQIEEINIELLDEYNRRSDAQLIATVPGIGFYGALLIHAEIDDIKRFSHPEKLCAYAGLVPTGSQSASSVHYGAISKDGSSYLCWMLTEAVHTHTHCEPGSRLSRFHAKVARRRGKQKAIVATARKLLLIIYWMLWTKEPYHCHGFNPVFPPARTSAT

SEQ ID NO: 481014 - protein, 312 aa, unidentified
MDAVIVGIDVSKDRLDVAVRPTGESFVVSRSGAGIDDLVGRLLALAPKLVAIEATGGFETIVAAGLAGKGLPVVVVNPAQVRSFAQALGKRAKTDPIDAAVIAHFAEATKPTPRPMPDETTRMLADLVARRRQIVEMMAAEGQRARRVTDNRLKKSIARLHKALQKELTELDASIDDHVRGSPVWAEKEDLLASVPGIGKTIARTLIAELPELGQLDRRQVAALAGLAPWTRQSGQWRGKSFIGGGRKSVRRVLFLGAMVAARHNPILKQFRDKLVAAGKPKLLAIIAVARKLLTILNAILRDQTPWNPKNA

SEQ ID NO: 481015 - protein, 305 aa, unidentified
MEHTICVGIDVAKDHLDVHVRPIDESFRVTHDEAGVVTLLARLRTVTPTIVVLEASGGYEVALTATLASAGLPVAVVNPRQIRDYARAVGQLAKTDRLDAQIIARFAEAVRPEPRPVPDAQAQALGELIARRRQLVDMLAAEQNRRRLLRDRGLQRHVDAHIKWLEEALRRLDHDLTTLVRSTPAWREADDLLRSARGIGPVTSCTLIADLPELGRLDRRRIAALVGVAPFARDSGVFRGRRMIAGGRPHIRRVLYMATLAAIKHNPVIRAFHHRPSKVAITAAMRKLLTILNAMLRDRRPWQPA

SEQ ID NO: 481016 - protein, 408 aa, unidentified
MRIIGLDIHRVFAEAVALDNGELRRLGRIGMTRNHLEAFARTLCLTDHVVVEATSNATAVTEILAPYVARVAVANPLQVHLIAKAKIKTDAIDARVLAKLYAAGFLPEVWIPDAATLARRRQVTRRTQLVRQRVRLKSIVQSILHANLIPRCPHADLFGGKGRAWLRAQYLPGDEQEAVEQHIQEYDRLTEVLKGVERDIARAALADPNVTRLMTIPGIDMVVAVGLMAAIGQIERFSNPGKLAAYIGLNPSVYHSGDGAAHHGRITKRGRSNARHLLVEAAWQTVRSPGPLRAFYHRVRAKRGNHIAAVAVARKLTVIIWHLLTKHEDYDWVRQALHAKKIRDLELRAGYPEQRGQRGRSYDYNLPHRRRQEGARAEQAESAYRRMTEGWRRTGPRRSTGAAIEERQ

SEQ ID NO: 481017 - protein, 355 aa, unidentified
MEKAYDGRQVVGMDLHRRRSVLVRMTEDGRRLGTSRITNSPQELRKEIARAGKAPKVVLEATYGWYWAADTLEEAGAEVHLAHPLGVKAFSYRRVKNDERDSADLADLLRMGRLPEAWISPHEVRELRELTRYRQKLVHLRTSCKDQVHGVLAKLGVPVTCTDIFGKAGSAWLDGLRMPQPYGGKVTSLRHLAGELTTEITMLGEVIADLLAGDRGYQVIQQLPGIGPVLAAVITAEIGDVTRFKNAGQLCSWAGLTPRHRESDTKVARGHVTKQGSRPLRWALTEAIQRIPRDCAIGAVKDAIIARRGKEARNIAKVAAARRLLTLVFYGMRDGQIRCLSKAPGNPPATPAAAT

SEQ ID NO: 481018 - protein, 338 aa, unidentified
MKRYLGVDLHWNCFTVHTRQEDGSGESREWSIRGLKAFAKMVSANDAVAVEATGNVRLFCEALKNRGCRVVVVNPHQFQVISRSVKKTDEHDAQVLAEFLAKDMLPEVRMKDDAHARVASLAQTRDKLVKLRTTLKNKVNNLLAARGILIRKESLASEKGLAEVLAAPVRELERLELEILVGAIRHLNESVKKIEGLLHDQGPKLPGWENLTSIKGIGETGASILLSAIGRIEDFADEGKLAAYFGIVPRVSNSNETERSGRITKRGCKLGRTALVQCSLIAIRYSPYLRAYYERIAARRGTGKAIIALSRKFLGIIYKTLKNNWIFEDFTQFVRVNG

SEQ ID NO: 481019 - protein, 388 aa, unidentified
MNRILKIGMDVHSTNYTLCAMEPTIGAEDRIFGEIQVAPDYKEVICFIESLKLKLGLADNYSIECGYEAGCLGYTLYHQLEGAGIKCVILAPTTMLTQQGQRVKTDKRDARLIAQCLCYGGYHPVYIPTGEDDAVKEYLRMRDDHKLALKKLKQQINAFVLRHGHQYTGTKWTIKHVSWLNKLELDPMYRETLNEYMASYEEQEAKIERHDKRIEEIAAEARYQENAKQLGCFLGIRTHTALSLIVETGDFKRFAKGNTYAAFLGLAPGEHSSSTNVNRLGISKAGNSHLRCLLIEAAKGICKGAIGHKSKELRARQSGQSAEVTAYADKANTRLRSKYYRMIRHGKKKNVAVAAVARELACFIWGMMTGNISIASVAGTSAPAASQG

SEQ ID NO: 481020 - protein, 427 aa, unidentified
MPYCIAGIDVHKKMLAVAVADVAIEGDWRFERRQFGTSPSQLRVLAEWLIAREVEEVVMESTALYWRPVWETLERRWQPTRRPRAEAGPTSGALHLAQAQSNHGPRGRKKDFPDAERLVKRLVAHELTLSFVPDVTQRLWRTVTRRKYQLTCNRVQLHNRLECLLEEAHIKVSTLVSDLLGLSARRMLRAVASGATDPAAVVALGSPRLHATPEQLRDALGACTELHPVYRRLLSMTLDELDVIETHIRQLDEELASLLREHQGAVQRLAAVPGLGVDSAQQIITEVGPMAATFLSAKRLASWVGACPGHDESAGINHSRRSPNGNRQMRRLLNQAAHAAVKTKGSIFELVYRRLVVRLGHAQAIGAIAHRLCRLVWKILHDGVIYEERGPAVTKARAQRRAAKMIRELRNLGYRVEPVLAAGSVRA

SEQ ID NO: 481021 - protein, 365 aa, unidentified
MAEITRAPLARVGVDLSKRVFQVHAVDRAGRVLLAKAFAPDRFFAWCAQLPAGCQVTTEACGGAHHVARRLRLMGLDARLVAGHFVTPYRMAGRSGKNDANDAAAICEAASRPHMRFVPIKTAEQQGQLAVHRLREGFKEERTALINRIRGLLAEFGLAFPQSPEALRSNLGDVIEDASNELPSVARLALQRAHLHWIDIELQMAWCDQRIASHVRSDERARKAAKLQGVGPITASAVAASVGDLAQFANARQFGAWLGLVPSQNSTGGKASLGRITRRGDVYLRTLLIQGAKSAVMSAGKRSDRISRWLVQLKERAGWQRAAVALANKNARILWAVLTRDAAFDPDHVPEPPPARCCPRPQPAA

SEQ ID NO: 481022 - protein, 319 aa, unidentified
MNSIIVGIDISKETFDAAVLINNKVQTRKFNNSSEGFNKLVTWLKSRGTGHICMEATGIYWKNLAKYLYDYGYKVSVVNPARIKGFAMSKLSRTKTDKADSVLIADFCKAMKPEAWYPQPLYIQELQQLVNRLNVLIKHKTQETNRLEGASKAIANNIQMHIEFLETQIKEIEQLINDHIKNNKDLHNKAMLLESIPGIGAKTQAVVLAFLADIEKFSSAKQVVAFVGLNPKHRQSGSSVHGASRISRTGNSDLRRSFYMPAMSALRHNCIIKQFFQCLFDTGKPKMLILIASMRKLLHIIYSVLKHNSPFNPNVSIKF

SEQ ID NO: 481023 - protein, 355 aa, unidentified
MDNTKYIGMDVHKETLSIAVLDLSGKLVMESVIETKAITIIQFIRGLHGDLHVTLEEGTWAAWLYDLLRPYVHEVLVCDPRKNALLKAGNKSDQIDARKLAELLYLNKLTPVYHGEHGVRALKELSRSYLTISGDVARVMTRLKAVYRSWAIPCAGKQVYAPRYRDEWLGKIREAGVRRRAEFYYQQLDELRALRQQVRRELLAESAKHQASKLLCQIPSIGPIRAAQLIAILQTPNRFRTKRQLWAYGGLAIETHSSADHRYVDGQLRPSKRPVSLRGLNRNHNHELKNIFKGAAIIAATKAGPFQEFYAALVAKGIRPEMARLTLARKIAAITLIVWKKGVSFDAQHLKPQTA

SEQ ID NO: 481024 - protein, 350 aa, unidentified
MRIHAIGIDLSKTTFHVVGLDEKGAVVLRRKQSRKQLLIYTANLPSALIGMEACGGAHYLGRALEAQGHQVRLMPAQYVKPFVKTNKNDYLDAEAIAEAVQRPTMRFVPIKSDEQLDLQTLHRVRDRWVARRTAVMNQIRGFLMDRGLTVRRGPNYLREVLVPVLDDSNALFSGRIRWLLRELQAEWNELETRIEEVTGQIEAIAKENEECQRLMEIPGFGPLVSTALTAAVGNAATFYKGRDLAAWLGLVPRQHSTGGKTRLLGISKCGSEYLRRMMLHGARSVVMHVARKKSALGAWVEQLSARTHRNVAVVALANKMARIAWVILHKSERYRPAALAPVSLSPAGAM

SEQ ID NO: 481025 - protein, 402 aa, unidentified
MQVDDIDVFIGIDVGKSEHWATALTTAGECLHDRPLPNDEARLREVYEHLGEHGRLLVVADQPATIGALAVAVAQDMGITVGYLPGLSMRRIADLSPGSAKTDQRDAAVIASAARTMPHTLRSITSSDEDAAALSMLTGFDLDLARQVNQVSNRIRGLYTQIHPALEGVLGPWLEHDSVLEVIATWPTPAALRKAGRARINAKLKANGCRRHAAWAQAIVEALSKQTVTVAGTDAAGVVLPHLARQLIALHTQRADIAAQVEALVEAHPLYPVLTSMPGVGVRTAAVFLAGTLGKTFTTGAHLASYAGLAPVTRRSGSSIRGEHVSHGGNKRLKRAMFLSAFASLRTDPVSRTYYERKRAQGKRHNQAILALAHRRILTLHAMIRNGTLYNPQPAQPLTTTA

SEQ ID NO: 481026 - protein, 343 aa, unidentified
MAQSNLIAIDLAKNIFQIAQFQGSKLKSNKQASRRALLELLVKAKPSVVAMEACASAQYFARTAQSFGHKVMLLDPLFVKAFRQGQKTDANDAIAIAIASKVPNVRTCKILSIEEQALQSLSKVRALADKQKIQLSNQIRGLLLEFGIVINQSEAAFKAAIPDILEDAENTLPLELKHALALTYALYQQQCDNKVELQKQIERIVKQNDGCQRLMALEGVGPITAIELLSFLGDTTQFSNGRSAAACAGVTPLQHSTGGKAKIGCIPKRRGGALRRNLFLGARSIVSKLKNREASTEKERWIKSLLIRKGVKCAAIALANKTMRTAYALLKKGTNYEPTALTA

SEQ ID NO: 481027 - protein, 290 aa, unidentified
MLIIGCDFHSRFQQVAMVDTETGELVERRLEHGNGEAKKFYAELHKAVRVGMEATGYAQWFEQMLARLGHELWVGDAAEIGAAMVRKQKTDSRDALHILDLMLQNRFPQIWIPSPGERDLRQLLRHRHKMVCLRTSVRNQLHALAMGQGVYRKRKLWAAGGRRELEALALDPWASRRRQELLEILDRLDPSLAELERAVAREAEQRPAARRLMEQPGVGPVTALMWVLTIGPVERFRRSKQVVSYLGLNPRESSSGGPFTSKAPTASLPPLPLRLLPGGANQFPGGSCTR

SEQ ID NO: 481028 - protein, 418 aa, unidentified
MLHIEHPVRTATRVDHATPIDMDATLFVALELSLSSWVIVASAPGEDKISKHRVEACDGPGLLALLDRLRLRAEQRCRRPVAVVVMQEAGRDGFWVHRLLEAHGVRSQVVDPSSIAVNRRSRRAKTDRIDAEAMLRTLMAWARGERQVCAMVRPPTREAEDARRLGREREALLAERIRHANRIKGLLATQGVFGFEPTLRDRRARLAEVRTPEGAALPPRLEGEILRQVDRLELAMSQLAAVEAARDAAFAAENVAGPVHGAATSVDDGANGAAALLPQHEGPGARLLRLKGIGPETASVLAGEAFFRDFRNRREVASYAGLAPSPWQSGGVDHEQGISKAGNARVRKTMGQLAWLWLRNQPDSALSAWYRDRVRDGRGRIKRIAITALARKLLVALWRFVTQGLVPTGAVLKPIKAG

SEQ ID NO: 481029 - protein, 426 aa, unidentified
MAYRIAGIDVHKKMVAVVVADVDVAGTWQFDRRQLGTSPAQLRGLADWLVEREVVEVVMESTAQYWRPVWEALERSWQPRMQQTDPAPRAGTLHLAQAQSNEGPRGRKRDVPDAERLVKRLVAHELTLSFVPDVTQRLWRTVARRKYQSTCNRVQLQNRLECLLEEMHIKLSSLVADLIGPSARRMLRAIANGDTDPGAVVALGSRRLHATPDQLRDALGACTDLHPVYRRLLALTLDELEVIERHIHQLDEELAQLLRGHQDAVERLAAVPGLGVDSAQQIITEVGPTAATFPAAKRLASWVGACPGHDESAGINHSHRAPKGNRQMRRLLNQAANAAVKAKGSIFQLVYRRLVVRLGHAQAIGAIAHRLCRLIWKILHDGVTYEERGPAVTKHRAQRRAAKMIRELRSLGYRVERDLPPASALA

SEQ ID NO: 481030 - protein, 359 aa, unidentified
MQTQSNKIDFNGQNIYAGLDVHLKDWKVTIMTEKLTHRTFSQPPKPEALYHYLKKTFPGGTYHSAYEAGFSGYWIHNKLRNFGINSIVVNPADVPTTGKEIVMKDDIRDSIKIARSLRNGELNPIYVPTIPTLEDRTLVRTRTTLVKDLTRYKNRIKSFLYFHGIEYPEAFSRPQTHWSNRFNKWLEAVEMTEPSGKASLNILLAQSRYLRASVLQTTKQIRELTKTSRYKRQHELLRSIPGIGLLTAMIILTEIETIDRFDTFDQFCGFIGLVPSTHSSGDHQVIGDITPRGHSVLRVAIIESTWMAARLDPALNKCYHDYCKRMEPNKAIIRIARKLVSRIRFVLKNNQPYVCSVVK

SEQ ID NO: 481031 - protein, 346 aa, unidentified
MEHYAGIDVSLELSSICVVDAQGKIVKEAKVASEPEALVCFCKGLGFPVKRIGLEAGPLSQWLHAGLVQAGLESVLLETRHVKAALSAMTVKTDRKDARGLAQLIRMGWFQAVHAKSIGSQEIRALLVARKQLLGRLLDVELSIRGILRGFGLKVGQVTRKEFEGRIRELVTGQPTLERIAGAMLSARASLRAEYEKLHKAVLAIVREDGVCLKLMTVPGVGPLVAVTFKSAVDDPNRIAKSKAVGALFGLTPKKYQSGEKDITGGITRAGDEMVRTALYEAANVLLSRITRFSKLKRWGMDVAKRRGLKRAKVALARKIGVILHRMWVDGTTYRWTEAKLIAAQA

SEQ ID NO: 481032 - protein, 410 aa, unidentified
MDLYCGIDWATAHHDVAVVDADGRVVARGRVGNDAAGFAQLLTLLAEAGDSAEHPIPVAIETDRGLWMAALRETGRAIYPINPLAASRYRARYAVSGAKADATDAVLLANIIRTDPDAHRRLPADTELAQAIRVLARAQQDAVWARQQIGNQIRDLLKDFYPAALAAFADLTSGGLARADARTILAAAPTPAQAAKLTPARLRRLLVKAGRRRDLDRDVERLRMVFTDTYLHQPPMVENAMGIQLAALLRQFEAACAAADELAEAAIAHFEQHPDAAIITSFPGLGNLAGARVLAEIGDDRARFADARGLKAFAGSAPITRASGKKTVVTHRHIKNRRLAAVGAIWALASLRGSPGARRHFDARRAGGDWNHQAQRHLFNKFLGQLHHCLQTGQIYDEHRAFPPPLLRAA

SEQ ID NO: 481033 - protein, 335 aa, unidentified
MSKSNIYVGIDLHKEKFDFVMLSASGDVINQGTCLAELGAVADFASSLTRRHLIVVEPLQNSYWFIDQIRPYAGSVHLAHSGKVRLIAESRLKNDRIDAKILADLLRVGYLPEVYIPEDEIRQWRFLVQHRRQLVKDNTRLKNRILGIINREGFTIPASDPFGKKGRAQLDSLPLSAPLRVSVDTNLVTLDLSSAQLKAVDKEIEQIVQSDDISKLLCTIDGVGPITAFTVRACVGDISRFRSAKAFAAYTGLIPSCRQSGDTVHNGGITKQGNSTLRWALGQSVTHAIRRSPHLKRLHARLCFRSSSGTARTAVAHALARIIYHVWKEARPFYR

SEQ ID NO: 481034 - protein, 422 aa, unidentified
MEVIHPRSGGLDVHKQTVVACVRLALGDKVTREVRTFETTTTGLLLLLAWLTEMGCTHVAMEATGVYWKPVWNILSDGDFELVLANAAHIKNVPGRKSDVSDAVWITDLLAHGLIRSSFVPDQEIQELRELMRTRKQLTRQQTSHVQRLQKTLECANIKLDSVITDIVGKSGRAMIQALIAGETDPVKLAALADRRIKASPQELREALRGRVTDHHRFLLRLHLQHIEFADAAILDIDRNVAALIARMDQEVEAGRAFHTLIALLITIPGIDVLAARAILAEIGPDMSRFPTAGHLLSWGGLCPRNDESAGKRRSTRLRKGDRWLKTLLVQCAWAARRKKDSYFRAQFYRITARRGPKKAACAVAASLLTTIYHMLKDGTPFQDLGADHFDRRSKEARAERLVTQLAKLGFDAKLTPLAQAA

SEQ ID NO: 481035 - protein, 376 aa, unidentified
MDTSTAAGSILHCALELSKNTWLLGIQFPDRPQPSLYPIKGGNTEDLMAKLTAARDRCAKLNGRAPSIVLCYEAGYDAFWLARFLKARGIECLVVDSASMQVNRRARRPKTDRIDVGKLLRGLIAWFRGDRHVWSVVRIPSVDEEDLRRSHRERDYLVHERTAHINRIKGLLFAQGIRGINVKRQYKTLNVDKLVTGNGHPIPPRLASEIVREIARLALVQEQIAILERERDERPTPCTATEKKRAQLMQLNSIGPAISAVMTREVYYRQFDNRRQVAGFLGLAPSPYDSGETERSQGISRAGRGQVRGTMIQAAWLWIKHQPRSTLTRWFLERTVGQGGRVKRIMIVAVARKLAIALWRFLEHGLVPQGAILSSK

SEQ ID NO: 481036 - protein, 346 aa, unidentified
MCSLPVFVGMDYHDSFVRVVVQDTDGSEMGNADRTNHWKAIADFGDRFGRPVRAAIESCCGAADLAEELVSCAGWSVALAHPGYVQRMKQNPDKTDCQDAQLLADLERVGYLPRVWLAPRYIRELRHVVRYRLQLTEQRRATKLRLRALLREQRCHAPDGLNAWTKAWQHWVRHTAELSAQGRWLVKQHLRELARLAIRIHEVEKRLEHLTANDVEVQRLQQQPGIGPVTAWTIRAEIGHFDRFRTGKQLARFCGLSPRNASSGQRQADAGLIRAANPALRTVLIEAAHRLVQYDPSWQKFAQRLRARGKPGSVVAAAVANRWMRRLYHEMKTPSGELAVAVGPAQ

SEQ ID NO: 481037 - protein, 329 aa, unidentified
MGTAAVFAGIDVSKDTLDACLVLPGGQAKEATFGNDARGHAALLAWADRHAAGAAAHFCLEATGPYSEAIATFLAGAGRHVSVVNPTRVKYAGLARGRGNKTDKADARLIAQYAKRERPPAWRPPPPEVRELQGLVRRIDELTEAAARDKGRLASPALTPAVRKSVERTVRLLEREADRLRAQADELVAATPSLRADRDLLESIPGVGRRTATVILAELPAVERLPSAQSAAAYCGLSPREFPSGTSVKKRTRLSKAGNPRLRKALFLPAQTAVRFNPLLKGFFDRLVAAGKPKMQAIGACMRKLVMIVYGVLKNRAPFDPHWSSRITS

SEQ ID NO: 481038 - protein, 344 aa, unidentified
MEYSAIDLHLRRSQFRIVGEDGAVVREGKIDTSRADLSRVFGDRPRMRILVESSTESEWVARHLEALGHEVIVADPNYAPLYGSRSRKVKTDGRDTAALTEACRTGIYRRAHRVSAARRAQRQELRVRRHLVQMRSRSIGLLRALLRQDGWRLPRGSAEAVDARLERLRLPTGLATILTPLRTWLKELNALLDAADRAVEAQAAADPVAAHLMTAPGVGPVVALTFEAVLDDPARFGGEAARASAFLGLVPSEDSSAERRHKGHITKTGPSELRALLVQASWVIWRGRSAAGAALRAWAQALAARRGRRIAIVGLARRLSRILFALWRDRSNFHVEGGRPLVAA

SEQ ID NO: 481039 - protein, 317 aa, unidentified
MDHQAVFIGIDVSKNQLDIAVRPGEDRFSESNGDAGIQALVQRLLPLKPQLILLEATGGYEILAAAALRQAGLPAHIINPRQVRDFARSSGRLAKTDKIDAAVLAHFAEALKPSLRPWPDEQQQELAALMSRRRQLVEMLVMEKNRLSMTFSPRVRRSLQTNLQFLKEQLKELGQDLDDFIRQSPIWLEKDQLLQSVPGVGPLTSQSLLAWVPELGALNRKKIAALVGLAPFNRDSGQMRGKRTVWGGRARVRPPLYMATLAACRVNPAIRAFYLRLLAAGKSKKLALTACMRKLLTILNAIIKQQQPWCPLAPVNP

SEQ ID NO: 481040 - protein, 442 aa, unidentified
MAHRGSTTRGMAILREGGAEVKGPEARIVGFDCAEEDHYAVLLDEDGGIEKRVKVVNRRDRVEEALAQLMLAVGPGVKLVVVVESRRSHGRVVTDVAKELGCEVWQVNTVALNHFRDVEGQPRKDDEWDAYLAARMVYLRMLGCRVITEVTEEERALSRLSRAYARLTADKTRQQLRLRAHLLELAPEMLHRSWEGPKPGSKALVYLLQRWPGFEGLERAQLRSIEKILYRCRYGSRGRTVAELLREMARRIGIAGEERSAITLEITFLMQQIQLCDASLEKLFTEISSRVERHPVGVKLLEMHGIGPVIAAVLVSELLPVARTATEAECATYAGVTPIGRKSGKALDTSCLARGVNKRTLHAVYTSSVVAIKNSPVDRAYYDKKLRGYAGHPKPHVAAFIALSRQRHKLIYKLMTTDARYDSEILFASHLERLEETRRAAA

SEQ ID NO: 481041 - protein, 437 aa, unidentified
MSNIIFNPDEFFLSVGMDVGADFTWMSIALPNQTLLGKPFKILHSRMDSLEAAVSKIKEAEELYSMKSRIFLESTGIYHYPLFYFLCDKGFNCSVINPIITKNSTNINIRKVHNDRNDSKKAAMIGLKPDLKVSLMPSDLVLEFRNLTREYYNLMDHRCAYVNKLTAELRMVFPQYLGIFSKITTKTSLHLLRAYTSPDAFLEAPEKDVIAAIRKAARFGVKYATDKCNAIKKAAQEAKLFGHAVNSNYTRILIYIDFIELYDKQIASVLAELEGLADINGDTRFVKQIRLIESYHGAGFLSAASLMAEIGDFSAFKKPKQLFAYFGLDPAVKQSGKFIGTKVKMSKRGSSIARRVLHIMALNSIGNNRNGVAKNPVLRDYYLDKCKSKPKLVAMGAVMHKVCNIVFAILRDEKEFRIITPEEHQKNYLKAKCDIAA

SEQ ID NO: 481042 - protein, 422 aa, unidentified
MFKIIKFNCCGLDVHKTWIYACIGITDANLRTEYFEDRFSSFPKDLRRLAAWLQKHNCEEVCMESSGKYWIPVFNALEQTCKVTLAHPKYTKPQKGNKTDRKDAHWICDLFMCGMIKPSFIPPPAIRHLRELIRYRVKLTNMLTGEKNRAHNCLTVSSLKLDDVFSDIFGKSARSITEYILAHPGEHFDVTPFIDKHCKTPVDVIQDAVDGAISPEQAVKLRECLNHIDELSAHRDNIEKEILELVKPFSAQLALIRTVPGLDKDPMTAITILSEIGSDMSVFPTAKNLVSWAGCCPRNDKSAKHVKSTRIAAAGSFLKPILVQVANALIKSTKHPEFTERYRRIKSHRGHKKAMIALCKMLLTAIWNILSNGEVYNPSGYILRSPRPVDEKKVLTQKQALELLRLRGFTIVDDAPPQAALA

SEQ ID NO: 481043 - protein, 355 aa, unidentified
MTEQPSANQIVIGVDTHDLVHVAVAVDHLGRRLGDLSIPTSPSGYEYFVTWASGLGEIIAVAMEGTGSYGHALCTLLRSRGVHVVEVSRPSRKNRRNHGKADLSDAESAARAFLGGEVTAKPRGNDASVAMIRSLRIPREALVNQRTQAINQLRALIVTAPAELRESLAGLTAKQLIERVAHFRVGSVTSPAEASRFAMLQLGRHVLHIDVQVEDLDRQLDPLVAGRAPELLAIYGVGVEVASNLLVAWDNAHRIRSEAAFASLCGVAPVLAPVPASSGKTSRHRLSRGGDRIANRALWRIVLTRMRTDERTRDYLARRQAEGKSKREVVRCLKRYVAREIYHVLQSSPAPCASA

SEQ ID NO: 481044 - protein, 416 aa, unidentified
MDFFVGIDWGSKNHTVCVVDPEGKPLLEEEVAHRGDAVLAFIDRLLRLANNDATRIVAAMESPHGVMVEALLERDVATYSINPKQLDRFRDRHSGAGAKDDDLDAYVLATSLRTDLQLFRKIALPSAERMLLGALSRSYEALTEQVLSLSNQVREQLVRYYPQMLKLGDWHNQPWLWDLFEVAPIPARAMRLSPAKVRAILSGYRIRRHDATAVLETLRQTPLPVAVGVPEAAATRIEMLLPILRASHQQRIDCSQKMNALLSSFQEETDSPEKMHHDAALLLSLPGIGVHNGAVMLTEAHSALQQRDYQAMRRLAGVAPVSKRTGGRTKRPLVQRRQACNQRLREATYHWGRVATQRDPRARQHYHELRARGHSHGRAIRGVIDRLLKVLFAVLKSGLPYDSSRRICVENLSLAV

SEQ ID NO: 481045 - protein, 439 aa, unidentified
MSRRAYRATGVNEVNWEQIAHGKEGLDVTLGVDVGKFDVLVVCRWADERFERPWRVKNPREIPTLVALAKRVQTDRKLVVAMESSGTYGDALRQALSDNGIEIQRVGGKAAHDYAEVFDGVPSQHDGKDAAVVAELAALGKGRPWPYEAPDSWEEELTYWVEEMVIQRQLVTCWQGRLEGLVARHWPEAFQVLKLSSGTLLRMLKRYGSPQALAADPQAPRQLARWGGALLSAKKIDQLLAGARSSVGVRLGPWQQRQIQECAEKALAARRQSNQAQRRLRQLAVGHQVLQAQGKVVGIPTACVLWVCTGDPRKFDSAAAYRKAMGLNLVERSSGTYQGQLRISKRGHARTRQWLYFAAMRLVQKRGVRPWYEAKKARDAGDARRLLVAVMRKLAVALYHVGVRNEEFQPRRLFGRIGKHRGRGAQRAIAVAEPSKIQG

SEQ ID NO: 481046 - protein, 338 aa, unidentified
MRIHTVGIDIAKTVFHLVAVDEKGSVVVKKKFSRSQLLVFTANLKAEVIGMEACSGAHFLTRALVAQGHNVRLMPAEYVRPYVKSNKNDFIDAEAIAEAVLRPNMRFVPLKTEEQLDLQALHRVRERWIGRKVALTNQVRGFLLERGLPIRVGSEHLRKALPSILEDAENGLTPRARTILSTLREEWMELETKIERVTDEIGRISRSNEACKRLMGVPGIGPIISTALVAAVGNATAFKKGRDMASWLGLVPRQHSSGGKTKLLGISKRGNFYIRKLMVEGARAAFARLNRSQHSFGPWMDNLQAGKHSNVAVVALANKMARIAWAVLTTGQQYRAAT

SEQ ID NO: 481047 - protein, 341 aa, unidentified
MRTLYVGMDIHKNFIQAAAMDEAGNIIKEQQFNSTEKEIRRFVKSLKTKKIHTAIEATCTWYHVYETLDALGIKTTLVNMRRTKTIAESKIKTDKLDAKTIAHCLRTGFIATAYIPPKTIMEQRTILRHRMSLRKEITRYKNKIHAILLRNGIQHSDYSDLFGPGGMTFLRSITLPDSEQYSLTSYLNIIETLIHEKTQTAEKIETLCKHNQHAMLLTSIPGISYYGAMIILTEIGEIYRFPHPKKLCSYAGLVPRTIQSGNHVYHGRILKECNQNLKWILDQCTHIHIRHCPNSSITKLYYRLENKKGRNKAIVAASRKLLTCIWYMLMKNETFKYSNDD

SEQ ID NO: 481048 - protein, 418 aa, unidentified
MNEELIARLSRRYLALDIHKHYSVVAGVNFEGQVVVEPVRIEHADLEGWLKKHIQPTDYVVIESTTNAWHIYDLLVPLTEKVLVANPIKVKQIAQARVKTDIRDTLILARLLAANMVPVIWVPPAHVRNLRYLLSQRRHLVGMHTATVNRMHSVAHRHHLNHPRGKRFNEKNTKWQRDNILSDSEQFQLELDMNTKKHLAEQTEKITEKLRRMSHQKPWAESMMYLMQLPGFGVITGMTVLAAIGEITRFETPGHLASYSGLTPGLDQSGVKLRGKKITKEGRKDLRWAMVEVAQRAVKSDPLWKHRFNELQRRMHRNQAIVVIAHRLLELVWYVLSRKQAYRNFSHERIAYKYLTWSWQLNDKDRDGLTRQQFTRYYLMRLGIGHDLKQIALNPRYKRNLASEAELLALRPELKQTE

SEQ ID NO: 481049 - protein, 408 aa, unidentified
MNDSSKRYIGLDVHKHYLIVLGVDADLNVVLPARRVELRYLESWMKKSLTRADEVVLEMTTNTWQLYDELVEYAGSVMVVHPPHVALITRSQVMNDKIAASILARLLAKGLLVGIWIPPQEIREARSLVAQRQKMVRLATQAKNRLHAVIQRHHLIPPEGNPFGASNKEWWQELSLGKLEKLNLQSDLETLQFAEKQVKRMTEMMEGMVCEQEPIGRLLHLAGFGVVTAVTVWAAIGDIRRFAEPRYLVGYAGLGTRIHESGMTMRSGKITKAGRRDLRTVLIEAANVAANSHPHWKAELARLEPRLGRNKAVVAIARKLLIAVWYVLQGQTDKYAKPEAIAQKMLKFAYAVGKANRPKGQTAAQFARTRMDVLGLGSELTSIPWGSKKPIPLPPSALRERSDVPNTK

SEQ ID NO: 481050 - protein, 334 aa, unidentified
MKYQHVVGMDIAKDSVQASCFDGTTFFDFSFPNQEKLFLKKVQKSIPKSDPSHILFVMEATGTYHLKLATALDKEGYSVAVVNPFIIKKYAEMLLKRAKTDRNDARLIAQFGFYQEVTLFAPKENLAEEITQVLKGLDQLKKERTNLKNYQEALTHHNEINSVVRDIYQKQLKEVEKAIKTLEAEAKRLVCQYAPKEYQLLLSIKGIGKCSATALLGFLQKMDRFSRGKEVASFLGLAPQISQSGKDKGKAWLSKKGNGYLRRLLYLAALSASRSNAQCRELYQRLLAKGKPKKVALIAVANKLLRQAFAVLKSGCPYDPHYLKLKSNLEVVLT

SEQ ID NO: 481051 - protein, 409 aa, unidentified
MEVLYERCAGLDVHKKSVVACVLTSSGEREIRSFGTMTGDLLTLVDWLKQWQVTHVAMESTGVYWKPVYNLLEGEMEVLLVNARHIKFVPGHKSDVKDAQWIAELLQHGLLKASFIPEAPQRELRELVRYRTHLIQERTREINRVHKVLEDANLKLGSVASDALGVSGREMMAAIIEGQTNPAALAQLAKGRLRDKIADLQRALTGRVRESHRLLLKLHLEHIDDLNAKLELLEQEIDRLLVPFDSNDLLARLQTIPGVGEKTAQVIVAEVGTEVSRFRSAGHLAAWAGLTPGKNESAGRNYSSRTNKANRYLKTALVEAAHALSRSQDNYLAVRFRRLKSRRGAKRAAVASARAILEIAYHLIKEGTVYHDLGPAHYDQRRKDQVQYSLVKRLEGLGYTVILEPRAVA

SEQ ID NO: 481052 - protein, 337 aa, unidentified
MEQQRQYVGIDLHRRRSVIVRMSENGSVLETVRVENDPLQLCLAIARAGTDPEVALESTYGWYWAADLLEAEGAKVHLVHPLGLHWDARRVKNDERDATELANRLRRGDLPESWIAPPEIRELRELVRFRAKLTAFRTSAKAQIHAVMAKHGILPTLDDMFGPGGQKLLDEMAFEGAYAIRVHALRDLLELYGRELVMVEKALARHLRGHDGYQAIQAIKGVGPIMAAIFTAEIGDARRFSSARHLCSWAGLTPSHRESDTKVHRGHITRQGNHLVRWAAIEAVVCYRGGPPIAPAYARIAARRGNMIARVAAARKLLSLVYYGLRDGEIRCLKEAS

SEQ ID NO: 481053 - protein, 342 aa, unidentified
MQISTIGLDIAKNVFQVHGIDAAEKVVVRKRLRRRQVLEFFKALPPCLIGMEACATAHYWARELTKLGHEVRLMPAKDVKAYVKRNKNDAADAEAICEAVRRPTMRFVRIKSAEQQGQLMQHRTRDVLIRQRTQIINALRAHLAELGLVAAQGNAGVNELRAIVTDEQDTRLPIDARASVIVLAAQLEALESVIGAIEKRIKMQHRSSEASQRVEAIPGIGVIGATAIVATVADPTIFRSGRDFAAWIGLVPRQDSTGGKRKLGPISKQGDRYLRRILVVGAIAVLRRAQENPGKYPWLTHLLARRPFKVVAVALANKMARMAWALLAHGGTYRAPELAETA

SEQ ID NO: 481054 - protein, 339 aa, unidentified
MELYVGIDLHSNNSVLVILDETDKVVYERRHPNELPVILAQLAPYKESIQAVAVESTYNWYWLVDGLMEVGYNVKLVNTAAVKVYEGMKYTGDEHDARHLAHLLRLGILPCGHIHPKEDRAVRDLLRKRGQLVRYRTMQILSIQATVSRNVGHGLSTAEVRKLDDVEIDRLCGGEAPRALAIKSNLMTLRCLDAQIAEVEALALQKAKLKPEFKKLLTVDGIWEILGMTIMYEAGDMKRFEKVGQFASYARYVGSSRWSNGKKKGEGNRKNGNKYLAWAFIEAAHYAVRYNERIRKFYQRKKAKTNNIVAAKAVAHKLARACYHVLKEQAPFDEARAFA

SEQ ID NO: 481055 - protein, 345 aa, unidentified
MELHTIGIDLGKTVFHLVGLNLRGEVSVRKKCSRTQLLRFTANVHVRLIGMEACGGSHFLGRALREQGHQVRLIPAQYVKPYVKTNKSDYIDAEAIAEAVARPTMRFVPIKTDDQLDLQSLHRVRERWVMRRTAVINQIRGLLLERGITLRKGRRYVDAALPGILEDADAKLSGALRMLLAQLKLELDHLDLRIDEADALIKKTARENEACQRLVAIPGIGPVTATALIAAIGNGGAFRKGREFAAWMGVVPREHSTGGQQKLLGISKRGNSYLRRLFVQGARAVMQQRTKQSSGLSAWLAQLTSRTHRNVAAVALANKLARIAWAVLARNEQYRPPVLANVAAA

SEQ ID NO: 481056 - protein, 359 aa, unidentified
MREQRNKISFRGQKIYVGIDVHLKSWSVTVLSETSVLKKFSQHPSPEALYGFLTRSYPGAEYHSVYEAGFCGFWIHERLTALGIDNIVVNPADVPTKSSEKLRKTDTVDSGKLVRSLRANELKGIYTPDSVSLEMRSLIRLKNSITKDTTRQKNRLKSQLRYLGIEIPQEFLTPFSNWSKRFFAWLKEIETLTPSGRQALDIHIRHLEELRRQKLEMTRALRTLAKTDRFREPLRLIMSVPGFGQATGMAFLSEICDITRFRNAEQLAAYIGMIPMCHSSGEKDGTGDITIRKHAVMRCNLIEAAWVAVRQDPAMNLFYTEQCKRMPKSKAIVKVARKLVNRLFFVLKHQTEYVNSIVS

SEQ ID NO: 481057 - protein, 341 aa, unidentified
MGEVSTIGLDIAKSVFQVHGVDVAGSVVIRKRVSRAKLLEYFGGLPRCLVGIEACPSAHHWGRELQALGHRVRLIAPSYVKAYLKRSKNDANDAAAICEAVTRPSMRFVPIKTKEQQTVLMLHRTRQLLVRQRTMLSNALRGHLAELGIVSAKGRNGTAELLRIIADRRLSPAVCGILEVLARQYGAIGTEIASIDKNIMVLHRACEASRRLAEIPGIGPISATALVAEIGDWKAFGSGRSLAAWIGLVPKQYTTGGKDKLGRITKQGNRYLRWLLVVGAMAVIRYARNHGTEKRPWLGRLMQRRPTKVAAVALANKIARMAWAIMVRNERYKEPKLLLAV

SEQ ID NO: 481058 - protein, 444 aa, unidentified
MGKLIKVIHNSYYQEAPMQFNSKPNPIKAENLLPVAFDVSQHKLNCYSQWGERIIHSFEDEFANRIPAIEDKIKALNSYAVEKGFNGLHIICEPTGGYEQKLMQTALRMHHKVSYVNGESVNKFQVVENNENDKSDPKDPKVIFKLYLNGKLIKFRQLDEPYQQLKALGRFYEQDSKARTATKNIIHDTLKVLFPDLSFCNAFLFDTSGRALMKQFCANPYTMLKGGRTRFNRRMKKESPRIRNKTLDRLWQDALCSVRMGMDETLIQIYQERIGKLWMDYLALESNLNKIKAKMEALYDLLLDAGEQVPLPVKNFVSKLNLARIVGQTGPFSDFASARQIKRFGGLHLKTRQSGKYKGKVRLSKKGRIDLRTIMAQSIFHLIKKECIFGQFYHKKKERGMPGAKAMTVVMRKMVDVLFALSKPGVVFDEKRLFACQSLYGNAA

SEQ ID NO: 481059 - protein, 411 aa, unidentified
MLEVKVEKCAGIDVGKKFLAVCILIGLAKQKPVGEVRRFGTSVKELERLRTWLLESGCTEVVMESTGSYWKPVFNILEGSLKVILANPEQVKALRGKKSDPNDSRWLASLLRHGLVQGSFIAPRDIRELRDLTRRRRRLVGDGAAEKNRVQKILEDANVKIGNVLSDVFGSSGQAMLEALLENKQGPAEIAQLGHWSLAPKIPLIVEALEGHRMSDHHRFMIRQSLRHMRDIEEMIEELDKEIAVRLKPYEQHIRLACTVPGIKPTSAASILAETGMDMSPEGPFPDCHHLASWATVCPGNNESAGKRKSGRTRQGNRWLRATLTQTGWAGAADKKSLFQRRFQRVKLRRGGQRAVMAIAHAQLIAIYWALRNGTPYPEQVQSMEQDRREAQIRYHLQRLTKLGYESDIHA

SEQ ID NO: 481060 - protein, 309 aa, unidentified
MDATIVGIDVSKDRLDVHVRPAGEELAFSRDAAGIEALVARLSPLMPRLVAVEATGGFETVVAASLHAAGLPVVVVNPAQVRAFAQALGKRAKTDPIDAAVIAHFAEATKPEVRPLPDAETERLADLVARRRQIIGMIAAERQRDKRATKRMRQSIARLVAALNGELAVLDQDITDAVRGSPAWREKEDLLASVPGVGPVIARTLIAELPELGGLDRRQVAALAGLAPFTRQSGQWRGKSFIGGGRATVRTALFQGALSAFRWNPTLKQFHQRLIAAGKPKMVALIAVARKLLTILNAILRDRIPWQNA

SEQ ID NO: 481061 - protein, 365 aa, unidentified
MPILHPDTIHLGLDVHKDSISAAILNPGHESPDCEKIFHDEESVRRLIGRLGDPRLVRACYEAGPTGYDLARLLASMGVRCEVVAPSLIPKAPGDKVKTDKRDCRRLARLHRAGELVAIRIPTPTEEAVRDLCRTRGDMVEDLTRARNRLSKFLLRHSRVWRGGSPWTHRHEAWLAAQSFSEPALAATFSHYRAVVLTRDAQLAAVEDDLATWFDRLPFAETVLRLGAYRGVTHMGGLTLAAEVCDWRRFAGAHQFMGFVGLVPTEYSSGGSTRRGHLTKAGNAHIRAQLVESAWTYQHRPYVGAAIAKRHDGVGPETVARAWAAQLRLCGRFRHLAARKNTKSVVAAAVARELAGFLWAEMTAA

SEQ ID NO: 481062 - protein, 319 aa, unidentified
MAQNGLVVAGIDIAKDKADVSIRGLSQRQTFASTAEGRRQLITWLRKHKVTKAVMEASGGYEREWAKALREKDIEVRIVDPKRVRHFARSAGRLAKNDMIDADTIAWFAETFGEASSQAHDAARETLRQLVNARQGLLDIRTGLSNKGEHDVPEPVQKSHAQLLKAIAVELAKLEAAIAAMIKATPHFAERAAIIESVPGIAGTTSAGLIAAMPELGQVSNEAISALLGVAPYDDDSGKRRGERQIKGGRRKVRNLFYMACLGAATRHNPALKAFYRRLIAKGKKAKVAMVACMRKLIVILNIMIARGEKWDASRYAVE

SEQ ID NO: 481063 - protein, 373 aa, unidentified
MPKYSTAFGMDVHLRSTTVCALDADTGEAVTRRFPGNPWGEIAGWMDGFPGPSLAAYESGYLGFAPQRELAGLGVECVVAAVSKIPRSAADSASKNDRNDAARMAKAILAHDISPVWVPSPEVEGIRDLAGAYDGATARLATAKQRLLAFLAKRGFVYGGTTPAGNPRKYWTYDFLRWLDKVRPEDDGGVRTLAALRNEVEAAAEARSDLLSEYRAAVDASPIAAEVAALQSIKGCAFALAAAFSAEVGDFTRFRSGRQVTAYFGLAPSQRSSGGSVRLGGISGAGNALVRKLAVEGSWCYAAARHQPKLMPRDTGVPLEIRVHGRKGSERLLRRREEMLARGMPAAKANAATAAELVRWLWALGMMCREGAE

SEQ ID NO: 481064 - protein, 315 aa, unidentified
MSKVRYFAADVSKRELVFAVYPEAAEVVRVANATAAIRAWLDLLPAGSVIAMEATGTYHRRLAVLAHERGLMVYVVNPRDVYYYARAMGARGKTDATDARLLARYVAHEQAHLHRYVPPSPRSEQLTALLERRALLVRTRQALKQSLAELPALAAEKHTALNALEALIKAIDRELAQLNGSDPPTAQLVTRLRTISGVGPLVATLLAALFQRFTFHHPDALIAYVGLDPRPDESGQHQGRRRLSKRGHPEWRRLLVAAAMSAARSHVWRDYIAHQRTKALPATAVHVILARKMLRVAYALHKNGQAFVAPPMQTA

SEQ ID NO: 481065 - protein, 340 aa, unidentified
MTFGTIGIDVGKNWFHLIGLDSRGVIVTRQRFNRAQLLRFMSKLPPCVVGMEASCGSHHLARELSGMGFDARLMSAKFVRPFLKGNKNDYLDAEAIAEAVQRPSMRFVPIKTVEQLDLQAIHRTRSGLISRRTGVINQIRSFLQDRGITVPQGPAVLARALPALMTAEEARLSDSIKQLIRMLREQWVSINQQVDELESELRSIVERDDACKRLASIPGIGAITASAIVAAIGDGRMFRSGRDFAAWLGLVPRQHSTGGRSTLLGISKRGNAYIRTLLVHGSRCMLRFFKDPDTAIGRWAVALKSRAHANVAAVALANKQARTAWALLTQGTFYQARPAV

SEQ ID NO: 481066 - protein, 340 aa, unidentified
MTVIIGIDPHKASHTAVAIDCDEHSLAEIRVRATCRQTEKLLAWAEPLGPRTWAVESAGGMGYLLSQQLVTAGEDVLDVPATLASRIRVLGTGRSNKNDPNDARSVAIAALRSPGLRSVRVADHGEVLRLLAKRNHEIGRLRNIVVSRLHAALQNLSPGGIAKELNASDAIALLNGFEPITAVEQTRYDLAHELLDDVERLDVQLKASHKRIKVAVQASGTTLTDLYGVGPILACELIGYTGDVRRFTTRDQFASYAGVAPVEFSSGGRTVHRLSRRGNRQLNHAIHMVAICQIRQTDSEGRIYFEKKVADGKTKREAIRSLKRHVANAVYRQLLVDTTK

SEQ ID NO: 481067 - protein, 365 aa, unidentified
MISVPQTSTLLGLDVHKLTISAAVLPPRADMAAVDKISSDPDAVRRLIGRFEDPKSLVACYEAGPTGYELARQLRSMGVRCEVVAPSLIPVAPGNRVKTDKRDAQRLALLLRGGQLSAVRVPDVAEEAVRDLCRARADMVIDRTRARHRMAKFLLRHGRVWRDGENWTMKHEAWIAAQRFDEPALDAALSHYQATHTARVAAVDAIDAELGVWFERDPFADAVHRLCAYRGVTELGALTLASEVCDWRRFPTAGMFSAFCGLVPSENSSGERVFRGGITHAGNTHLRTQLVESAWAYKSRAQVGPTLRRRHEGLNPEVVARAWAAQLRLCGRFKRLDARKSSRKTVVTAIARELACFMWAEMTAA

SEQ ID NO: 481068 - protein, 404 aa, unidentified
MWYVGIDWANDHHDALVIDEKGRQVGSLRIDHNPQGLSRLNTFLEQILGSESKDQMACIIETTHGLLIAHLLEAGWPVYPVNPRTVDRRRSASGAKTDTIDAYLLAKTGRADLADLHRLTPDSEKITALKLLTRDQAALIQMQTRLVNQLTACLKAYYPVALELFAKLHQKSTLLFLQTYPTPQEAMAASLEQIREVLRQAKHSNPTPVATNIFERLHQPHLKADSVITRSKSRLMLVLVSQLLPLIEHIAQYDKEIEAFFLSHEDHAIFESLPRAGQRLAPRLLAEIGDDRERYHDASSLQALGGTSPVLFQSGMYSKAHRRLGCIKSLRNALHQFAWQSTQSEPWARDYYQRKRAEGKSHTVAVRTLANVWVRIIFAMWLHHRCYESTTFEQAQRQHARKAA

SEQ ID NO: 481069 - protein, 423 aa, unidentified
MAREQLMTAGAMLVAIDIAKARNEVLIEAPGHDRRRRLTVPNTRDEHDRFVELLRTAGRPVIVALEATGNYHRPLAWRLLDAGFEVRLVSSVALARTREAIHNGWDKNDPKDAQVILHMLRTGLTQRYHDALFHGMNDLQELSKTHEAISKAKTEVLHRLLTHYLPLYFPEIDRFRHNSRSEWFFDFLSRFPTPSSITALEKEAFIAEAWDVVGRKVAKARLLADIYDTAASSIALPIPPDAEAIAMFRLVIAEVLGLIRTRDRIEGRAQALLGCNPDYQRLLQIPGIGPIHALTILAEAGDLRRFGHHRQFLKFCGLDLATYQSGKYRGQTRLSKFGNARLRRAMWLAAQVAIRQKENSFRDKFERYVAKDRRNADLNRKALSAVAAKMARVVHAVIKGGRDYRPFIEVAVPSGRTPFRLGP

SEQ ID NO: 481070 - protein, 407 aa, unidentified
MDVLHPKCAGLDVHQQTVVACARTGAGKAVTYDVRTFGTTTAEVLALSDWLTAHGCTHVAMESSGVYWKPVWHVLEGHFELVLANARHIRNIPGRKSDVNDAPWIADLLAHGLIRGSFVPPEPIQELRDLTRTRQQLVREIAQHTLRIQKTLENANINLTAVLADVLGSSGRAILRALARGERDPERLAELASDRVKASRAELVAALHGRVPPHHRFMLTLHLTQIEALEAAVREVEARLGDALAPFRAALDRLITMPGVSETVARVIVAEIGFDMTRFPSAGHLVSWAGLCPRLHESAGKRLSNRTRSSNPWLTTTLVQAAWAAARKKDSYCRAQFLRIKSRRGPKKAVLAVAASMLTAAYYMLKHGVHYRDLGADHFDRRDKAKLAKRLIARLHDLGLTVEVRAA

SEQ ID NO: 481071 - protein, 326 aa, unidentified
MKTIIGIDVSKEKIDVAWLRDLTTLKVKTKVIENSKKGFSDLRTWLEKETQQPITACHFIMEATGIYHEPLAYWLSDMGANVSVCNPAQVKNFAKGLGTQHKTDKIDSIILARYGALIQPNVWQPESKSMRELKALINRLDAVEADLQREKNRLEKNEFSSCSSLVTESIKTMINHLEKEQKDLDKKIDEHINKDPDLKKDQELLLSIPAIGRVVSRLMLSVIRSRDFKTAGECAAFVGVIPKIQESGVFKGRSALSKKGNPKVRAKLYMSALVGLKHNQDIIAQKERLVKNGKNAMQIIGAAMRKLVHICFGVLKTQTPYEYKGA

SEQ ID NO: 481072 - protein, 360 aa, unidentified
MLYLAIDQHRKQLTVNLRNEQGDVLVKRQVSTEWPRVRCFLEEVRKTSVPEGGFVAILEVCGFNDWLLKLLTEYGCRETILIQPEKRSKKKTDRRDAYALGELLWVNRQRLLAGKKIQGIRRIQLPTDREAEDRQLTAVRQRVGRERTRTINKIKHLLRKHNLEQQQPAKGLDTKRTRKWLTTLPLGPIDRLEMDMLLAQWKLWDEQIAKLELEIEKRQAKNATAAVLATIPGCAAYGSLALASRIGSIERFPRPASLANYWGLTPGCRNSGEATDRLGSITKQGSAMARFVLGHMVLHVLRRDGRMKVWYGRIKRRRGSKIARVAVMRRLATIIWHMVKHNEPYVAGGPPQRRLAPKVV

SEQ ID NO: 481073 - protein, 467 aa, unidentified
MQPKPQEKTTKDTCRTEPGHWHEMNRKQRRETMRKIQSDDLSLEVVHPDAAGIDIGNESHYVAVPPTRDSQPVRRFGCTTAELKAMAQWLKQCGIRTVAMQSTGVYWIAVYDILEAADLEVYLVNARETKNLPGRKSDVQESQWLMKLHTYGLLRNSFRPSQQIRRMRTYWRQRKDLIESAGRHIQRMQKTLTQMNIQVANVLSDVSGVTGQAIIQAILAGERNPQKLAAFRDPRVKASEKEIAQSLEGTWQEDLLFVLKQEQAGYEFCQKQMAECDRQLEQYLRQLEDRSQGASLPEEKRKDRLQKRKGNKPKFDLRQQLFRMTGTDLTQIDGVDVMTAATILSEAGWDMIKWQDEDHFVSWLRLSPDNRISGDRIIGKGRLPTTNRVTVALKLAASNLRTSQSYLGAQFRRFRARLDTPVAIKAMAAKLARLVYRMLRYGIKYVDRGTQFYEVQQRTRQIRAFLN

SEQ ID NO: 481074 - protein, 347 aa, unidentified
MVVLGIDIGKRELFANLQESDGSSIPQVLGHQGPISNTSAGFQQLVEWLQRRVGDLRQVRVVMEATSVYWEQCAYHFHALGCPVSIVNPAQIKYFSRSVLRRGKTDAMDAEIIARYGHVMHPASWVPPRTVFSDLKQLTRERERVQLHLLQEHNHLTTLQDAQQVSGTVLALAQRRIDLLERQVVELEDALHALIDTDVSLKQQLTLLLSVPGYGFITAVTVLAETAGFSMLETGSEISAAAGVAPAPNQSGASNKRGSISKTGNPRLRRIAYLAALGATRSNSRMKVFYQGLKARGKPPKVALIALGRKLLRTGLAVVKSGKPYQDDFSRAQDGSGSTPHPAVQGG

SEQ ID NO: 481075 - protein, 364 aa, unidentified
MAIELSQKTWLVTLHSPDRDRISRHKLEGGDHAGLLAQIEKVRGRAAQKLGSMPRVVSCYEAGYDGFWLHRLLEAAGITNFVFDAASIAVEQRSRRSKTDRIDGELLLRTLMAYLRGEPRVVRIVRVPSVEQEDARRASRERDRLVEEQTAHTNRLKALLRLAGMAVGNPRRRDWLAWLERQRDWRGEPLPPHLLAEVKREHARLMLLREQLAALEQAQAAQDITVPAPMVERRNKLQRLKALGPAFSTTLVNEVFYKDFRNRREVASYNGLSPSPWKSGGIDREQGISKAGNHRARVKAIELAWLWLRHQGDSALSCWFRARTANAGKRARRIAIVALARKLIVALWRYLSTGLVPEGAAMKA

SEQ ID NO: 481076 - protein, 323 aa, unidentified
MSNPVVLGIDIAKQKFDAALLIGGKLKHKSCKNSTEGFETLSQWLRKQRVDCLHACLEATGSYGDELALYLYDAGHTVSIVNPARIKGFAQSELLRTKNDKMDAGLIARFCLAMHPEPWEPPAPEIRALQALVRRADALIGMRTQEMNRLGTAARAVEPSIREHIAYLDEQIEKIKQQIAEHIEGNPELKNKKALLSSIPGIGPATIAAILAEINIFKRCDEVRKVVAFIGLAPKEKVSGTSIKGKPRLCKIGHARLRKALYMPALVSIRYNPVIIDFYRRLKSKGKNGKVIVCAIMRKLVHIIFGILKSGKPFDPNYKPHFA

SEQ ID NO: 481077 - protein, 296 aa, unidentified
MDTLFVGLDVHKLSISVTTAEDGRDGAVRFCGEVANTPEQVRKLAGRLSRSGSRLEFCYEAGGCGYGIYRQLTEMDHGCLVAAPTLIARKPGDRIKTDRRDSQMLALQHRAGGLTAVWVPDEVHEAMRDLVRARGDAMMALMRARQQLLAFLLRHGRTYPVGKPWTLRHRRWLAGQAFEQDAHRIVFQDYVEAVWAAQDRREQLEARISAMLAGWSLSPLVEALRALRGLDTISAVSFVAAVGDLGRFENPRRLMAYLGLVPSEHSSGDRIRRGGITKTGNREARRMLVEAAWSYR

SEQ ID NO: 481078 - protein, 349 aa, unidentified
MKILAIDLGKYKSVACNYVTATGTARFATVVTHANEFDRLLSQESPDLVVIETCSIAGWVHDLCCQRGVKCQVANPSSEAWKWKNVKRKTDRDDALKLAQLAALEQLPTVHVPAPETRQRRALLKYRQSLITRRVAIQNHLRAIAQRQGILLDRGSRAWTVAGLEAIQHLAKPLEECSAEELWRGEAALELQALRAVVKLLREVEHKLEAFAASNGSVKLLRSIPGVGRCTAEVVVAYLDNPQRFENGRQVSAYAGLVPKQFQSGETNRQGRISRRGPSLLRKMLVEAGWILLRYNPWAQRLMLRLSRGQKTRRKQAIVALARKLLVRCWAMLRDGTEWHEPPPATATA

SEQ ID NO: 481079 - protein, 344 aa, unidentified
MDHFAGLDVSVKDTSVCIVDDTGRIVREVKVASEPDALLAVLTNPAYRFKRIGLEAGPLSQWLFSALAEAGLPVICVETRHMRAVLKAQINKTDRNDARGMAQMMRVGLYRPVHVKTLRSQKLRMLLTHRQLLLSKAIALENDLRGTLRNFGLKVGMVGKVKFEARIRELVENLPDLAVLVEPMLIVRRVLREQIVILHRRLLAIVRDDEVCQRLMTTPGVGPVVSLTYRATVDIPARFRKSKSVGAVFGLTCAKYQSGEVDWDGRISRCGDEMMRTMLYEAAQAMMRSKKWSWLKAWAMQIARRRGMKKAIVALARRLAVIMHRIWVDGTEFRWTREQATATA

SEQ ID NO: 481080 - protein, 342 aa, unidentified
MNGDYDGRQYVGVDLHRRRSVIVRMTPDGEQLGWVRIDNDPVALGLELAKAGPDPEVVLEATYGWYWAVDVLQSVGAQVHLAHPLGVKGFAYRRVKNDVRDAADLADLLRMGRLPEAYIATPHERELRELVRHRAKLVALRSGLKAQVHGVLAKQGLLPEVSDVFGPTGQAWLRTAPLDLVYRQRINSLLELIDAYDGEIELFRVMIANRFTGHRGYRVIQQISGVGPTFAAILVAEIGDVTRFSRPEKLCCWAGLTPRHRESDTTVHRGPITKQGSKLVRWAAIEACQRTRPGTKLAADRTRIITARGRNIGVVAAARRLLTLVFYGLRDGEIRALGAGAA

SEQ ID NO: 481081 - protein, 414 aa, unidentified
MDTLVERCAGLDIGKADLKACVRTPGKNARRVREIRTFATTTVGLLQLRDWLTGHQVTVVGMEATGDYWKPVYYLLEDTFEVQLLNARHMRNVPGRKTDVADSAWIAQLIEHGLVRPSFVPPPPIRRLRDLTRYRTAVVQERTREIQRLEKVLEDAGIKLSTVASHTLGKSSRAMIEALIAGERDPQVLADLALARMRNKIPQLRQALLGRFTDHHAFVCRTMLERIDTAENTINKLTERIEQEIAPFHQTVTRLMTIPGVSARIAQILVAETGADMTRFATAAHLASWAGMCPGHHESAGKHHGGATRKGDSWLRGALGEAATAAARTKNTYLQARYRRIAAHRGTKRAVVAVGHTILTSAWHMITAEIDYADLGADYYQRHQDRRAATIRLVGKLTQLGYRVTLDDAATVAT

SEQ ID NO: 481082 - protein, 351 aa, unidentified
MMIIGVDYHPSFQTIAFLMEETGECGEQELKHSDGQAEKFYRDLKQRGISVRVGMEATGYSRWFERLLAELGFEVWIGDPAEIKTKRVKKHKTDREDARLMRKLLLENRFPRIWVPDPENRDLRQLLWHRHRLVQMRTRIMNQLQALAMNEGYRWKKRLFSEQGRAQLEKLTLAPWASRRRQELLELLDRMNPTIEELTAAVEREARKRPTVQRLMTHPGVGPLTALAFVLIIGTWERFPRGKQIGNYVGMIPSEDSSAGKQRLGHISKQGNSLLRFLLVEAAQAAARVHPDWRRRYIHLAMRRHKSIAKVAMGRRLAIRLYWMWRNGCEYSQSLEFGSYAGQLGTGHGVK

SEQ ID NO: 481083 - protein, 359 aa, unidentified
MIVVGADSHKHTHTVVGVDQVGRRLGERTVRATSDGHLALLEWSAQWPEVTFALEDCRHLTRRLEADLLAAGQRVVRVPTRLMAAARRAGRQPGKSDPIDAEAVALAALRHPDLPVAELDGPTREVKLLVDYRRDLVRQRTRVANRLRWHLHELDPALQVPSRGLRRYKVLEELAVRLAGVEGTVARLARRLLARCRELTVEINALEAELRSLVRRLAPRLLAVPGCGVLGAAMILGETAGAHRFRSKDAYARFTGTAPIPVWSGDRRGKMRLNRGGNRTINTALHMIAVTQIRGIGPGQAYAERLMARGKTRTEAVRLLRRRLSDVVFSALRTDEQARSTSTQTRYSAAAKAASARAA

SEQ ID NO: 481084 - protein, 344 aa, unidentified
MLHAGLDLSRKKLDVCLLSDRGEHLDQLAVPPDVDSLRRLARRIEEVHCQPVCAVIESMTGARIVRDTLEQQGWSVEIADAQKVKGLSPLACKTDKIDSMVLAVLSHRDLLAAIWPPDLSVREERELARFRLHLVKHKSALKNRIHSTLINFGKPCPVSDLFGLEGRRLLKRLQVPEPWRVNITASIELIDDRERQIDEINRRLKEGHAEHPYIPLLLTVPGIGWVLAFTIAAEIGAIERFSTSEKPTGHTGLCPRVSQSGEKDRRGPLTKHGPTYLRWALLEATMHALRHTAYSERYERTKRRLGKQRGAKVALARRLAHAIWHMLSRKEEFAPRGAAFRLAA

SEQ ID NO: 481085 - protein, 343 aa, unidentified
MQTVTTIGLDIAKSVFQVHGVDAAGQVVIRRQLKRRTVLAFFQKLPPCLVGIEACASSHHWSRELQALGHSVRLMPPAYVKPYVKRQKNDMADAEAICEAVTRANMRFVPTKTAEQQSCLMLHRTRHLLIRQQTAVINSIRAQLAEFGIIAPVGRKGVTELLHVVADPNDKRVPGVARACLAALGTQLLSLKEQIMEFDRMILDWHRSNETSQRLHYIPGVGPVLATALVASVADPRTFRSGRNFSAWIGLVPKQHSSGGKDRLGSISKQGDRYLRSLFVAGALAVIRYAKIHGTKHRPWLTALLARRPTKVAAIALANKIARMAWAMMAKGERYKQPVALAA

SEQ ID NO: 481086 - protein, 337 aa, unidentified
MKYSGIDLHSNNAVVAVIDDQDRVLYCKRLANDLSSIIAVLASFNEDLQGVVVESTYNWYWLVDGLVAAGFAVHLANTSAIKQYEGLKYAGDERDAVFLAHIFRLGLLPEGYIYPPEERGLRDLARKRMQLVQQRTLNILSIENIVARQLNLRLNAQQVRHLDNAAVSALRLPPHIECALMANLAVVRTLQAQIHAIETVLHRTVKLRPEFSILKTAPGIGETLATTIMLETGSIARFHSVGQFSSYCRCVESKRISNGKKKGEGNAKNGNKYLSWAFIEAAAVAMRSCPQARRFYDRKRSRRMPVVAMKALAHKLARAAFYMLRDGKPFEVTKCFG

SEQ ID NO: 481087 - protein, 406 aa, unidentified
MDEIIIDKGCGLDVHKETVVACVMGSGIKKDIRTFSTMTNDLLRLKTWLSRLGITHVAMESTGPYWKPVFNVLEDGFTLILANARHIKNVPGRKTDVKDSEWICRLLRSGLLSASFVPSQRIRELRDLTRYRRKLTQALSAEKNRIQKVLEDANVKISSVLSDTFGVSGSQMIEAIMEGKLREEEIADLAKGRLKSKKEEIREALVGYFHDHHRFMIKASLEHIKYLEKLISDLDRATKEKLEQYQKEYELLQTIPGVKEQGAAAIIAEIGADMDVFPSEGHLSTWAGMSPGNNESAGKKKSGKTTHGNKNLRAALTQCAWAASKTKNTYLSAKYHSLVGRRGKKRSLIAVGHKILVMAYHIIKNGVPYKELGKNYLLHRREDKIVKNHIKRLRDLGYEVELKKAA

SEQ ID NO: 481088 - protein, 468 aa, unidentified
MKSAIGIDPDSRGFVCALVMDGKAQATNRRFSVSQEGLREFLDWVSARGTPLVGIEGTHGQSRPMEKALREAGVVFHSFKPADTDKFRKAVLGQNKNNERDAESVARYSLALEAQGLLEQYRRVYSPDMELQMLTRRYESLSGELTREVNRLWKLLHDACPDLYLLLGGENGEIEQRGKVLKNQGILNLLISKPHIGEWKDLSGSQMQEAMGGGDYKGRGQLIAELQEAAARFPSVSAGIAMVIRHSAGQIQRFKAEQGELVRMLDSLTEGNRAVQCLKSRRGIATLTAAKMVAEIIDIRRFAREDSLACYSGLGMREHSTGNTTMMVPTRLFNHRLKDAFMTAARNVVLYDPGSHLAGYYRNLVKAGMRPLEATKRAARALVRVIFRELSGLTETKVHDAEQKGPKEGEGDMASGVTRSGRSRKSNISPSSRRISKSKRAKKVKTTRALIVRTGAAKKKGALTEKNA

SEQ ID NO: 481089 - protein, 352 aa, unidentified
MDKYVGLDAHARTCTLAVMSPAGKRLKSMVVETSEALLVDAVRDIPGDVHLCLEEGTQSAWLHEILSPHVCEIVVTMPEKNQGAKDDLRDAWARAEDIRTGRVRTRVYKAPQHLAGLRSAACAYRLATRDVVRTKNRIKAVCRSRGIRADAGVYEPASRDKWLRQLPSGPRELAEWLGQELDGLVPLRDEAEEWLLKEAKSHPIIRKLRTGPGMGPIRTAQLVAIVGTPHRFRTRRQFWSYSGLAVVTRSSSDWVQSRDGGWVRGQVYQTRGLTRQRHPVLKAVFKGAATSVILQLPEDPLHAHYQRMLASGIKPNLAKLTVARRIAAIVLAMWKHQEVYDPQEHAVVTDKA

SEQ ID NO: 481090 - protein, 410 aa, unidentified
MTLFCGIDWAETHHDVAIIDAAGQLVAKKRIPDDPGGFADLVELLAEAGDSAESPVPVAIETPRGLMVASLRATGRPVYAINPLAVARYRERHSVARSKSDHADAMTLANILRVDAHLHRRLPADSELCQAIAVLARAHQDAIWARTTAHHQLRSLLREFYPTFLAVFTGRFTLGIASPEARAVLAIAPNPAAAAKLSVRRIAAALRRAGRSRGIDQAAAEIKAGLRNPQLRQPLLVETAMGKNALALLAALETACVNVDELGQASAELFRQHPDYSIITSFPGLADSTGARLLAEIGDDRSRFTDARALKAYAGCAPITRASGRSISITHRHIKNNRLANVGWMWAFTAAANYAPARRHYRQRREHGDRHAAATRHLFNKLLGQLYHCLQQHQTFDEAKAFPMPVCEAA

SEQ ID NO: 481091 - protein, 341 aa, unidentified
MSESALIGIDLGKYTFHLHGQDKSGREVFRKKCSRAQMMQFFGNVPSCVVVMEACAGSHFVARQLMAMGHTAKLISPQFVKPFVKGNKNDFVDAEAICEAASRPSMRFVTPKTESQQTLSVLHRMRESLVHDRTKTANQMHGFLLEFGISLPKGLAIMKRLASVLAEHELPVRLTVLLQRLHDHFVYLDEQIKALDKELAGQLANDDLGSRLLSMPCVGPITASLLAVEMGDGKQYRCGRDFAASVGLVPRQYSTGGKANLLGISKRGDKHLRQLLVQCSRVYMQRLDHQKGALADWVKTLLSRRHSNVVACALANKLARIAWAIAARHTQYEAGPDALNA

SEQ ID NO: 481092 - protein, 371 aa, unidentified
MISVGIDVSKGKSTVCILKPYGEIVSKPFNITHTQKDLSELSSMLFRLNDEVKIVMEATGIYHLPVLTYLQEKGFFVSVINPYLMKSYRNESLRKAKTDKIDSRIIANYGIDHWFKMKEFQTSGEIYEELKLLGQQYRHYMKLHLLSLAELTHLLDLTMPGIKNLLASWNETNRKDKRSDFVERFWHYDVITSMSEQEFTEEYILWAKEKKYVPSQEKAKVIYTLAQESIPTLPSETSSIKMLVTEAVRVLKEVDATLGLILSRMQEIAKTLPEYSVVREMGGVGNTLAPKLIAEIGDVRRFRNGKALVAFAGIDPPPYESGQFVGCNRKISKRGSASLRKVGYETMRSLKMRSRPEDPVYRYVVKKESER

SEQ ID NO: 481093 - protein, 322 aa, unidentified
MAMLSFGGIDVSKDRLDITVLPDEQCSSVSNDAAGWAELIEQLRGSSITAIGVEASGGYERGVVRALLAAGMSVRQINPFKLRQFAKASGILAKNDRLDARMIASFVAIMPTRPAQRQTPMIEQLAAMLTVRRQLSDHKVATENASRLLEDAMLQRLSRRRVAGLTADIDLLDQRLVEIVTADPALAHRFRLLTSMPGVGAVLACTLIALLPELGQMSRKQVAALVGLAPYDFDSGKLKGRRCIWGGRARVRHVLYMAALSASNWNPALKAFHDRLAATGKKPKVVIVAVMRKMITTLNAMLRDGTTWVDRYSGRRSASTAR

SEQ ID NO: 481094 - protein, 423 aa, unidentified
MKPLSDRPFTAHVGIDWADAKHDVCLQGADSEQREFDRFAHQVGSIDRWAKSMHQRFGGPIAVALELAKGPIVYALQKYDFFVLFPINPATLAKYREAFKPSGAKDDPTDAELALDLLLRHPERFAPLKPQSVAMRTLLSLIEQRRELVDDKTRVTNRLGNALKQYYPQALDWFEQRDTILFCDFLRRWPTLSAVKRARQASLKAFFYAHNGRRPKLIDERIDSIRAATPLTDDMGVIAPYRLQVLVLVEQLRVTLQAIDRFDRQIAAVAATLPDYALFSPLPGAGPHLAPRLLAAFGEQRERFMSADELQKYSGIAPVTERSGKKRWVHWRWQCPTFVRQTFVEWAAQTINKSFWAGVYYRQQRDKGSSHQAAVRALAFKWIRILYRCWQAGTPYDESTYLNALRQRGSPLLKQLHPTAQNA

SEQ ID NO: 481095 - protein, 331 aa, unidentified
MSVHVGLDVGSRTTAMGWRDKGRAAGSWDIAQTPKGRKAAVKKLKALKPLSVVMEATGMYYLDLALELNAAGLPISVINPKSSRNFAKLVLQHNKTDAIDAQLLAEYGERMTPRLWMPPSPAQLELRAIGRHINRLTGHCTRAKNELHALRATETTSAMMIEDEEEAIAMFGRRIERFRQAGLEIIANCPALQEQFNHMAAAPGMGDVSTFAVLAELTTLPETLKSSQVSRYAGLDVRLTQSGTSIDKPGRLSKGGNAYLRSAMFMPALSAIRCDPYVKAFYEGLVGRGKRKMQAICAVMRKYLTGLWACMRSGEDFDTAKLFSDKHLLKA

SEQ ID NO: 481096 - protein, 453 aa, unidentified
MSKQKKQKNEQSLSLGIIYPKAAGLDVGSMNMVVSYPTANSVQTVKEYDAYTQNLHQMAKELQQAGVTHVAMEATGVYWMAVYEVLEQYGFNVTLINARHYKNVDGQKTDVKDCQWIQQLHAHGLLRSSHIAEEQYRELRTYIHERNVLQNQKSDTLNRIHKVLTQMNIKFQHVISDIEGVIGMQIIRRIADGVTGVENLLADIKTDRLKASKEKLGKSLEGIFKPQFITVLKNHLIAYDFYKKQMWAYEHIIEDVLKKMLPVTDTAQQLAPIKKKTTKARKNQYHFNLKEYLLQIVGVDLTEIDGLDEAAVLAIISVVGLNMNKWPTAEHFVSWLNLAARPKKSGGKVLGHQKRFTNNLATQLFRMAAQTMWQSKGPLGGVYRRLAHTKGSKKAIKAVARRIAIIFYNMVKKQTKYNPKIVVLDEEKIKAKKIARLQKEAEKLGCRIEKLAA

SEQ ID NO: 481097 - protein, 338 aa, unidentified
MTQFEYFVGVDIASETFMACVGATPWKLVEKPVKFENHVDGCAFFLGWLQERGFKPGNTVVCMEATGVYSEELAYFLSASGYAVAIESPLNIQRKFPLNTSKTDWLDCQYIAEYACRYVDKLALWQPRNEILEQVKLLLTTRQQFSVQLAAHKNALHAANRKKVSSAVAKQVHQDIIQQIGKLIHDIDAEIRRLLESDPTFKQTLLLLLSVPGIGLQLAAHLLILMQTSLDPRELAAYLGICPYQHESGTSVYAAPTSRHFGPPALRKLLYLAACSVRTHSKPFQQYFLRKTTEGKSGKLVLNNIQNKLLKVACAVVRTQKPFIKNYVSVNPLALHGA

SEQ ID NO: 481098 - protein, 390 aa, unidentified
MLRTKLQNSIDFKGQKFYVGLDVHKRSWSVTIRSMGIQLAHFTQPPVAETLFNFLQRNYPGGCYYSAYEAGFCGTGIHEQLCKLGINNIVVHAADIPTTDKQKKNKTDVHDSRSIAQHLEKGNLHGIHVLSREQQELRSVFRLRAGKVKDVTRANNRLKSAMTFFGVVIPESISKKEFLSLRALRWLNNYEMASPAGRITLDQYAEELKYQRAQLFQTTKLLRKQIQDFHGKSYEYLLSVHGVGSIIGMAFLAEIADFSRFNDPDEYCSFLGICPWQDSSGDIIKTKGIQPRCNRYLRPLLMEASWMAIRKSAKLFAYYSKHAAKDSKKAIVKVARKLALIIRAVVIKQQPYQEGYLQQKLTPKKNSDRFSSGIAEQHENKQPDKNVLTS

SEQ ID NO: 481099 - protein, 328 aa, unidentified
MTMNPTQAPFKHVVAFEVAKTSLVVHRLPADEQCAIANARPAIRRLLRAEVRRNAKARLGPLLIVVEATGGYERHVLDAALDLGLACHRAHGSRVRFFARYLGLIAKTDRIDARLLATYGLKTERLRLFRPLRPEEQALKELQARREEIQQMLIAEGNRLEHAGLASVVRSIKTHIAGLRKALDAIEAEIAALIDANESLARKARLMRTVIGVGPVTAATLLANMPELGSLTKGEAARLAGLAPINRDSGKASAPRHIVAGRGAVRRCLYMAALVALKRNPVLKAFASGLRARGKPFKVVITAVMRKLIVTLNAIVRDGEPWNHARPA

SEQ ID NO: 481100 - protein, 366 aa, unidentified
MTDIIAPESPPRRVIIGVDTHKHVHVAVAVDTFGVRLDNRSFPADSHGYADLVGWAEATGRVEAFGIEGTGSYGAGLTSVVRRGGHRVVEVNRGDRRSRRANGKSDTLDAEAAARSVLAGTSLAVPKTADGQVEMIRQVKIARDTAVKARTSAMITLKQLVVNAPAELREQLDPLADKALLDRCASLRPGTITDTTASAKHVLRAMAKRWLTLHAEISDHDRILNELTAQIAPSLRDGFGIGPDTAAELLIIFGDNPERVRSEAAFAKLCGACPIPASSGMTSGRHRLYRGGHRQANAALYRSVIVRMRFHQPTMDYVARRTADGLPKKEIIRCLKRYLAREVYQRVMTDVRARQGAGGTRAFAPS

SEQ ID NO: 481101 - protein, 444 aa, unidentified
MAVRKREDEVFPNAAGIDIGASSHWVAVPRHLAEAAGDEPVREVGAMTDDLNALARWLVKLGVDTVAVESTGVYWIPVFEILEQHGLQVWLVDARQMKYVPGRKSDVQDCQWLQKLMSLGLLRAAWRPSADVCVLRAVARQRETLIVEQGSWVQRMQKALVQMNIQLTEVLSDVMGQTGQAIIRDIVAGQRDARVLASHRHRRIRASEDDIAKALTGNWREEHLFVLKQALGMYDDIGRHLAECDAQLDALLDERAAAAVDVGALPRAGSKARTEHDIRQRLANWAGVDLTRIDGLGVTVVMKLLSEIGPDVSRFASVKHFCSWLGLCPGTKISGGKVLSSGTKRSANRARQALKLAAQALSRSESALGAFYRRLCARMDKPKANTATAHKLARMVYFMLTRGEAFVDQGQQRYEEQQRQRSIAALKRRAAALGFQINPLEVAA

SEQ ID NO: 481102 - protein, 481 aa, unidentified
MKIKSIYPARNSSQLREVLGKYSPGELLYAPIDVAKYNHKACAVNFFGDILTPAFEFSNNAHGVKFFISKITEAARNAKAKKIFIGLEATGHYHQNLTLHLKSLGYEVAVINPFDSWKERLNKSSKTDKIDLGSIAKSLISRKFSSSTVPQGVYYNLQRATRTRRKFVNRRTSSKNIITGLLDNLFPGLWDKEDTIFSDRWGKASLSVLEHYPTPQMILRLGEKRLTRFLKKGTTKLGEKTARKIISAAKVALTRSPYEQTMDILALRSHLQAYRLYEEIIFHLEKEIAYLLVQTPGTYLLSVPGISVTYAAEVTAEIGDISRFAYANQIISLAGTCSKKDQTGEHDPQNLPISKKGNKFLRTVLNQAELSLNTWCPDFNAYYSRKVEEKKGRCGIARTATGNKFARLAFALMKHESLYHPHSFNTLVQDPGNYYLSVYGEILKKLRAFSSEKILPQSNYLEKIKQKLEKEYAINLSEVKG

SEQ ID NO: 481103 - protein, 325 aa, unidentified
MIVKQYIGVDMAKATFDVCFGDSQSVKTFPNTTSGITRLFRCIGKEQPSGETARSSIYIGVESTSHYHLLLCMRAKEQGYTPVLINPLVTNKYSQRNIRKTKTDTIDARIIRYCAMQGEGYPFTQTAADITLKNLIRDREYLAKLHWILTMRQSSADFKSFAIQQDIPSMSADILVLTKQKMKETERMIRQYRTEEQKLLQTIPGVGPLTAATCIAEIGDIAKFQKPKHLIAFIGIDPKVHQSGSSIDKYRRISKRGSTILRTRLYNAASVAVLRPNQFYTYFHKKKDQGKPYRVALVATMNKMARVIHAVWMNNAPYQEPTTII

SEQ ID NO: 481104 - protein, 350 aa, unidentified
MRTKPIPETAAFGIDIGKKVFHVVALNAAGAVIQRAKFSRDTLMAFFETAPKVLIGMEACPGSQWLARRLVTIGHDARIIPARFVKPYVKSNKTDTVDAAAIAEAVTRPTMRFVEVRTTEQVDLQALHRIRDRLVGQRTALMNQARAFCLEYGLAMRVGAGGFHANIRRHLANAENDLTPGMRVLLEELLDDLAYVEGRIKAVNAKVETYAAEHEAVSRLVTIPGIGALGATALVAAAGDGRQFKKARDLAAWLGLVPAEHSTGGKQTLLGISKRGNRYVRRLIIHGARSCLLHLNRANHALGGWLTSLEARTHRNKAVVALANKLTRIVWAILTKPGTVYLQSKGAAAS

SEQ ID NO: 481105 - protein, 412 aa, unidentified
MSKEFVGGAGGFGVPKTPCMLPPKPAEMLESVRGEGTERSAVPSPRTAGDRSLTLRTGHSLTQSVWQQDRRRFLRPSPNSRLSRCTTASSHRQGREPVVNTILHFVGIDVSKADLDVCLLPQGARHRLANSASGHQQLLQQLPPPGQVLIVMEATGKYSRQVAAELLQHGHLVAVVNPRQIRDFAKAMNVLAKTDRVDAAVIAQFALKVQPRTLEKMPEQQAELDALVTRRRQLLQLRVAEHNRSEANDSLIVRKSLQHTIKHLDAQVEIIEEAIAKLIESDQQWKNKSDLMQSVPGVGQVTASSLLAEVPELGQLNRQEIASLVGVAPFNRDSGTFQGHRRIYAGRRAVRSVLYMAAMAARRSNPVIKAFAKRLEAQGKKTMVVLVACMRKLLVILNSLLKTNSPWKTLHA

SEQ ID NO: 481106 - protein, 413 aa, unidentified
MTEENFAWFAGIDWGSERHQACLVDAQGRIVGEREFPHGGKGLAELCDWLLSMCGAADTVAVGIEVPHGPVVDTLIDRGFVVHAINPKQLDRLRDRHSVAGAKDDRRDAYVVGDGVRTDRRLFRRVHVTDPRLVELRAWSRLAEELTEERVRLSNRVHHELWRYYPQMLKIADGDVAATWVLDLWDLAPTPARAHRLRAAPVEKLLKHHHIRRIDADAVLRNLQEPAIKVGKGVAEAASVHLRSLFTRLRVVNRELRQADAKLDALCAAIGETDADSGEGLQRQDVMILRSMPGIGRINLATLLCEGSGPLSRRDYPALRTLCGAAPVTKRSGKSHIVIMRYASHVRLRNVVYHWARVATQHDPKSRERYAALRRRGKSHGRALRGVADRLLGLACVLLQRQTPFDPNFAQAK

SEQ ID NO: 481107 - protein, 404 aa, unidentified
MQRVTIGVDPHKLSATIEVVDGHETVLAAGRFSTDKAGYAAMRKRVEAWPERTWAVEGSNGAGRSLAQRLVADGERVVDVPAKLSARARLLDTGHGRKTDADDAHSVAVAAVRAKQLRMLAHDPDLEALRMLTDHRDELVQRRVQTVNRLQRLLAELTPGKAKKDITALQAKAILASVRPRDVVGKTRRRLAAEQLAELVAVEKKIKQLGNELKAMVTASDSSLMELPGVGPIVAARVLADVGDVARFADRNRFASWTGTAPIEASSGEIIRHRLSRAGNRRMNHMIHIAAATQIRLDTPGRAYYRRKLAAGKTRAEAMRCLKRRISDALYRQLLADARRQADIESEDAGPGGHCGATHQSSAVDLPPHIDTSDQPLPGPANPTLQPALRPRKSTADHTPSAAS

SEQ ID NO: 481108 - protein, 345 aa, unidentified
MQPMYYIGLDVHKRTISYCVKDSSGAIHAEGTIPATRFDLDRWMKTLPQPWSAAMEATVFTGWIYDHLRPHAAALKVAHPLMLRAIAAAKKKNDRIDAKKICDCLRCDFLPECYMASTAIRERRRTLRYRNLLVRQMVQMKNKIGMLLMEAGVSYNKQRLHKAGYFRELLATNPDIDEGLQSLLRLCRETVARLQRTESALVRSLERDSLLVERVERLMTIPAVEPITALTWALEVGDVQRFSSIKKAISYCGLCGAEKSSGNTVQRTPLSKQRNKHLQTTLIEAAKMAPRNSSELAMLYDKEKQKGNANRATLAVARKLVAYLMAVDRGQRNFQVVETSNGIAA

SEQ ID NO: 481109 - protein, 369 aa, unidentified
MVKTTLYVGLDTDSKHIDVGLAEPLPRGEVRYWGKLANEPGSVDRLVRRLQKGGRELIVCYEAGPCGYGLYRQLSCKPGVTCQVVAPSLIPRRPGDRVKTNRRDCLSLAKLLRAEELTAVWVPDPAHEAMRDVVRARSAARGDLNRCRQRIGGFLLRQGIRYAAGKPWTQRHRRWLGQVELGETAYRLMFGELLDTLDQAQARHDRLVDHIRELVPQWSLAWLVEAIQALRGYRLIQAVTVAAELGDPRRFSSPRPLMAFLGAVPSEHSTGESVRRGGITKTGNGRARKALIEAAWTYTRPIRAAAPMHHAPAVRAIAEKARHRLSGRYRRLLARGKLPVVAVTAIARESLGFIWAIAHAAGPEASRRS

SEQ ID NO: 481110 - protein, 359 aa, unidentified
MPQDHLDRYCIIGIDTHKDVHVAVALDQLGRRLEELHIPTSTVGYTQLENWAIALGSVKAFAIEGTGSYGAGLTRFLSDRGHRVVEINRPDRATRHRLGKSDPIDAEMAARSVLCGVASGTPKDSRGNVEMIRMLKMAKDSGVKARTQSINQIKAILITAPAELRESLAGLPVGVLLDRCAAFRPGKLTSTTAVAKHTLRLLARRNFGLRVEIAELGQQIRTLADVAAPQLIKVFGIGPDNAARFLMTAGENPDRLRSEAAFAALCGSNPIPASSGKTNRHRLNRGGDRQANAALHRVVVIRLRWHEPTRAYMSRRLAEGKTKAEVIRCLKRYVAREIYNVLCPRNTDANTQTTLVQAA

SEQ ID NO: 481111 - protein, 341 aa, unidentified
MEGVSTIGLDLAKHVFQTHGADASGAVLFRKRLRRHQVLAFFSSQPPCMVAMEACGSSHHWAREISRLGHQVRLIPPAYVKPFVKRQKNDAADAAAICEAAQRPTMRFVVPKSAQTQAAGLVFRARDLLVKQRTQIINALRGHLAEFGIVAAKGPARVPQLMRAVGDPDQPIPELARPVLQMLIETLRGLDEQIARLDHEIAQRAKENEAARRLMTIPGVGPVTAVALAALAPPAETFKHGRDFAAWVGLTPLQRSTGGKQKLGATSRMGERTLRRLLIIGANSVLVQVARHGAPAGSWIARMVARKPPMLVRVALANKMARIVWALLARGEVYRAPAAAV

SEQ ID NO: 481112 - protein, 350 aa, unidentified
MPRKFDTAVVTIGIDPGKNTPHLVGLDARGEIVLREKVARTKIVSRLANVPPCLIGIEAGMGTHYVTRELLALDHDVRQVPPVYAKPFRQTHKNDFRDAHAVAEAVQRPTTRCVPPKTDDQLDLQALHRVRYRLVGQRTAIINQIRCFLLEHGITVRQRLHWLRHALPDILAQRIDVLSPRMVRILEDLAQDWRRLDDRIEAVTDEIDALSKNTEPCRHLMTIPGIGPIISSAVVAAIGNGTAFACGRDFAAWLGLVPKQISTGDRTILGRITKRGNRYLRMLFLQAARVVLLRPKNWMKHGFGPWLAAAAQRLHHNVLATALANKLARIAWSVLVQQREYEARLSVAAI

SEQ ID NO: 481113 - protein, 452 aa, unidentified
MKHKRAGRGGAVPSLECIEPNAAGIDVGAREIYVAVPANRDPKPVRCFSTFTQDLQALAAWLLACRIRTVAMESTGVYWIPLFQILEAAGIEVCLVNSRHVKHVPGRKSDVLDCQWLQYLHSVGLLRASFRPEDVICQIRSLLRHRDGLVEMAAQHVQHMQKALSQMNLQLHHVLSDLTGQSGLAMLDAILAGERDPRVLAELRDGRVKASAETIVQALVGDYRREHLFTLHQSLQAYRYYHQLLAACDQEIEAYLRELDSKIDVEQNPLAPEPKPHRPRKNEFRFDLRSELYRILGVDLTAVPGLNALSVHTLLGEIGRDVSRFPNAAAFASWLGLCPQADKSGGKVLSAKTRRTKNRLNRSLRLAAQALHRSQSYLGNYYRRMRSRLGAPKAITATAHKLARIVFHLLRTGEAYNESIFAAEEQRCRVRTEHRLRRHARQLGYDLVPLPA

SEQ ID NO: 481114 - protein, 355 aa, unidentified
MYGLKHQKEKRSMDHFAGLDVSVKKTSVCIVDDTGKIVREVKVASEPEALLAVLKNPAYQFKRIGLEAGPLSQWLYSALAEAGLPVICVETRHMRAVLKAQINKTDRNDARGMAQMMRVGLYRPVHVKTLRSQKLRMLLTHRQLLLSKAIAIENDLRGTLRNFGLKVGMVGKVKFEARIRELVETLPDLAVLVEPMLIVRRVLREQIVILHRRLLAVVRDDEVCQRLMTTPGVGPVVSLTYRATVDIPARFRKSKSVGAVFGLTCAKYQSGEVDWDGRISRCGDEMMRTMLYEAAQAMMRSKKWSWLKAWAMQIARRRGIKKAIVALARRLAVILHRIWVDGTEFRWTREQAVAA

SEQ ID NO: 481115 - protein, 332 aa, unidentified
MTTPNATDCIFAGIDVSKLKLDLAQTGIQQVATFTNDPAGISQLVELLLKAPPKLIVVEATGGLERPLLDALLEANLPVHLANPKQVRYYALSLGILAKTDPIDAHVIERYAAQLSPRLLQKRSEKQGELEALVTCRRQLLHVRTEQTNRMGQTTSKPARKSIQAILKVLEKQLKSLERQIRQLIESDDDLDDIDKLLRSVPGIGPVASATLLCEMSELGKMDRGQAAALVGVAPFNRDSGRFKGKRVIRGGRRAVRSVLYMSALCAIRCNPILGAFAQRLQKAGKLPKVIIVAAMRKLVCFINAMIRDGLRWDQLNIVKKLNSVKTLPQNT

SEQ ID NO: 481116 - protein, 263 aa, unidentified
METEIGCDISMDWIDVCVLEPPRHFRLANQAKPVERLARALPPGSRIGMEATGTMHQLLADAMCAAGHTVYELNPRWVHRYAGGVGVRGKSDRTDAMLIARYVHAEGAHLHPYRSPTPQQREIRTLLHRRAQVMKLKTASRQSLGDQANEVVQKFKQLVKDIDRRIATLLGADPQWKGLAAKLRRIPGVGPLVAAHLVEALARRPFEAVKAFIAYTGMDPRPNDSGRKKGIRRLTHHGDAHLARSAVHGSHGGLQGCAMARYL

SEQ ID NO: 481117 - protein, 341 aa, unidentified
MKNKSFIGIDISKNVIDASIFCEGTPIKDFPHAVFNNSRKGFGEMCTWLKKNHVVLSNCLFGMEFTGSYSMELEKFLNARNYQFCMLSTHVVKHYPMEPKDKSDKIDSAKIADFLYRYNGTECVKPYKMPDKTMQRLKTLMNERKFLVEQRTSFMNRKQLCTTKEDAQLYDSYIKNLSHDIENIELEEQKLLATDDSLLATYKNLLTIPGIGFVNAMNVIVITRNFTAFETARQYASYIGVAPHFHTSGTSVKWRPRPSARCDGQAKADLSMAASVAVQYDAELQSFYNRKLGGKQDSDTKRKALNAVKFKLVLRMFAIGKQNREWEPLDSKSSNEKLAIS

SEQ ID NO: 481118 - protein, 408 aa, unidentified
MRVIGMDIHRTFAEAVMIDGDRLIRLGRIKMSRDHLAAFAAKLTSEDHLVIEATGNAHAVVEAVAPFVGRVIIANPRQVHLIAKARIKTDVIDATVLARLYASGFLPEVWVPDQSTLRLRRQVTRRNQIVRQRVRLKTMIQAILHAHLVPQCPHADILGPKGRAWLLTQLLPDDESAAIERHIREYDRLTDDLRVVERELARDALGSAETKRLMTIPGIDMVVAVGLLAAIGPIDRFTSPGRLVAFLGLNPSVHQSGNSPARHGRITKQGPCHARTMLVEAAWQAVRGPGPLRAFYERVRGRRGTHVAAVAVARKITVIVWHLLTRGEDYAWVRPALHAKKLRDLELRSGFPARRGQRGAGYAYNLARSRREERQRGERAEAAYKRFTQGWTKRGRRVSADASKEERQ

SEQ ID NO: 481119 - protein, 318 aa, unidentified
MNTKINQSINVGVDTGKTQLDIHIRPLDLFFSVENNDKGIKKALKTIKSHSPERIVIEATGRLEMPFVLACAEAQLPIVRANPVHIKRFSGAIGRRAKNDRLDAELIAHYGEAIKPALTVIKPKNIRLMSDLVIRRNQLLSMQTMENNRIQILPASLHPTIKPMLTTIKNQITKLEEKLVKLIEDSPEYQAKNTILQSVPGIGSIAAASIISNVPELGYITNKQAASLIGVAPITRESGRYKGKRVIQGGRAQVRTVLYMAMMSAMQCNPVFKATYARLVAAGKPKKVAIIACVRKMVVTLNSMLRDGAMWDENTAKN

SEQ ID NO: 481120 - protein, 369 aa, unidentified
MAFFIGVDLHKTQFTVHVRTEEKVESLDQIRQYPTTTAGYAEFLSRIETYKATGAAVKIGVESTGNTRFFKNQVEKAGAEVTVINTLKFKVINESTKKTDKHDASTISEFLSKDMLPESYLCGKETENIRRLLKSRERLVRSTVGQKNEIHALLVSLGLSDELRSLQSKKGRQRVLDTLESNNDYVLEAQSVKLMFEIIERIEESVKIIEKQISELTKDDEMVNRLMTIRGCGKITAWTVRAYTEDISRFATAKKYAAFCGLVPWVQDSNETIHHGKITKRGPQELRTCFVQLVMGIRRCKDTSEWRMMQRYEYMKKNKGSGKSIVAAARKMAEIVWAMLNDKQDFDSAKMIGRYKPIILADEALTAMN

SEQ ID NO: 481121 - protein, 359 aa, unidentified
MPMLADSVDGVIGVDTHRDTLAAAALTPVGGILAQATTSTTAQGYQQLLDFARVQVPGSPARRCWAIEGAGSYGAGLAAFLHTRGERVVEAARPKRPASRTGAKTDAIDAVRAAREALGHEHLALPRSRGDREALRVLLTTRRHASVSRVAAINQLKALIVGAPDELRAELRGLTTRAQIARCAGLRDRPARSPEHRMTVRVLCTTAQRIQHLQAEIDELTGQLTTLVDAVAPWLTDLPGVGPVTAAQVLVSWSYAGRLRSEAAFAALAGVSPIAASSGQVTRHRLNRSGDRQLNRALHTIVLARLRDDPQTRAYATRRVAEGKSPREIRRCLKRFIARQLFKLLEHCDQPGVELLRAG

SEQ ID NO: 481122 - protein, 360 aa, unidentified
MHATTVAVDLAKSVFQLVVADEHWRITDTQRLTRTQFERWFVNRSVGLVVMESCGSAHHWARWLGGLGIEVRLLPAQYTRAYVRRNKTDATDAAALLEAARAADIRPVRVKSVEQQALQGLHRIRSLWMGTRTSRINALRGFLREFGIVIPVGARTGVEAISRVLADPNTAVPDLIRGSAKLLVEEIRLLEARIAQVERELAAAARLSPACTTLLSIPGIGLLTATALVAATSGDVSHFQDARHFASWFGLTPREFSSGNSRYLGRISKKGDRYLRMLLTHGARSVLRAAKVAEGAGKDVCGVRRWALQVQGRTNHNKAACALANKLARICYATLRDRAAFDENSRLGKKMNRQAFVMPA

SEQ ID NO: 481123 - protein, 423 aa, unidentified
MEVIHERVAGLDVHKDSVVACVRIMSGGKAKRECRTFGTTTAELEALRDWITSWECTLVAMEATGVYWLPIWKILLGGAFEMNIANARHIKAVPGRKTDMNDAMWIADLAAYGLIRASFVPDEEFHELRTLTRTRKQLVRDQTSHVQRIQKTLTEANIRLDSVISDIMGVNGRRMIEAMIEGVRDPGKLAALGDRRLKATRKELHDALHGRLTEHHCFLLKLHLDQHDALEKTIRVIDAEVERRIARLDKQAKPAETPLSRLIELLVSIPGVSYLSAITIISEIGSNMSRFPTAGHLIAWAGLCPGQNESAGKRKRSRLRKGAPWLKTMLVQCAWAAKRQKNSYYRAQFYRLQARRGPQKAICAVAASILTAIYHILKDGVPHQDLGIDYFDKRKPEAKVKRLVAQIAKLGFEATLQPIAKAA

SEQ ID NO: 481124 - protein, 361 aa, unidentified
MRTLQLPTHDHLVMGHDSEEPSCKRSRQLVSTSPSRSSRCAAGRVVIRRQLKRRAVLAFFQKLPPCLVGIEACASSHHWSRELQALGHAVRLMPPAYVKPYVKRQKNDMADAEAICEAVTRANMRFVPTKTPEQQGCLMLHRTRHLFIRQQTAVINSIRAHLAEFGIVAPVGRKGVMELLQVVADPSDKRVSEVTRACLTALGNQLLSLKEQILEFDRMIMAWHRSNEPSKRLRYIPGVGPMLATALVASVADPKTFRSGRNFSAWVGLVPKQHSSGGKDRLGSISKQGDRYLRSLFVAGALSVIRYAKIHGTKHRPWLTALLARKPTKVAAIALANKLARMAWAMMARGQRYRNPVALAA

SEQ ID NO: 481125 - protein, 381 aa, unidentified
MDQKQGIREQRAQVPVLYVAFELANSTWKLACSDGGKLRQVTVNAGDLAQVQRAIIGAKRHFDIGDEVHTVSCYEAGRDGFWLHRYLQSCGIDNVVVDSASLEVDRRLRRTKTDRIDAGKLLSMLVRYHGGEKHLWRVVRVPSREDEDARHLHRDLEALKRERTRYRNRIHGILIQQGLRVKNPSTKKFVQALELMRTWDGRELPPEMKVRLVRVHERLRLVEEQISCLVKEKTLRLKAETARMAQVAQLMRLPGIGPVSSWTFVMEFFGWRRFRNRREVAALAGLTPTPYDSGKRLREQGISKAGNRRVRTLAIEIAWAWLRFQPRSKLSRWFLERFAGGGSRMRRIGIVALARRLLIDLWRFLEYGVVPGGAQVRPLAV

SEQ ID NO: 481126 - protein, 424 aa, unidentified
MNNTQNDKLMQIKPETLVVGVDVGKNTHYARAFDYRGIELTKLIKFSNTRKGFEGFEGWIRSLMVLNGKADTIVGFEPTGHYWFALGDFLKSCGYKLGIVNPYHVKCVRELDDNSPSKNDHKDPKTIAMLVKDGRYRDVYIPDDLYQELREAVVERERLNEQLAAIQNQVIRWLDIRFPEFNDVFKAWTGKSAMMTLKSFPTPALVCSAGVDEILETWQKASKTASRRKAEMLLELASASIGRVTGSNAALAALRNLLQQYELIVEQQECIECMMQELLLRVPNASKILEIKGIGVVSAVIIISEIGDISRFKDPRQILKLAGLNLKENSSGKHKGKTTISKRGRRRLRESLFRTMIPMLANNPEFRAIHARNTARSVNPMNKMQSIIALCGKLVRVIYAILSKGNNYDSGKLLSDMNLQQEAA

SEQ ID NO: 481127 - protein, 344 aa, unidentified
MNTIKVVGIDLAKSVFQLCVWMNDGTVAWNRKVSRSKLLDTVRQFPPDTLIAMEACATSHYWGRTFQSMGYAIRLIPTQHVKALTRHQKNDANDALAICETAFRPGIHFVAVKTLEQQDIKALRCARQLMVEQRTAAANQIRALAAEQGFEFPVGIHTLQQRLPDLIEDAEKPVSPVLRHLLSTLLENIHTLNEYIRSTEYEIAALCQQQPRYRALMTIPGVGPLIAAAFLSEVDAEQFANGRQLSAWCGLVPRQHSSGGKHLLTSMTKNGNCDLRTLIIHGARAVMRCAQKRDDRLGRWLNHVTERRGKMKATVALANKLTRIVWRLLSEPVDFNMDKAFAMK

SEQ ID NO: 481128 - protein, 355 aa, unidentified
MMEPVYCGVDFHARMQTIAYCDSANGEIQLAQLDHRKDDVRGFYSQFTGQVIVGLESGGYSSWFEAMLEELGHTVWIGHAAEIRRRAKWRQKNDRRDAELVLEIMLNGDFPRIHCHSRESVEVLRMLRYRARLIKMRTMISNNLQAIAMSCGLSERSRMLSRARQQQLKSARMTPAIKHQSEDLLTLLVPVNERIGRVDKWLKEQSSIDDRVKLLMTHPGVGVLTALGVVHTLEPFNRFSKQRSVVAYVGLEPMERSSAERKRYIGISKAGSRLLRFLLGEAAHVAVRLDPELKQFYQRVGQRRGKSKATVAVARKLLIRCWIMLRENIDYAEFRSRGVEARLARNIARPSVPVE

SEQ ID NO: 481129 - protein, 347 aa, unidentified
MSITMIGLDTAKSVFQVHGVNETGKVEIRRKLRRSELLPFFEKQEACTIVMEACGAAHHWARILSGLGHEVKLIAPEAVRPFVKKGKKNDPADAAALCTAASRPDMMFVPVKNIEQQGILALHSARSLLVKQQTMLANAMRGLATEFGLTVPQGIGRLEELLALVDTDKAFPEKARQVFTGLFDQCRALAESIRAFEVEIVAHARQDETACRLATIPGVGPITASLIAATVVDIGLFKSARHFAAWLGLVPRQYSTGGKTRLGRITKTGNREIRRLLVLGATSMVYRAPQWKSVVGVWTRGILERRPVRLVTVALANKMARIAWALMTRKEVYRATGRVAAATEAAA

SEQ ID NO: 481130 - protein, 421 aa, unidentified
MPPSEFSAYVAIDWADQKHHWQLADAEGMRREQGELLHKPEAIDTWVAGLLARFPEGSLALCLEQARGALVYQLGKYARLVLYPVHPTALNSFRKAFFPSGAKGDPGDAGLLLELLLHHREHLRRLNPDTAETRQLRLFIELRRRLVDERTRQSNRLTAWLKMYFPHPLDWIDNIDSPLGCDFLERWPTLERLQRADAATIERFFREHNSRSEARIQQRIVAIRGAIPAVHDAALLQAGAAATTSLVAMLKALNGAIASLDQQIAEQVPRHPEVDLFVDLPGVGPVLLPRLIVAFGTQRDRYQSASELAAYSGIAPVTRQSGQSKSVHFRFVCPKFLRQTFQEFAAHSISNSEWARQYYQRQRDKGVRHHAAVRALAFKWIRILYRCWKDRTPYNETRYLQSLRLRHAPKDSPSPQNPEAD

SEQ ID NO: 481131 - protein, 313 aa, unidentified
MAQSVITAGIDVSKPYLDVALYPKRETIRVGRDASGLAELAAWLTQHDVHRVGLEATGGYERMVMDRLSAAGFEVIRLNPLFVRRFAEAKGRMAKNDQADARTIAQFTAVMLDNPKPGRRTDLDALAEHLALRRQLSDWATDCGNQLEHLTDRALRKQLEALRANFERRKLAIEVKLARMIAERDDWATLEQRLRSVPGVGPVLAQTLIALLPELGQLTRRAIAGLVGVAPYDNDSASHSGERHIKGGRSAVRDVLYMAALVAKQHNPMVAAFAKRLAGKPPKVILVACMRKLLTILNAMVRDGVGWKATKPA

SEQ ID NO: 481132 - protein, 391 aa, unidentified
MENVSAQPGAPNAVRVDLGAIFVSLELSRSTWLVTSLSPGSGEKMSKRAVDGGDIAGLISLFEDLRKKAQSRTGRLFPIVTIQEAGLDGFWIHRVLEANGFESHVVDAASIAASRRRRRAKTDKIDGEALVRALLAFKRGEPRVCAMVKAPSPDDEDRRRICRERKVLIAERVEHVNRIKGLLFAQGISGYEPLRKDRRKRLGGLATGDGRQLPRHLKAQIDRELDRLELLLQHIAAVEEERDAMMSATKEAPHPASGPAAMLGALKGIGSEFAAILWAEGFSRHFDNRRQVAAYAGLAPTPWQSGTIDREQGVSKAGNPRLRTTMIQLAWLWLRNQPHSALSRWFVQRVQSNGGRLKRSTIVALARKLLVALWKYAALGIVIEGAIMKNA

SEQ ID NO: 481133 - protein, 358 aa, unidentified
MEPKYIGFDIDSKNTVACAVQQGRKDVFQSFPTDTRRMQKYLRQLGRDGSPLHLTFEISGEAGYRHDALRPYVESLTVSNPNKMTWIFRTSRKNDRIDARKQAVLLSIDEVPKVHIPVLEVRQWRATIQHRRLLVNRRTAVKNRIRALLKAHGLAQPPHRGSWWKRANQRWMEQLTQDWSEVSGETLWRVQLKNLLEELTLLGGQLKQVTSYLDQYLDRHPGGVLLMSIPGVGPRTAEAVLAYTDDIRRFLRSKQYCAYFGLTPKLDESGLRRRLGHISKEGPSVVRWLLVESAWRVVARVPAFQAFYERVQAGQPNRRKVAVVAVARKLLAIMRAMLQSGELFNESLVAAVPAKSRR

SEQ ID NO: 481134 - protein, 356 aa, unidentified
MKKTNYLNFVNQHIYIGIDVHALRWVISIVAGELLLGTFSQDPKTKLLINYLRKNYPGGIYHCVYESGFSGFWLHDELHENGVDCIVINAADVPTTHKEKDRKTDKVDSGKLAKSLSLGQLTGIYVHSRELYEERSLIRTREALVKEQTRCKNRIKGLMKFFGIEISDEEIKTHWSKKYIEYLDNLETEYVYAKVSLRIYLEDLKHHRIQISDVTKQIRKLSESERYQHLVNLLRTIPGISILSAMIILTELGNIERFSSLDRLSSYIGLIPSEYSSGEKQNRNSMTRRGKSILKRLIIESSWIAIRKDPGLLMCYTNLCKRMKKTRAIITIARKLIARIMYVLKQNQEYKFLAVS

SEQ ID NO: 481135 - protein, 313 aa, unidentified
MTSGKYVGVDVSKRWLDVRVHEEGEGWRVGNDPEGFASLVGRMKLIGPRMIVFEATGGYERGCVKVLGEAGLGVAVVNPSRVRQFARSMGKQAKTDKIDAKMIAHFASVAELQPKSRRTPMEERLAACVERRRQLLLDLVAEKNRLSTSPDCIQTDIAEHIAWLNGRVAKLEIEIQACIAQNDEWQTRAQLIDSVPGVGPVTATTLVAELPELGQLDRQEIAALAGVAPFNRDSGPKKGKRRIFGGRAGIRRTLFMAALSAVKFNPVIRAFYASLLMRGKEKKVALTACMRKMLVIINAMVKAGKPWKFLPVA

SEQ ID NO: 481136 - protein, 386 aa, unidentified
MPQLNDLSRSLTPFVQGNTLVAVIELSLSSWLVAGVVPGVERQPLKKLEPDETGLLRLLQRWRDEAVKGGCMIERIVVAYEAGRDGFWLARWLQVQGIEAHVIHSSSVAVSREHRRAKTDRLDTAMLRRVFMGWLRGERGHCGMVGVPTIEEEDAKRPHRERENLVGERTRIINRMKAALIRPGIRGFKPELRRAPKKLDALRTPEDLPIPPNTLDEIRRDLARLAMVREQIDLIEQARLARIEQAPDTGPNAMVRLLASIVGMGVETADMLVQEVLSRNLRDRRAVARYAGLTGSPDESGAKRREKGLAKSGNARVRRGLVQLAWRFLLFQKDSALSQWCRARTGVQGVRKTVLIVALARKLLIALWRMVTIGEVPHGVVLRATA

SEQ ID NO: 481137 - protein, 370 aa, unidentified
MLDTTIFVGLDVHARSIKAVSLDVMTGEVRCATFGYDAGAVAGWVRSVDPRARCVYESGVTGFDLQKRLSGLGVDCVVGAVSKMIKPSADRRRKNDRNDAEFLARMLSVGNVVEVWVPDDECEAARDLTRALEDARDDLSRSKQRLSKFLLRHGLVFDERTPTGRRKGNWTRAHWSWIESIRFAEGADNDVLAYYVDAVRRAAEEKARLEGLVEAEARKPRWRRRVDSLRCLKGVDTATAADLVFEAGEFSRFGNARSFAAWVGLTPSEHSSGESDRRGAITKAGNKHLRKALVEAAWHYLTCSGRPKEPARGQAPDRGARRHAAKGVRRLVERREALLARGVHGNKANVATARELACWVWAVGLMAEEA

SEQ ID NO: 481138 - protein, 332 aa, unidentified
MTAVSTLGIDLAKNTFSVHGVDAQGVVTVRRTVSRAKLGELVARLPPCLIGMEACSGAHEWARRFSEAGHTAKLMAPKFVTPYRKSGKNDGNDAEAICEAVGRPNMRFVPIKSVQQQCDLSLHRVRLGFVEERTATLNRIRGLIAEFGYVVPLGTERLRREVRDLLEQLPARAASCVRDLLEHAERLRSKALEYEREIRSSLQHNELALRAHTRPGIGLITASALVATVGNGHDFRNGRQFSAWLGLVPRQYSTGGKTRLGHITKRGDPYLRTLLVMGARSVLQRAYRETDPLSRWALALQQRRGYHRACVAIAAKNARVAWALLAKGAAAA

SEQ ID NO: 481139 - protein, 361 aa, unidentified
MKTNVRALVDGYDHFIGIDHHKRTSYVTIKDREGEIVKKGGIVSTKASIADFIEAIPCDGDNLEVPRRIAVIECGRTYRPMYRWLSEIVDDVVLAHPGGLKIISDTVYKDDKIDSGKLSDLLMLGMIPEAHAASDEAWERRMVLRHRIMLVKMQTEVKNRIHVVVDLHPDALPRRPDVTDMFGKLGTAWLESLKIPDSDRRRLDELLEILEFLGAMIKKSDSLVRKMVREDKTCALLKTIPGIGDFYAALIAAEIDDIDRFHGPKNFVSYTGLVPGRDSSGGKESSGSIHKRGNKYLRWALVEAAIPATRSDLALKNKYDSVVARKGGGKDAKKLAKVAVAGKLAWIVYRVLKDRRPYEIR

SEQ ID NO: 481140 - protein, 443 aa, unidentified
MSELAVLDPRAAFVDVGSEKMHVSIAGGPPALFGTVTSQLHALRDYLAEHQVRSVAMEATGVYWLPLYGVLEAAGMEVVMVDGRQTRNLPGRKTDMKDCQWGATLHAHGLLRAGFVPPASIRRLQDYLRLRGDHIAAAAGHVQHMQKALERMNIKLHEVISSLTGASGLTVIRAILAGERDPQVLLGLCDIRIRNVKAERVVESLRGDWAEEHLFALAQAVQSWDHYQGLIAACDRQIAVVLRQMPDAKVPPPAASTKAGKPRTRPGVNAPDIADLREILAQICGAKDLTTLPAHSEYSVLQLIGEVGTDLTKWRTEKHFTSWLGLAPGSAQSGKRKASVKRRRNRAGQIFCVMARALARSKYVALGGFYRRMAARRGGLVANKALARKLATLFWRVMVKGLDFIETGVAQYETRVLETKHRILHRLARQLGQQIVPNPAAVV

SEQ ID NO: 481141 - protein, 402 aa, unidentified
MRWIGLDVGRDFAHAAVVEDKGSARKLGRFRMGDEFRAFAASLGADDVVALEASTNTWALAELLGRHAGRVVVSNPLRTRAIADAKRKTDDIDAATLAELLAADYLPEVWQPDEITRRLRRLVSHRASLVRDRTAVRNRVTAILARRLLRPPASDPFGVRGRAWLATLELPGDERLTLDAALRLDGLLRAEVETAERAIALLVVDDPRIGRLLTIPGIGLVTAAAILAVIGDIGRFHRPAKLVSYLGLDPRVRQSGDRPALRGHISRAGQAHARGLLTEAAHAAARTSGPLATFHERLRHRRGAGIAIVATARKLAVLVWHLLTKDEDCRFANGERTTLKRRGLERLAGRVAEGTRSSQRGATGSSHDRGRARLRGGTDPHEPALRQAINRVRLDDTSPSTS

SEQ ID NO: 481142 - protein, 340 aa, unidentified
MEKRFIGIDLHRNRFTCCIRLENDRTYISEWALEDLSRFVKKLRPNDEVAVEITSNTRLFHDAVAPQVARVVVVDTNQFRVISQSVKKTDPHDARLLSLYLSKGLLPEVRMKDKERAQLASLTQTRDTLVKQRSALKNKVNNILSARGLNLAKEALSSEKKLQQVLELPFDDVVRFELRILVEQIRVLNKSVAEMENKIGEEGSKLKGYQNLSSIKGIGTITGAILLSVIGDVNDFADEGRLASYFGIVPRVSKSNETERSGRIHKRGTKLGRTALVQSALIAANYSPYLKRFYEQVKARRGAGKAIIALARKFLGIIYRTLKNNWVFEDFPNFVLAEAS

SEQ ID NO: 481143 - protein, 411 aa, unidentified
MENILACCAGLDVHKESVEACVRRSDPNSRVHSETRHWGTMTRDLLAMTDWLAAEGVTPVAMEATGVFWKPIFNILESRFTVLLANARHLKQVPGRKSDVRDCQWIAQLLQCGLLKGSFIPPLAQRELRDLTRHRTQLVDEKTRTINRIQKVLEDANIKLASVASDVMGVSGRAMIQRLIEGENNPYRLADLAQGQLRGKIPELEKALEGKLTDHHRFLLKLLRKELAQQQELIAELDTKIDEHTRPFAAEVKRLDAIPGVDHRVAEVLLAEVGLDMKPFPSDEHLSSWAGMCPGNEESAGKRRRRRITPGNRWLKRTLTQAAWAASHTKNTYLASQYRRVAGHRGRKRALIAVGHSMLVIFYHMIRSGATYAELGGDFFDRLEPERLTRYYVKRLERLGHKVTLETSVAA

SEQ ID NO: 481144 - protein, 361 aa, unidentified
MANSMRCVGLDVHVRETQAAVLDLGTGEVSYRRIRGRPHEVVPYLEGLEGPLRAVYEAGPTGYGLARRARERGLDVGVCAPGHILRRRQDRIKTDKRDAERLARLLLAGELRLVHVPEPWQEELRDVVRCREDLRVDLMRTRHRISKLLLRRERYFPGPGRAWTHRHRDWLSGLRFADRASQVVLSDYLHAHDVLLARRERVEAELFELALASPFAQTVRNLRCLRGIDTLSAVGLCCEVLDFERFRAKQLGSFLGLVPSEDSTGEEQRRGSITKAGSKHARRLLVEAAWHYRHQPYVSDKLRRRQLGCDPRAVDIAWRAQRRLYRRWQRLAGERGKLETKVAVAVARELSCFCWEIATLD

SEQ ID NO: 481145 - protein, 354 aa, unidentified
MKHLQLKDGDRLRRQCIGIDVSKKKFTFCLCQSTEQDLHFYTKPRELENSESGFRHLLAWSGKEVDSSVPYSFLMEATGCYHESLALFLARKGMTVIIAHANKAKDFARLNGQRTKTDSVDSKMLSTMGCDTTNLKPWPVPDEKYLRLRDMSRLSEQLEKTHAQVLCRMESTTHSGYVTESVLRAHKSLLRSIEKVQAANEQHMAELVNGNPVIKAGVDNMESIKCIGKKTAILVAAETFGFHQMTSAKQVASYAGLDVKKEQSGDSDKKGHMTKRGNAHLRAGLYFPAMVASWSNPQLMEDYNRICASHPQSKNIALVALERKLLCLMYSLWKNGRQWDPEYGQDKKQEEAMS

SEQ ID NO: 481146 - protein, 346 aa, unidentified
MNQIIRIGMDTSKHIFQLHGVDAAEQAVLRKRLRRKEVLAFFAKLPPTVIGMEACGAAHYWGRELRKLGHEVKLMAPQHVKAYVKRNKNDGRDAEGTCEAMGRPTMQFVPVKTEEQQAALMLAGVRQQLIARRTQLSNAIRGYAAEFGVTAAKGLDKIEPLLARIAQDESLPALARELFAIEGREYAQVQAELKAIEAKLMAWHRANAASRRLAQIPGVGPIGATALVMKTPDPRAFPSGRHFAAWLGLTPKDHSTAGKTRLGKITRAGDEVLRSLLVAGATAVIQQVRRGRGHPSPWLVALLKRKPPKLAAVALANKIARIAWKLMTTGESYDGARMLGASALAA

SEQ ID NO: 481147 - protein, 323 aa, unidentified
MSKHSMICAGIDTGKYKLDVAITGSREQLQVDNAADGHATLSAWLKRHKVQRVGIEASGGYEQNVVAQLRRDNFVVVVFQPAQVRAYAQFLLQRAKNDKIDAALIAACTAATKKIHAPPDPRLVPLAERMTLIDQLTEKIAGFKNSREGSRDPRIRQLWKEQIAHFNGLLQAELKALVAAIRAHRDLAERLDLINSVDGIGLKTAVAILVRMPEIGCVTREQATALAGLAPYDDDSGTHVGIRHIAGGRQRLRGSLYNAALCAAFHWNPQLMAFYGRLTAAGRPHKYALVACARKLLIFVNTVVARGTPWVSGRTSSAARTAA

SEQ ID NO: 481148 - protein, 325 aa, unidentified
MVLEELPDRKEVKLVFVGIDVSKARLDGAVRPTGEVFSQPHSPEGIAQLVQRLQAMQPSLVVLEATGGLEQPLVIALAESDVPVVVVNARQVRDFARATGRLAKTDKLDAMTLALFAEAVRPQLRSLPDAEHRALAALVARRRQLVEMIVAERNRLHASRDSAVAEDIRAHLAFLEERLAQMDRELVQAVVAHSGLKMRFDLLLTTPGVGRVVALTLLSELPELGRVNRRQIAALVGVAPLNRDSGQLRGYRGTWGGRAEVRRVLYMAALVAARWNPVIRRLYQRLVAAGKPAKVALVACMRKLLVILNAMLWSGTCWAPRAMEA

SEQ ID NO: 481149 - protein, 391 aa, unidentified
MIYIGIDVAKDKHDCFITNSDSEVLFKAFTILNNLDGFNDLYQKIESVMDDVTKVKVGLEATGHYSYNLLGYLIDKGLPTYVINPLHTNLYRKSLSLRQTKTDKVDARTIASMLMSDVNLKSYSDTSYHNEELKSLTRYRFDKVKERAKLKTSVSRLVCILFPELEKLVPTLHMASVYALLSEFPSAKHVATAHLTRLTNLLSESSKGRYGKDTAITFRDSARASIGSNMPAKSLELKHTIKLIQELDSEIDEIENEIKIIMDEINSPILSIPGINYRMGAMIIAEIGDFNRFDSPDKILAYAGFSPSTYQSGQLDGAYAHMEKRGSRYLRYALYNATKYVCHWDPTFAAYLAKKRAEGKHYNVAISHAVKKLVRVIYHLEKTKQQYIKVA

SEQ ID NO: 481150 - protein, 306 aa, unidentified
MHACVGIDVSKATLDVAVYGSSEVRAFANSPTGFRRLAAWLLPQYPRQVVLEATGGYEQAALDALFAAGLPMVRANPRQVRDFAKALGQLAKTDRLDARVLAQLAATISLSPYQPACDWQRRLAQWHQRRGHLVQMIGSERQRLERLADPTLLTWARRHIAMLQRELRRLDAQIKHQVATQPALDPLRSLKGVGPVLQAALACQLPELGHLDGKAIAKLVGVAPLARDSGLMRGQRHVWGGRRQIRAVLYMASLTAIRYEPRLRDFYQALRARGKAAKVAIVATMRKLLVILNARMRDARSKEQPA

SEQ ID NO: 481151 - protein, 387 aa, unidentified
MEVRVVNTPSAGRNNDPVHCFVAIELSKSNWVVGFQTPLTDKASRHQVKAGDAKGLIELIERVRMRVGRQLSRPVEIVSCYEAGYDGFWLHRVLEAHGIHNHVLDPASLQVSRRARRPKTDRIDAERMVRALIRHLRGEPEACSVVCVPNVEQEDAKRLHRERRRLIAERVQHVNRIKGLCATQGIYDYSPLRKDRLARLDGLRTGDGRALPTRLKAEIVRELKRLELVIEMIATVEAERDAILTNPASTHVNAGKIKMLAKLRAIGPEFATNLVGEVFYREFANRRKLGSYVGLGSSPFCSGSVDRDQGISKAGNSTARSMMIELAWTWLRYQPGSALSVWFRERVGNLKGRPRRIAIVAMARKLLVALWRYLETGLVPTGTALKA

SEQ ID NO: 481152 - protein, 402 aa, unidentified
MTIFAGIDVSKFKHTCCIIDENGEVIRKSFDFRNSKEGFDALIETFKLIDQPESIQIVMEATGHYHECLFRYLVANNYQVQIKNPVVIARFKQSEYLDKAKTDNLDALLIAQYASKHPFSPSMLKSYNIERIRRIARAKYFLYQDKERTINHLHRYLDESFPELIPFLRKSRDIKRYQGRSFFDSKTTLWFLENFPSAKKFSLARSETAEKLRRMSKGAFSLVKFNELRNIAKNSIGVSYTETETIIIQLVKELRIIQARNEELDQQLEPLIDETAPNLLTIPGIGYRLAGLLVGEIGDASQFPTADKIVKFAGLDVRIYQSGTIEKHGAIRKRGSPLLRYALFQAAEKARIHCSEIAEFYSKKKDEGKHPICALTHTARKILRIAWALLKTGQNYNQLVSD

SEQ ID NO: 481153 - protein, 334 aa, unidentified
MALELLAIDLGKRAFHIYGIDTDGVILSRKVSRAKLAEVVGDLEPTAIAMEACASAHHWARCWLAASRQVRLINPRFVKPFVKGSKNDAVDAEAIFEAAMRPTMRFVPVKSTDQRDLQSLHRARDRLICQRTALINHTRGLLAEYGVVLPQGPRRFMAQAPTAIAGADLSDLARAIFGELMDQLDDLDRRIQKLDAMIVTLCRTNETCRRLTKLPGVGPIVATAIVAAVNDGRQFRSGREMAAWIGLVPRQYTTGGKLRLGGIGRRANHYLRRQLIHGARAIVSRSDKHDDRQSTWLKALVARRGFNRTIVALANKTARIAWVLLSRKQEYAAP

SEQ ID NO: 481154 - protein, 391 aa, unidentified
MIYVGIDVAKDKHDCFITKSDGEVLFKAFTIANNLDGFNELHQKITSVMDDVTKVKVGLEATGHYSYNLLGYLIDKGLPTYVINPLHTNLYRKSLSLRQTKTDKVDARTIASMLMSDVNLKSYSDISYHNEDLKSLTRYRFDKVKERAKLKTSVSRLVCILFPELEKLVPTLHITSVYALLSEFPGAKHIATAHLTRLTNLLSEASKGRYGKDTAITFRDAARASIGSNMPAKSLELKHTIKLIQELDSEIDEIENEIKIIMDEINSPILSIPGINYRMGAMIIAEIGDFNRFDSPDKILAYAGFSPSTYQSGQLDGAYAHMEKRGSRYLRYALYNATKYVCHWDPTFAAYLAKKRAEGKHYNVAISHAVKKLVRVIYHLEKTKQQYIKAA

SEQ ID NO: 481155 - protein, 314 aa, unidentified
MANAVGIGIDVSKDKVDVASTDGWSATYVQTPEGLKELAQAVQARKPHRVVLEASGGYERGPLVALYAAGCPVVLLEPARARAFARSQRKRAKTDPIDARVLGQMALVGVEEDPLWEPLEANLAALRDLVLRRQAVLRIIDEETKRRANAPAAVLASITRVLEVVVSERRLLEKEIDALIASVVELKEKAEILEGVRGVGRTTAAVLLIAVPELGRLSRGSVASLVGLAPMNNESGTWTGKRRIQGGRVLARRALYMAALVATRHNPHIKAFYARLRAAGKPGKVALVACMRKLLVYLNNLLREHGTMRVTAAA

SEQ ID NO: 481156 - protein, 426 aa, unidentified
MNLLILKRSPYVFKKSSTKICCGIDVHKTFVVACIASTNDIGVTSYESHRFSTYTSGLKTLLQWLLKRNCKDVCMESTGKYWIPVYNILENDCSIVLAHPKYVKAIRGKKTDKKDAKWIADLFKHDLVAGSFMPPADIRQLRDLMRYRFKLTCFQSSEKNRLQNCLTVSNIQLGNVVSDTFGKSAQAILDKLLENPADTSFDLEPLVYKSLKKKLPELRDAIDGYITPEQVGKLKVIKAHYESLESRKAELEELILALAAPYQQELAILQTAPGIRSDFTSIGIISEIGTNMEAFPSAKHLCSWAGLTPTNNESAGKKKSVRVSKAGCYIKPLLVQCANAVVTSKKHPEIRNRYLRLKKRRGHKKAIIAIARMLLTALYHMLKNGENYNAELYRKSDLPPANREITVEQAIIIARNQGYKIKSATA

SEQ ID NO: 481157 - protein, 413 aa, unidentified
MDAIVERCAGLDVHLDTVVACVLYGKLDIKPKKEVKTFSTTTKGLLELLDFINQKECTHVAMESTGIYWKPVWNILESGAFDLIVANAKKIKNVPGRKTDVKDAEWIASLLRCGLIEKSFVPPERIRDLRDLTRLRKELLGEVNRNKNRIHKVLQDANIKISSVLSDVFGETGKSILNQIIGNQCITEEFIYSLYEGRGKSKLKSTPMEMYEALNGKIRGHHVILLGMHNSNIVFLEKQINELEKEIDILLQKERDSLELLETIPGISKISASSIIAEIGTSMDVFKTEKHISSWAGLCPKNNESAGKKKRSGTKSGNNWLRSMLCECTWSATKKKDSRFKNKYWSMVPRMGRKKALIAIANMMLRLIYHLLKTKSTYKELEIQYFIDKDKRREDRIIKELKSKGYLVEKDSL

SEQ ID NO: 481158 - protein, 343 aa, unidentified
MAYFAGLDVSVKETSVCIVDDAGKIVREARVASEPEALLQVLTNTIYRFKRVGLEAGPLSQWLYSVLAEAGFPVICIETRHMRAMLKAQINKTDRNDARGIAQMMRVGLYRPVHVKTLRSQKLRVLLTHRKLLQSKAIAIENDLRVTLRNFGLKVGMVGTVKFEARIKELVENLRDLAVLVEPLLIVRRVLREQLGILHRRVLAVVRDHDVCRRLMTIPGVGPVVALTYSVTVDVPARFRNSKAVGAVFGLTPAKYQSGENDRTGAISRCGDEMMRMMLYEAAQIMLARSTKWSWLKAWAMKVARHRGMKKAIVALARRLAVIMHRIWVDGTDFRWTREVAAA

SEQ ID NO: 481159 - protein, 416 aa, unidentified
MNAAGIDVSSRKSTVAVLRPFGEVVKVPFEVGHSAEALLDLARQLKTLDGETRVVMEHTGRYYEPVANVLHEAGLYVSAVNPLLIREYGGNSLRRVKTDKADAVKIARYALDNWADLRDYTPMDTIRYDLKTLNRQFQLASKQKTATANNLIALQEQSFPGIRKCFDSPVRRDGTQKWVDFTYAFWHVDCVRRHSLNAFSERYRKWCKRHGYIFKQSNAEEVYTLAKSAVVLVSSSETTKLLVQEAANQLTSISRSVEIYRAEMNRLASLLPEYPVVMELYGVGESLGPQLMAEIGDVRRFEQKKSLIAFAGVDPMPNQSGDKNVRSNRSSKRGSPYLRKTLFNIMGIYLRCSPAEEPVYQFLDRKRAEGKPFYVYMTAGANKFLRRYYAKVRDYLATLDDLPPVDMDSTGLNQTN

SEQ ID NO: 481160 - protein, 423 aa, unidentified
MMKLKYSICCGLDVHKNVIVATIVTTNKDGISEYLQKSFSTINSDIQRFHNWLIENNCYHVCMESTGKYWIPIFNYLENDIDVCLTHPKYVKAIKGKKTDKKDSKWIADLYKFDLVRCSFIPPKDFRQLRELSRYRFKLVCMKSSEKNRIQNCMTISNVGIASVLSDPFGKTATEIISYLLEHTADSMDEKAVRKLIKKGAKSKSDEIIEAIKGYTIETDQAKKLELARGHLEYLNDMITQTEVELYVRIKPYYEFVEFVSTMPGMTELSSTIVLAETGVDMNIFDDAKHLCSWCGLAPANNESAGKKKSVRIAKAGDYLKPMMVQCALAAIKSKKQPYFAIKYGRIKKRRGHKKAIIAIARMMMVCIYHMVSEKKPFTPTDYEELMDPQNHVESVVLNENNVFAYLESLGYDSSKLVKRNDN

SEQ ID NO: 481161 - protein, 324 aa, unidentified
MSKIIGIDISKQTFDVCFEQQERLIHKVYDNNLFGFISFMELIKNRDIIVMEASGPYYMRLANYLHSHNIIVSVLNPLIIRRYSQMRFYRAKTDKKDAATIMEYGILQRDELPIWKPSQEFIQALQQQHSCLELLKKQYHQTKRQQESFEATGYISNEVSSRLEALLVYLTSAIKEIENQMLAICKSHYNQSYELLTSIPGIGNKTAIMLIVITDNFKKFSHYKKLIAYVGLSPRIYESGTSVKGKGHICKMGKSQIRKLLYLCSWTAKKYNKACKQMYDRLKTKGKPERVIKIAIANKLLKQAFAIANSKQKYIENYQENICF

SEQ ID NO: 481162 - protein, 333 aa, unidentified
MQDLSTKQHFVGCDVSKDTLDLALYQPKTDYRKFEHVQISNDTEGFKQLLQWLKARKIKKNEVAIAFEHTGAYSIALAEWLHKKKITFSMLHPLDVKNACSRGRNKTDEVDAKFIADYAYTMREKLAPSGPEPKNIKHLRELRNERDLCVRCRASYLCQIKVQTEAQTIARMHKMVDFMTVQIHQIEEEIKKIIAADETIATNYHLLISIPGIGMVNAVNTIVATGNFTRFQTSRQYAKFCSVSPMAVQSGISVHSGNHVCKKGHNELKATLSEAARSAIIHDPQLRHYYQRKRSQGKSHGCVMNAVKFKLICRMFAVIKRQQPYVNTECYRG

SEQ ID NO: 481163 - protein, 474 aa, unidentified
MSKKTLKPEVRGSRGPLPAKSKRNKRPNQPDRSVFEPNAAGIDIGAREIFVAVPPDRDPNPVRKCETFTGDLHQMAEWLVSCGITTAAMESTGVYWIPVYDVLEQHGIQPCLVNPRNMKNVPGKRTDFHECQWIQHLHSLGLLHAAFRPDGEVCTVRSMMRNRNDLVQMASQHVQHMQKALTQMNVQFQHVISDITGLTGLAILDAIVAGERDPSKLAQLRDPRIKASEETLRKSLEGNWRAEHVWALKQRLSLYRSYRAQIEECDQEIERLAAAFEPRVDPDDRPLPEDRKKKQRRRKKKSGTPSFDMRTEAYKLFGVDLTQIPGLMTLVFRLFSEVGRDMSRWPTAAHFVSWLGLCPDNDISGGKVLWRGARRTKNRAGTLFRLAAHSLHRDQTPLGHYLRRMKAKLGPAAATTATAHKIAIIFYTMVSRQVEYDASLWGKRDELREKRSEVQLQKQAARHGYKLVPLKPAA

SEQ ID NO: 481164 - protein, 360 aa, unidentified
MAKTKSVRPPFVVGGVDTHKDLHVAAVVDENNRVLGSDFFATTRQGYRQMLTWMASFGTVARIGVECTGSYGAGLLRHLQNAGITVLEVTAPDKMERRRRGKSDTIDAESAAHAAFSLIRTVTPKTRSGMIEALRVLKVCRKTAVAARRIALQMIQMNIVSSPDELRDQLRNLTRMQLIRTLAAWRPDVTAYRNVQDAYRIALKSLARRYLELHDEIADLDIMIASIVDELAPEMIKRNAIGYESASQLLITAGDNPQRLQSEPGFAALCGVSPVPVSSGKTNRHRLNRGGDRAANSALHIIAIVRLRTDTKTQEYVAKRVAEGHSKMEALRCLKRYIAREVFTLLRNQNRQINSTQITT

SEQ ID NO: 481165 - protein, 338 aa, unidentified
MKAYAGIDLHSSNNFIGIIDETDKRLYSKRHENRVDVVLKVLRPFKRNLQGIVVESTYNWYWLVDGLKEKGYKVHLANPSAIKQYEGLKHTDDQWDSFWLAHLLRLNILPEGYIYPKEQRALRDLLSRRLRFVRHRTSTTLSLQSMIARNRGFTMPASSIKTFTEQFVEDMFDSPHLVFAAKSDVAEIQLLNKVIKNIEKEVKTQIQLRKSFQMLLTIPGIGEILALTIMLEVGDIKRFDKVGNYCSYCRCVKSQRLSNGKKKGQGNRKNGNRYLAWAYVEAAHFATRYCSGARRLYQRKKAKSNGAVATKALANKLARASYYIMRDQVPFDEKKLFG

SEQ ID NO: 481166 - protein, 401 aa, unidentified
MSQSFNGAEVVQYDRRLVLAIELSNKSWVLAAQVPGLPQTKAKRAIEPDKLALQSAIDGYCARAVAAGHPVDRVVATYEAGWSGFWLARWLIAKGVEVHVIQPSSVPVDRRMRRAKSDGIDAELLLRTLLAWLRGEPRVCSMVPIPDEADEDARRSVRERTELVSERVSLANRIGAVLATLGVEDYNPLLKNRRRRLADLRTGLGDPIPPHALAKIERLLSRLELVLDQIATLEHDRDAVAEVPASDDASRMIQQLCSLRGIGVQSATILVREAFVRRFANAKALGSYAGLTATPYNSGGVEREQGIGKAGNRRLRTVMVELAWLWQRYQPGAAQVAWFRERTGSTGRRGRKVMVVALARKLLIGSVALCRRWSRARGSDHEARRIIITEIGQLCDCKAAR

SEQ ID NO: 481167 - protein, 418 aa, unidentified
MKVVFPICCGVDVHKSFLVATIIKTQQDSLQPSYQKKRFSTFNSDLNRFADWLRENDCLEVCMESTGKYWVPVFNILEKRGIRVVIANPKWVKAVKGNKDDTKDSKWIGDLFRIGLVKSSFIPDKDIRVLRELTRYRYKLTSMRSSEKNRFQNAFTVCNVALDSVVSDMFGKSATAITDYLTSDEDFDARHCVSLLQCSLKKKADDVLASIEGYEITLEQKTRIGIVRDHLHYIDSLIGRVDTCIDTMVDRYEGYIVLLCTIPGVDRSSAITILSEIGVDMTQFGSSKRLCCWAGLTPGNNESAGKKKSVRISRAGVYLKPALVQVAHAAVKDKLSPYYALKYERITKRRGKKRAIIAIARMILTAIFVMLSNLEEWNPVDLYRVDMPEHLKEKQLAKAVKQAVHFLETQGLTVLNSA

SEQ ID NO: 481168 - protein, 343 aa, unidentified
MDITTIGLDLAKHWFQVHGVDAAGKVVVKRRLRRAEVGEFFRRQAPCLVGMEACATAHQWARELIALGHEVRLMPPAYVKAYVKRNKNDAADAEAICEAVTRPSMRFVPVKDIDQQSVLMLHRARNLLIRQRTMLVNALRAHLAEFGVIAPQGLRHVEQLVAAIEENHVGLPELARSILRLIVAQLNDTQAKVRQIEAKLAKWHRSNRVSKLLATVPGVGIMGASAIAATVSDPNLFRSGREFAAWLGMTPRQNSSGGKERLGRTSKRGDKYIRCLLVAGAVAVLRHARNRATKDAEWVRALLARRPAKVVAVALANRTARIVWAVMARGEAYRAKEIAGQAA

SEQ ID NO: 481169 - protein, 354 aa, unidentified
MEKQNKMLDFTGYKLYIGIDVHLNQWTVTIRMRDLELKTFSMNPNPQQLKQHLMKYYPHGQYYSVYEAGFCGFWAHRELAKIGINNIVVNPADVPTTHKEKTQKRDKRDSRKLARELADGSLEAIYIPTKPQESLRLLSRLLVQLSKRSRQLKSRIKQFLHTQGIILPKRSEMSHWSGRFIHWLKSLEFEYDDARYYLDELLIDLEQARKQKSQHLRKIRARIKGNKIIQLLRTVPGIGLVTAFTFYTEIMDIFRFQKLDHLIAFIGLIPSVEASDKKEKIIGLTNRCNKYLRSLLIEAAWVAVRQDPALTLAFNNLLKTKSKQRAIIRIAKKLVNRMRSVWKNQQQYVIAVIE

SEQ ID NO: 481170 - protein, 412 aa, unidentified
MEVLYPHCAGLDVHKETVVACVRHMVDGVVKREVRTFGTMTKDLLDLSDWLSVEGCTHVVMEATGVYWKPVWHILADGEITLVLANAAHVKNVPGRKTDVNDATWLADLMAHGLVRGSFVPDEPTQEMRNFLRSRKQFTRERTSHVLRIQKTLEDANIKLDSVITDILGLSGRRMIEALINGETDPHALAALAHRRIKASPDELAVALRGRVTEHHRFMLRLHLDHISAVDDAIARIDKEVDANVEPFRTAVNILTTIPGVDDLSTKAIVAEIGIDMDRFPTSSHLISWAGLCPKNDESAGKRRSTRMRKGSAWLKTTLIQSATSAVKKKGSYLQAQYHRVLARRGKKKAIGAVAASILTAAYHMLKNGTLYQDLGGDHFDKRTKGRQVLRLVARLQNLGFAVQINPLEAVA

SEQ ID NO: 481171 - protein, 359 aa, unidentified
MLKYSIGLDISAKTIHACISTIDAAQTVTVKSSCKIDNTLSGFKQLDQWVSKHYRQKDIPLVVNMEATGVYYENCALYLFKQGYSVSVLLPNKAKKWLQSEGLKSKNDKIDAQGLSKMGAEKALELWQPAAEYYYELRAMTRQRQSLQEMKTSVNNKLHAEEHGMYKNKLVTKQLKQQISFIEKQIAALEPVIEAHIAADKHVAVKVENICRIQGLGIQTVAVILAETNGFILFKNAPQLVSYAGYDVIENQSGNHTGKTKISKKGNSRIRRALFMPAFNMIKFKQTPFIDLYKRTFEKHGLKMKSYVAVQKKLLVLIYALWKNNAAYDIDYKNKYTRELEQALPLGMASTEATPENAV

SEQ ID NO: 481172 - protein, 458 aa, unidentified
MNRKKSKPKINRTMPMVHPNAAAIDVGATMHMAAVKADRAPEPVRSFGTFTTDLHRLVNWFKECGVETVVMESTSVYWIPIFELLDARGFTVFLVNARDAKHVPGRKTDVSDAQWLQRLHSYGLLRASFRPKGQIAELRAYVRQRERLLEYAASHIQHMQKALTEMNLQLHHVVADITGATGLRIIRAILAGEHDPKVLAHLRDYRCHASAETIEKALTGSYRAVHLFALEQALALYDAYHEKVTACDARIEAVLKDLSIDRGRRSDSLLAPSRPRSDQVNGLAFDIRTALFALLGKDLTQIDGLGPYLSLKLIAECGDDLSAWPSAKHFTSWLGLAPSNKISGGKMLSSRTRRCGSRAAARLRLAAVTVGRTDTALGAFYRRLSARIGKAKAVTATARKIAVLFYNAVRHGMEYVDPGASFYETRYRTRVVHNLHRRAKAFGFVLQPMEPTPGVAVS

SEQ ID NO: 481173 - protein, 414 aa, unidentified
MNCYCGIDWAEGHHDVAIVGNDGKLVAKKRIGDDPAGFTALTGMLAEAGDSPEDPIPVAIETPRGLLVAVLRASGRPVFAINPMAVARYRERSSVARAKSDHADAMTLANILRVDAHVHRTLPADSELAQAIAVLARSQQNAVWRRSKATNELRSALREYYPVLLDTFAGKSATNLAKPHVRAVLAIAPTPADAAKLTKARVAAALRRAGRKRGIDELAADIVQRLRAPQLRQPELVEKAMGRQVLALLAMLDAACVGADELEHAAAEEFRKHPDHGVITSFPGLADLTGARVLAEIGDDRARFADDRALKAYAGSAPVTRASGKVTSVTYRRIKNDRLAAVGWVWATYAAINPGPARGHYRRRRDHGDRHAAALRHLFNKMLGQLYHCLQTGQTFDPIKAFGQTYLAAEPAAA

SEQ ID NO: 481174 - protein, 313 aa, unidentified
MSQNNPPILYLGLDIAKLSLVIDLAGQPRTVGNHAKGQAQLLKWLRAYPQAHVICEATGGYEQAVVRCLQAARIPVTVVEAGRVRYFARAQGRRAKTDPIDAAVLSAYGQACQPLASVAASPQQQQLAELTQRRQPLVRLRSQERNHLEHYTDRFRLRQAKQLCRWLDKQIDECEQALAALIHADPGLKHKAERLQAIPGVGPVVASTLLAEMPELGRLTPQTAAALAGVAPYNQDSGAQQGLRSISGGRRPVRCVLYMAALSAVRHDRILKAFFQRLVAAGKKFKVALTACMRKLIILMNRLLKDDHFQLAS

SEQ ID NO: 481175 - protein, 315 aa, unidentified
MSPEVVIGIDISKAHLDFGTHPSGEVWRESNEPTAIAHVAKRLIELAPKLIVMEATGGLEIPVAAALSRAGLPVVVVNPRQVREFARATGQLAKTDRIDALILALFGDRVRPEVRPLPDDFAQAFEALLARRRQLVVILAQEKTRLKQARSRPVTTGIQRHIRWLEKEIKDVERDLTKNVRESPVWKAKDNLLRSAPGVGPIMSFTILADLPELGRLNRKQIAALVGVAPHAADSGTLRGKRIIWGGRACVRQPLFMAALAACRSDPGFRTFHQRLVISGKPPKVALVACMRKLLTVLNAMVRDATPWNPTIVRI

SEQ ID NO: 481176 - protein, 333 aa, unidentified
MYSIGIDLHKRDLVMAIEDESGPVGRPRRFVCRDEAAILRHVALHRPFRAVIEASASYRWLYERLAPMGEVVLAHPLRLRASIARPAKTDKLDAALLARLLKMDQIPESYVPPERYQQLRELTRARARLSRAATEAKNLLYHVLAARNVPLRYRRPFGPRGRRWMSALDLGFSGNLQRDELLRRLEHYEAERRVLDEALEKMSADYPEMEALEGIRGLATYRRLLVIAELGEPERFGRGGQVGSYAGLAARVHQSGGHDYHGHITRQGSPWLRWALVQAAIQAIRGDQKLANFYERVRKRSSRHIARVAVARKLAVICWVRLRRWHREHPAAK

SEQ ID NO: 481177 - protein, 317 aa, unidentified
MSVVVGVDVAKRSFDIATPLPNGKVRTKAKLANNPSGFEQFATWLEQHAEPRAWVIMEATGTYHEALAECFHAKGYRVCILNPAVIAKFAGADLRRVKTDKADAKVIAAYGQQKKDLLRQWKPEPPAQRRLRALVRRLDDLKEMQQMEQNRLDVSQIAVQESIRAVIGHISEEIAKTRKAIEQTIDDDPDLRQRRELITSIDGLGDTTAALILAELGDPLKYESPSAMVAFAGLNPMIHQSGEKIGQSTISRTGAPRLRAGLWMPGTVSIRYNPVVKALAERLSNRRKAYKQIVCAAMRKLLPVSYTHLTLPTNREV

SEQ ID NO: 481178 - protein, 411 aa, unidentified
MHNRQNYLYVGVDLHKQHHTAVMINCWQEKLGEIRFENKPSAFSKFLLEVETYVCDGITVVFGLEDVGGYGRALAKYLVDHEQVVKEVNPALSFLERKSQVMIQKNDSWDAECVARILVNKFNQLPDAKPNDLFWSIQQLVSRMNALVKAQSALKNQLHIQLNHHYPSYKKFFSELDGKTALAFWQQYPSPSCLEGANIKQLTAFLLDVSNNTCSVKKASDILKLVKEDGHTMKEYQETRDFLVRSIVRDIEFKKTEMKYIERELKQLVNLLDYQLETMPGIELVTASALTAEIGDVRRFSNANKLARFAGIAPVYFGSGGKGKTHKSKQGNRALHALFYNLAVQQVQVAKGSKLPRNPVFHAYYQKKLKEGKTKGQALVCIMRRLVNIVYGMMKYKTAYELPVVEEKEVV

SEQ ID NO: 481179 - protein, 319 aa, unidentified
MSDKTTIGIDVAKNTLEVFIDTTGQLLHLENSATGVLELQEALSGFAVTGIIMEATSRYHCTAEIMLTAAGFPVAVINPRQIKNFARAMGRVAKSDPIDARIICEYGRRMTPQFRPVKSEGQQYLAVLLTRRRQLIQSRVMETNRFKERCGAYIEQGIKRHIEWLCVEIDNLDAEIKQRLRLDETLDEKRRLLEKVKGIGPITQATLLIQLPELGSLTRRQVSALVGVCPYDRDSGQLRGKRAIWGGRSGLRATLFMAMLSAVRFNPQIKAFFNGLLARGKPKKVALTACIRKFITILNAMFRDQKDWIYGDTGGLHTT

SEQ ID NO: 481180 - protein, 351 aa, unidentified
MQTNLKDFTGESIYVGIDSHLKSWKITLMCDELELRNFTQEPDSKKLATFLRRNYPGADFQCVYEASFSGFNAQRALSSEGISCMVIHPADVPTTDKEKRQKSDRIDSRKLARGLKNGDFIPLHVPSIEQQQDRSLLRIYDKVTRDISRVKNRIKFFLMFFGIEIPSEFQGKNWANGFNTWLKQVNPGGLGNQSFRILLEEYEMLKEKWRELNQMIKELSNQDRYKENVELLTSIPGIGRLTAMILLTEIGDINRFPTLKELSSYFGLIPNCHNSGETERVGRNTKRGNVYLKYILVEVSWMCIRYDSSLLLTYKSAVRTMNGNKAIIKVAHKLLNRIRFVLRNKQPYKII

SEQ ID NO: 481181 - protein, 388 aa, unidentified
MTQAPGARPTPAVLDYERTLILAIELSNTSWVLAAQIPGLPGVKAKRSIEPTPEALMAAIASYRARAETAGRNVDRVVTVYEAGWSGFWLVRWLAKYGIETHVIQPSSVPVDRRARRAKSDGIDAELLLRTLLAWLRGEPRVCSMVPMPTEADEDARRRVRERAELVTERFGLVNRIGAILATLGAGEYNPLRRNRRQRLDELRTALGDSLPTHAHAKIARMLDRLELLLIQITELEQSRDAVLEDKAPDRAASMIQQLAKLRGVGVQTATVLVREGFVREFANGKALGSYAGLTATPYSSGGIEREQGIGKAGNARLRTVMVELAWLWQRYQPDSAQVSWFRERIRGTGRRMRKVMVVALARKLLIALWRFATQGVVPEGAVMKPAS

SEQ ID NO: 481182 - protein, 362 aa, unidentified
MEVAGNAVGLDLGKRTYEMCLIAQNGRATRTGGKTDFAGIDNLCRKLKKDDVVAMEACNLAFRIERAIREQVGCRVIILNQGRLAIIFMSTRKTDKEDSMKLAKFLRSHEEDEMPVVAPPSDEEWTRRKLLSEYRSLKSLRTKEINRLHAIFEHNGYTQFTRKDMCVPKNRENIIALLNGYEEEEAGRLAERLVLVEKQIEVLYRKINEETEKDEKVRRLMTVPGIGPITALSYVAYIGDVTRFENAHQVSNFIGFVPKVDRSCTINRLGHITKQGNSLLRSLLVQAAWSATRSKSGGALRDKYNYMAFTRGIGKGKSIVTVARKMGELLYTLLRNNQDYEPRRFITPEAYVSKLVEEALVS

SEQ ID NO: 481183 - protein, 405 aa, unidentified
MFYVGLDWASETHDLTIIDDTASIIDRWAFTHDETGITSSLDRLAGHGDPGDLPVAIETSNGLLVERLLAAGHPLVPIHPNAFNATRPRWGASRAKTDPGDSYKLADYLRTEGHRLRRLTLPDEATRDLQQLVRLRDDHVTAKVACTNQLAALLARHWPGAGTLFAHLDSPIALAFLADYPTWTSAQRLGQTRMAQFCRRHHYTGRRTPAELLARLREAPQPAQPAISDSVAAQLVTAQATLLCSLLETIASLDKAITKTTAAHPKVHLFAELPRVGRIHLAQLLAEIGPILDRAATLEQACAEAGVTPVTKASGKSLNVGFRYATNTRARQALTLWADNSRHAAPWAADAYRAARRRGKRHPHAVRILARSWMRVLWACWQQNTAYDPERHTTARARHGAPAAA

SEQ ID NO: 481184 - protein, 323 aa, unidentified
MLDIFVLGIDVSKESLSCTLLQADTRRPKWHKEVKNTLAGWNQLLRHTPEGAPWILEPTGRYSQDVARAARKAGRDVRLAQPRKAQMFLKSVQSRAKTDKLDAAGLALYGLSCLGTCCDLAPYPLKSAMQEELDQLLCARKGMSQSVCELQARERELPRAAATLAPAVAALQKQIKEADRQIAELTKAPELRAVKELQKVPGIGPVIAATLASRLTARSFSHSDQFVAFCGLDVRVRQSGKKSGQLGLSKQGEAELRRLLYLAAQASLRAKDSPFKAQYERERDKGLSSTAALCAVARKIARLSWSLVAHGTSYDPQRVYKQS

SEQ ID NO: 481185 - protein, 350 aa, unidentified
MIAINKDIIATIGVDLGKNTFHICAMNDKGTILLRERLTRAALPKRLANIPPCRIGMEACAGSHHIGRQLTALGHDVRLMPAKYVKPFLKSHKNDYRDAEAIAEAVQRPTMRFVPFKSDEQLDLQALHRVRSRLVGQRTAVINQIRTFLLEHGVAVRQGPGALRLALPSILAQRTDVLSPRIIHLIEGLTGDWRRFDERIADVTREIEQLAKQDQYCKGLMGVPGVGPMTASAMVAAIGDGAAFSRGRDFAAWLGLVPKQISTGDRTILGGISRRGNRYLRTLFIQGARSVLQRSDGWEKKSFGRWLIAASKRLHKNVLAAALANKLARIAWAVLYNAREYDTALAPKAP

SEQ ID NO: 481186 - protein, 308 aa, unidentified
MKKLQFEQLISVGCGIDVHKDVILATIRKSSKNYETRSFQAFTSSLIELRDWCILEKVTHIAMESTGIYWKPLFNVLEEYFEIILVNARHIKNVPGHKTDKKDSVWISKLLLSGLLKGSFIPPVAIRELRDLVRYKKKKIQFIAAEKNRMIKFLEDCNIKLSSVVSDTQGVSATKIINDIIDGNDNVKHLITHAHGKIKASKEDIEKALTGKITSHHRFMLKMIRETIDENEKLIAKIDAQIDLWVARYEEEISNLQTIDGVGRDTAITIISEVGTDMGFFPNEQHLASWSGLSPGSNESAGKKKAQG

SEQ ID NO: 481187 - protein, 391 aa, unidentified
MICVGIDVAKDKHDCCILDSEGTTLADCFTIPNNLDGFKRLLQTIKDCTQKSDKIKVGLEATGHYSYNILGFLLDNDLPVYVMNPLHTNLYRKSLSLRKTKTDRVDAKTIATMLLSDVDLKSYTDTAYHNEELKSLTRYRFDKVQERAKLKQSVSRLVTILFPELEQLVSSIHGTSIYALLSEYPGAKQISEAHLTRLANILVTTSRGHYRKDRATHIRDAARTSIGSVMPAKSLELKHTIKLIQELTSEINEIEDAIRKIMDELKPPILSIPGMGFYSAAMILAEVGDFSNFNSPDKVLAYAGCSPSTYQSGKLTNCYAHMEKRGSRYLRYALYTATKYVCYWNPVFTEYLTKKQAEGKHYNVALSHATKKLVRLIYALQKSGKAYLAIT

SEQ ID NO: 481188 - protein, 383 aa, unidentified
MRIVCGLDVHKDSIFLCIMSSTGEIFEKKYGVLTNQLEEMRDLMLTYHVQEVGMESTSVYWIPVWRILEPHFKLKLINPYFIKQLPGHKSDVKDAQWIAECMMKELVRGSFVPPERIQQLRLYDRRIYDLDDEIIRKLAKLDAAVQRCNIRLSNYVSNTDSVSYKSVIDKICEGVTSPEELVMEVHGRIINRHGRETIIASLKGCVTEADIDIMAQLKAEIDMAEAHKQKCMDKMQEICEKEYSEQLRNLQTVPGVKMRAATSLIAEIGTDMSHFETANHLSSWAGLKPRNDQSNKTIKSRRITHGNRYLRRTIIQCAWGASRTKGCFFSRFSYHQTQVRKKNKMKVVVAISRKMLVCAWHILKEGVVYKDFDNMILTPCTKG

SEQ ID NO: 481189 - protein, 338 aa, unidentified
MNKITTIGLDLAKNVFHVICCNEHGKVVRKKMLRRREVILFFTQMSPCLIGMETCSGAHYWAHQFTALGHQVKLIPAQFVKPFVQGNKNDYNDALAIAEAVVRPNMRFVTPKTTAQQDVQALHRLRERRLQERTALCNQIRGLLAEYGLILPQGINVIHRNIPELLEDAENGLSDLFRQLLSQCYQQLQEIDEHIVFYTQTLKIENQQNEACQRLQTIPGFGPIIASVFYATVGDGSAFRRGRDVSASLGLVPRQHSSGGANTLLGISKRGDSYLRSLLVHGARSVVLHAQRKDDRLSRWINKIRSERGYNKASVALANKMARIGWAILSQQAVYRTV

SEQ ID NO: 481190 - protein, 412 aa, unidentified
METVVERPAALDVHKEQVTACVRVPGEGRSREQHVAEFPTTVAGLLTLRDWLAAFGVQQVVMEATGVYWKPVWAILEDEFECLLVNARHVKQVPGRKTDVQDSEWLCQLAEAGLLRASFVPPKPIRALRNLTRYRKTQIQERAREANRLHKALEDTGIKLDCVASDILGKSGRAMLDALVSGTTDPEILADLAQGRLRAKIPALREALEGRFDHLHAVWIGAILNHLDFLDEQISSLTEAIGEQIAPFESAVELLCTIPGVQRRNAECIIAEIGIDMSVFPTDKHLASWAGMCPGNDQSAGKRRSGKTRHGSKWLDWALEQSAMAAIRTKDVYLAAQYARLRPRRGHKKALGAVKHSILIACWHMLSTGELYNDLGGDYFRKRDPERITKRLVAQLESLGHHVTLEALTEAA

SEQ ID NO: 481191 - protein, 390 aa, unidentified
MIYVGIDVAKTTHYAAAADSDGVVLVDPFAFDNDAPGFAKFISKIASFPKEQLIIGLESTGIYSENLICFLFDSGYKLAVINPIQTATLRKTNIRKTKTDKVDTLLIIKSLMVNSYRLYTEQDTQSLKLKSLCRFRQSLKKSKARLKIQLSGYVNLLFPELLSFFKSGIHISTCYTLLKRCSSPAEIAALRLDSLSRLLSNASRGRFSRSTAEALKSLAKSSVGVKNPYISIQIAQTIQQIELLEQQIDEIENVIKDTICELDSVIMSIPGIGAIDGAMILGEIGNIDRFASPAKLLAYAGLDPTVCQSGKFKARSTKMSKRGSKILRFALINSAWQLTLKNDTFFNYYQLKLSQGLSHYGALGHVAHKLVRVIFTLLKHNVLFDPTRLV

SEQ ID NO: 481192 - protein, 482 aa, unidentified
MKKKNIYVNQSQELLTLFEEAGNSAEIMCVPIDYAKKDHVVMFCNGYGDILRKPFSVKNNPEGVSYLTEQVTRSCHNRSINPKHVFFGGEDVGSYAENFASTLRSGGWLVAGVNAHDAKKQRSNMQASTDRLDLMGIATMLLNRRCNCSPAQSGIYRNLRTLVRHRRRLVVMTTEVRNRIHAIVDRLFPGFLDERKSGIAPFSKSSLYLMENRFSAQQIRGRKRSALIEALRRLGTPKPDCAGAKLQQYAAWVLNTPDEYVATLQLSLAQHVKHYRCLQENTDQLEKEIAVWLSQTQGAFLTTVRGIGIVLAAGVTAEIGDPFQQKPLNNLVSYAGIIPRIIQTGGPEGEIYTGKVARRSNRILKDYVVQSASHLGLHGPEDLMSDYKRRDAAGQHADFSIARRYLRMAMCLMRNSQVYLPPRLRKKDSKPEGRASYYLMTWPYLRDKWQKLDALRAAFAEDRPLGRWRNMVQGIYDIKLEL

SEQ ID NO: 481193 - protein, 397 aa, unidentified
MTEYAAYCGLDVGKEAHHACALDLEGKRLFDAELPQDEARLRRLFTDLSGHGRVLMVVDQPNTIGALPIAVARSMGIDVAYLPGLAMRRIADLHPGSAKTDARDAYVIADAARALPHTLRRVDVGEEALAELKVLVGFDDDLAGEATRLSNRIRGLLTQVHPALERVLGPRVSQKATLALLTQYGGPTGLRKAGRARLLQAARKANPRGADTLIEAIVAALAEQTVTVPGTAAADRVLPNLARSLADTLDQRRQIAAEVEQVLDVHPLAEVLTSMPGVGVRTAARILLEVGDGSSFPTAGHLAAYAGLAPVTHRSGISIRGEHPARSGNKHLKRAFFLSAFAALRADPNSRAYYDRKRAEGKKHNAALICLARRRCDVIHAMLRNRQPYQPRTAAAA

SEQ ID NO: 481194 - protein, 356 aa, unidentified
MAIVADTYTYVVGVDTHAATHHYAIVETRSGGQIAHGKFPTHAAGLLRAVDWISRRTSVDDNPAVDQVLISMEGTGSYGAQAAELLAARGYRVVDAPSPKRARGSGKNDHIDALVAARGALPKDSERLADRRAGHTRAALQILLTARDSMRRDRTRSKNQLTALLRTHNLDIDARKGINKAHISLIAGWRKRPTDTTLARIARTEAHRLATRIHTLDADLDSNEKAINALVRELEPTLLDLPGLGPINAAIVLAVWSHPGRIHDEAGFAKIGGVCPLEISSGNSKDHRLNRTGDRQLNSALNSIANTRMRHDETTKAYVKKRKQQGQTKPRIRRCLKRYIARQIFRHLNTTTLDKT

SEQ ID NO: 481195 - protein, 349 aa, unidentified
MKESSVVSFEGQVIYCGIDVHKNSWSVNLRHCRRELKKFSMNPDPEELSKFLNKNYPGAEYRSVYEAGFSGFWAHRKLCKLGIKNIVINPADVPTSGKERDRKNDVIDSRKLARELENRTLEELYVPSKENLELRNLVRRETKLTGNIVRIKNRIRSHFYFLGLTFSGWSGRSLKIMQAEAQKCYDYALLSDLRELRFLREEKLRVIHDEQTCLKRLKRTEIQKHLQSIPGVGFRTAVILQAELWDLTRFPDKNALSSYVGLAPRLVGSGEHEETRSAGNRKKKELHYILIEAAWRSIAYDTELRAKYGSLVHKGASPQRAISIIAKRLLYTIRAVWLQKREYIKPATE

SEQ ID NO: 481196 - protein, 429 aa, unidentified
MNYTQNEKIEQVTDSTMVVGVDIGSQIHYARAFDNRGRELTKRIFPFHNDLEGFNSFNLWAETLKTENKKTAVLIGCEPTGHYWFAFAKYVNDHQKRLVMVNPFSVKKIKELDDNSPKKTDSKDPKTIAKLVVDGRYSIPYMPEGIYAEIRDLVYSRDRIMKQHNISANRIQRWLAIYFPEYLGLYTRFDAISGLAVLEKAPLPKDVIALGVNGIRKIWHDKKMRGRGVTEDRAKTLVEAAHNSVGLDGGIGTKSELYMLLEEHRLWTSQLEAVNKVLEEMILKVPHVEKLLAIKGVGSITIAGFIAEVGDIRRFDSPKQIQKYAGLELLENSSGKHKGRTRISKRGRRKLRKILYQVMVPLLARNKEFRGIYDYYVTRVKNPLKRRQAMVAVSCKLIRVFYAVLTKGVEYDRFKMMSDIHRKSDIIAV

SEQ ID NO: 481197 - protein, 326 aa, unidentified
MQKSLKFIGIDISKSTLDICVLDKDSSIHYQIENQALQIRKFFRVFPKNNTRICFENTGKYGWVLIEILSNLEFNFYQVNALHLKRSMGLVRGKDDVVDALRIAQFISKNHKETPLYQTSDKNIKKIQVLISKRNLLVKQRAQHKTLKKENKLLKSLKLPALGKYSNAIISLLNKHIKGIEKMIANIISQDQELNKNHRIATSVPGVGKIVSWNMLVKTNGYKGISNPRKFACYAGVAPFSQRSGTSINKKARVSHLADKAMKKLLHMAAMRAIQLENDLKKYYIRKVKQGKNKMLVLNAVRNKIIHRIFAMIKSEKLYDFNLHLS

SEQ ID NO: 481198 - protein, 475 aa, unidentified
MNVKGTKKKNQVATANIFEQQELLKKAEVIKKNLTASTWRELETNGKFDKNEKLSFISDDMLILGCDVGSETHYLRAIDTRGRELSKSAFPFSNDSAGFQSAKEWAVRIAAEHEKKQIVLGLEPTGHYWFCLATWMIFNGISVVQVNPYAVKQTKEVEDNSQLKDDTKDPKLIANLVKDGNFGMPYLPEKLYAELRRLSMFRDQLNEDRIRAINRMHREMKIYFPEYKDAFGKVDGAFSLELLKSAPFPDDLKALDEDGIRQIWHEAKLRGRGYSRSGEILGYARSSVGIRDGADAAKIAVQWFVKKIMELDEELAVIENLINHKCKEIPHTGNILEISGIGENTLSGILAEMGDISRFDDVKEIQKLSGLGLVACSSGKHKGETKISHRGRKRLRYWLFQAAKSAVAHADEFKELHIYYTTRTKNPLKKMQPLIVIACKLLRIIYTIMKKGTAYDPKKMLTDIKRQEKQEALAA

SEQ ID NO: 481199 - protein, 438 aa, unidentified
MSNKVIFNLDELFISVGIDVGADFSWMSIALPNQQFVGKPYKILHNSIDSLTTAVSKIKEAEELYSLESRIFLESTGIYHYPLFCYLRDKGFNCSVINPIITKNSTNINIRKVHNDRFDSKKAALVGLKPDLKVSLMPSDLALNCRNLCREYYDLMDNRSAYVNKLQGELRMAFPQYLGIFSKVTINTSLTLLETYTSPSAFLKADKQEIIDIIKSTARFGLTYAQNKYNAIIQAATDANQFGYIIDSNIKRIRLYISFIRKYDEEINSILESLHELVDANEDADFVKQIHLIETFKGAGFLSAVSIMGEIGDFSAFSKPKQLFAYFGLDPSVKQSGKFEGTKVQMSKRGSAIARRVIHTLTLQSISISRNREAKNPVLREYYLKKCDSKPKLVAMGAVSHKVCNMIFAILRDNKPFKIIAPQEHIKQYNSAKCDIAA

SEQ ID NO: 481200 - protein, 316 aa, unidentified
MASFLGIDVSSLSLDAAVRPQGIKMHLSNDPTGFEALLESLRKLSIKRVLLEATGGYERDVMRFLQDAGYKVIRVNPRRARSFADSLGIKAKTDAIDAEVLAHYAEVIPDQPSLRVSPERALLRELLQQRDRMVQQRDDDLRRLKQVQSTAVANYLNANLKHFKAQIKRVECEIEQQIAMLNDERVAQLIKVKGIGMVTAGKLIALLPELGRVESREIASLVGVAPFNHDSGKFMGKRSISGGRFAVRRSLYMACLVAMKYNPALKARYQSLRERGKLPKVAIVACMRTFIVRLNAMLRTGTSWLDLVLPQPESTT

SEQ ID NO: 481201 - protein, 372 aa, unidentified
MNYNTVYVGMDVHKESFTLCSCKYEDEKASHYQRTPASYKNVLRYLAFLRTIYGEYTRFVCGYEAGCLGYSLYHQLENFNVECVILAPTTMLEQRSKRRIKTNKRDAEIIARSLAQHNYSPVHIPTETDNQTKEFIRMRDDHKAELKKIKQQILSFCLRQGYQYDGSGNWTAKHVKWLRSLKPAGLYKEILDEYLLTYTILIDKLNRLDQRIEELASKEEYKESVSKLTCFLGIKTHTALSVIVEVGDFQRFVSARKFAGYLGLVPGQHSSGDDRNGLGITKAGNTHVRRLLVESAQSYTRGKIGYKSRVLRSRQAGNSPQVINYADRANERLRRRYYKMVLKDGKKYNIAKTAIARELACFIWGMMTDNIY

SEQ ID NO: 481202 - protein, 384 aa, unidentified
MPRPMKELTEVEHRVATLFASLELSQTSWLVTSLSPGSVTMSKHSISAGDGAGLLGLLARMRVKAESVAGVPVEIVVIQEAGLDGFWVHRLLEANRIKSHVVDAASISVPRRRRRAKTDAIDGETLLRTLRAWTRGEPRVCAMVAPPSPEQEDQRRISRERAILLRERVRHVNRIKGLLSSQGITDFEPLHKDRRIRLDALRTGDGRPLPPRLKAELLREIELIELLLLQIAEVETERDSAAEFGTAQNPSPIALLTRLRGIGSQIASVLYFEGLYRHFGNRREVAAYAGLAPTPWRSGTIDREQGISKAGNPRLRHIMVELAWLWVRHQPDSALARGFRARVGTETGRVRRIAIVALARKLLIALWRHVNLGEVPEGAVLKSA

SEQ ID NO: 481203 - protein, 358 aa, unidentified
MAETAVTTQVVVLGVDTHQQTHHAAIVATDGRPLADREFPTTTAGYTQLWQWACGFGRVEDAAVESSASYGAGLTRMLTAEGVRVIEVNTPDLPRRYAHGKTDQLDAYAAAMAVITGRATAVAKDTRGAVESIRMLTVARASAVEEATRIGNQIRDLCTTAPAEYADQARQARTIAKRAAFIKDLPVPAEKADLSGPAAAFVRAARSLLDRHRLAQQQARSLARELTRLLSKLVPTLLSRPQIGPITAARLVITAGDNVERMGTEARFAKLVGAAPLPASSGKTSRHRLNRGGDRQANSALHMIAVGRMKSHAPTRAYVERRSAEHKTKKDILRCLKRYIAREVFRDLTTDLGALDKL

SEQ ID NO: 481204 - protein, 405 aa, unidentified
MDIIIERGCGLDVHKKTITACIMGIGLKKEIRTYNTMTNDLLRLKMWLKENFITHVAMESTGVYWKPVFNILEDSFEVMLVNARHVKNVPGRKTDVKDSEWLCKLLRSGLVRGSFIPPIEVRELRDLTRYKRKLIQNVTSEKQRIEKILEDANIKLSSIASDTFGASGSRIIEELMKGKLDAEEMAELSKGRLRRRKEELKEALVGKMQENHKFMIKASLGHIKAIEEELSTLECRIQEKIERHFKAEYELLKTIPGVKENASVIIAEIGVNMAIFPTEMHLSSWAGMSPGNNESAGKKKPGTTTHGNKFLRSILTEFGWVAAKTKGTYLSAKYRSLVGRRGKKKTLVAVGHKILIMCYHILKYKVPYKELGGNYLDDRKKERITKSYIKRLNSLGYTVTLKEAA

SEQ ID NO: 481205 - protein, 339 aa, unidentified
MKKVSIIGVDLGKRVFHVHGVDCSGEVVVRRLLRRSQVLAYFGRLEPCLVGMEACATSHYWARALRDLGHDVRLMPPAYAKAYVRRNKNDAADAAAICEAVSRPSMRFVAIKTAEQQAASGLHRVRALLVKQRTMQTNALRGLMAEFGVVVAAGPHHVEALLAVLADPEERRIPAPLRAGLESLARSLGELVRQIAAVEKQILDWARSQATCRHLITIPGVGPILSSALAAMAVDPASFRSGRDFSASLGLVPRQSGTGGKLRLGPISKRGNGYLRRLLVNGAMSVLNSRRAKQDPWLVKLLETKPRKLAAVALANKMARIAWAVMMHQEDFRPRPAAA

SEQ ID NO: 481206 - protein, 417 aa, unidentified
MQMELSEFTAVIGIDWADKKHDVCVQAAGSTEREFSTISHRADKIHEWAQLMLERHGGQMAVAIELSQGPIVSALQKYDCFVIYPINPTTLATYRKAFNPSGAKDDPTDAELALDLLTNHPERFTPLNPQSVQMRTLITLVEQRRRLMNDKGRITNRLRNALKQYYPQALDWFDHIDTPLFCAFIKQWPTLAQVKRARRTTLEKFFHAHKLYRKDVIERRIHSIQSAMPLTRDEAIITPYRLQALVQIDHLEVVFASLARYDAEIAALAPQHPDYALFSGLPGAGPQLAPRLLVAFGEQRERFANAAELQKYSGVAPVTERSGQKSWVHWRWQCPTFLRQTFVEWAAQTINKSYWANLYYYQQRAKGCSYQAAVRSLAFKWIRILYRCWVTRTPYDEAIYLKALRDRGSPLLATQNT

SEQ ID NO: 481207 - protein, 428 aa, unidentified
MSRMLRRCAPTSHFSVGCDPLGRKSPPYEILNRGVFSVFIVGIDISKRNHEATIIDQKGSIIGKSFRFANSFTGFNHLLETVKRTTGNDVVFGMEATGHYWLALYTHLRKKGFAVHVINAIQSDALRAMYIRQQKNDSRDSFIIADVIRFGRFCETTVSPSDLYALRELCRHRFYTVDSVSDIKRKVIALLDQIFPEYENLFTDTFGKTSLELLSEYTTPEEILNVDTDKLVETINIASHGRFGLKKAIEIQDAARNSFGILLATDTIALLIRQYIEQIRFVEKQIDVLDAEIARMLSTFETQLTTITGVGPTLAAVILSEIGDVKRFNSAAKLAAFAGVDPTMKQSGDFSGSRNRMSKRGSPYLRRALWLAATVASFKDPAISAFYQRKRAEGKPHMTVLGHVVRKMINIIFAVLRDNSPYSPAITN

SEQ ID NO: 481208 - protein, 429 aa, unidentified
MIAVSEPVPPDASVFAAFVGLDWADQKHDLVLYDPRGGKPEHSQLPHTPEAIDEWACSLCERFGGRPVAVCFEQTRGAIAYALLKYDFLVLFPLPPARLKSYRESFSTSGAKDDPTDAALLADYLLRHRDQLRVWRPDSPATRELLWLAEARRDAVNQRTRLSNQLTAVLKRYYPQALVLVGEDVDTPLACDFLSKWPTLTAVQAALPATLRKFYYAHSCRSEERIAERLELARSAVPLTTDAALLGAGTLQVQCLVAQLRALHKAIAKYEARLAELMEAHPDAALFRALPGAGPALAPRLLAAFGTDRERFQSAAELQTLSGVAPVTERSGKRSTVRRRWACPKFLLQTFHEFAYCSSKRSVWARAFYLQQRAVGKGHHAALRTLAFKWIRILFRCWKTNTPYHEQRYLDALRRHSAPLLTFLPTASS

SEQ ID NO: 481209 - protein, 355 aa, unidentified
MNEIKYIGMDVHQTSTSIVVLNASGRVLTSAVVETRAQALLAFIQAQRGRLHLTFEEGTQAAWLYDLLLPHVSRLVVCDPRHNALLKAGSKDDPLDAHKLADLLRLNALRPVYHGQHSLATLKELSRSYTTLVRDSTRVMNRIKALYRSRSIPCPGTKVYSPRYRTSFLDQLQQAGVQQRAQVLYQHLDLLSRLRRQAKLALLSESRKHSVSRLLRPVPGLGPVRIAVLLAMVQTPFRFRSKRLFWGYVGLGLVTRISAQFALVNGQLQRSRKAPALRGLNPNHQRELKEIFKSAASAAVRRPGPWQQFYQQRVAARGKPELVRLTVARKLAAVTLHLWKKGERYDVKPLKSTAV

SEQ ID NO: 481210 - protein, 388 aa, unidentified
MHVYVGVDIAKELHYAAIMDSDGVVSKPFSFENNDKGFNLLLSHLAPYNKESILIGYESTAHYQENLAYFLKSLGYRTAEINPLQTAALRKANIRNTKTDSVDARLICLALMNHHIQGDQRDSARLDDLYQLCKMRMDTMKKRTTCKIQFVAIMDRIFPELASFFDNNLHINTIYRLIESFPLPSQIKKTRIDILTKLLHKASKGHFKKEKAQKLKDLADISVGIPSDIFAFQAQQLVHQIEFYTDQIQTIEERINTNPDVMSSPLMTIPGIGTFCVACILSAIKNINDFGAPCKILAYAGLDPVIRQSGKFNASHTRMSKRGNSLLRYALVWSAGNVVKNNHTFAKYYRHKTEDQGKSHYQALGHCAKKLVKSIYHMLKYNESFNLD

SEQ ID NO: 481211 - protein, 438 aa, unidentified
MSRSYARLLDPVLEDDDNPFAHYDAHHEPLEDRLYLPVGGDPHGDICGVVFAHPFPQCKESLAQRIVRNNNLQDMLWMIETADHLAVPFQAAPIFIFESTNVFWRAQRNFLHRAGYPTATVCGRQTKHARDTVTRKTKNDLKDAYLITKIFKQGESHATRILPEPLASLREYCRLHQFLVSYSVAIQNRIHCACYQIHPEFAALFSKPMCATTLALMEAELVHPLHLLDCNLDDLTQVIRRASHGKLGQQRAEELLLSAQFTFPSPYAVEGFSFSLKLLAQAYQHLHSRLLPPLLERIQDTLASSNFPIQHHLDEIPYFGPIVIGTYLSELGLPEWFRSVDSVVAWFGLDPAVSISADKPTGATHLTKRSSKTGRRMMWLVGHNWSRYVSQGRQLFLKEHQQHKRSYDAAVCIVAAKLVRIAFAMLRDGSHFDIDKAF

SEQ ID NO: 481212 - protein, 334 aa, unidentified
MEEVTTVGIDLAKNVFSLHGVDAVGKTVLRRTVRRDRLVQTVASLSPCLIGMEACSGAHEWGRRFQLHGHTVKLMAPKFVAPYRKSDKNDGNDAEAVCEAVTRPSMRFVPVKSVEQQALLTMHRVRQGFVVERTALINRLRGLLSEFGVVLPLRSVTVRRQAADAAEVLPELARRAIADLLEQLHLLDGRIDAYDKEIEAQARLSEPARRLMKIRGIGPTTALAIVASVGNAREFKNGRQFAAWIGLVPGQYSTGGKARLGHISKRGDAYLRNLLVQGARSVLQTAPAHQDRLSRWALELQERRGYYRTLVAIANKNARIAWALLAKNEQPHKN

SEQ ID NO: 481213 - protein, 344 aa, unidentified
MKVMRVGVDLAKNVFQVHGVDAGEQPVWQRSLRRATWLRELVKRVEPGAEIGLEACAGAHHWARALGAHGYRVKLMAPQFVKPYVKSNKTDRNDAAAICEAMSRPSMRFVEVKNVEQQDIQAVHRVRSELVSQRTSKGNQIRGLVGEYGLVAPVQLAALRRALPEWLEDGENGLTDRFRRLVAGLADDLRRLDQRIAELDAEIASIAASDPAAQRLLELRGVGPITATALVAALGTGEAFRRGRDFAVSLGLTPKQHSSGGKERLLGISKRGDAYLRQLLVHGARAVVRTAPSKNDPLSRWLQKLLARRHTNVVAVALAGKTARMAWALIRHDMAYEARLAAAS

SEQ ID NO: 481214 - protein, 383 aa, unidentified
MSMNPSASSQEEAPLKYICGIDVGSQSCAGCVYRLDKSLVVKPLTFANAKEGWNVLLDKLTQLDALPKQILIGMEATARYSENLYHALEQRGYRLCLLHPGQTHQFHERQGLRAKTDRLDAITIARVLLSGEARASYIPDEQVATYRELVRLHSQLSEQVARYQNQIHALVVVLFPEFTQVFADPCLPSALSVLKVYPSAQAMAQAEEAALYALLRMHKHAHYGHPTAKKLLSLASTSVSSQRAEAGRSLSLRILCGQLEQTQKYLEELQAELEQLIANDPAAKSLQQIPEFGTQTVAVLRAELGDVDRFARTDQAIAYAGLDVQIKESGLWKGKAKLSKRGSGPARGRCSIWRLCVAFICRGLPLGLTIRDWWHAVSRKAPP

SEQ ID NO: 481215 - protein, 346 aa, unidentified
MTIVETRAITGGVDTHADVHVAAALDPVGGLLGVREFPVSPAGYAGLLSWLGGFGTIALVGIEGTGSYGAGLARHIAAAGVRVVEVDRADRQDRRRQGKSDPLDAVSAARAAQSGRARGAPKGRDGAVEAIRALMVAKRSAAGERTRTINQARALILTGPDDLRARFAGHTAAGLVTAIASLRPRPGDAAGHATRVALRELGRRAVFLDGQLERLDELIVPLVTARAPGLLALYGIGPNTAALLLIAAGDHPERLRSEAAWAHLCAAAPIPASSGKVTRHRLNPGGDRQANHALWRIVFTRMGSDPATRAYVERRTKEGKSKAEIIRCLKRYVARQVYPHLHPAAD

SEQ ID NO: 481216 - protein, 403 aa, unidentified
MKVRERIWVGIDVGKAHHHACAVDETGTVVFSKRLANGQAEIEALIARAGKAAGHVRWALDMTSGSAGLLLAVLRQSGAELVYVPGRLVNRMAGAFAGEGKSDAKDAFTIAETARLRHDLTPITEPDALVAELRVLTARREDLIGDWVRGVNRLRDLLASIFPALEAAFDYSTRSALVLLTGFQTPGGLRAGGADAITEHLRTGGAWPKGIPAMVDKALTAAAAQTIALPTETAVAPLIARLARQLLDLDREIKDLDKQITGTFGEHPHAARITSVNGFGPILGAQLLADTGGDLQAAFGSSARLAAYAGLAPVPRDSGRVRGNLHRPKRYHRGLRRVFYLAALSAIKPDGPSRVFYQRKRAEGKLHTQALIALARRLIDVIWALLRDGREFHPSPPLTTQAA

SEQ ID NO: 481217 - protein, 470 aa, unidentified
MRIIGLDLAITSAHKAVVMDERGKFLTAVFPVTTWAESLGALLQRAREGAEANCPLVVVMEPTGVAWLPVAVYLIMRAVTVYLVNGQQVADLRRFYKRHAKSDRIDARVLAKLYLVAQEKLHALSLSPAALFSLQRGCKQLDWVISEATKLMNQIIALDRMTWLGGWEDLGFGDPFSATACWCREHYYSPVAVLEAGEERIRQAWEASEQAKAGENGAWIPFLVELAGKVMAVYGNPCPYVDFTALQAEAALKQKWLCDLQMDRDQLRKSVIFPLYHQLHPSGNLESLYGVGEESAAVFLSFIGDPLRFPSGRQMRGWSGMIPDSRQSSGSESKGLRISQAGPNLVKKFAFLDADVARRYDPQLAALYYDQMVHRGKHHTQAVCVVATHLLDRVWMVVAKDKPYELRDVDGTPVTPKQARKIIAEKYTVPEEVRKRNNRKARRERIERQAERSFSRQERVRESLPDLVRG

SEQ ID NO: 481218 - protein, 328 aa, unidentified
MKAFIGIDVGKEKLDVSWLRDVVKNKQKTKVLKNTKQGYQELVDWVLKNTGLEAQNIVITTEPTGIYSEPLMYFLYTQGFTLLHVNPGKAKQYAKSLGLVHKTDKSDATMLARYGHDQQHSLSSWQPEPVEARELKAMMRRLEALEQDLQREENRYEAVGFSGASARVAQSLKDMIAVLKAEIDKLKNEIDEHIDRHPQLKKNRQLLESINGVGEVTSRIMVCLLACKRFKSAKQLASYLGLIPKHNESGKRAGKTTLSKEGPGYIRAKLYMAAIVAGQHNTDIKAQKMRLLKQGKTKMQALGAAMRKLSQICFGVVKNQTEYQPQVS

SEQ ID NO: 481219 - protein, 395 aa, unidentified
MFIVGIDVAKRSHEVCMITSDGQTVQRPFSIRNNCTGYNLMLEKIRKHTNIKSQIVFAMESTAHYWLALFTRLRKDGYHVILLNPIQTSAMRDMFIRKIKTDAKDSFIIAELIRFGRYAESNVAQDRLLALKELCRNRFYLVDMAGDLKRKLIALIDRVFPEYEAQFDTIFCKSSVALLKKYPTPQKLSNAHLDKLTELLWNSSNGHFGEWKARELKELARNSFGVEDCDGAYSTLILLMLDQIQSLSGKADALEKEISRLFQSFATTVTTIPGVGPIIGAVILSEVGDISRFSSADKLAAYIGVDPSVNQSGEFQAVHAHMSKRGSPYLRRCIWMASQVAVQRDPMFRAYYEKKAAEWLKYMTIIGHVTRKMTAVVFAILRDHKVYEPVLPTAA

SEQ ID NO: 481220 - protein, 340 aa, unidentified
MELKRISIDTSKHVFTVHGVDGHERVVLRRELNRARVESFFQKQPATEIVLEACGSSHHWGRTLQAMGHTVRLIPPQYVKPFVKRGKNDRNDAEAICEAASRPTMRFVPVKSAQQQAGAMLLSVRELLVKQRTQAVNALRGHAAEFGIIAAKGITRVDDLINRIAADTTLPAEVGEAAAILNAQITALDARLAQVEGKLAAQHKASQVSQRLATAPGIGPVTALTLASRIDATQFESGRHFAAWIGLTPKEHSTGGKQRMGGISRAGDERLRQLLVVGAMAVIKAAVANPASPLATSWLTALLARRPRKLAAVALANKMARMVWAMMVRGEAYRPFKPAC

SEQ ID NO: 481221 - protein, 353 aa, unidentified
MQRKSPNVYVGIDTHAETHYVAVTDEHGRQLTDQEFPATAGGYRKIIEFIRANGNALGIGVECTGSYGAEITRQLATAKFEVVEVNSPSRDQRRRRGKTDQLDAYSAAEAVMSGRASSAPKGRNGLVEALRSLRTVRESALRDRTATINQIKAMLVSAPENVRSPYRSLTTPRLVAALAATRPQRQPVTSEECTRYALRLLAKRYQELDEQVRDLTAQIDRLLKAHAPGLMNVFGSGPDTGSQLLITAGDNTARLRSENQFAALTGTCPRPASSGKTERNRLNRGGDRKANSALHHIVLVRMRYHQPTKDYVARRTAEGLGKKEIMRCLKRYIARQVFPVLVQTLRINEPGIT

SEQ ID NO: 481222 - protein, 350 aa, unidentified
MMIIGCDFHTRYQQIAMMDQATGELIERRLEHERGEAHAFYRSLQGGVRVGMEATGPMHWFERLLSELGHELWIGDSAKIRASEVRKQKTDQRDAALILDLLLTNRFPRIWVASPAERDLRQLLWHRHKLVGMRTMVGNQLHALAMGQGLCRKAKLFTKKGRAELSGLSLGPWARRRRQELLMLLDQLTPSISELDRAVMEEAQRREEAVRLMTHPGIGPVNALAFVLTIGPITRFRRSKQIASYLGLNPSEHSSGGKRRLGAISKQGNSMVRWLLIEAAQHASRFDPALRQDYQRLKFRRGSAVAKVAIARKLAVRMYWMLRSGADYAQLVRMQGSPRGTLVSNASPMC

SEQ ID NO: 481223 - protein, 369 aa, unidentified
MTNAITYVGLDVHKDETVVAVLRGSSKEVVEFRVATSAVGRLVKRLLAAADGGPVKAVYEAGPCGYGLSRALRAAGIDCQVVAPSRIPVQPGQRVKTDRRDARKLAELLRAGLLTPVAEPTPAEESVRELCRCRENAKRDLLRSRHRLSNLLLRRGRVFREGRNWTQRHRAWLYQQSFEHPADQIAFADYLAAVEALEERVRSLEAAMAAIAEQEPYAAPVGWLRCLRGVDLITALTVVTELQDIRRFATARQLMSYLGLVPSERSSGGAVHRGGITKTGNAHLRRVLIEAAWHARRPPRVYGPLRQRRRGQPTPVVALADRAMKRLHQRWWSLVQRGKSPQVATTAVARELAGVIWAVLHCGLQLHTA

SEQ ID NO: 481224 - protein, 409 aa, unidentified
MLSVGIDAALAKHQGEMRSDNGKVYWNSCFKNNKDGLAKLVEQIEKIKTDTGESVIGIYAEAMGSYFAPFQYRLTQMGYRVVLVNPIEIKSARTIKNLNKNKNDRIDASTLASLPWMDEKYRNHESHQRYPISELTRLYQIMQKSETQLKNRLNSDIIRVFPELIQFIKDLDSKTVLKLLEKYPTPAKIIRVSEDKLLKLIKSTSKGSFGSEFVKKIQELARDSIGIPDTDEVLEYRIKYFIRRIWEIKESLKKIEKEITKRTENIEEVQMIDDMRGIQRIKAVSLYSEVGSAEQFKTARKLQGYGGITPKRNQSGSKEWIGRPTKIANHYLRNTVSVCARSLAHHSEEFREIYYREKMKGKTDTQAYIIIGNRLLYHVFTILKNKKPYRKRLPMSAKQPPHPSISNTR

SEQ ID NO: 481225 - protein, 366 aa, unidentified
MRKVMAGMDLHGNNVMVGIVDDQGARLQHRRLACELPEIIEFLAPYKAELESIEVESPFNWYWLVDGLRAAGFTVVLANPAKIDQYSGIKHADDKNDAYCLAELQRLKILPTGYVYDPELRPVRDLFRRRMSLMRQRTTLFLSAKSLHQRTTGRGLELRRLKAMEPEEAAALYTHPANQLIAQIQKEHIDSLDQSIRQIEKAVLKVALQQPYYQRLQTIPGVGIILGLTISMEVGNVDRFAGPGQFASYCRTVDAKRISNGKTKGDNNQKCGNKYLAWAFVEAAHGARRFDATCRRWYDRKAGKKCTTVATKALACKLAKAAWYVMAKGTEYQAGKIFPGLTEPKAEEISGEQASASKGVGPNPED

SEQ ID NO: 481226 - protein, 391 aa, unidentified
MATTERVVIGMDPHKRSVTIEVMGADEEVLGCGRFGTDVAGFKAMTEYVKEWPNRVWAIEGCSGIGRHVAMRLIAEGQDVVDVPPKLSARARVFSTGQGRKTDATDAHSVALVGTRMAGLRPVVADDQLAVLRMLADRRRSLGEEHTRKVSQLHALLLELLPGGAKKDLSAAQAKALLAKVRPRDLVGKTRRRLAAELVGDLEQIYARKKAADKELKALVAATGTGLLDLHGIGPSGAARLLVEVGDITRFPDRNHFASWTGTAPVDASSGDHVRHRLSRGGNRQINRVLHIMATVQLRNATEGRAYFDRKKAGGKSSNEAMRCLKRRLSDAVYRVMVDDLAKTLRTDPGGQPGNDSVSSATGSQPNAGSSDKPLPGPVEQQPRTPLPAAS

SEQ ID NO: 481227 - protein, 421 aa, unidentified
MSKGRYKRIEFKRVDWQGVRERVAGGRVVCAVDVAKTDFVATLLAADETSLLTFQWEHPSQTAAVVAQLQVLAQGGVVEAVMEPSGTYGDALAWQLQRAGLGLYRVSPKRVHDAAEVYDGVPSLHDAKAAYLIGRLHLQGLSQPWPEVAAERRELLAVVSQLRMCKARQQVDLNRLEALLSRHWPESLRLLGLTSVALLALISRYGDAAAVSADVEGARTLLRRCSHGGLGDDKVTELLASAHASVGVPCVPAERALLQWLAAASQETRRQRRTLERELARRVEDRPALRQMGRAIGRVSAAVLWVVLGPPQTYPSAAGYLKAAGLNLKERSSGMHHGELALTKRGPSLARFYLYYAALRLIARDPAVQTWYARKTQRPGALPNKTVIALMRKLGGALWHVARGEAFDISKLFARQPVACA

SEQ ID NO: 481228 - protein, 357 aa, unidentified
MAQNYKKDFNGQNIFVGIDVHLKTWSISVALQGGGYLKTHTQKASAKELFEHLNKHYPGGTYHAVYESGFSGFSTCYALRELGVDCIVVHAADVPASQKDKISKSDPIDSRRLARSLMSGDLEGIYVHSKDNLDDRGLLRHRILLMKQMNATKSRIKHLLYNNGVKYPDEFASKGRHWSNRFIHWLQNEVTLLSETRVSLDLLIEELQYLRSRVLDVNRRIHQLARTERYSNLYENLISIPGIGTIVAMSLLTEIEDVWRFNNQRQFASFLGLVPVMRSSGEHEYTGEKTFRGNRTLGPQIVEASWVTIKHDTELAAKFGEFCGRGMKKNEAIIRIARKLSNIIFSVLRDNHRFVCR

SEQ ID NO: 481229 - protein, 308 aa, unidentified
MIMQNYVGCDISKQWLDFFNEASSRCQRIDNQADTIAAYVAGLQPGRDFVVMEATGVHDRLLRHALAKAGVAFSRHNPAHTHHYAKSTARRAKTDRLDARMLSGYGRRYHPDAEPAPSEEGERLQSLARLRDQLVEIRAKLKKQLSEAFDEIVIREFEELIDNFNTRIKALEARITEVIRQTEDMARGNALMVSVPGVSKITAFSLLAHLPELGLRTPKSIAALAGLAPFDNKSGKLNRRSQIQGGRARVRRALYMAALGAIRACERFRDFYSAIAARSGSKKLAIIAVARKLLVVLNAIIRDKKAFA

SEQ ID NO: 481230 - protein, 343 aa, unidentified
MQSVTTIGLDIAKSVFQVHGIDAEGNVILRRQLKRRYVLAFFQKLPPCLVGIEACASAHHWSRELQALGHTVRLMPPAYVKPYVKRHKNDAIDAEAICEAVTRPNMRFVATKTREQQSCLTLHRTRHLLIRQQTSVINAIRAHLAEFGIVAPVGRNGVDQLLGIVADASDKRLPELARACVAALGAQLGTLKAQILQFDRLIMAWHRSSEASRRLDDIPGVGPALATALVATVADARAFRSGRNFSAWIGLVPKQHSSGGKDRLGSISKRGDRYLRFLFVAGALAVIRYAKIHGTKHRPWLTALLARRPTKVAAIALANKIARMAWAIIAKGEPYKEPVALAA

SEQ ID NO: 481231 - protein, 428 aa, unidentified
MKYNTQNAKIESITEKTLIVGIDVGSETHYARAFDWRNYEYSKKPLEFSNNEAGFVTFKVWMEELAEKYGKDVVIPGMEPTGHYWFNLGAYLQDNGMKPVHVNPHHVKKSKELDDNNPNKNDRKDPKTIAALVNEGRFSYPYIPTGVYAEIRSLSNLRLQAQEEITRIKNRIARWFSIYFPEIKDVYKNPGAVSGLMILKVAPLPKDIVKLGVDGVNQIWRDAKLRAASLKRAKTLVTAAEHSIGSQEACDSARIELKILLNDYEIYHQREEELMELIEEKLSEVPYIDKLLEIKGIGMKTVSGFVAEVGDIKRFDNPKQLQKLAGYAIVECSSGKHKGESHISYRGRKRLRYVLYEAAISLIARNTEFKEIHRYYQTRGKNSLKKMQSVIAVACKALRIFYAILTKGVTYDGAKMLQDIKRPQLKVA

SEQ ID NO: 481232 - protein, 501 aa, unidentified
MKAKQRKAKGNDHSSSMASKQRAKIAKAMQAPEQMEIVNRHAGGIDCGSEEHYAAVSPESVEEGEPFVRCFSAFTEGLDALVEWLKDCGVTTVAMESTGVYWVALYQKLEAAGIEVFLVNARHLRHVPGRKTDVKDCQWIQRLHSFGLLSASFRPEDMICRLRSLQRHRLNLVSAGAAEIQHMQKALQQMNLHLHHVVSDISGLSGLRMIEAILAGQRDPSQLAKLRDPRVRKSTVAQMEAALVGDYRPEHLFVLDQSLQAYRFYQARIEECDHEIEPLLQQLAERFECSSSPLAAESSQPEVIQDQAAQSQTARPIKPKRKRKPKANQPKIDLAGYLQRICGVDLTQVVGLDVLSVLLIVSEIGVDMSKWRNAKAFCSWLGLCPGNKISGAKVLDRRTCKVINRVATTLRLAAQAVGRSNTCLGIFYRRKKAHLGPAKATTATARKLACLVYHLLKYKDQYREPDPVTYQLKVQKTILNKLQKQAAALGYQLLPTALVPA

SEQ ID NO: 481233 - protein, 346 aa, unidentified
MMIIGCDFHPSWQQIAWLDTDTGETGEQRLVHAGGDAERFYRQLQSPALIGMEATGNSHWLVDLLAESGHELWVGDAGQIRASYVRRQKTDKRDAGHILKLLVEGRFPRIWMPSSEVRDLRQLLLHRYKLVLIRARVKNELQHLCLNKGVQRKRKLWTKLGQQMLCELPLRPWAGRRRDDLLGLMAMLDRQIEPLDEAVKAEAQRDKMALLLQTQPGVGPITALAYVLTMGDVTRFPRGKQVASYLGLIPREHSSGGRQHLGAISKQGNRMLRMLLVEAAQTTVRLDPEFRKEYQHRCHQKPKAVAKVAAARKLAVRLYWMLRTKQGYPEVVRIESSPRVPLVGEN

SEQ ID NO: 481234 - protein, 482 aa, unidentified
MATRKRSTYERLQPGPLNRQQRRELGRKIAAADPGLAVVHPDAAGIDIGNASHFVAIPPDREPVPIREFGAWTAALQEMAQWLTAHGIRTVALQATGVYWIAVQDVLEQAGLEVYLVNARGTKTLPGRKSDVQECEWLRKLHTYGLLRNSFRPPAEIRAIRTLWRQRDRWVQEAARAIQHMQKALTTRTVQLANTISDLSGVTGQAILRAIVAGTRDPGALAQLRDCRIAASEAELAASLQGTWREDVLFELRQTLEAYDFYQAQLAACERELAKYTAAVATRELPPPPPPPAGAAPLSPGKAARRATSRRKPQPGFDLAAELHRTMGVDLTRIDGINVLTTQVVFSEIGPDFSAFPSENHFASWLTLAPRHDISGGKVLRHVPAAGRNRVANALRMAAQSLVRSDSYLGARYRRLRARLDGPVAVKAMARYLACLIYRLVTKGQAYVDRGAAHYERKRQERERQALERRASNFGLKLVPAA

SEQ ID NO: 481235 - protein, 341 aa, unidentified
MNKPSTICIDLAKNVFQVALFNQHGKLKSNQKMSQAKMVTFIAQYPASMIYMEACGSAHYWGRYFQNNKHHVHLLPPQIVRMYRAGNKNDANDALAIYEAAQSPGIHFVSVKTTEQQDIASVLHLRESYIKQRTAVANRIRGFALEYGIKFPQSITKLRALLPLELEDPNNGLTSSARFVLHQLLNQLIELDKPIQEVTDYLIAYAKQIPACQLLMTLRGVGWIVASALYARMGDASAYKCGRDASASIGLVPAHSGSGGHNKLLGISKKGDRTLRAVVVHGARSVVSNIKDKSDQLSCWLRALLERNHFNKVVIALANKTVRMACAMLKSNQPYQEKLPA

SEQ ID NO: 481236 - protein, 344 aa, unidentified
MDYYAGLDVSLRSCALCIVDAKGTVLLERELPCEVSDIAVCLASFPHPIERVGFEAGTMSQHLFHGLKAEGFDVVCMEARQVNAAPSAMRNKTDRTDARGIAQVLRTGWFSPVHMKSREAHGVRALLNTRKALLKKTMDLANEVRGLLKIFGIRLPMTVKHGSFDGVVRPLIEMDDVLAHALVPLLDARVVLYQHFLELDRRVKRAASQDEVCMRMMTVPGVGPIASLTFKAAVDDPTRIKRSRTVGAHFGLTPRRYQSGEHDNPGRISKAGDRDVRATLYAAANALLMRTMAGSQIKSWGMRLIRTKGRRRAVVAVARKLAVLLHRMWTDGTEFRQDQVGDTA

SEQ ID NO: 481237 - protein, 337 aa, unidentified
MTRYVGVDLHRRRSVIVVRDGDGSELWTHRIDNDPVTLGLEIEEAGPGAEVVLEATWGWYWAADVIAQAGGRVHLAHPLGIAGYENRRVKNDHNDARLIADLLRMGRLPEAWIAPASVRYQRELVRYRRKLSQLRAGLKAQVHAVLGKEGLIPPIGHLWGPGGTRWLDDTTMADAYETRVRSLRRLIRLYDTEVTKLDVRIAAEFKGHVGYEAIQAICGIGPVIAATLTAELGDVTRFRSAKQVCSWAGLTPRHRESDTTIHRGSITKQGPPLVRWAAIEAVAKNHGTDHIKQHYRRVAERRGANKAKVAAARKVLTLVYYGLRDGEIRSLAPPEAA

SEQ ID NO: 481238 - protein, 358 aa, unidentified
MEKLIRVGMDTSKSVFVLHGVDAAEKVVLRKKLRRQQVIEFFGKLKPTKIGLEACGAAHHWARELEALAHEVVLLPPQYVKPYVKRGKNDAADAEAICEAMSRPTMRFVPVKTAEQQAALMLAGTRDRLIRMRTQLTNAIRGYAAEFGLTAAKGLDKIEPLLARLTAATELPKLAKELFAAHAREYAQLKVEIQKIEAKLMAWHKHNELSRRLVEVPAIGPIGAALVVMKVPDPHAFRSGRDFSAWIGLTPKDHSTAGKTRLGVITRAGDETLRRTLILGATAVIQQVRRGRGHPSPWLIDLLKRKPPKLAAVALANKTARIVWKLMISGERYNPMRLRDTRSPSARCGSEPTAITQA

SEQ ID NO: 481239 - protein, 403 aa, unidentified
MIFVGNDWAEDHHDIHVMNEQGKKLLTRRFPEGVAGVSAFHAVIADHATDPQEVLVGIETDHGLWVASLVAAGYRVYAINPKAVARYRDRHHVGGGKSDAGDAKVLADLVRTDAHNHRVVAGDTDHVHAVKVLARAQQALVWSRGRETNRLRNALREFYPAALIAFEDLHDQDALAVLGRAPDPITAARLTLSQVKAALRAGGRQRNLEAAAAKIQAGLRTEQLHAPAAVAAAYSAVVTAQVGIITALNTQLAALETQLESSFEQHPDADIILSLPGLGDILGARVLGEFGDDPERFADAKSRRNYAGTSPLTIASGKKRAVLARHARNQRLYDAIDAWAFCSLQASPGARALYDQRRGTGDTHHQALRALGNRWVGILHGCLKHRTPYNEHTAWAHRQPAAA

SEQ ID NO: 481240 - protein, 343 aa, unidentified
MAHPQPPRITVGVDTHKDLHVAAARDQLGRRLGTTMARATSAGYATLLVWAQALGDVQAWGVEGTGSYGAGLARFLTARGQRVLEVNRPDRAARRRRGKSDPVDADAAARTVQAGEATGVPKAQDGVVEMLRALRVARQTAVKARTQAINAIKALLVTAPAELREPLDGLANPELVAAAAALEPGTLTTPTAATMLALRGLAQRYQHLDAEISLLTSRLDQLTTRTASALRQLLGVGPDSAAALLIAAGDNPGRLRSEAAFAALCGASPVEASSGKTVRHRLNRGGDRQANAALHRVVIVRLRWHQPTRDYVARRTAEGKTKKEILRCLSATSPVRSSQCCHS

SEQ ID NO: 481241 - protein, 364 aa, unidentified
MKYSKDIAKRVLRYIGMDVHKDSTTAVVLDAQGKVTMQVILRTEAEALVSFLRGLSGALYLTLEEGTYSAWLYTLLSPCVEKLIVCNPRQNALLKQGNKSDPIDARKLAELLRLGSLSPVYHGSPELRTLKELARSYTTLVHDGTRVMSRLKALYRGRGIRCSGTQVYAPRHRARWLEQLPEPGVRQRAELLYRELDLLLQLRPQARRALLAQSRQHPGHKILRTIPGLGPVRVALLLALLQTPHRFPAKRKLWGYGGLGLITRGSAQHRLVQGELVVSSKGLMVRGLNPAHNPELKEIFKGAALVASQRPGPLRDYYTRCVVNGTKDYLARLRLARKIATLVLTLWKRGEVFDARRLTREQAV

SEQ ID NO: 481242 - protein, 413 aa, unidentified
MATTSPPLRFVALDIHRKYLVVGAVDPHQQVVLTPRRFGFEAFSAWATTHLSPSDAVVLEATSNAWLLYDQLEPLVGSVTVAHPLAVKLIAAARVKTDSRDTIKLAHLLAANLVPAVWVPPLHVRELRALVSHRKRLVNQRTQVRNRLHAVLHRHNLTVPPGKPFAAHQQEWWLALDLSSSEKLRVQQDLSLLHSLEELVGAVEAELGRLSTCDPWVKQVPFLVQLPGLGVLSVMSILAAIGDITRFPSAKKLVGYAGLGASVHDSGETHQGGHITKEGRRDLRGVMVEAAWVAVEHHPHWQAQFERLSRRIGKQKAIVAIARKLLVAVWHVLTEQEADTNAQAQAVARKLMNWITHHGVIPGQHRDRLLLLYQHLDELGLSEELEEIDYYGTTYRLSVRQKLLREAQKSKRS

SEQ ID NO: 481243 - protein, 386 aa, unidentified
MKNQIKPIHDRNTSTPGPGQSNPAVAAAPAPPAPVRHVFMLGLDVDLLNVVTAIQCDRGAIALAQKFSRAQLLAWVQKQTAAGHEVHTVYEACGFGYTLHHALVAAGAHSLVTTPMRLSPERRRKNDRLDARALCVRLSRHREGHAHELKPIRIPSAAEQQRRELGRQREFFKRERGRLENHGRALRIEFEHETLPAGWAGPRKWKQIAPQCSEFVRGQLEPVVLQIRACQARMQELTARIQATVAQEKIPTGLGALTVALLEGEVCDWKRFRHRKAIGSYTGCCPSEHSTGGVQRFGHIDRHGNKHVRVLLVEAVWRLLRWQPDWHARVKYLQKLKHGASLKKKIAVALARQLAIDLWRWRTGRCTAAQLGWTVESAKDEAGTAQ

SEQ ID NO: 481244 - protein, 355 aa, unidentified
MSQNLDVSPAAIGIDIGKTSFHIVGQNKGGAIVLRQKWSRGQVEARLANLPPCRIGMEACVGAHHLSRTPKALGHDARLMPAKYVRPYSKGQKNDYRDAEAITEAVQRPTMKFVATKTADQLDLQALHRVRERFVGQRTGIINQIRAFMLERGIAVRQGLRFLRAELPNILATRTDAASPRMLRILEDLSADWRRLDARIEDLSSEIEALARQDKGCERLMTVPGIGPIISSAMVAAIGTGDAFSKGRDFGAWLGLVPKQLSTGDRTILGSISRRGNRYLRTLFVQAAWVVLVKVGPKHWDRYGLKSWIEAAKKRLHHNVLAIALANKLARIAWAVLHRGRAFECVKTNEAYRPA

SEQ ID NO: 481245 - protein, 344 aa, unidentified
MEHFAGLDVSVKETSVCIVDDAGRIVREAKVASEPEALLAVLNNPSYRFRRIGLEAGPLSQWLYSALGEANLPVICVETRHMRAVLKAQINKTDRNDARGIAQMMRAGLYRPVHVKTLRSQKLRMLLTHRKLLQSKAIAIENDLRGTLRNFGLKVGVVGAIQFEARIKQLVENLPDLALLVEPLLVVRRGLREQIAVLHRRLLHIVRDDEVCRRLMTIPGVGPVVALTFRATIDVPARFRNSRAVGAVLGLTPCRHQSGESDRTGAISKCGDEMMRVMLYEAAQILLVRSTRWSWLKVWAMQIARRCGLKKAIVALARRLAVIMHRIWVDGTEFRWARQAAAAA

SEQ ID NO: 481246 - protein, 472 aa, unidentified
MKQPGNGAPSEPRRNRKQRRELARKIQCDDISLHIVHPDAAGVDIGNEFHYVAVPPSRDPQPVRRFGCATPELMEMAAWLKQCGIRTVAMQSTGVYWIPVYDVLEQAGLEVYLVNARETKNLPGKKTDVQEGQWLMKLHTYGLLRNSFRPAQEVRMMRTYWRQRNDLVRSAARHIHRIQKTLTQMNVQLANVISDLSGVTGQAIVHAILAGERDGRKLAALRDGRIKASEEEIARSLEGNWQEDLLFILKQEQEAYEFCQKQIGDCDQRLRQYLGQQEDRSEGATLPEETRKSRRKTKRGNAPQFNLREALFRTTGVDLPRIDGIDVSTATTVISEAGWDMSKWRTEDHWVAWLRLCPDNKISGDKVIGKGRLPTNNRLTQALKMAASTLRQSDTYLGAQFRRLRTRLGAPKAIKAMAAKLARLVYRMLKYGMEYVDRGAEFYEQQHRQRQITTLKQKAAALGLQIIEPAAA

SEQ ID NO: 481247 - protein, 313 aa, unidentified
MNKDTYIGIDVAKDTLDIHILPHEQRIHCTTSEADVQNLIEQLETFKPKLIVLEATGGYGTTLAAELQDSDLPVAVVNPRQVRNFARALGKLAKTDRIDAEVLAMFAQRIRPPARGVGDESARKIKALVGRRRQLVDMRTAERNRRHRAMTSVVAASIDAILETIDRQLEDTDTMIRQAVEASEVWLEKAEVLKSVPGLGDATTHVLLAELPELGKLNRREIASLVGVAPINRDSGTFRGRRMIGGGRTEVRNALYMATLVATRHNPVIRAYYLRLVESGKKKIVALVAAMRKLLTILNVMLKENQPWKPKIT

SEQ ID NO: 481248 - protein, 424 aa, unidentified
MKVTYQTCCGVDVHKSFLVATIVKTTGGIEPSYQKKRFSTFNNSILEFKQWLINNNCHDVCMESTGKYWIPVFNLLEDQINVTIANPKWVKAVKGNKDDTKDSKWIGDLFRLGLVKGSYIPCKAIRILREYTRYRYKLVSCRSSEKNRYQNALTVCNVALDSVVSDIFGKSSTSIIDYLLEQSGTSINHEEIASKLLRSLKSKEDAVIHSIEGYQMTDAQKYRMRLVRAHMDYITAEINDVDKMIENMISSNPDFENAIQFLCTIPGVKRDSAITIISEIGTDMSQFSSSKRLCCWAGLTPGSNESAGKKKSVRITRAGVYLKPALVQCAHAAVKSDKSPYYKKKYESLVKRRGKKRSIIAIARMILTAIYQMLSTGEQWNPSDLYKIDMPVALVEKQKAKAIKQAKKLLQREGLLPPDEPLAS

SEQ ID NO: 481249 - protein, 321 aa, unidentified
MADHSMKVAGIDTGKAELHVCLLPDGTRFKVGNDAGGIAELVAKCVEAGIRRAGIEATSIYHRAAVKALRQAGIEVAELQPRQARGYAQALLQWSKSDTIDAAVIARLTQALDEVRPAPDPRIEAFAEVLTYVEQLEERIAWLKTSHERYANARLKTRIAADIKVLEKRRHAELKRLETAMRKEQILATRLDLLLSIPGVAERTAIGLLIRMPELGTLSREAAARLAGLAPCDDDSGQHKGERHIHGGRSRLRRTAFMAAFAAALNWNHDLNIFYKRLRQRGKAHTAAVVACARKLIILANAIIARGTPWEKQRGMPCPAS

SEQ ID NO: 481250 - protein, 385 aa, unidentified
MAEQIFKYSVGCDISMDTFNACILEVSQDMQSKVKASHKFKNETKGFKEFETWVKRHKKLDVPIGFYMEATGVYYENLAWYLFEQEYSVFVLLPYKTKHYLKSIGFKSKNDKIDAQGLARMGSEQKHCQWRPHSKSIYTLRSLTRQHENLTKLKTTLGNQLHANEHSAVKNAIVKKQLNATIRLLERQLEELADEISKLIDADEKLSEKYSHIDPLKGISKLSWATIIAETSGFETFENQRQLVSYAGYDVVENQSGKHVGRTKISKKGNSRIRRILYMPSLVSVRLKEPMLYNLYQRVHERTGIKMKGYVAVQKKLLVLIYHIWKNDKVFQSGYTKIFGEEESKDLFPFGFGETIKESSPDERATQDEHSYELSSKVLFPLPQN

SEQ ID NO: 481251 - protein, 364 aa, unidentified
MTDGICFAGLDVHARKTAAAAVQLGSGEVFRAQIVGAPTEAIGWLQTLPGAVRAVYEAGPTGFVLARAARAAGIEVMVCAPGAIPRQPGDRIKTDTRDALKLARLHAAGQLRAVLVPEPELEALRDLVRCREDLRGDLMACRHRIGKLLLRRGLIYPGPGATWTRRHAAWLSSLTFDEPLVQTVFAELLACHDVLLARRDRLDGLIAAQAANGPWAARVARLRCLRGIDTLTAVGLVAEIGDFAAFAHPRRLASFLGLVPSESSSGTRRRQGAITKAGSTHARRLLVEAAWHYRRHPSLSVDLRRRQAGQPPAAIDAAWRAQLRLHRRWAHLDGARAKKRTTVAVAVARELACFVWEIANQPDI

SEQ ID NO: 481252 - protein, 334 aa, unidentified
MKSDTVHIGVDVSKEKLDIYVPAKKEGSRPATKEVDNSVAGFRELRDLARKAKATVCVEPTGGYELELIAFLHKFEVPVAYADALRVRQFARAEGCLSKNDTIDAALISRFADKIGVRALEAQEVEAVELKRKAKFRQTMMDSRAAMANRLETEVDPEMKALLKEQIKHMDKVIDKAERLCLETVEKDERMNALRERFTQVGGVGDLTAISILAGLPEIGTLNDAKLNRLVGIAPEQRQSGTKEWQRRIWGGRKDVRNALYMAAVASIMWNSVLGAYYRKKRAEGHPHKWAMVPTMRKLLSLLNRIARDPDFVPAPEPESTKLNARVGRRRKAA

SEQ ID NO: 481253 - protein, 323 aa, unidentified
MDTLDFLGIDIAKKTFDAALLRNDKFRHKKFANNPDGFKQLDAWLVKQGAIQIHACLEATGSYSELLAVHLHQAGHTVSLVNPARIKAFSQSELQRNKTDRADATLIARFCSMHHPTVWTPPPAEIRELQALVRHLDDLIGTRTQLANRLSDGPRVESVLESLRSLIKTVDAEIKLTKQKIRKHIDDHPSLKQDCDLLETIPGIGERTATILLAEIQHLRHYKHARQAAAYAGLSPRLEDSGTSIKSSRLSKTGNSRVRKALFMPAIVASRYNPVLRQFSERLLRRGKPKMVIIGAVMRKLLHLAFGVLKTRRPFDANHAIAA

SEQ ID NO: 481254 - protein, 406 aa, unidentified
MISVGIDVSKGKSTICAIKPYGEVLMTPKDFMHTRNDLDSLTKQLSRFKEEVHIIMEATGNYHLPIYQYLKSKDYQIAIINPLEMKRYRCQGIRNPKTDKIDSMIIAQFGIDYWYRFKSNNDIDEKRQELRILGIQYTQFMKTRVTRCQSLCDILERTMPGVYGILNDFDRNNGRDKLCDFAEKYWHSDNIIKHSEKAFVEKYCLWLKKKGYRQNEKEARQLYSIAKNAIPTLDSKLSSTKLLVQEAVNVLREVDSSLYDILNQLKSLSKRMPEYETILAMKGVGDTLGPRFIAEIGDPRRFHNAKALIAYAGIDAPPYQSGQFTGTKRHISKRGSSNLRKLGYELMDSINKHKTLYSGDPVCEYLIKKRDEGKPYRVAMIAAFNKFLRIYHSRVSAILNEQENKK

SEQ ID NO: 481255 - protein, 376 aa, unidentified
MKNTIMCGADVHDNSMTTQIAVNKERPETRVFPYTTNGRRNLLKYLKLVARKHGADRVVVAYEASSLGFGFCDECTDAGIECYVLAPTKMPKSEEDRKRKTDKWDAQKILEQLRAHILAGNELAKVWIPNLETRDDREVIRMRLALGQKLTSAKTQVRTLLKRNGMEKPKDVGKAWTVSDRHWLHWLTEPESKLADGACVGLASLLRQIAFLEEEIKELDKEIEVLADTERYKAAAEALVEQLKGVGLLTAMVFLTEMGDLRRFKNRKKVGAFIGLVPSSNESGEHNDRKGHITRQGPARVRKVLCQASWARIGSDVDESKVHARIVKKNPKKKKIATVACMRRLGVRMWHIGMQAQIEAGVYETKQLPCSKRIAV

SEQ ID NO: 481256 - protein, 265 aa, unidentified
MGIIGCDLHARQQTLAMLETTTGEVVNLTLMHEGNEVREFYSQLPRPVLVGIEATGSMQWFLNLMEELGIECRVGHPATIRAAEPRKQKHDRRDAELILKLLVENRFPAIWLPTKELLDLRALVLHRHQWVRIRTRIQNALQAIALANGLRRGPGLWSYDGQAKIAFLPLPPHASCRRSALQAMYRKMEEEIENLSKQVAEQAEQRTRARRLMTHPGVGPVTALATDIFLGDPGRFVDGKALASYVGIIPREYSSGGNQRLGRIT

SEQ ID NO: 481257 - protein, 386 aa, unidentified
MKTVAGLDVHKDSVYLCILRENGEKIERVYGVLTPQLDSMRDFMAENKVSEVAMESTSVYWIPIWRVLVDSFELKLVNPYFIRQLPGRKSDVKDAQWIAECVMKELIRGSFIPSPLVQRLRLYDRRIFEINAELVRKYSKIDAILQRCNIRLSNYVSNTDCKSYKAVVKQISEGVTSPQELLRHVHKRIINKHGEDTILAALTGVVSDAEIDMLAQYVAESAILEDNKNKCIEKMREICNSEFEEQMKNLQEIPGVSERSALTVLAEIGPDVNAFPSAKHLVSWCGFNPRNDESNKKIKSNKITHGNRFIRIASVQCAWAASRTKDCYFSKFYAFHTQVRKKFKLKVVVAVARKVLVCIWHILKFNVPYKDFEPQKSVTKDCTQFA

SEQ ID NO: 481258 - protein, 373 aa, unidentified
MKTYTLKDGTLKATPVACAKEIKNEKAPKAKLIAVGIDTGLGNNQASRKVDNAAIGPVQKLRSETELLLYVDKQLELAEEVVVVYEAGPFGYGLYRKLTARGAKCLVSAPDSTQQKRKRRKNNAIDSRTLTSNLSNYLNGNEAALQLVRVPTEEQEQARLVSRQHDQLVEERKRLGAQGNALLLSQGFGSWKNWWRPKAFNSLKRVVPGWLLEMLGSWVDLLKVLDEKIQKAKAAQAKGWSGPRPKGAGANSLVQLQSHVLDWNLYPNRRKIACLAGMVPSEWSTGKSQRLGSITKVGVPAIRRIITEMVWRIILFQPHYRPVQKWQEVLRGTNKTLKKKAVVAIGRQLIVDLWRLQTGRLSAQELNLVLIGG

SEQ ID NO: 481259 - protein, 340 aa, unidentified
MNPGIEFSLGVDLAQESFEAAVAPEGADPRLWRELPHIHLTHAPDSEEGIDALLLWVKEHSPLGRCLRVVVESTGQLSKRFARALRGKGLPEVVILNPRRSKAFGDSLGVRDKTDRIDCAILALYAMVHRCEPAEPNSQAQERLRELTRLRERYCAELTGWKNRLRETGQAKSRKFIEKTIKHLDKQIKELDEAIEQEILNDEKMAFQVKSIKKIKGIKKIVSSTLTAELGELRNYGRDQIIGRAGVFARKFESGSSVHKKPRLAKGGGGPVRRVLYMAATSILHSKGPLREYAERLRERGLEDMEVLMALMRKLLLICRAVMMNDGQYDESKILRGAQP

SEQ ID NO: 481260 - protein, 409 aa, unidentified
MRIIGLDIHRAFAEAVAWDDGKLKRLGRVDMRRHLLEAFAKKLSKEDVVVVEATGNASSVAAVIAPHVKKVVIANPKQVRIIAHAKIKTDTIDASVLAQLYASGFLPEVWIPDEPTQALRRQVTRRNQIVRQRSRLKNIIQSILHSHLIPSCPHADLCGAGGRAWLFHQVLPEDERLAVERHLREFDRLGEDLKVIERDLARSALGNEGVKRLMTIPGVDMVVALAIAAAIGEVRRFDRPEKLVGYLGLNPSVRQSGPGPAYHGRITKQGRGHARGMLVEAAWAAARTPGPLRAFFLRVRARRGQHVAAVATARKLAVIIWHLLSKGESYAWARPALHARKLRDLELKAGYRAERGQKGAAHAYNIKSHRDQERRWVEQAEAAYARFVAGWNPRGPKRARTGAANEVRQ

SEQ ID NO: 481261 - protein, 414 aa, unidentified
MLRIVYPICCGLDVHRDFVYACIATTENGITVYKSQRFPTFTKGLRKLLSWLLQFNCRDVCMESTGKYWIPIYNILESDCKIVLAHPKYVKAIRGKKTDKKDAKWIADIFKHDLVSGSFIPPADIRQLRDLVRYNYKLTNYIVGEKNRAQNCLTVSNLKLDCVFTDVFGKASSNIIGHILANPSEKISDVSVFRTKGMKATDAEVLDAVVDGKMCPEQAEKLRIIRSHMDGLELCKANLMSLILTIAEKYTSEISLISTVPGLTANSAISVIGELGVDMSVFPTSKHLCSWAGLAPQNDQSAGKKKTTRISRAGVYIKPLLIQCALAAIKMKKHPEIFNRYNALKKRRGHKKAIIAIARTLLTAIYNILKNKEPYKAGLYAHSYDTPPEHRAVSVEEAIFILQRQGYVVTPCAT

SEQ ID NO: 481262 - protein, 325 aa, unidentified
MQGKETSEQETLHCTVGIDVSKSWLDAHVLPVDESLRVANTLDGIRKLKRWLLACNPKLVAVEATGKWHRGLCRSLHASQIAVAVTDPYRVRMFAKAQGILAKTDRLDARVLARFAAVMAPAARPPAPQALDALKEMVAAQDSAVAERAALKNQLAAAESAFLKRQLTGRIKQLSVHIAGIRRETLKRIKADEGLAGRYAILTSIPSFGPIVAETLIACLAELGTVNDKQAGALAGLAPVADDSGQRHGVRSIWGGRAIVRKILYLAAVSARRCNADMRIFYERLIAHGKAPKVALIAVARKLLILANTLIAQNRTWLPTPPKYA

SEQ ID NO: 481263 - protein, 355 aa, unidentified
MMTESSSVLEVFGGVDTHSLTHHAAVVDTLGRELGDREFPATPAGYEALQAWLVGFGQLVRVGVEGTGSYGAGLMRVLTGAGIVVVEVDRPDRTARRSLGKSDPLDAYAAARAAASGRATGTPKSRDGIVESIRCLRLAQRSAIKARTQCINQIRALLVNGPADLREHLAQLPTAKLIKSLTRLRPTTDLTDPHVACKLALRSLARRYASLDEEIKQLHRGLCDLTRQVAPQLLERPGIGVQVTAQLLITAGDNPDRLGSEASFAHLAGVAPVPASSGKRQHRHRLNRGGDRSANNALYTVALVRMRYHEPTRAYVERRTAEGSRRRTSSAVSNARSPERFTVCSPGQQSRWYAR

SEQ ID NO: 481264 - protein, 369 aa, unidentified
MELERTFVGLDVHARSVVACALDDRTGELSRARLTPDDETILAWLRALPGPLAVVYEAGPTGYGLARFLTSRGVRCVVAAPSKLHRPSGDRVKTDARDALLLARLLRLGEITAVTVPSLAQEAARDLVRVREDVRADLMRARHRTSKLLLRQGIVWSGGTAWTGAHHSWLGQQRFDLVGLQAAYDTTLETVLLAQARRDRLDKTIGEMAHETQWWPVVSRLQCLRGVSTLTAFGLAVEVGDWARFSGSTIGAFLGLVPTESSSGEGRAQGSITKTGNTHARRLLVEAAWHHRRPYRPTKTMRDRWDLAPAAARARGHAGNHRLHDRWLRFEERKKRTVIANVAVARELAGWCWSLAMLEEPEVTAGRRR

SEQ ID NO: 481265 - protein, 370 aa, unidentified
MNKMSAVNTQTIVVGVDVHKYSHTAVALDCFGSQIGLHEFTNDFLPEYVSWLDAFGNRNNPIVALEDVNGYGVHIVRKLADEGITMRYVPGILTERKRKQSIHREKSDPVDAMRVAKVILTNYEETLPAKESIANREERTTAITLDFFLNERRSLVAEKTILKNQLHAMLHQHMGDHYTDCFSKAFTPKAIGYYLKTVNPKAIHDSEASALVASIRRRLTRLKLLLGQIAEIDKAMKKAAKDSSPVAALKKNISGCGDVTACTLIAEVTSIKRFKTKSQFARYAGIAPVHKSSGNHKRLYTSPYGNRKVNRALHTIALYQISRVDDNNPGRIYFEKKLNEGKTKLWALRCLKRQLSNRVFQTLKHEYNTC

SEQ ID NO: 481266 - protein, 431 aa, unidentified
MKTNVTKTNNLYAAFVGLDWADRSHRVCLRAADSDRDEQRDLLHDPLTLHTWAHELRARFPQGKIAVAVEQSKGPVIYALMRHAHLELFPLNPARLAKYREAATAASGAKDDPLDARLACELVRLHRDWLRPLALLPVEVRELEMLLEARRGFVEQRTAYVEQLAATLKGYYPQALELVGREVGAPLCCAFLRRWPTLAAVQRARAETLRGFYHEHNVRSTELIEQRLALVRTAVTLTDDAAILSALPVQVAVLVGQLEALHPAIVDYDRRIAALFAQQADAKLFAALPGAGEQLAPRLYVAFGSDRGRYRSAEEVQRYSGIAPVKKKSGDGLDITSWRWHCPTFLRQTFHEFAGCSIPQSKWARAYFEQQLTRGKSPNKAKRALAYKWQRVLFRCWQTNEPYDEERYIAVLRRRGSPLVERIDALAKAAA

SEQ ID NO: 481267 - protein, 388 aa, unidentified
MDVLYQSCAGIDVHQANIVVCILHGPLTSTRPKREMATFDTTTKGLRACHDFLSQFHVEAVGMESTGVYWRLVWHALCDDFELILAQPAHMKAIPGQKTDKKDAHWIAKLTRIGLLPRSFVPDETIQELRELTRQRKHYVESRNRETNRIHKILQSGGIKLTTYIEDIMGLSGRNLLQLLVDGTPITPRIVHQSVYTSLKKKVPQLLEALDDYFSDHHRFMLKQSLEIYDFYQKQIELLEERMNVYLSQYEKHVEILDSIPGIDVITASVIISEVGVDMSQFPTSGHLASWAGLCPGNNESAGKKRSTKIRHGNSYLKKCLCQAAFAVKRQKGSPLAERYYQIQSRRGSQKATIALAHQLLKIAYILLKEQMTYPEFLAQKKRLLGTS

SEQ ID NO: 481268 - protein, 316 aa, unidentified
MSHPATPVSRFIGCDVGKTAIVVFDSMTGRSRSIANEPQALSDFASGLEPTCFVVCEATGGYEGALLAALLAAGVPVHRADARKVKAFIRSFGTIGKTDAIDAKALARYGSDRCAELARWQARDRERLRLQGLVLARRDMVRDRLAYANRRAAPGAEPAQAHLDALLASFDAQIKAIDADINVLTAQCQPIARAVNTLVAIEGMGAKTATALIALMPELGSLARRQAAALAGLAPHPRQSGELDAYRRTRGGRPEVKRVLFMAALSARKHNPTLKAFFERLVLAGKKPLVAITAIMRKLVVIANAKLKAANALQLS

SEQ ID NO: 481269 - protein, 407 aa, unidentified
MQVYIGIDWSEEKHDIDFMNEAGADLACLCIEHKLEGFVQFDAARRKLGVAAQDCVVGLETAHSLFIDYLWSQDYQNLYVLPPNQVHSNQGRFRQSGAKDDRADARLIADVLRTDRGRLQRWCPDSLLTRQMRAQLSWVLQLNTQIIRLSNRLRAMLLRYYPAALEVFSSLTTQIAPEFVRAYPNPQAARALSYSEFQAFARQHRYPKPKQLPMRYAHLQDDYPETSPETVLIYQSQAVQLADLLLQTMRTRIQNMAQLQVWYRQHPKYAVFASLPGTGELIGPALLVKFGDDPQRFSHPSAVQALAGTSPITRRSGKQKTVRFRSACDKEWRYICQQWAMGLVNQVRSPIASAYYAKIRPHCHSNEHAYRCVANRWLAVAWKLWQTDQPYDEKYHFQQRALRSKPH

SEQ ID NO: 481270 - protein, 360 aa, unidentified
MFTERTSVGLDVHARSVVAAAIDGVTGEVFKARLVPAPEVITAWIGGLPGPVAVVYESGPTGFGLARALAGAGIRCEVAASSKLQRPAGDRVKTDARDALHLARLLRLDEVVAVRVPTPVEESARDLVRCREAARADLMRARHRLSKLLLRHGIVYSDGKAWTQAHDYWLLKQSFPLAGTQAAFQDAYETVVLATGRRDRLDVTIAEMAVDSQFTPVVRRLSCLRGISTLTAFSLAVEIGDWDRFTGASIGAYLGLVPSEHSSGASRSQGSITKTGNGHARRLLVEAAWHHRRPYRPTAILRRRWQLAPPSAVARAQAGNHRLHQRWVSYTERKKRPVLANVAVGRELAGWYWSLAVMPD

SEQ ID NO: 481271 - protein, 412 aa, unidentified
MNAVGIDVSKGKSMVAVLRPLGVVVAKPFEVSHTAAELGKLANFLKSLDGETKVIMEHTGRYYEPVVQVIHEQGLFVSAVNPLLIREYGGNSLRRVKTDKADARKIARYGLDNWAELREHTPMDTIRYELKTLNRQFHLASKNRTACSNNLVALLDQSFPGVRGWFDSPVRKDGSQKWVDFAMTFWHVDCVRAVSQAAFVERYRKWCKCHGYNFSTQKAEQIHREAGEMIALVSRSATAKLLVQESASQLLNLSRMVEVLRAEMNRLAAQLPEYPVVMGLYGVGESLGPQLMAEIGDIRRFAGKQSLVAFAGVDPMPNQSGVKESRSNKSSKRGSPYLRKTLFNVMTALLQNAPPDEPVYQFLDRKRAEGKPYYVYMTAGANKFLRIYFGKVRDYLASLGAAPLDNSSTNPQ

SEQ ID NO: 481272 - protein, 409 aa, unidentified
MEVIVQRVAALDVHKANVTACVRVPAADGGREPHLAEFATTVRGLLALGDWLAAHKVSQVVMEATGVYWKPVWHILEDDFELMLVNARHVKQVPGRKTDMSDAAWLCQLAEAGLLKANFVPPKPIRDLRQLTRYRKTQIAERQREAQRLHKALEDSNVKLDCVASDLLGVSGRLMLNALVAGTTDPEVLADLAKGRLRQKLPALREALEGRFNDLHALLIGAILAHLDFLDEQIDRLSDAIGERVAPFEAAVELLSTIPGVQRRTAEVIIAEIGPDMSIFPSARHLASWAGQCPGNHRSAGKQRSGRTRKGSRWLNAALKDAAMAAIRTKDSYLRALYERQRSRIGHGKAIGAVKHSILVAAWHMLSTGELYTDLGADYYRRRDPARTTKRLVAQLQALGHDVILQDAA

SEQ ID NO: 481273 - protein, 349 aa, unidentified
MLADQVDYVVGVDTHRDEHVLAVVVAPSGAVVAQRSVRASARGYAQALRFVEQYSCGRRVWAVEGVGHYGAGLARYLSGRGETVLEIGRGPRDERRLQGKDDQLDAIRAARTALASRTLTLPRAGERREALRLLLLARRSAVNVRREALVQLRSVIVTCPDRLREQLRRLPAGRLVVRCSRFRRSSACTPDELASRLVLRSLARRVEAATAEAAELEREIHAHVRALAPQLLDEPGIGPIVAAQLIVTWSHHGRVRSEAAFARLAGVAPIPASSGQTTRHRLSRGGDRQLNCALHTVILYRRQHDPTTKDYIARRVAEGKTTRDAVRSLKRYLARHLYRLLQTQEPLMA

SEQ ID NO: 481274 - protein, 316 aa, unidentified
MEQPSTIPHFVGIDVSKDRLDVHVRPSGRAFAVARNGEGIEQLITELRALTPMLVVLEATGGFEVTVAAAVAGAGLPLAVVNPRQIRDFARATGRLAKTDTLDAEAIALFAERVRPEARPIADAESQALAELVARRRQLIQMIGMEGNRLRQARNRRVQRSLKATLKTLEAQLAKLDKELDDAIRGSPVWRATDDLLTSVPGIGDITARTLIADLPELGRLDRRRIAALVGVAPINRDSGQMRGRRTIAGGRAAIRQVLYMATLTATQWNPVIKAHYAQLVARGRPKKVAIVACMRRLLGILNAIIRTASPWQKLA

SEQ ID NO: 481275 - protein, 482 aa, unidentified
MKKRNIYLNRSQELLGLFEEAGNNAKVMCVPIDYAKKDHVVMFCNGYGDIVRKPFSVKNSPEGVEYLTQQVVRSWRHRAINSKHVFFGGEDPNSYAENFANTLRSQGWLVASVNARDAKKQRANLQASTDRLDLMGIAVMLLNRRANCSPAQSGIYRNLRTLVRHRRKLVIMKTEICNRIHTVVDRLFPGFLNEKNSGVCPFTKSSLWLMQNRFSARQIRCRNRSKLIEALRRYGTCQPEKTAAQLQQYAAQVLSTPGEYIGTWQLSLAQHVKHYRCLQENIDQAEKEIALWLAQTQGAFLTTVRGIGIVLAAGVTAEIGDPNEQKPVNNLVSYAGVIPRVKQSGGPEGKIYVGHVAKRCNHILKDYVVNSAVHLGLHGPPDLMADYKRRDAAGQHADFGIARRYLRMAMCLMRTSQVYMPRHLHSRKVQREERAGYYLTMWPYLREKWKKLGALIAAFEKDRPLGQWRDMVQQLYEIKLTL

SEQ ID NO: 481276 - protein, 429 aa, unidentified
MNNVDNIRLEQFRQIRKEVRGSKEYMIVGIDVAKEKHYAFLGTATGKTLLRRMIFENSIKGFEKLLSHADSLKVQHSLDKVVFGLEPTGNYHKPLGEHLIKCSRNVVLVSGVAAKNNRRMMDGRWDKNDTKDAAVIADLISQGKFLFYEYATMPIRDLRNLLSLKRRLKKQEHVYKVRIRNSLLAQYFPELDKYYRNCGKEGLAIVRWCLDPSVIYGLEYEAFTCLVASNGRGGLPQQKRLRAVWKKSIESIGCAVGESLDVEAKVMVEGLKYTREAISCVERKIKEICLNIPEYQYIFSIPGFGPDISSKVVGAIGYPYRFDNGRQVLKMAGMDLSANRSGKKSDNVTPKLSKSGKADLRYALYQAALIASCKNGYFMRYYTEKLRGREKEKGIKTKMRVKLAAKMLIIAWTLMKKQEYFDPGYLNIE

SEQ ID NO: 481277 - protein, 344 aa, unidentified
MDHFAGLDVSVKETSVCILDDAGKILKEVKVLSEPQALLKVLGNPAYRFKRIGLEAGPLSQWLFSALAEAELPVICVETRHMQAVLKAQINKTDRNDARGIAQMMRVGVYRPVHVKTLRSQKLRMLLTHRKLLQSKAIAIENDLRGTLRNFGLKVGMVGTARFEARVQELVETIPDLVVLVEPLLVVRRALREQIVVLHRRLLAIVRDDEVCRRLMTTPGVGPVVALTYRATVDVPARFRKSKSVGAVFGLTSSRYQSGEIDWSGRISRCGDEMMRTMLYEAAQSMLHSKKWSWLKAWAMQIARRRGMKRAIVALARRLAVIMHRIWIDGTEFRWTREPTAAAA

SEQ ID NO: 481278 - protein, 342 aa, unidentified
MTRVNASEPSPPDAADAAADAAGDDGIFVGVDVSKAKLDVARSDAGNAVQAFANDPAGIAELVRRLLVAGRPVRLVLLEATGGLERPLVAALLEAGLPAASVNPTRARYFAIGAGVLAKTDPVDARVLVECARRGEHRLLRKRDERRAELEALVTCRRQLLHVRTEQSNRRDGTTSRPALRAIDAVLKTLDRQVLGLDRQIEKLIESDDDLRRDGGILGGVPGVGAVLTATLLAELAELGAVGRRAVTALVGVAPYPDDSGPRTGRRRIRGGRASVRNALYMATLSAIRFNPVIRPFAQRLRDRGKAAKVVIVACMRKLLCILNAMLRDRLTWAELDLVKNA

SEQ ID NO: 481279 - protein, 333 aa, unidentified
MDIVIIGIDLGKNSCSLTGMDASGRVVLRRRMRRNSLERFTKGLGRCIIAMEACCGAHHLGRIFATQGHEVRLMSPEYVRPYVKSQKNDDLDAEAIAEAAMRPTMRFVEVKSQAQSDIQALHRARERLVSERTALINHLRALLLERGIVAPQGRRKPEEELSVFADEDGIEALSPRIRLLIEDLRAEWRALDERIAAFDGEFVRMARDDEAVRRLTKIPGIGTINATALAAAVGNARAFRRGRDMAAWLGLTPRQMTTGGKPRLLGISKRGNRYLRKNLIHGARAVLPYLVERETPAHKNVAVVALANKLARIAWAVLAHGCAYDSGCETAAA

SEQ ID NO: 481280 - protein, 312 aa, unidentified
METKFVGIDVSKLTLDFDCLPVSAAQQFANDAAGVAALVVLLQGSGVERVVIEATGGYETAVVSALAAAGLPVVVVNPKQVRDFANAMGHFAKTDRLDAKVLALFGERIKPALRTIPDETQRALADLLGRRTQLVVMRAQEKARLATVAAVARKNVEQHIAWLDKCIGKLDADLGDRLRSSPVWCHKATLLDSVPGVGEVTTFSLLAKLPELGTLNRQKISALVGLAPFPDDSGKRQGTRYIRGGRAEVRCVLYMATLSAIKHNPPIKAMYERLTMAGKPFKLAMTACMRKLLTILNAMLKTNQTWKIQTSS

SEQ ID NO: 481281 - protein, 388 aa, unidentified
MLTPDSEESNGGRTVIGIDPCSQFLQLAILTPNKKTEFKKLHLSPNITEEIARSTDPATTQIAIESYGSYGKLFVYDLLKRGYDIREVNPHISKKLASLYNEEHSDQKDAESLAKALLLIPDLPRISITDKKQWLAKLTRTRKKLVKDLNGYLNRLHIALTESYGVVYKSLFKTLFAKKALMFFDDNPTINDSISDEDAKKRLGEEKWDLLIQAGKWKDDYYLETLRTEIRGLIGIIRSINSTKIALEENIQEITEQVEEMRILQTFPGIGGIAGATLLSEIGDIERFDQESYLSAYCGVSPVIWQSGTGRIRTKRRKRYSRRLKGILYFIALSQIRINPESRAYYDRKIKEGKTHWQAMNALSRQLIKIIYYMLKHKKPYQRNTFVN

SEQ ID NO: 481282 - protein, 367 aa, unidentified
MKKVSTAVAKQSRNFFRQTLTIGLDLGDRNSWYCVVDEAGQVKREQRVRTTTKALQEVFGAMPRSRIALEIGTHSPWVSRLLGELGHEVIVANARKVRLIGESRKKDDRLDAQTLARLARIDPELLYPVKHRSAKAQADLAMIRARAGLVRARTGLVNTARGLAKSYGERLRGCNVRNMDPEKAEGLSPELQRALEPLLAAIEELSERIVEYNDRIEALAQTTYPQVELLKQIKGVGTLIALTFLLTLEDPHRFRKSRDVGGYLGLQPGRRNSGQSEPQLHISKEGDPYLRTLLVQGAQHILGPFGIDCDLRRWGLKLAERGGRNGKKRAIVATARKLAVLLHHLWVSGEVYEPLHNSSRLTVAAAA

SEQ ID NO: 481283 - protein, 343 aa, unidentified
MEYYVGLDVSLKQTSICVVDQSGSVVREGVVDSGPEAISVYVRSKAPGAVRIGLETGPTSTWLWTELKQLGLPVICIDARHAKAVLKMRINKSDRNDAIGIARIMQSGWFKEVHVKDIDSHSVRALLASRALLVKIKRDLENHVRGLLKNRGLVIGRAKFNVFAVRAEELIEDRPELIAAIRPLLEARNVVEQQVSELDRKVMKLARHDAQVRQFMIVPGVGPITALAFKATIDDPARFARSRSVGAYVGLTCRRHASGEVDWSGRISKCGDAMLRSYLFEAAGVLLTRVQKWSAVKAWGVKLAKRNGLRKAKVAVARKLAVILHRMWIDGTEFNWSKKEIAA

SEQ ID NO: 481284 - protein, 456 aa, unidentified
MLRDAIGIDPDSKGCQSALLKFGECQAQQSGYPAPEDGMQRFNRWVKEKEDVIVAIEGSNGQSKPIEKALRSAEIVFYSFKPSDVGKFRKVVLGQNKNNKKDAESTARYAMALEAQGKLDKWKRVWSPDEDLQGLTRSYSQKTTESTRSINRLWKLLREASVDLYLALGGEHPDIDINENILQNEGILALLIEKPDIFEWKTLSETDFLSVMGNFNYKGRKKLIEELQKVSRSFRPVSPAISLMIKNTTEQIILLKRQLKEIKKMIEKQTKDNKAVKTLEQHKGIGTMTAATLYAEIIDIRRFVKDDNLASYSGLCKREYKTGKNEKEIPNYFFNRRLKNVFMTAARNYVLYNPGSHLAGYYRNNVKGGMKKTDARKRVARALVRVFFKELYSLVEQDNNSDKIEDKKMGKENDMANGLSRSDKYHSNISFPSPIKNNTEGREKVKREKTEKLVMK

SEQ ID NO: 481285 - protein, 405 aa, unidentified
MNAVGIDVSKGKSTVTIRRPGDVVLMPPCDIPHTQSAINALIEQIKNLDGETKACMEHTGRYYEPVANWLSDAGIFVSAVNPILIRDFGDDSLRTPKTDKADSKKIARYALDRWAKLKQYGSMDKTRNQLKTMNRQFGFYMDQKTAMKNNLISLLDQTYPGANDFFDSPARSDGSQKWVDFVYTYWHVDCVRSKSLQAFTEHYRKWCKRNGYNFSASKAEKIYQSSSDLIAVFPKDDSTKTLIRQAVTMLNTASQTVEALRLKMDQTAATLPEYPVVMAMNGVGPSLGPQLMAEIGDVTRFTHREALTAFAGVDPGKNDSGKRNQKSVRTSKKGSPSLRKTLFQIMDGLIKRSPVDDPVYTFMDKKRSEGKPYYVYMTAGANKFLRIYYGRVREYLASLEEAKES

SEQ ID NO: 481286 - protein, 326 aa, unidentified
MQSILGIDVSKDKHDLILICEGRKYHKVISNDLKGFEQLGKWLKKRQVTELHACLEATGQYGEPVAEWLYNQGHQVSVVNPARLKHYGESKLHRNKTDKADADLIAEFCLKEKPSLWKPLSPEIKHLRALIRRLQSLKDNLQQEMNRLESGENDVWVTNDLETHIRFLQERIKATLEEIEDLIDQNPGLKSQQKLLTSIPGIGDLTANTLLAEVGDFSAFEDAPQLAAYAGLNPKGHRSGSSVYKKTRISKQGRVELRRCLYMPAVSALSSNPVIKSLAYRMSMTNHEKMEIVVAAMRKLLHLAYGVLKNQLPFDPDYGAQFNYSS

SEQ ID NO: 481287 - protein, 323 aa, unidentified
MSSLFQLGIDVAKAKLDCALRLPEGKLRHKVVENSPSGFQALNVWLAKQGAITTHVCMEATGIYWEAVAEYFAALPGFTVSVINPAQIKAFGASQMVRTKTDKVDARLIAQFCFERRPEPWQAPTPAEQTLRALVLRLDALQAMRTQEGNRLEVARSALKDSIATHIAWIDGEIDRIIRAIRDHIDHDPTLRDKQRLLDSVPGLGERTIATLLAFYATPERFDNARQAAAFAGLDPRQCESGSSVKGKPRMSKIGHAFLRKALYMPAMVTLYRTDWGKQFRSRLAAAGKPPMLIIGAMMRKLVHVAFGVLKSGKPFNSALHGA

SEQ ID NO: 481288 - protein, 301 aa, unidentified
MDESIKFFVGLDAPKDSIAVAVCEAGREPSRFVGTLGPDVQGVLKTLRKYSPARQVSVVYEAGPTGYGLHRELTRRGYRCEIIAPSLIPRRAGARIKTDRRDCARLAELSRAGELKAIWVPDEAHEAMRNLWRAREDAVNLRLKVRQQLKAFLLRLDRRYAGKTSWTKMHQRWIADQHFAHPADQIALTEYQLAVQATEERVQRLTAALQQIVQGWRFEPVVAALRALRGIDTVSAIGLVCEVGDISRFGTARQLMGYLGLVPSEHSSGNSVRRGSITKTGNAHARRLLTEAAWNYLSACC

SEQ ID NO: 481289 - protein, 413 aa, unidentified
MVRSGGGWLEIFCGIDWSEAAHDVAVVDESGRLLARRRIADDAAGFTALTELLAGYAGRPERVDVAIETGRGLLVAALRAAGHRVFAINPKAVDRYRDRHGMAGAKSDPGDARVLADILRTDRDRHRPLPADSDLAAAVGVLARAHQDAVWARVQDANRLRSLLREFFPAALTAFADLTTNTALAVLAAAPTPTAAARLSRANLTDLLRVAGRGTRPTEAARLAEIFTVDQLRQPPVVEAAMGQAVRAIVRTLTAANQSISDLEAALAAAFDQHPDGEILRSLPGLGPILAARVLSEFGDDPTRFPDPASRRAYAGTAPITRASGRSRVVLARHVRNKRLADACYLWAFAALNRSPGARAYYDTRRAAGDRHNAALRRLASKLLGQLHHCLTTSRPYDEALAWPQPDTTPAAA

SEQ ID NO: 481290 - protein, 446 aa, unidentified
MSRWSPRVAALQSAGAFGEEMTKAMLAESQDEEQIIARAAALDIGKAELVCCVRVPVEGNPKKRLQEVSTHSTMSRSLAELANHLVDLRIERVVMEATSDYWKPVFYLLEAHGLEPWLVNARDVKHLPGRPKTDVLDAVWLCKVAERQMLRPSFVPPAPIRRLRDLTRYRIDLVGARTAEKNRVEKLLEDACIKLSVVASDIFGVSGREMMAALIAGERNPAVLAQLARSRMRTKITELEEAFTGRFDDHHVFLLARMLARIDGIDADIAAVDEQIEAQLAPFAAAAERLDKIPGIGPVAAAVILAEIGVDMSRFPTEGHLCSWAKFSPGINSSAGKTKGNGSTGHGDRYLARILGEAAVVVGRTDTFLGERYRRIARRRGKNRAIVAVGRSILVIVWHLLHDPDARFRDLGADHFSRHTDPDTKKRGHIRQLEALGYTVTLAPAA

SEQ ID NO: 481291 - protein, 471 aa, unidentified
MTAAPGDDDRDDGAEEVIGGIDTHAETIHVAVVSVLGREIADAEFATTPAGYRAAYDFLNSHGAIERVGIEGTSSYGAGIARACAAGGLEVREVLRPDKTVRRRQGKSDPIDAYHAARAVLSGRATSPPKDEKILGLRALHLARRSAVKARTATIHQIHQVLVTAPDSIRQKYRSMTNTKLVTALSRSRTTRYDPVGAAIMRALKDLAARHEFLTSQAADLERDIRTVVESMNPGLLAAHGVGPDTAAQLLITAGANPDRLSNEASFAALCGTAPVPASSGKTRRYRLSRGGDRAANNALHRVALVRMSSDPTTRAYVQRQRARGRSSKEILRTLKRALAREMFKYLTRVVTAPATADLRPARQAKNITLTQAAAHFGVWPMHISTIERGTRRDDDLARAYRQWLQAARQPIGASSPSKRASCEVRTVAPRWGWLSGPAVTFRDAARAVARHPRVLVPVRGAVVLSGEWWS

SEQ ID NO: 481292 - protein, 387 aa, unidentified
MTVQSQVSAFIPRHYEIFAGLDVDKHSIAVTFTDHTKLLKSLRLPYSSEHLLNYARKHFPDRRLAFVYEAGPTGFGLYDDLIADGHPCLVVAPSMVPTAPGQRVKTNRLDSKKLSEGLRGGQLRSIHVPSPTYRQLRHLVQLRDTHVRQLTATKCRIKALLLYEGIAFPEAPAGGQWSARVLRQLEALPGAEAVRFKLNHLIGTLHFHFLSAAAVQKQIRRFCQNDPELRQVIGLLTSLPGVGWIVAAHLTARLGDWREITNVRQIAAFLGLVSSEHSTGDQENRGAITRSGDSRLRNKLIQSAWTTIGKDPELRAFYRRIYERHPKKVAARKAIVAVARKLTTRIYAVLKQQRPFVLRPDSSSAPLTAEETAGPRGRLDAAQNEQP

SEQ ID NO: 481293 - protein, 339 aa, unidentified
MKLYAGFDLHSRSSHLAVLDQEGKKVFKGKLDNDPQLMTLALEPYREGLVAIAVESTFNWYWLVDALMETGYQVRLANPAAIQKYKGLKHSDDSSDAQWLAEMLRLGILPQGYIYPREHRSVRDLLRKRMHLVKLRTSLLNSLENIIARNAGVSLPAKKIKQLTCDHVAPLLDEDDDLALCGQVSKEAIDYLTRQINKVEKVVERKVPLKQEYTLLKTIPGVGIILSLTITLETGPIDRFPQVGNYASYCRKVPTRWLSAGKGKGKGNKKNGNKYLAWAFSEASEMSRRFDPKIKAYYDRKASRTNLMIAHSALAHKLCRAAYYIIRDQVPFDSDKLFA

SEQ ID NO: 481294 - protein, 338 aa, unidentified
MYYTGIDLHKFTSYLTTVDSLGNIVKQQNLKNVDHNFVQYFNAIPGDHKTTVESTMTWYWLNDLLSSLNIPLVLAHAKYVKAIAYAKVKTDKVDSHTLAQLLRMDFIPEAHKISNQNRTLRDALRARLKLVQRHTSVTNSMHLLLAKYNLSSSSELFGIAKYQFDQLSDLEELLNDQILDLEKQLYPDLILNDDIQRLLWIPGIGKLNAFNILLEVDNINRFDSVNNFYSYCRLTPSARNSAGKAKQRSSKDGNKYLKIVFSDAAIHAVQYYPVIRKYHASLLRKKNKQVAKTIIAKEIANIVFHVLKYKTNFNNLFKGKDLVHTKSLQWPRVVSPYA

SEQ ID NO: 481295 - protein, 338 aa, unidentified
MYYTGIDLHKKTSFITTVDENGKVVFRRNFPNQDEHILEYFVNLDGPTKIVIESMCSWFWLHDLLRAHNFNVVISNPLKTKAIASAKIKNDKVDSHMLAQLLRADLIATVHVCSLKTRKLKELLRHRQRLVRDATRMKNRIHMLLMKNNTAIPVSDLFGVKGMKHLKDVDLPIYHRQQLKSYLTLYDCLNEQIEPLTKQVRDLAQKNPMAQLLMTIPGIGPLTAMFIIAEIEDISRFPSYRNLSSYAGLVPCLDASADKSRTGRITKQGSPYLRSALVEAAQVIPRMKKTRLNVFFRKRIVRAGYQKAIVATAHKILQYVYYVLKNQTPYQEEYPAKA

SEQ ID NO: 481296 - protein, 394 aa, unidentified
MFLVGIDIGKHKHSFCIINKETGESIVKPKFFNNNKVGFEELLSSFKGLPKKDILIGMEDTGHYHFALLKFLLDKKYQVALINPVTTDLTRKLSGSHTKTDKLDTLTICDVLTSNQRTKPYRISKVDRFDLYEQKQLTREHHNLKEQSNVLKNRLQKSIDIVFPEFNSLFKSMYGVVYMNILKEFGSADALAHSDIRTIRKCFDFKGRGKRIELTAKELKKAAINSIGFPSIAEVVQIKHLVNQIELVEEQIEELDKKIEEFSIANNSPILSIPGISHFSGTSILAELGNIHNYSKPSQIIKFAGVAPLTYESSQFTAKHTAITKKGSTYLRKTLYQIILPVINNNKVFKDYYNLKLSQGKGYRCAQGHCVRKLLRVIFQLLSTNTQFDPALLV

SEQ ID NO: 481297 - protein, 360 aa, unidentified
MAQVRTWVGLDVHAAKVVAAIADSESGELAVRRMGGQTEQVAEFCAGLPAPVRVAYEAGPTGFGLARALAARGIDCTIAAPGKIERPAQDRVKTDRRDAERLVRLLMIGGLHAVRVPTPAEEAMRDLVRAREDVRGDLMAARHRVGKLLLRHDLRFEGNNWTQRHLDWLGRVELPEPVAQSVLLDGIGAIDALLVRRESLEAQMGALVEGSPWEQTVARLRCLRGIDTLSALGLCAEVGDFERFARPAQLMSYLGLVPSENTTGEKRRQGAITKSGSRHARRLLVEAAWHYRRAPRKGTALRRRQEGQPQEVCAISWKAQQRLHRSWVRLDSERGKRRTLCAVAVARELAGFCWAVSTAD

SEQ ID NO: 481298 - protein, 355 aa, unidentified
MSKITRVGVDLAKTVIQVHAVDAAGRVLVRRALKRDMFIDWCVQLPAGCLIAMEACSGAHHWCRKLQALGFDARMIPAQFVAPYRLQGSSGKNDANDAAAVCEAASRAHMHFVRPKTIEQQGMLCVHRLREGLKEERHACINRIRGLLAEFGIVLPQSPEVLRRHLRDLMEDASNELASMARLVLQRAQQHWQELDEHLQWCDERIAAHKAADPQVQRAAQLLGVGPVTASALIASVGDFKQFKNGAQLGAWLGLTPKQNSSGGKARLGGITKRGDTYLRTLLIQGAKAVVLTRKGCTNNPIGQWAQRLRERVGWQKAIVALANKNARILWAVLTREAPFDAHHISVKPTAVAPL

SEQ ID NO: 481299 - protein, 338 aa, unidentified
MEWTVAIGVDTHKDVHVAVALDRFGAQLGSREVATTETGYRALLAWALELGPPAFAVEGCGSYGAGLVRFLELAGVAVWECERPRRQERRRGKSDLIDAALAARRLLSGEGLCLPRGGGRREELRLLLLERRSAIQARTAALNQLNALVVTAPEQLRQRLGPLSGERLARAAARLRPGDDVGTAVVRRLGRRAEQLSHEVTEIDRRLLEILTEVAPALLAECGVGPVCAAQLLVSSGDPDRMASEASFAALAGTNPLDASSGQQRRHRLNRGGDRQLNRALHVIALARIHHHAETTAYYQRLLVTGKTAREARRCVKRALARYFYRRLREIPTPALTT

SEQ ID NO: 481300 - protein, 343 aa, unidentified
MNKIATIGLDIAKQVFQVHGADAQGVTLFNRKLRRSEVLPFFEKLSPCIVAMEACGSAHHWAREIGALGHEARILPAQYVKPFVMRGKTDAADAAAITEAMKRPDIRSVPVKTAAQQAATMTLRTRTFFVRQRTNAVNALRGYMAEFGLVADRGIANFGKLVTALPERADARIPPAAHMMLDEILAEIETLTARIQRIEEQIAANAKEDEDIRRLTAIPGIGTLTAAAIQAHVPDPGCFKSARHFSAWLGLTPKQNSSGEKSRSGKISRMGNGELRSLLYIGAMGVLSAARRFGTRSAWLRRLMDRRPLRVVAVALANRTARVAWALLVKGGAYHAPAELAGN

SEQ ID NO: 481301 - protein, 321 aa, unidentified
MTAILGIDVAKNKLDVALFRNDKYKTKSFENKPAGFETLAAWLARHEVVSVHACMEATGSYGDSLARFLFEAGHKISVVNPARIKAYGESELLRTKTDKTDARLIARFCEALKPAAWQPDPPEVEHLRMLGRRRDALISMRTQEVNRLGSPDASVNESVQKVIAFLDGEIEQISKAIREHINKHDGLRKKRDLLNSIPGVGYVTIEAILSEANGFEGFDTVEQVVAFMGLSPKERTSGSSVKGKASICKIGSARLRKVLYMPTLSAIQHNPFVTALYDRLVAKSKNGMIVACACMKKLVHIIYGVIKNGKPFNPAYNIKTA

SEQ ID NO: 481302 - protein, 420 aa, unidentified
MKSWTEITHYAGFDWAKDHHGVVIVDAQGRIVADFEFNHSLEGWKSFGEKTSAFPNLAVAIETSQGAAVDQLLQRGFTVYPVHPVAAQSYRERKSPTGNKTDHLDAWGLADALRVDGHGWRVLQPTDPMTQQLRLLCRDEVTLIEQRTALVNQLQQALAEYYPAALEAFDDWTKDFTWEFVIAFPTPQSLVKAGKRRWENFLHAHKLWRPQTSEKRLQIFARADQFKASAPIVAAKSQLAVSLCKLLRTLGLQLELYREQIEALFKKHPDHHLFGSLPGAKDFLAPRLLAAIGVNPDRYGSHEVLQCIAGTAPVSYQSGKLHKVRVRWACDKFLRHTVHLWANCFCKASAWGRAYYQQKRDEGMSHACALRCLGQRLLKILFRMLKDKKPYDAELHARNQQKHGSWVLKLANAPVAKPSA

SEQ ID NO: 481303 - protein, 351 aa, unidentified
MLYTGLDLHRSFSYITTMNDKGEIVGHKKLPSNGEIVEFLKEFDDTMEVAIEATPSWYWLYDCLEDEGFKVKLSHPLKTKAIAYAKVKTDKVDSATLAHLLRSDLLPLSYVPEKPVRLNRELLRYRARLVRVQTRIKNNIHTILAKNNVSHRYSDLFGKEGMAFLYSLSMPENYKIALEGYLSVLETLRHEIRLASKRVQALAEENPDAVLLMTIPGVGYYSALMIESEIGDVKRFSSAKQLCSYAGLVPSTYASGNTCYHGHITKQGSRWLRWILIEAAIHAVKRPGPLRRFYFKVERKKGGKVAKVATARKLLEWIYHMMRDNKSFKEAERLAELQGKGELVKKPGLVL

SEQ ID NO: 481304 - protein, 353 aa, unidentified
MGIVVALDVHRKQITYKTLDRETGEVKRGRIAPAARADVREWLARFAGCEAEFALEGTTGWRFVVEEIERAGHRAHLADPAETAAKRGRKRRAKTDNADCDLQLKLLLSGELPESWIPPAHLLELRTRVRVRKTLVDQRTAWQQRLQGQLFHQGVPAGLRPRTRAGREALARVELSPAGRALVLLALRMIETIDRELAPLDRELRAYARRQPGCRALMARLYGVGPVSATAILAELGDARRFARSDDAVRHSGLDVTVYQSDSKRAAGHLSHEGPEVLRWALFEAAQQAARAGSPDHRYYRQVAGRIDHNRACLSVARKLCRRAYHILRELGDEALAAVECDPQAEEAVAAAA

SEQ ID NO: 481305 - protein, 310 aa, unidentified
MEHRRIAGIDVSKDRLDVHVLPSQEAFAVSRDPTGLAELCRRLGDTATLVAVEATGGYETLVAATLADHGVPVVVVNPAQVRSFAQALGQRAKTDPIDAAVIARFAEATRPQIRPLPDAAARLLADLMARRRQIVEMIASERQRLHRTEPPRVRKSIERLLKALERELGTIDHDVDGAVRGSPLWREKEGLLASVPGIGRIIARTLLAELPELGRLDHKQIAALAGLTPYTRKSGLWKGKARIGGGRAVVRTALFIGAQVAKRWNPPLKAFYERLIAAGKTKMVATIAVARKLLVTLNAILRDSTPWQNA

SEQ ID NO: 481306 - protein, 367 aa, unidentified
MNKSSKAFVGMDVHKESIDWAIAERDGEVRSFGRTGGDLTAVARTVRKLVASGKTLVFVYEAGPCGFGIHRWLKVQGHECWVVSPSLTPKKPGERIKTDTRDAIKLARLARAGELTAIYVPEAADEALRDLVRAREDAVAMQRQARHRLQALLLRNDIRYVGKTAWTPAHQRWIARLKLPYAPQQIAFEEYVQAVQEATTRIDRLTAAIQAAVSTWRWQPVVAALQAMRGVQLIHAVRIVAELGDLTRFGTPRALMGFLGLVPTEHSSGGKRAQGAITKAGNSSARRALVEAAWAYQHPARITPIIARRQGGVPKIVLDIAWKAQLRLCARFRKLAVRGVNRNKLVVAVARELAGFVWAIGQQVRPV

SEQ ID NO: 481307 - protein, 407 aa, unidentified
MVIQMNSVGIDISKGRSTVAVMRPFGEVVISPFEVRHTDSELSELARQLKSLDGETRVVMEATGNYHTPVAKLLHDAGLYVSVVNAKLVHGYGNNDLRRVKTDKKDSVKLANYGLDRWLALTRYVPEEDTRLLLKNCYRQYRQYSKVQTVLKNNLISLLDTVFPNVNRLFSSPAREDGSEKWVDFVAEFWHCRCVSEKSEKAFANKYQRWCRKYGYNFNEAKAHTIHAEASGHIGVMPMSETTKLLVEQAVAQLRATSTALAALKHEMQALTSMLPEYPVVMDMFGVGPTLGPQLIAEIGDVRRFYSKKALVAYAGLDAPPNDSGDVTGRHKSMSKIGASSLRRTLFLVMSVYLQTAPLDEPVYQFMDRKRAEGKPYRVYMMASANKFLRIYYATVKAYLESLEHTA

SEQ ID NO: 481308 - protein, 322 aa, unidentified
MHPFHLGIDVAKAKLDCALRTPEGKIRHKVVANTPAGFEELRAWLAKQGADSVHVCLEATGTYGEAVAIFLAGRAAITVSVINPAQIKAFGVSQMVRTKTDKADAVLIAQFCFERQPTAWQPPSPAEQALRVLVLRLEALQTMRTQESNRLEVAALPVRDGIAQHLAWLDTEIERLIKEIRHHIDRDPTLHDKQRLLDSIPGLGERTIAILLAFYADPARFGNARRAAAFAGLDPRQHESGSSVRAKPRLSKVGHAFLRKALYMPAMVTLYKTDWGKRFRQRLAASGKPPMLIIGAMMRKLVHVAFGVLKSGKAFDPAIHGA

SEQ ID NO: 481309 - protein, 447 aa, unidentified
MKKKSGFPVLHPNAAGIDIASSEHYVAINPEADEQSIRAFGCFTEDLYAIADWLLECKVDTVAMEATGVYWVSLYLILEEAGLNVVLVNAKHVKNISGKKSDVKDAEWIRQLHSCGLLSASFQPDHFTRTLRTFMRHRKNLTDMAATHIHMMQKAMEQMNIKLQNVIADITGKSGQAIIEAILKGEHRPEVLVQLLDGRIKASHEEVRKSLEAVWKEENLFELKQSFELYRTYRSKIRECDEQIKAHLTTRTNEMEKEISVSKQKVKTKAKSNKNNLSFDATEMLQQIVGTDLTEIFGITDTNAIEIISEIGLDVSKWATVKHFTSWLNLAPNNKVSGGKILSSKTQKKKNKAGQIFKLAAYTVQRSKNWLAMFYHRIKSKHGTKKAITATARKIAVIFYKLMKEKTSFNPLSAELYTRTFREQQLKRLKKQADKLGLMLIQNELVT

SEQ ID NO: 481310 - protein, 386 aa, unidentified
MNYIGIDISKYKHDCFIATETINHQFSFENSQSGFKELLRYFKPYLKQEMIIGLEATGHYGENLKSFLTFHGYSFMEINPFLVKKFGEAQSLRKTKTDKKDAQMISSYMRSVDYKAYHHQSYHISALKSLTRLRSKLISMRTKHYNMITKVLDVIFPEYKPFMHEQGYSEISLYLLKRFSSPDRIAKMKENHFETLRKLSRGKFNYPKFVKLKALASQTIGVTQDHQLFKLKTSISYVEMINQDIDETEKQITALMDQYPTYIQTIKGIGVISAAIIICEYGDISLFSNPAEMLSYAGLDSSIKQSGTMSSTGKLVKRGSKYLRATLINICQTVMIYNPVFYAYYDKKKQEGKHHRVALVHLAKKLIRVIHHIEANKEDFDSKKLK

SEQ ID NO: 481311 - protein, 306 aa, unidentified
MIVGIDVHKHTHAVALIDDRGGQVAALSIANSPKGYRQLIDWLVDHDAASAVIGVESPGSYGRCLVVALCGAGFEVLQVPAWRTHRERHHRGPGKTDPGDALSIAHVVLRHRHELGPAQEPELVRALGMLELQRRRFVRDRTQAIQRLRSDWTQHDPVAEAAVLRCDRKRELRQLKRIRLGDSLHQRTAARCIRELAHDIDELNHKIAALDTEIADLLAEHDNPLEDLLGAGTNLAATIIAQAGDVRRFRNAGAFARFCGAAPIPCGSGQTSGRHRLHRGGNRQLNAALYRIAIVQQRHHPAARPS

SEQ ID NO: 481312 - protein, 353 aa, unidentified
MCKGMKNFSIGIDVSKEKFDLTVKKVYYGTKQPEFLHYDVYENNPIGFRKMLKVLEKVTGRADKSEWLFCLETTGAYELHLCNYLYAKGYDVWRESALQIKLSNGIAKSKNDQVDSERIADYAIRYMDKMVIYEPEDEKLRTLKSLFLFRERLVKEKRSKQTSSQEIKCTHVMNDEMRWMQTRSQQDIARLNKEIKECEDHIRSLIASCEEIEKNYQHVMSIKGMGIVTTTALIVYTHNFERITSARKASSYCGLAPFYAQSGSSIYYEKNVSNYSNPQLKGYLTQAAFIATRYNEDIANYYNRLRASGKPTGICVNNVRNKLLRITFSLVQNDCNYEENHEWKRSQSLKEAA

SEQ ID NO: 481313 - protein, 405 aa, unidentified
MSNKVIFNLDELFISVGIDVGADFSWMSIALPNQQFVGKPYKILHNSIDSLTTAVSKIKEAEELYSLESRIFLESTGIYHYPLFCYLRDKGFNCSVINPIITKNSTNINIRKVHNDRFDSKKAALVGLKPDLKVSLMPSDLALNCRNLCREYYDLMDNRSAYVNKLQGELRMAFPQYLGIFSKVTINTSLTLLETYTSPSAFLEADKQEIIDIIKSTARFGLTYAQNKYNAIIQAATDANQFGYIIDSNIKRIRLYISFIRKYDEEINSILESLHELVDANEDADFVKQIHLIETFKGAGFLSAVSIMGEIGDFSAFSKPKQLFAYFGLDPAVKQSGKFEGTKVQMSKRGSAIARRVIHTLTLQSISISRNGEAKNPVLREYYLKKCDSKPKLVAMGLFHIKYAT

SEQ ID NO: 481314 - protein, 396 aa, unidentified
MAQVWAGADAGKAHHHCVVIDADGRRLLSRRVANDEPELLALIADVIALADKVTWAVDVPDGGAALLIGLLIARDQELLYISGLAVNRAADGYRGEGKTDARDAAVIADQARIRRDLVPLRPGDEITTELKILTARRADLVADRTRAVNRLRGLLTEIFPALERALPDLTQAGPLILLTGYQTPAAIRAAGPAGLQAHLAGRKVRNPGKLAALAAGAAARQHTALPAEQLTASLIATLAGEVMALNEQIKQAGKLIEDRFHRHQLAAVIESLPGIGVLLGAEFLAATGGDMAFFATPSRLAGFAGLAPAPRDSGRIHGNLHRPRYYHRGLNRVFYYSAMISLAHCPESRRFYHRKRAEGKRHTQAVLALARRRVDVLWAMLRDNRPYQATPPPAAA

SEQ ID NO: 481315 - protein, 456 aa, unidentified
MSKKQMSLEVVNPNAAGVDVGSRSHWVAIGQDAQDVREFGVYSEDHQVLCEWLTENHIETIAMESTGTYWQNLFSSLVVAGFDVILVNGKQTKNVKGKKTDIKDCQWIQKLHCLGLLSNSFLPDSTTDIIRTYSRHRQNLVRQSARTVLKVQKYLRLMNMRLDVVVKDIVGLTGTKIISDFIAGEHSGKELAKNRHYNCRKPEEEIAKALQYNGRDDYMFALKHEWGTYLHVQQQIEEVDAEIKKLLEDIIDKDDNKKQHVAGKKTYKRKNKNTIRGTDMNQIAYQYFEGIDLMAIEGVNDATIMAIISEIGLAGIKKFESAKQFTAWLRLAPNNKISGGKVLSHHLPKGSSRLKIAFRNAANAIGNLKEGHLADFFRKINYKKGRATAVSATARKLAVIIWNMLVKGQSYNPPSQYLFLDEKRRLGLVKRIKKQITKFEILPEQLGFTNDCLSMT

SEQ ID NO: 481316 - protein, 421 aa, unidentified
MRFIGMDVHRDFCEIAIAEEGGRVRSAGPIASTLDALGLFAQSLAFDDVVALEATSGAGLIAEIIEPHVVAVVVANTRKLPQISRAKAKTDRLDARTLARLAASGFLETVWAPDEPTRALRRLCARRESLVRARTRAKNEAHAVPARNLCGRPPVTDAFGKKGRAWLASLQLPVDERLTLDGCLRQIDFLDAELRALEAALAEQALRSPQILRLMTVPGVNVHTAAAFIASIGDIRRFPTARRLVGYLGLDPRVRQSGNSDPRHGHISKAGSSLVRHMLGEAAWSVAQTPGPLRAFFERVRARKGPQVAATATARKLACLFWCLLTREQDYAFERPSMTRSKIRQLELAAGAPPRKGVRGIAGNKSPAVRETERELARRAEAAYRRMISDWQATAPPKTGASATPGRASQRPSKGKAARQA

SEQ ID NO: 481317 - protein, 359 aa, unidentified
MDNNEDGTRHVVGGVDTHKDLHVAAVVDGQDRVLGTACFATTRQGYRQMLVWMRSFGDLRRIGIESTGSYGAGLLRFMQQAGIDVLEVTAPDKHDRRRRGKNDDLDAQNAAHAALAGRRTVTPRSRDGMVESLRVLTVCRKTAVAARRVAIQIIQTTIVSAPDGLRDTLRSMTRMQLVRTLAAWRPDLTAYREVEAAYRISLKSLARRYLELHDEIADLDAMISAIVDDLAPELIARNSIGYTGAAQLLLTAGDNPERLRSEASFAALCGVSPVPASSGKTIRHRLNRGGDRAANSALHIIAIGRIRTDSATKAYVARRTSGGHSKLDAIRALKRSIAREVFHIITRRHREINQTRIAA

SEQ ID NO: 481318 - protein, 325 aa, unidentified
MELSAIGIDVSKDTLDVSIFTGGKPLGKQFPNTEAGYAALISWLKHRKLGQVHACMEATGRYSLGVALALHAAGHVVSIVNPAQIHDFARTKLGRNKSDTVDAGQIREYGAMFRPAPWQPPTPALRLLCDLQTMRAGFVASKVEWENRAGSVGGDAAANALAATTIAHFTAQIAAVDQAIARTIDGDDDLRKKRDLLLSIDGVGQTLAALILAELPGPDVISSSTQAVAYAGLNPKQFQSGSSINRPTRISKIGNATLRAGLFMPAMAAMRHNKAVAALADRLRAQGRLKPKQILVAAMRKLLVICFGVLKTGKPFDAEMAMPKA

SEQ ID NO: 481319 - protein, 340 aa, unidentified
MKHIGMDVHSTTTDACVRNARGVIVLQRRIRTTQNELVDFVASIQGQKRVVVEEDQMADWVTRLLQPHVDEIIRCQPQYNKLISGSEDKCDKMDAKALSELLYLNRVKPVHHPEMKYRVLREAVRAYWVASRDLTRAKNRLKGWYLFNGLYENGRSIYSERNRGKRLKAMQQEGRNTELAELLYEHMEACRQLKAKHIQMVRKAARPVKDLVQLVLTMPAIGPISGYTLVSLLEDGWRIPNKRKLWRYAGLSLRRYESRDFGFKGSSKTGNRLLKRVAMSAAITIVARGESNALLALWEKDIRQNVNPKRARRNLARKIVVIAQHLLRSKQEYMDERIKA

SEQ ID NO: 481320 - protein, 335 aa, unidentified
MQVYGIDLSKEKFDVSFIDAKGKEKNREVKNAVVSISRFLSSVSEDSILCAEHTGVYGDILVYLCNQMNISIALVPGYTIKHSLGLLKGKSDPLDSMRIREYGERFSDKLEYAEYAEENIAEIKQLYTLRNQLVKQRRALRTVDTGRGHLPMQSISVHNHIHAVFSSLDNEITSIEDEIEALIKANQDLNENYELAKSVFGIGPVIATDLLIKTGNFKTIDTHRKAASYAGVCPFPNTSGKMVGKSKTSPHADKKLKSLLYMGAKAVVKNNKEFRLYYQKKQLEGKPHYVIMNNVSNKLLRIVFSVVRNKTPYTSDHVCLDPREKNNNSSTKKVA

SEQ ID NO: 481321 - protein, 408 aa, unidentified
MSIVFGIDVSSRDSSVCVLQSGVTREYKITNDTIGFKTLLIDLKEYAEHPQIILEATGIYSRRITRFLDEYDYDYVLLNPLKAKKEINQGLRRNKTDRNDAYHLALAQDQNQHQPNRKEPDVYHQLQSLSRAYEELTHDIISSKNRLHKYLQLTFPELETIFNNSRGVNYWYLVELFPHCQDVRNLDVSTIAKQIKDFKGYGINRAQKLAIKLKHLADLAYPAVDQDDPERDEVVYYANRLLRLTADRERRSEAMIKLAKTLPNRDLEILMSIPGIAEITAVRILAELGDIRRFSNPNKINAFVGIDPGRYQSGEKDSSLRISKHGNAVARKILYRAIGQIDLAAKTSPCHIADYYERKKQFSQTKGFKKIAIASIHKLLRTIYILIITDQMYDYNVANNNQKDFCRN

SEQ ID NO: 481322 - protein, 356 aa, unidentified
MAMLAESVDGVIGVDTHRDTLTAAAVNNLGGVLAQTTTSADAAGYQRLLDFACVQVAGRRLWAVEGTGSFGAGLAVFLQQRGERVVEVARPKRPASRTGAKSDALDAVRAARQALGQDHLATPRRRGEREALRVLLTTRRCATLARVAAIGQLKALIVGAPEELRAELRGRSTAQQIQHCASLRRRPARSLEYQATMRALRATTQRIQALQTEADQLQAELAILVGAVAPWLLEVPGVGPLSAAQVLVSWSHAGRFRSEAAFAALAGTNPIPASSGQVVRHRLNRGGDRQLNRALHTILLVRLRTDPDTRAYMARRTAEGKSRRDAKRCLRRVIARQLFRLLERYDQPGVEILRAA

SEQ ID NO: 481323 - protein, 350 aa, unidentified
MSQTPKTVGFDIGKNSFHVVGHDERGAIVLRQKWSRGQLEARFANMPPCLVGTEACVGAHHLSRTLKALGHDARLMPAKYVRPYSKGQKNDFRDAEAIAEAVQRPTMKFVATKTADQLDLQALHRVRERLVSQRTGIINQIRAFLLERGIAVRQGQRFLWTELPRILSTPPEVLSPRMVRMIEGLTGDWRRLDERIDGLSSEIEAIARRDVGCERLMSVPGIGPIISSAMVAAIGTGDAFSKGRDFAAWLGLVPKQMSTGDRTILGKISKRGNRYLRVLFVQAAWVVLIKPKIWERHGLKPWIEAAKKRLHPNVLAIALANKLSRIAWSVLAHGRGFETSPITNATAQTT

SEQ ID NO: 481324 - protein, 367 aa, unidentified
MEKSSKVFVGMDVHKESIDITLAEEGGEVRRLGQIGGDRGSLLKMVRKQQSKGGERVFVYEAGPCGFWIYREITALGLACMVVSPALVPRRAGDHVKTDRRDSERLASLARAGELEAIHVPDIRDEAIRDLVRGRDDAVIAQRRVRQQLKALLLRNDIRYVGKTSWTGAHRRWLSELKLPQPAQQIVFEEYVDAIAVATGRIERLTGAIATEVLTWRFAPVVGALQAMRGIQFVHAVTLVAELGDLTRFGSARQLMGYLGLVPREDSSGEHRYQGSITKAGNSYARRALIEAAWAYRHPARVTRVIATRQTGLPKAACDIAWRAQLRLSARYRRLNARHLNHNKIVVALARELSGFVWAIGQSVKPQ

SEQ ID NO: 481325 - protein, 335 aa, unidentified
MKEITTVGVDLAKSVFTVHGVDALGRVVLRKTVRREQLVELIAGLPPCLIGMEACGGAHEWGRKFQIYGHRVGIMMARFVAPYRKSSKNDSNDAEAICEAVTRPNMRFVPVKSAEQQAILSLHRVRQGFIEERTATINRIRGLLAEFGVVLPQRAEQVRRAAVVMAEGLPVLAREAIADLRAHLTYLDERITHYERQLVSLARQREAAVRIQRLPGVGPLTASAITASISDGHEFANGRQFAAWLGLVPRQYSTGGKARLGRITKRGDPYLRTLLMLGARAVLQSAGPKTDRLSRWALALRARRGYHRAIIAVAAKNARIIWSLLANNREFVLPV

SEQ ID NO: 481326 - protein, 343 aa, unidentified
MYYIGLDVHKKTISFCVKDAAGCVHREGKIGSSRRELDAWIRTLPQPRMMAMEATIFTGWIYDYLLPHAEKVKVAHPLMLRAIAAAKKKNDKIDASKIADCLRCDFLPECHMAPTEIRDRRRVLRYRNLVVKQMAQMKNRVSGLLMETGVSYNKQKLHKVGYFGELMSTNVDVSDAVRPLLNLSRGMIRRSGKLEYDLVSSLERDPLLKERLRRLRTVPGVGSITALTWALEIGDYTRFSSNKQAISYCGLCADEKSSADKVMRMPLSKQRNKHIQRVLVEAAKLAPRESPELAMIRARELERGNPNRATLAVARKMVCYMLAVERRQQDFVRVEELIPTSAA

SEQ ID NO: 481327 - protein, 350 aa, unidentified
MWYSGIDQHKAYCVITTYGPEGPRVKQARVASTPLALQQYFAESPGPQQAVVESTGAWYWLADTLAGVGVALVLAHATRGKAIAAAKVKTDKVDSNTLALLLRADLIPAAHMIGPAQRAPRDLMRTRLRLVAKSVSAQNSIDRLLEKFNARDVGELDELYQLQARCHAAQIQLLENQIRTLERALHPHLIPNADVQRLLWVPGLGKVSAFTIYTEIDGIARFPTARQFFSYCRLVPGADNSGGHTRHRSGSKAGNRYLKLAFSHAGIRAVQYYPEIRGFFKAKARKKPIRIARTLVALELARIVYHVLTKQEAFNGRFKDRPLSRHKQAQWPRRASPPVLTETPQGGSRA

SEQ ID NO: 481328 - protein, 514 aa, unidentified
MKSIYQNQCAELRQLFAQVSPDRILAVAIDFALDQHVVLFCNGQGEQVLKPFPVHNNTAGFLFLKERILTTCRRLQIDPSHVVLAGEDDPPYALNFLWALNQEWLVLRVNARIAKEHRENLKASTDLLDLLGIAKALLSRQAHRVFPLNLEANDALQSLKTLERDRDAIVKDATRLKNRIHSHVKILFPGFLEAHKDNPVKAFGKPSLALMAKDDFCATTYARKKAAPLARCLKSLRLRLSQEKAVELIKRASEVLAPPPHRIESEQLALGSLLVAYQALEEAAYQLELQQSRILATHSAAMLTTLPGVGIITVSAMAGELGQPEELGSRAQMASYAGIVPQVEQSGGPNSPAQTKPTGHRCNHRLKNHLVRAAMNIGTLFGPTEIRQDYRALRDQGRHANFIHARRLLGQFKALTSSGSCWLPPSLREGVVDQGEAAKARYRNELHEYFSYLWPKLVAKWAVFKLEGIFEDPQSPLGQWRDMIQNIYRISLPMDGPPILKDEEESDVSVGTSN

SEQ ID NO: 481329 - protein, 343 aa, unidentified
MDHFAGLDVSVKETSVCILDDAGKIVKEVKVASEPQALLKVLGNPIYSFKRIGLEAGPLSQWLFSALAEAELPVICVETRHMQAVLKAQINKTDRNDARGIAQMMRVGMYRPVHVKTLRSQKLRMLLTHRKLLQSKAIAIENDLRGTLRNFGLKVGVVGTVRFEARIQELVETIPDLAVLVGPLLVVRRALREQIVVLHRRLLAIVRDDEVCRRLMTTPGVGPVVALTYRATVDVPARFRKSKSVGAVFGLTCSRYQSGEIDWSGRISRCGDEMMRVMLYEAAQSMLRSKKWSWLKAWAMQIARRRGMKKAIVALARRLAVILHRIWVDGTEFRWTREDVPAA

SEQ ID NO: 481330 - protein, 426 aa, unidentified
MTARALYVRGNKMAEAETIWWFAGVDWGSEKHQVCLLDARGATVGEREFPHSGEGLAELGDWLLSMASAASTVAVAIEVPHGPVVDALIDRGFVVYAINPKQLDRLRDRFSVAGAKDDRRDAYVQADSLRTDRRLFRRLQVPDPRLIELRAWSRLTEELRTERVRLSNRVRHQLWRYYPQMQKLTNDLAAPWFLELWAIASTPAKAGRLRNSTVERLLKQHRIRRMDAETVLRILREPAIKVAEGVAEAASIHMRSLVARLRIVNRELREAERKLDELCTAVSEIEEASGESLQRRDVAILRSMPGIGRINLGTLLSEASGPISRRDYQGLRTLSGAAPVTKRSGKSLIVVRRYAAHVRLRDTVYHWARVATQRDPKCRARYTALRKRGHSHGRALRGVADRLLALACILLQRQTLFDPYFGRPTA

SEQ ID NO: 481331 - protein, 434 aa, unidentified
MRKSAQSSQPDPADSSAASTPKNTIQVGIDWADKEHAFSALLPSGKIKTGSFKQSKTGIEEWIAELSKLAPDCNIDVCIETSSGALINALMEYSQVRIFPVNPFALANYRKAFAPGGGKNDPVDARLIMQFLQHYRDQLRQLVPNSPETRELTALTQDRRQLVEQRVALANRMMSYLKAYFPAILELKPARTYSEFVVRLVHAYPTLEEAQKAGKVKLRKILFGTGAKAKMESRLETIMQAKPITTDPVILRTNARRSRSLAAQIDVLNDSIKSYDAEIKELVKKHSDYEIVKNLPGASDKTHARIIAALGDDRTRYANAESLQAAAGIAPITTQSGNSRFVSARWSSSKFIKQTFHEYAGLSIAKCEWAKAYYEEQLAKGKSAQMAKRALAFKWIRIIYRLWQSRIGYDDSHYVSRLNKTGSPLAKKLQSAAT

SEQ ID NO: 481332 - protein, 351 aa, unidentified
MYYAGLDLHKKYFTLCILTSEGQVVADHRRLPAALEPLVTILRELDGPVTVTIEATLQWAWLHDRLAEVGIPVVVAHPQQVKLISQARCKTDPIDARKLAELTRVNLLPAIWVPTPEIRAWRQLLRGRAALVRWRTRAKNRIHGALAAENLRVAATDLFGAAGLAWLATAPVTPATRREITVQLAMIAALNEQIAGYDGAVKRLAKQPEAQRLMTIPGIGPFGAALLVAEIGTITRFHSAAELAAYAGLVPSTRSSGDKTSHGGVGVANNHWLKWILIEAVQTLKQRPGPVQFHYERLLRAKGKPKATVAAARKLGLYIYWMWHDGLDYPTWLQAEAKRVGCSMQTLASPA

SEQ ID NO: 481333 - protein, 416 aa, unidentified
MNAAGIDVSSRKSTVAILRPFGEVVKLPFEVCHSAEDLSALAQQLKSIEGETRVVMEHTGRYYESIAKVLHEAGLYVSVVNPLLIKEYGANSLRRVKTDKADAMKIARYALDNWADLRDYTPMDTIRYNLKTLNRQFQLASKQRTASSNNLIALLEQSFPGVRKCFDSPVRSDGTQKWVDFAHAFWHVDCVRKQSLNAFSERYRKWCKRHGYFFKQANAEEVYTLAKNAVVLAPKSDVTKVLIQEAANQLTSISRSVETYRTEMERLASMLPEYPVVMQMYGVGKSFGPQLMAEIGDVRRFERKQALVAFAGIDPMPNQSGEKNIRSNKSSKRGSPYLRKTLFNIMSIYLKCAPQEEPIFQFLDRKRTEGKPYYVYMTAAGNKFLRRYYAQVRDYLATLENLPPVDMDSTGLQHTT

SEQ ID NO: 481334 - protein, 393 aa, unidentified
MRFVGIDVASETHTVAAVRGDGEAVLKPSSFAEDAEGYERLFEKLGSSEDTLVAMEATGHYWKNLFAALVSRGFAVALLNPLRTRRFAEEDLERTKTDAIDALGIARFAAQKRPAVTRLPDAATEELRELVRLRDRIVQEIGDRVRQLHRLVDLGFPEFTRYVRTLDSSLATALLHEYPTARAFERVGPTRVSKLVYDGQHRVGKELASQLVEAARRSVGAHHGPAYQVQVRYLCEDLDVLRQRLRDVDGDLEQHLDAHEVGTLLTTIDGIGPLTAARLVAELGDPTTFESPAALAAYVGVIPALRQSGKRTSQRAGLTPHGHIRLRHALWMPTLTAVRRNPWLRAHYQRLRGNGKPTKVALVACMRKLLIAVYAVARDRKPFVPHLPAQAKT

SEQ ID NO: 481335 - protein, 354 aa, unidentified
MVFDNKYQPKEALQMKFIGMDAHSKTCFFVVMNKSGKVIRRQRVNTSESNILDFVRSVKGPKSLVFEEGVMSHWLYLLLKDEVDNLMVCQPREHDGPKTDEIDATENADLYRVGRLKAVYHADNEYMNLRVLVSGYDDLLGVITREKNRYKALYRHVAIPTEGAKFYKDQELLTKLPTDTQNYVACTLFEQIDLLEKQRRGYEERFAANVKRFKEMKLLTSIPGIGPIRANQLVAIMVTPHRFEDKYHLYAYAKLTKHPRESDGKKYGMKRANGRPMLKSIFKSAVLGAMKSDTSFRRKYESMKADGADEYAAKGAVSRMIAGTVLAIWKSGKKYNDKYKEVAQRRNQKKTKGS

SEQ ID NO: 481336 - protein, 408 aa, unidentified
MERYYLGVDWADEFHQVWVSDPEGNKVIEKKVVENVEGLTEFGRWLDENRAKGIELWAAIEKPHGRIVDFLLDHGVVVYPVNPKALDRARDRFRMSQSKSDSFDAYVLAEFVRTDHGHLRALEPNSDPAQELKLLTRDQYRLVRQKTRLLNQLSRTLKEYYVRPLEIFSDLETNIALDFLQEYPTPQVLAKLTRRQWNRFSKREHHLGEDHCKELWEKLNQPQLEVPEHVVRAKARLLAVLVVQLKTLRDAVDSYNERVKSFFACMPAAELVRMLPGAKTGTIVATLWAELGDAKSRWESFRHLQAEAGVVPVTKASGKSRVVQFRFSCNKIMRHAAYWLAFVSLNRSEWANQYYRDQRAKGHSHHQALRALGAKWLKIIFVMWRDHKPYDENIHLANITRQKMRQAA

SEQ ID NO: 481337 - protein, 329 aa, unidentified
MKAIKATSKFYCGIDVSGDTLDVCYQAPGGNLEWYKCTNNAEGFKQIWQHTGKLYHFVMESTGVYQLPFCFFLESKKARYSVVNALQIKRYIQMKLERNKTDKKDAFHICMYGVDHNPEYYEMPSHLYFECRAINNAIETITTEITSFKNKLHALSKLDIDSKVIVTGYKKILRELQAELKKFEVELYKKLEAWQPALVKQVRSVVGIGKRATAILIVATQGFKHTETYQQLISYAGLSPREYSSGSNIRGKVRICKQGGSLMRHTLYMCALNAKETNGACKELFDRLVAKGKNKKLAIIAVANKLLKQVFGVVKNKCLFDRNYYKKIA

SEQ ID NO: 481338 - protein, 316 aa, unidentified
MAHQLCIGIDVSKDHFDVASEPSSYTSSFDNDVAGIRQLVGQLRLVKPHLIVLEATGPYHRPLVAALKAAGLPVRVMNPRIIRRFAQAQNLLAKTDRIDAAMLALYAARMRPLVRELPAALDEELQMLVGRRRDLVEMITAEKNRREAASPWLTSRLNKHIRDLQREVEMIEARILKILQSDARRWQDYELLLTVLGVGMVTAFTLVALLPELGRLSRQEIAALVGVAPFNCDSGRHQGARRCWGGRAPVRDTLYMATLTARTHNCVIRAFFERLHDQYRKPFKVALIACERKLLCILNAMLRDRTPWRPELAAAA

SEQ ID NO: 481339 - protein, 410 aa, unidentified
MLKIVYPICCGIDVHKKFVVACIASTGDRGVTTYRSSRFSTFTSGLRKLSGWLCSNTCTDVCMESTGKYWIPVYNILEDTCQITLAHPKYVRAIRGKKTDKKDARWIADLFKHDLVAASFMPPLRIRQLRDLMRYRFKLTGFGSSEKNRMQNCLTVSNIQLSNVVSDTFGKSSMKIIDYLLENPSDKDFDFVPLLHGSMTGKTDDIRLAIDGMITVEQRQKMNIILNHFSGVQKCKADLESLILSLSEPYTRQCSLVSTVPGIKNPFSVIAIISEIGADMSVFTTAKHLCSWAGLTPQNDESAGKKHSVRISRAGVYIKPLLVQCSNAVVRSDKHPEIRGRYLSIRKRRGHKRAIIAIARMLLTAIYHILSKDEPYNPELYKKVDLLPKTRSITVDQAILLAKRHGYSVA

SEQ ID NO: 481340 - protein, 309 aa, unidentified
MKQSVVYIGVDVAKEYLDVAWQRQSRRFGNNQSGHAALVAWIKQSPTVVQLICEASGGYERGLLESLERNAVKVTLVQANRVRQYARAAGILAKTDKVDARVLAAFGAAMQPKPTVPASAEQKRLREYDAQRRHLSRILWAEQNRLAQLGCAELRSLSRSLISKIKKQIATLDAGISGLIAQDQELRLKAQKLTSVTGVGARTVALVLAQIPELGQLNRRQTAALGGLAPFNRDSGTLRGKRAIFGGRRALRSGLYMAALSAARRNHILSPFYQRLRAKGKPHKLALTAVMRKLLIVLNHTLKPITSPA

SEQ ID NO: 481341 - protein, 341 aa, unidentified
MSDYSYFCGIDLAKNHFNLHAIDQNGKVILHKSVTRSKLLTTIANMPLMRIGVEACGGAHYWARTLNKLGHDARIMAVKYVVPYRTKGKNDLNDAVAICEAVQRPSTRFVPIKSPEQQAILSVHRIREHWVRERTALMNRIRALLSEFGLIIPVGRSSLMKLVPLMLEDAENELPHLARTVIADAYHHLGELNQRIADTEQVFDSFAKVSANVQRVMKVRGIGPQTATAILASIGNGSQFDKSRDFSAWLGLVPKQYSTGGKPRLGRITKHGDKYLRTLLVHGARTVIANLGDKQDKLSQWCRGVLERRGMNRAIVALAAKNARIIWSLLHNQTEYENYAA

SEQ ID NO: 481342 - protein, 370 aa, unidentified
MGKSVLYVGLDVHKMSIDVAIAEAGPGAEVRFYGQIGGDLDSLDRVIRKLRATGAQLQFAYEAGPCGYVVYRHLTAQGWSCLVAAPSLIPRRPGDRIKCDRRDALSLARLFRAGELTSVKVPDADDEAMRDLTRAREDAVSVERRAKQRTGALLLRHGRRYPGKTTWGRGHWRWLLQQVMDHPAQQIVLQEYLDAVREASARVQRLTGQIQELLPQWRRAPFVAAYQALRGVSLIVAATVVAELGDLSRFKNPKELMAYLGLVPSEHSSGASVRRGRITKTGNGHARRVLVEAAWAYRLRARVTRPLLQRQEGLPKNIRQISWQAQVRLCARYRRFLARGKHKNTIVTAIARELAAYIWAIGQAVEPLTA

SEQ ID NO: 481343 - protein, 335 aa, unidentified
MSKTISPAIVLLATFAGIDVGAKELVLVLRKNGLSMKAQKFANTPTGHQQLVKALKGARVCMEATGVYYVDLAVSLHDAGIALSVINPRAAHNFAKALMRNSKTDAVDADALAQFAERMDFVPWTRPSAEALALRAFARRIEALTRDRAASKNQLHALCACQDTPKAVLRDVKLAIAQLQKRIERLAAEARSLIKQHPPLEQSFQLLVSIKGVAQTSAIALLGELSVLPQGLTHKQWVKYAGLDPRVFQSGTSVEKKPRLSKAGNRHVRQALYMPALSAKQHDPHVRAYFEHLLARGKKPLQALCAVMRKLLHAIHGMLKHQQPFDNTRFYAMQK

SEQ ID NO: 481344 - protein, 312 aa, unidentified
MSHPATPSRFIGCDVGKTAIVVFDAASGRTSALANTPEVLSRFAASLEATCFVVCEATGGYERDLLAALIAAGVPACRADARKVKAFIRSFGTLGKSDAIDAAALARYGRDRFAELPLWSAREPERDRLQALVLARRDLVKDRLAYANRRAAPAAAPVHPYLEALVESFDAQIKAIEADINALCAACEPIAKAVNVLIAIPGVGQKTAAALMPELGSLPRRQAAALAGLAPHPNQSGQTDAYRRTRGGRPEVKRVLFMAAISAAKHHPTLSAFYKRLLNAGKKPLVAITAIMRKLVVIANAKLRTANALQLS

SEQ ID NO: 481345 - protein, 394 aa, unidentified
MRYTSFLSAPTTSRSGLLFIGMDVHKDAHAAVGATAFGEKLFEINIENNRNDFDRLIEQSKSVAVSRGLGLVFGLEDSTAYGHRLAKHLFANNLMVKTVPPIYVDRERKYETHPEKNDLLDAYAAAKVLIQRIDTLPTYRITEQNELGKEIKDLTLDREFLVKEQSRIKNHLHRLLHKAYNSEYRKKFKDPFGVKSLKYWLTHPLPAGQKEKGDILGTPSILKNQIKRKVRRLMDIREEMKEIKIELESLIDLTGQKITTLNGCGVTLGSKLLAEIKDISKFSSPSALTKYAGLCPREKSSGKTFRHIKSKSGNRQLNTAIHRIALSQISRSGNATAKEYFQRKISEGKTKAQALCCLKRRLVDIIYMMLKHKEPYKKELHIVSQKSAIIHTEI

SEQ ID NO: 481346 - protein, 373 aa, unidentified
MEHSSEAFVGIDTSKLRHAVAIADSNRTGEVRFLGEIENTGAATAKLVRKLAAKYERLTFCYEAGPTGYGLHRQIKSLGHECVVVAPSLTPKRPGDRVKTNRRDAVSLARLLRANELTAVWVPDGGHEAMRDLTRARETAMLDLRSKRQQVSALLLRQGRSYPENKQTWSKAHMSWLASQKFDYPEHRLVFEEMMLAVRQARERLERLEQAMRAAVPDWSLAEVVTGLMAMRGLDLISAATLLAEIGDLSRFRTPQQLMAYLGLVPSEASTGNTIKRGPITKTGNRRARRMLVECSWSYQHPPRVGSTKQHKVDAAPPAVREIAWKAQCRLYRRYRALIRKGKLKTVAITAIARELAGFIWAVGREISPAAAK

SEQ ID NO: 481347 - protein, 405 aa, unidentified
MWFCRDDGKVNGYMGQLIIGVDPHKRSATIEIINEREQVLARGRYGTDTGGYQQMLAAGRRHAGRVWAVEGCNGIGRHLAQRLVADGETVLDVPAKLAAKARNFDTGHGRKTDGHDAHHIAVTALRTPGLRRVHADGATVALRLLADRRDQLGATRTETINRLHQLLLELIPGGAKKNLTTDQARTLLERVSVPAGDIVTATRYQLAGDLADELTTLDTKIKAANRQLKTVLAATGTQLTSLNGIGPSGAARLLGDIGDISRFPTRGHFATWNGTAPIDVSSGDNHHHRLNRAGNRRINRVLHIMAITQLRFDTPGRAYYQRKRAEGKTAMEAMRALKRRLSDTVYRQMIKDDHTAQQTATGPGGHTGATLNSSAADPNPKIDTSEKSQPGPANHHPKTPLTPTP

SEQ ID NO: 481348 - protein, 361 aa, unidentified
MSTQNTACPKIYIGLDIHKKTWTVSIQSDLFFHKTYSMPSKSSDLYDYVEKNFPNHEINLVYEAGCCGFSVARYFLNLGWHVLVVNPADVKTGDKQKYQKTDSLDARNLSNQLKDGTLIGIHIPTEAEDQFTSLARHRTQVTKKLRQTKSHIKSLLLFHGIETPEEYDNSNWANGFIEWLEKLKFSTVCGDLALQGKIRMFKFIKKEYLEIANQMRAYCRKEHKTDYYLLKSIPGIGGYLAAVVIAECGDLRRFNTEGQFASFVGIVPGMYNSGGGEKCLGITPRSRSQLRSYLIEAAWIAIRKDAEMQAYYRKHQGKNVKTIIVKVAHKMARRILSVIKKQTPYQVNVNLVLEKNEKKSA

SEQ ID NO: 481349 - protein, 339 aa, unidentified
MEEITTIGLDLAKSVFQVHGVNAAGGVVLRRKLRRSALLEFFAALPPTLVGMEACGGAHHWARELTCLGHTVRLMPPAYVKPYVKRGKTDAVDAEAICEAVTRPTMRFVPAKTEAQQASLVELKVRDMLVRQRTQTVNALRSHLAEYGIVAAQGRKLAELIAVVRDGDDARLPHLAREALGELVAQIEALEGRIERLDSRMVRHAREDETARRLASIPGIGAIGATALAAMVPNPHGFASGRHFAASLGLTPQPHSSGGKERLGRISRQGNSMLRRLLVLGATSRLRYARRNPEAADWATRLLARRPFKVAAVALASKMARIAWALLARGGTYTTAAAA

SEQ ID NO: 481350 - protein, 478 aa, unidentified
MVGQAVVHLGCEPVNDYMAAPATHLVGLRARIRICRCPPRLPVQSSTVLEGSVMRFFGIDVHLEFCEVAVAERGKVSQVGRIASTPEAIREFARGLGGEDQVVLDASGSVMAIARILRESNVGRVIVSNAAQTRAISHARVKSDRFDAAMLARLLSAGMLSEVWVPDEATLALRRRVARRSALVRARTRIKNEVHAVVMRCLLGRPPVSDLFGRKGRVWLAEQQLPEEEAETVAGCLRQIDFLDGEIALLDQKIAEQALSWPGLCRLLTIPGVDIGTAAAVIAAVGDISRFQTPGQLVAYLGLDPKVRQSGSEPARYGHISKRGNAQARSMLVEAAWIAIRSPGPLRAFGERVRARRGAQVAAVAVARKLVVLCWHLLSKDEDYAFARPSLTRQKTRRLELTAGASRRPRRHDGATVSPTAAQRAAERELQTQAELAYRRLVDDWRSTASPKGGAGATPGRASQKPVKGKAARQATSP

SEQ ID NO: 481351 - protein, 342 aa, unidentified
MKATTIGIDLAKHLFQLHGVDQHGKTVLKRQLKRGQMLSFFTNLPPSLIGMEACDSAHYWANKLQGMGHTVKLMAPQFVKPYVKTNKNDAADAEAICEAVTRPNMRFVPIKNGEQLAVLALHRARQGFVKARTAQANQIRGLLAEHGIIVPKGIAHISLRLPELLEDAENNLPGTFRQLIERLGEHLKELAKQVNELEEQIWCWHKENSASQKLAKMPGIGPLTASALVASIGDAKQFENGRQLAAWLGLVPKQHSSGGKQTLLGISKRGDIYLRTLLIHGARSVLRVAERKTEYAGSWLAGVMERRNHNVTVVALANKNARIIWALLAHEREYDADHAVAV

SEQ ID NO: 481352 - protein, 458 aa, unidentified
MGRNKSRNKDRGTISVVHPNAAAIDVGATMHTAAVNADRAPEPVRSFGTFTTDLHRLIDWFAECGVDTVVMESTSVYWIPIFELLDARGFAVFLVNARDAKHVPGRKTDVSDAQWLQRLHSFGLLRASFRPKGQIAELRAYLRQRERLLEYGASHIQHMQKALTEMNVQLHHVVTDITGVTGLRIIRAILAGERDPAVLAGMRDRRCHATVETIEKALAGNYRVEHPFALEQALALYDTYQQKAFACDARIEAVLKGLSVHRGREEGQLPAARQNRSSQQNSLLFDVRAALFALLGKDLTQINGLGPYLALKLIAECGDDLSAWPSAKHFSSWLCLAPSNKISGGKVLSARTRRSGSRAAALLRLAARTVGRTDTALGAFYRRLAARIGKAKAVTATARKIAVLFYNAVQHGMNYVDPGASSYETRYRARLIANLHRRAKAFGFVLQPVDPPPGVAVS

SEQ ID NO: 481353 - protein, 371 aa, unidentified
MIHTNTFIGLDVHARSIKAVALDVITGEVRSASFLYDYIALAEWIRSLPQPTRCVYESGVTGFDLQKKLASSGIDCVVGAVSKMFKPAADRKRKNDRNDAEFLARMLSVGNITAVWIPDDECEAARDLIRALEDAREECIRSKQILSKFLLRHGLVFNETSPTGRRIGNWTLAHWRWIRSITLSNPAANDTFLYYIDRVKASTEEKKRLEALVREEAARPRWKKRVDTIRCLKGIDLMTAADLVFEADEFSRFKNARSFAAWIGLVPSEHSSGESIRQGGITKAGNRHLRKALVESAWHYLYASPGSKDLVKGQDPDRQARRHATKGTRRLIERRRALLERGLDKNKANVATARELACWVWAIGCMVEKGN

SEQ ID NO: 481354 - protein, 409 aa, unidentified
MSWLQREVPASALVVAIDPGKAFNRVWLATGDGPVGDPVSLAVLRDGVDELQRLIEASGVGGVPVIALEETGGLHRAWAAELERRWPGSLRLFAPSQTTAARGQLGTRRFKTDDRDCAALIWLARQGAGRPAEPQTVDAMLAAVRHRAQLVDARSRLQQHLHDHLNGLCPGLSAPAGHGRALKLEGPTGQAVLACAAAFAGRPPSKRSLQARALGRVTDTTAEFWTGRWKRLLTPPADAELRAARLRRGLDRWRDLQADIDAAERQLELLLAQTDGQVLTTLPGVAVIRAAAFCAHTLPVERWPTPEHLYSATGLAPATYQSSTINRRGSISRQGLAEHRNALMGIAWGLSQNSPAFRARDRELRARGFQPIQARVALARHACRLCWRLLHTQQPYDDQRYAAARRRGR

SEQ ID NO: 481355 - protein, 365 aa, unidentified
MEECIIKSVISGMDVHERTIKVCTAAHDGATEVKTFANTEEGRAALIRYLQSLAKKYGCGKIETAYEACMLGFELHDALSDAGIVNHVLAPSLMRKSRKDVKRKTDEADARMIFETLRGHLLAGNELPAVWIPPPELREDREVVRARLEVGNKVTQIKTQIQMLLKKHGVRKPAGLGDSWTMLHRKWLHGLLTCGGPALPPGGKVVLSSLLRQLAMLEKEIQTLDEAVEALSHKPRYQIACQALVKQIKGVGLLTAMVFLTEIGDLNRFGNRRKLGAFLGLAPTSNESGEVTDRKGHITRSGTSRVRWVLCQASWVRLQHDEAESAVFERIRKGAKKLTRVAQTACMRRLAILMWHTAKDAAAAA

SEQ ID NO: 481356 - protein, 342 aa, unidentified
MVQPVTVGLDIAKNVFHAFGADAQGAKVFSRKLRRGQVEAFFSKLQPCLIGIEACATAHHWARTFQTMGHKVRLMPPAYVKPYVKTQKNDEADAEAICEAVTRPNMRFADIKTVDQQRVLVLHRTRTILIKHRTRMGNTIRAHLAEFGITESLGREGLARLIDMIVTGKDGRITEIIRRAMMCLVDQYRLLQYQILDLDRQVMAWHRSSETSKRLATIPGIGPLAASALVASVGNASSFKNGRSFAAFIGLVPRQSSSGGKERLGKISKRGDHYLRWLLVVGSLAVIRYAQRHGTRRPWLVKLLQRRTAKIAAVALANKLARIAWVLMTRGGAYREPVPQAA

SEQ ID NO: 481357 - protein, 317 aa, unidentified
METEKAYVGIDVSKETLDMAVHASEQRWRFANTDNGITEALACLEELSPALVVLEATGGMEYPLAAALAVANIPVAVVNPRHVRDFARATGRLAKTDSIDAKVLAHFASAVHPTPRPLPDTQGQELKAILTRRRQLIEMLTAERNRLYSAHSKAVKAHIRAHIAWLEKEMIQINDDLGHSIRETPVWQEKDDLLKSVPGVGPVLSTTLLADLPELGALNRRRIAALVGVAPFNYDSGHLRGKRAIWGGRAVVRSALYMSTLVATRYNPVIRGFYQHLLAAGKPKKVALTACMRKLLTILNAMLKHQTPWYYPTSEMV

SEQ ID NO: 481358 - protein, 402 aa, unidentified
MIFINCLGIDVSKSESVVAHYKDEVLIKELVIQNNQNGYRHLENYIKHLDSLFILFESTGIYSRGMKRFCAVHKIDYLEMNPLEAKFKMSSLRSWKTDKSDAHKLALLAFRMKDSKVQRQSEEIYFELREHARFHLEMETNQNRLKVELVETLHQTFPGLEKLFTNRYSKIALNIAKTFPHPDYVSMLSDDELVEKVLHSTDKGISVNKAHKYVQKLIEIKNNSFPNVDKSSFLIKKVQYLCDKLLIAIEEKKVFDQEMIDLAKNTTEFENIISIPGIGEPTAALLIGELGDIRNFKTNKQLNAFVGIDIKRYQSGTSKSRDTINKRGNKKARRLLYLIIMNIIRGRNHYQSHIVDYYYKLREQPHGKPHKTAIIASINRLLKTIHYLIVNDKLYDYQKAPH

SEQ ID NO: 481359 - protein, 314 aa, unidentified
MAQIVTVAGIDVSKDWLDIAIWPDETLALHIERTAPDWADQLAAWLRAHQAGRIGLEASGGYEIEVMDALQARGFAVTRFNAYRVRRFAEANGRMAKNDRADAAVIAQATAVLRVKQAKQRPVTLDPLVELLTYRRRLSDWEMDCTNQLEHLQDKTLRRQTQRRKASLERERTAIDAKMAALIAACPDWRDLAARLRGVPGVGPVLATTLIALLPELGTVSRKAIAALVGVAPFDDKSGKRSGRRHISGGRGVLRHVLYMATLSAMRYNPVLAAFAKPLAGKPPKVIIVACMRKLLTILNAIVRDKTEWRVGAA

SEQ ID NO: 481360 - protein, 410 aa, unidentified
MGYETINRRAHVMTRKNTLKSLPTDTEFRVVGLDLAKSDVSVAAIPVDDNTPSLVDRMTYADLLDWAGKISPTLFAMEPCNGYSLLCLQLENLGHEIKVISGSTVSMWINTHLSGQKTDLNDAIALARLAVSDAELTPIRHKSITEIRIQTVQAVRQQLMSQRSKSIVSFKALAQQWGIPCAAGHRNLKKLRESIEAKVDLITRPVANAMLFLLDAVKSLDRQIGQLNQTLQELVMSDERGRLLQSVLGVGTQISARVITVVGNIERFNSPRSLVAYVGVAPRNFITGHKNLTKKKHGNCPDLSHKGQGKISRRGDKLLRSLFIQGAACLYMQFCKDQLPECQLKRWILKQLARQKTYGKLIVSLAAKLIRIVWAVLTYREKFNIQKAGMTRSMWSEMALETPLNKEVPA

SEQ ID NO: 481361 - protein, 323 aa, unidentified
MSNPVVLGIDIAKQKFDAALLIGGKLKHKSCKNSTEGFETLSQWLRKQRVDCLHACLEATGSYGDELALYLYDAGHTVSIVNPARIKGFAQSELLRTKNDKMDAGLIARFCLAMHPEPWEPPAPEIRALQALVRRADALISMRTQEMNRLGTAARAVEPSIREHIAYLDEQIEKIKQQIAEHIEGNPELKNKKALLSSIPGIGPATIAAILAEINIFKRCDEVRKVVAFIGLAPKEKVSGTSIKGKPRLCKIGHARLRKALYMPALVSIRYNPVIIDFYRRLKSKGKNGKVIVCAIMRKLVHIIFGILKSGKPFDPNYKPHFA

SEQ ID NO: 481362 - protein, 343 aa, unidentified
MDAIATIGLDLAKSVFQVHAVDVAGNVVTRRAIRRSQLLDLFERTPPCLVGMEACASAHYWTREIGKFGHQVRIMPASYVKAYVKRNKTDAADAEAICEAVTRPTMRFVPVKSDVEQSVNMMLKARDLLTRQRTQTVNALRSHLAELGIVAGAGFKASAKLIEIVRDDTDHRLPPIARFALIEIADQIERLTEKIMKLEKVIVSSVREDDVSRRLTSIPGVGPITAAAVRALVSDPAGFRTGRDFAAWVGLTPRSNSSGGKQKLGSISKRGNPQLRSLFMVGAMAILRMSKYGATMQPWVASLLKRRPFKVVAVAMANKTAGIIWALMTKGGCYEPTSAVSQA

SEQ ID NO: 481363 - protein, 482 aa, unidentified
MATGKLNRKQRKQLARQLQSADPGLEVMHPRAAGIDVGNASHYAAVRPDRDLEPVRRFECFTADLHRLADWLEACGVETVAMQSTGVYWIPLYEILEERGLQVYLVNARHTKNLPGRKSDVQESQWLLKLHTYGLLNNSFQPAAEIRVTRTYWRQRAEHVHGASTCIQRMQKVLTQMNVQLANVISDLSGLTGQTIVRAILAGERDPKKLAELSHRQIRASREEIAQSLEGNWRPELLFVLKQEVEMYDAYQQRIAECDRELEAHLKSFADKAKSKEAPAGPESNQQKGSDGQNRQRKPAPSAKRTQGNAPRFDLRGELCRVSGVDLTRIDGIHVMVAQTVISEVGLDMSRWNTEAHFASWLGLCPDNRISGDKILSKGTRHVVNRAATALRMAATTLLNSRSYLGAQYRRLRTKLGAPKAITAMAHKLARLVYRMLKYGQEYVDKGMQYYEDRYRTQQVELLKKKAAKLGLQIVEIQAAGL

SEQ ID NO: 481364 - protein, 391 aa, unidentified
MFIVGIDIGKRNHEATIIDQTGATVVKAFRFPNSFTGFNRLMETVKRTTDNDIVFGMEATGHYWLALYTHLRKQGFTIRVINAIQSDALRAMYIRQQKNDSRDSFIIADVIRFGRFCETSVAPPDLYALRELCRHRFYAVDSVSDIKRKVIALLDQIFPEYECLFTDTFGKTSLELLSEYTTPEEILNVDTDKLVETISITSRGRFGFDKAAEIQNAARNSFGILLATDTIALLIRQYIEQIRFAEKQIGVLDEEIARLLSAFETQLTSITGVGPTLAAVILSEIGDVKRFDSAAKLAAFAGVDPTMKQSGDFTGSRTRMSKRGSPYLRRALWLAATVASFKDPSISTFYQRKRSEGKSHMTALGHVARKMVNIIFAVLRDNSTYSPAIAN

SEQ ID NO: 481365 - protein, 342 aa, unidentified
MTYYVGLDVSQKITAICVVDADGARVWRGACASSPQQIDDAIRSNAGVDARIGLETGSMTPWLVHELRGRGLEVECLDARHARAALKMQLNKTDQNDAEGLAQIMRTGWYRTVHVKSFNTHRARALLGARSQLVGMTTRLSNQIRGILKTFGLLPGGLRGLRFDRRVETLIADREDIAPIIRPMLVVWRQLREQIAGFDKAVRSHVKQDATCRRLMTVPGIGPLSVLGFVSTVEDPDRFSSSRAVGAHLGLTPRQYQSGEMDRSGRISRCGDALARTLMYESAVVILTRVKRDSSLKEWALAIARRSGAGKARVALARKLAVILHSMWRSGEEFRWTASAAA

SEQ ID NO: 481366 - protein, 321 aa, unidentified
MTHLSQPAVYIGIDVSKDKLAVAIDAQTEVLTFSNDDAGAAQLIERIRPMSPALIVLEATGGYERAFLSAALDAQLPVARVQPSRVRHFALAQGLLAKSDCIDARLLAIYARCLQPAVSEKRSKKQAELDALLVLRRQLIDTRTAHTNQMKLADTSFARQTQAQLLRKINDQVKKVDKRIERLIDSDENLSGRCELLMSVPGIGKTTAATLAAQLPELGKADRQQICALVGLAPFDRDSGKWSGKRSIFGGRGAVRSVLYMAAVTAIRCNPVIIRFAQRLQKAGKQPKVVITACMRKLLTILNAIARDGQPWKPSCQLQTA

SEQ ID NO: 481367 - protein, 346 aa, unidentified
MNETTTIGLDIAKQVFQVHGVAVDGTVTVKRQLRRSEVIRFFDKLPRCRVGLEACGGAHFWARELTVLGHDVRLIPASYVKPYVKRGKTDAIDAEAICEAVSRPTMRFVPIKTVDCQASVMLLKTRYLLVKQRTQSINSLRGHLSELGIIAARGTGKVETLIAIIRDKTDERIPAVARRALEMLAEQVEALVRRIATLENEIVSEVRRDDTMRRLATIPGVGPITAATIVALVPDPGAFTSGRHFAAWIGLTPKMHSTGGKERLGRISKMGNPVLRSLLVVGATAVSRHARRGATVSPWLTGLLARRPAKVAAIALANKMARVIWALLTKGGVFTRRPATAAQHAA

SEQ ID NO: 481368 - protein, 308 aa, unidentified
MNYSTIGVDISKHFLDICMLPTGEICRYPNDKNGFEELLGLLNKHSFERILMEDTGCYHKAFYKFLIQYFDNVFIINPKRIRDFARSSGRLAKTDQLDAYIIAMYGERMNIISKITRSPAAEKLRAYVVRRRQLISLRKQEYNHIETCLDDDFKSSIYKIIKFIDDEIKQIEKAMKDLIKLDDRFKSIYDRLNQIKGVGDVLITTLMSDLPELGYLNKRQIASLAGLAPMNCDSGKMRGSRHIQGGRASVRHALYMAALSATKTNDVIKIYYTHLREQGKPGKVALTACMHKLLIYINSVFNKEFCSI

SEQ ID NO: 481369 - protein, 343 aa, unidentified
MTIDTMIGVDLAKNSFQLHAATRHGEVKFRRKLTRAQFLPFMAAQPPAVVVMEACGGAHHWARELAPFGHEVRLIAPVYVKPFVKRQKNDAADAEAIVEAAQRPEMRFVEPKSAEQQARALLFRTREQLVHQRTELVNALRSYLYEYGYVLPIGIASLKRIKLIVEDIDSDLPGLVRDIAGDLLQQIVEKTARIDALMKRIKTTAEDTETARRLQTMPGVGPVTALAIEAFAPPLETFRCGRDFAAWLGLVPRQNSTGGKQRLGRITKAGQADIRRLLIVGAMSRLTWLGRKSIREGSWLAQMLERKPKMLVAIALANKMARAIWAMLTRGEDYRDPVPGAAA

SEQ ID NO: 481370 - protein, 375 aa, unidentified
MSSAATIYLGLDVHKESVTIAVLPSGALAPTRVDKLPNDLAKLRRFCERQASQGPVRACYEASGAGYVIQRAMTAWGFPCDVIAPSLIPTKPGQQRKHDTGDAIQLARLYRAGELTIVRIPTEAEERVRDVVRCRETFQREILKSRHYILKFLARRGFVYREGTNWRQAHYEWLRQLARGDSPLAPDDRQVFSEYLGLLEYKLSRRDELDRRIGELALTPTLASAVATLQCFRGIQQQAAMVLATEISDWQRFGSPRQLMAYLGLVPREHSSGDRERRGSITKAGNTHCRHVLVQAAWAYRFQPKIGVALKARQRGQSPVVIAHAWKAQHRLHTFYQRLAFRRRPQIAVVAVARELVGFLWAVMRDVTPLATASA

SEQ ID NO: 481371 - protein, 387 aa, unidentified
MTPSCKLAPGTAALDYDSTLIGALELSSKKWVFAVQLPGSKKHTRQVVEPSGSALVEMIERLKARSLAAGRPILRMILTYEAGRDGFWLARFLQRRGVEVHVMQASSLPVDRRARRAKTDMIDVEMLLRTLLAWLRGEPRVCSMVPIPSEADEEARRAHREREDLTGSRRSLVNKIDGILATLGISGFRALRRDRREQLANLRQPDGAPVPPAAQERIERLLDRLELVLKQIKMVEAARDAVVKKSSAQDESERMIRDLVQLCGIGAESATLLVREAFCRDFANRRSLGAYAGLTGTPFASGGMQREQGISKDGNRRLRALVVELAWFWLRFQPDSALAKWFRARVIGAKGRVAKIMIVALARKLLIALWRFAKDGVIPEGATMKAA

SEQ ID NO: 481372 - protein, 424 aa, unidentified
MKVTYQTCCGVDVHKSFLVATIVKTTGGIEPSYQKKRFSTFNHSILEFKQWLLDNDCHDVCMESTGKYWVPVFNLLEDEINVVIANPKWVKAVKGNKDDTKDSKWIGDLFRLGLVKGSYIPCKIVRILREYTRYRYKLVSCRSSEKNRYQNALTVCNVALDSVVSDIFGKSSTSIIDYLLEQSGTSINHEEIASKLLRNLKSKEDAVIESVEGYQMTDAQKYRMRLVRAHMDYITAEINDVDKMIENMIFSNPDFENAVQFLCTIPGLKRDSAITIISEIGTDMSQFSSSKRLCCWAGLTPGSNESAGKKKSVRITRAGVYLKPALVQCAHAAVKSDKYPYYKKKYDSLVKRRGKKRAIIAIARMILTAIYQMLSTGEQWNPNDLYKIDMPVALVEKQKAKAIKQAKKLLQREGLLPPDEPLAS

SEQ ID NO: 481373 - protein, 338 aa, unidentified
MYYTGIDLHKKTSFLTTVDESGKMVTKKNLLNDEKTILDYFGSLEQQSRVVIESTASWYWLYDLLEANGFDVVISNPVKTKAIASAKIKNDRVDSHMLAQLLRADLIPTVYVSPLKLRKLKELIRHRQRLVNDATRMKNRIHALLRKNNKIVAVSDLFGVRGLQYLEQVHLPQYHRDQVQSYLSLYQELIKQIEPLTEAVNGAAKNDPIAKLLMSVPGIGAIVAMTIVAEVGDISRFRSYRNLASYAGLVPSLDASGGKQRMGSITKQGSRYLRTALVEAAHVIARMKKCRLNPFFRRRIVRGGYKKAIVATAHKLLKIVYYVWKNQTPYQETYPVCA

SEQ ID NO: 481374 - protein, 341 aa, unidentified
MSIVGAFDVHRRQLTFDYLDTVTGEVKRGRIVPADREQLSKWLARFAGQDDVHFALEGCTGWRYVVGELLAAGIEPHLAEPADTAALRGKKRHAKTDKTDSRHLRVHLLAGDLPECWIPPEQVLEARAVVRLYKDLLDERRVWHQRIAATLFHQGVPVTASMATAEGRAAAGQLQLSPAGRQAVDTALRQADRLTGELEPLRRQLDMFSRRQAGCRALRATQFGVGPVTSVAIWAELGDVCRFGNSDDVIRHTGLDITVYSSDGKRSAGHLSRQGPQLLRWALYEAAKCAARPAAPDYGYYTTARDRRTAGLATLSVARKLARRCYHTLRELGEEALAPAA

SEQ ID NO: 481375 - protein, 403 aa, unidentified
MVFVGIDWAEVHHDVCVVDEVGQVLATRRLPEGLEGVGRLHALVAEQAEDPATVVVGIETDRGLLVGSLVAAGYQVYAINPLASSRYRDRHTTSRAKSDAGDARVLADLVRTDRHKHRPLAGDSPLAEAVQILARAHQGLVWTRQRQVNQLRNALREFYPGALAAFEDLDAADAVAILERAPTPSRGRGLSLAKIISALRQGGRERNLEAKAAQIQVQLRLPQLEAPPLLAEAYGHSVAATVAVIKQLNLQIAALEQELTASFEMHPDAEIYLSLPGLGVVLGARAMAEFGDDRTRFLHPKARKSYAGTAPITKASGTRKVVLARVARNRRLADACYRWAFCALTCSEGARHRYDVLRARGQTHHQALRALANRLVGILHGCLTNRQAYTEDIAWPDHVEVAA

SEQ ID NO: 481376 - protein, 385 aa, unidentified
MTVCTVNHLPAATHGETARCLFAIELSKQSWVIGFITPLSAKINRRILSGGDWRGLLELIEEMRARVSRETGRAVDVLSCYEAGYDGFWLHRLLEAHGIRNYVIDPASLQTDRRARRVKTDRIDTERLLRSLMAYLRGEPKVWSVVRVPSVAEEDARRLHRERDRLVSERVQHVNRIKGLCALHGIYDYQPLRPQAMARLEQLRTAQGISLPPRLKSEIKRELQRLELVVEMIATLEAERDAIVEDEASTHVNAKKIQNLHQLKAIGPEFAAVLVGEIFHRDFNNRRQLASYVGYAPSPFQSGNVAHDQGISKAGNRKGRTTGIELAWLWLRYQPDSDLSVWFRARVGTTKGRIRRIAIVALARKLLVALWRYLETGLVPTFLGS

SEQ ID NO: 481377 - protein, 421 aa, unidentified
MPMTNQLNIVCGADIHQRFLVATILCRDGRTWANRFLMNLNGLIDFKSWLVSHGCQKVAVESTGRFWIPVHMILEGTIDVIVANAYKIKHIPKKKTDLKDSEWLAELCLNDMIEPSRIFPKEDRELRNLTRTREAYVRDLSKEKNRIHNVLESCSIKLASVISDIFGKSGMHILKGLLSGTSIDEVLKGIPDKRVREKKSEELRDALMGKLEATDIFLIRQSLQIMSQFEMRIEELDREIRSRIASRPMDIKILRSIPGIGMVSAYTILAEIGNYLDFKKPEKLAMWAGLVPSVYQSADKLITGGITKQGSKHLRWILVQVAHAIAHAKGGKLKKFFLKIRAKKGYLVAVVALARKVLCLIHHLLVNQEMYEEVGCLSKRDAPIPKNKNPAILTIEDMIQCIAQAGYEVKKVNFGGDGQCR

SEQ ID NO: 481378 - protein, 323 aa, unidentified
MQGQKSPERSAEPGVYVGVDVCKDWLDVYLHPIGQKFRAANTPEGLKALKRRIADLPVELIVMEATGKFHRQAHRTLHAAGLAVAVVNPLRARLFAEAVGQLAKTDRLDARVLALMGQTLEPSALAPAPEALEALQELARARAVAKADQTALSNRRGASQTAFLKAELGRRLKVLAAHIERLDAEIERRVGADAALKRRYDIVLTIPGVGPVAAVALVIGLPELGACSGKAAALLAGLAPLACDSGEKAGERHIRGGRAFVRTGLYLAALAAARCNPQLSDDYKRLRDAGKKAKVAIAAIMRKLVVLANVLIKEDRPWRPIHA

SEQ ID NO: 481379 - protein, 339 aa, unidentified
MNISTVGLDLAKNVFHVVCFNDRDKEVKKRMLRRNQVLGFFTQLSPCCVAMEACASAHYWGRQFSDMGHEVKLIAPRHVKPYVRGNKNDYNDARAIAEAANRPNMPLVGIKTAEEQDMQALHRIRSQCLRDRTALSNSTRGLLGEYGIVFAKGVPTLRKKIPDILEDAENGLSLDFRNLLARRYEQLVEMDEHIAFYTKRLESISQKDDACVRLQTAPGFGSIVSSAFRGAIGDGRAYARGRDAAASIGLVPRQYSSGGKKVLLGISKRGDKYLRKQLIHGARAVVLQAANKEDPLSLWINRIREERGWNKAVVAMANKMARIGWAILRHNTSYQPTSR

SEQ ID NO: 481380 - protein, 325 aa, unidentified
MEKVFIGIDISKLTLDIFVKGYCKTQHYQIENTSKAIKKFFKSFPNNANTVVGMENTGRYNFELYEVLSNMDLLVFVINPLHLKKSIGLLRGKNDKLDSQRICVFLEKNHMDLEPWISKSSDIQKISLLNTERRHRVKIRAGLSRQMKDLSFLKNHTDKETVKLNKQLILLLDKQIKTIEKKIVEIIESNIELRDQYERIQTVPGVGKVLATMFIVKTNGFTEIQSARKMACYSGVVPFDHRSGSSIYYKPRVSTMADKELKKILHLAALSSIRLKNDLALYFQRKVLEGKNKMSVLNAIRNKIIHRVYALIKNNSVYENKLHMS

SEQ ID NO: 481381 - protein, 370 aa, unidentified
MSESSTIFVGLDQHKESITVSYVGADRSLEPICLGPIGTRTSDVDAMVRKLQSKGKKLVFAYEAGPCGYGLYRHLTRKGHTCLVVAPAKIPRKPGDRVKNDKRDATNLCRLLRSNDLKCVYVPQIADEAIRDLCRAREDAVSDLKSAKHRIKSFLLRHDIRFNGKADWKTPHLRWLGEVKCESSAQQVVFQEYVRAMAQGFERVGRLEIELTQHVKSWRLSPVVEALQALRGVRFTVAVTAIAELGDLTRFEKPRQLMAFLGLHPSEHSTGERRRLGGITKTGNTHARRALVEGAWAYRFPARVSKQIQARQENLPEAVRDIAWRAQVRLCKRFQKMIARGKNANIVVTAIARELAAFMWAIAKQVPVVA

SEQ ID NO: 481382 - protein, 345 aa, unidentified
MTEAYDGRQVVGMDLHRRRSVLVRMTMDGRKLETVRITSSPAALRAVLARCGQNPLVVLEATYGWYWAADVLEEAGAEVRLAHPLGVKAFSYRRVKNDERDAADLADLLRMGRLPEAWIAPPPVRALREVIRYRHKLVGQRTSCKDQVHAVLAKLGVPVTHSDIFGTGGGLWLGQLVLPQPYAAKVASLRALIAVLDGQITRLADQAAQMLAADPGYAAVRELDGIGPVLGAVICAEIGDVTRFGRAGQLCSWAGLTPRHRESDTKVIRGHVSKQGSRILRWALIEAVQHQPEGTRPRQAKDAILARRGPAARNIAKTAAARVLLTQVFYALRDGHARSARHPAA

SEQ ID NO: 481383 - protein, 385 aa, unidentified
MPKPNDLSRSFTAFEQDSTLIAVIEMSLTSWLIAGILPGIERHPLKKLNVDEEGLLQLLHRWREEAINAGREISRIVLAFEAGRDGFWLARWLRARNIEAYVIHPNSVAVSREHRRAKTDRLDTELLKRAFLGWLRGESDHCSMAAIPTLEEEDARRPNRERENLLGERTRIVNRMKACLVRFGVRNFKPTLRKAPERLKTLRTPEGGPLPPNSFAELRRDMARLRFVMDQIREIEEARLQRLEHSPNEGLHPMVRLLARVIGVGIETADMLVHEILSRNLRDQRAVARYAGLTGSADESGKRRREKGLARAGNARVRRGMIQLAWRFLMFQKESALVQWYRSVTNEVRGARKIMIVALARKLLIALWRLVRTGEVPQGVALRTA

SEQ ID NO: 481384 - protein, 428 aa, unidentified
MLDRVAAIDVHKKMLAVVVADVAGEGEYQFERRKFGTTPEQLELLTRWLIQEEVEEVVMESTAEYWRPVWGALEQHWKPERQKREGATKMSGALHLCQAKSNRGRRGRKSDYADGERMVKRLVAQELVLSFVPDPEQRLWRTVTRRKYQLTRDKVRFQNQLESLLEQAYIKLSSLVSDLLGLSARRMLQALAEGETDPAALAALADHRLRATPAQLRDALGACAHLHPVYRRLLKMALEELKLLEDQIAKLDGEAAELLQGHQDALQRLAEVPGLGVSSAVQIIAEIGPEVAAFESAKELSSWVGVCPGSNETAGEAHSTTSPKGNQNMRRLLNQAAQAAVKVKGSIFEITFRKFLSSGMKYKEAIWAIAHRLCRLIWLLLRRKTHYEERGPAVSAKSKRTRTARMIKELRKLGYRVEGGAIPAGIPA

SEQ ID NO: 481385 - protein, 457 aa, unidentified
MRKKNKRTPGVEEAHPFSGMSRIHAYAAGVDIGAIEIVACVAGDENTQIVKAFGNYTVDLQALAQWMKSYRIKTVAMESTGVYWIPLFEELERQGFECLLISSRSLRRVAGRKSDISDAQWIQTLHTYGLLEGSFRPQGELVALRTLLRHRSQLVEHRSPHIQHMQKALLQMNVQLSQAVTDVTGMTGQKIIRAILAGEREPQALAALREAGCKKSAEEIGKALTGTWREEHLFVLKQSVLLYDFYTEQIQSCDEEIEHLYGLTRPDWEAGDVEPFTRRKKNSRSKNLPQHPEEIRKHLKRISGVDLSVVDGFGVSLAQTVIMEVGTDMSKFPDEKHFCSWLGLAPKHEISGGKVLKNNTLKTRNRAGQAFRMAAQSVKQAECMFGVFYRRLRARLGPAQATVATAHAIARVVYRMLKYKVEYDPLTLNEYQKQYEEQQIKYMRKKAAKFGFQLVPT

SEQ ID NO: 481386 - protein, 352 aa, unidentified
MVWVGLDLHKRYITACAVDDDGQVVAEHRRLPADAPTLVAWLTALSGAVTVAMEATLYWAWLHDQLSAAGIAAVAAHPYQVKLIWQARCKTDPIDARKLADLLRVHLLPTVWVPDAEIRARRKLLRGRAYLVRLRTSVKNRIHGQLTAENCRTTVTDLYGRAGRAWLATVPLSPMGRLQVDLLLELVDALGERIGRLDERVKRLAQADPHARLLQTWPGIGLFGAALLLAEIGTIDRFHSSHALAAYAGLTPSTQSSGDKTRHGSVGRAGSPWLKWILIEIVQSLKLAPGPVGAHYQKLLRSKGKAKATVAAARKLCCYLYWCLQVEWSYDQWLRQHERLEVRPVQPLGSAA

SEQ ID NO: 481387 - protein, 353 aa, unidentified
MKPKTESDTALPMVIGVDIGKEVFHLVGFGGDGKIVFRRKIKRLGFAAVFEKVPPCIVGMEACLSAHFVSRTLRALGHEPRIIPAIYVKPFVKGQKNDYNDAEAIAEAALRPNLRFVQEKSQDQLDLQACHRVRARLVSRRTATINQIRAFLIEQGIAVRSGPRALRTSLCAILENRKDEISPRMARLILDLYKDWCHLDERIDTVTGEIEELSRVEAKCQRLMTVPGIGPVISTGLVAAIGSGEAFERGRDFGAWLGLVPRQYSTGGRSVLGRISKRGSKYLRTLLIQAAKVLLMRPRNWPRYSFGAWLKTASERLHRNKLAVALANKLARIAWSVLRHDKAFDTHLETAAI

SEQ ID NO: 481388 - protein, 348 aa, unidentified
MRFYTQQHKHYCGIDLHARSMYICILDQEGNTLLHKNFKTNPESFLRAIQPYREDIVVAVECLFVWYWLADLCNRESISFVLGHALYMKAIHGGKSKNDKIDSQKIAALLRGGNLPTAYVYPEAMRSTRDLLRRRNHLVHKRTELLAHIQNTNSQYNLPVFEKKISYKANRVGISRHFPDPAVQKSIEVNLQLMELYDRLINDLELYIIKQAKEHDVRSFYLLRSLPGIGKILSLVILYEIQDINRFDRVQDFVSYCRLVKCPRESGGKKFGSKNSKIGNVHLKWAFSEAACLFLRGNEQAQSCHDRLVSKHGKGKALSILAHKIGRAVYFMLKRKEPFNMDTFFARA

SEQ ID NO: 481389 - protein, 408 aa, unidentified
MELTAMFKRVIALDVHQAKITACAIVEHEDGRQEMTKLDFGAFKRDRRALAQWALQIRPEVVVMESTGVYWKSPFAALEAVGIIAWVVNARHVKAVPGRKTDMADAQWLATLARAGLLRGSFIPPVDLRQLRLVARQRQKLVGMLSAEKNRLHKVLVDAGIRINVLVSDVHGQSARAMVKALIKGQPVHEILDLKGRLGASREELFEALSTEQFSATHAFVADAIMQHIEYIEQRIACMDHHLLAGLQAWQPQLNLLQTIPGVDQIGAAMLLVEISADMSVFGSAERLASWVGICPGNNESAGKRKTGRIRKGNAWVRRLLCEFAQAAARTQCALKAKFDSLAIRKGRTKAVIALADKMLRTIYAMLSSGTHYEDRTVDYEAMSVAKNAPRWIKMLKKHGFIGQTATA

SEQ ID NO: 481390 - protein, 408 aa, unidentified
MKRYYIGVDWGDRLHQVYVGDDQGKKVREMKVPESVEGLAEIGRWLDEQRAESFELWAAIEKPAGRIVDFLLDHGVEVYPVNPKAVDRVRDRYRMSGSKSDAFDAYVLAEFLRTDQAHLKVLRPSSEKAQELKMLSRDQRRVVRHKTRLLNQLTTTLKEYYPRSLDAFENIETEVALDFLTRYPTPAHLSALKRKEFNRFATQQHSVNKQRCEELWEKLQKPQLAVPEHVVRAKAQLVEVLIDQLRASIKAVKTYHHKVESFFASSPAAQLATTLPGGKSGTLVAAIWAELGDAAGRWESAGHLQAEAGAVPVTKASGKSHVVLFRFACNKHLRYSMYWFSFVSINNSEWAKLYYRGQRDKGHNHSQALRALGAKWLKIIFVMWRDHKPYDEQFHLANIALQKMRQAA

SEQ ID NO: 481391 - protein, 343 aa, unidentified
MNITTIGLDLAKSVFQVHGVDATGQAVVRKSLRRSQMLPFFARLPPCLVGMEACGTSHYWARELIKLGHEVRLMPPAYVKPYVKRGKTDAADAEAVCEAVMRPTMRFVPVKSPEQQAALSMHRTRDLLVKQRTQLVNMIRGLLAEFGIDIPKGLERALLKARQIVDGEAPDVPIEAAKIVVTLSQQALEIHVRLRAIDRDLLVWQRGNDVARRLMTIPGIGPVGATALAASVTDPHQFRSGRQFAAWLGLTPLQKSSGGKERLGRITKMGDKYLRKLLIVGMTSRVRRAKQNPTGDPRLADLLARKPTRVATVAMANKTARIIWAIMARGEIYRGGHQPALAA

SEQ ID NO: 481392 - protein, 439 aa, unidentified
MVAIRTLGVDVGIRAAHVATLCDERGDQVWSKRRFGNRRDELEALVGEIGECDELTVVMEPTRNAWVPVAAHFMAAGATVVLVPGERSADLRRYYAKHTKNDRLDSHVLARLPLLHPEGLHPIGGLGPAEPLRRAVRRRVKLVEWRLACRQRIDAMLDLLGPGYAEVLGGPRYGKTALEILERYGDPRRLRRLGPNRLAALMRRVSGGHWGTDEATALIDAAGEAVALWEHGGLDFDELAWDLASEARLVRRLDDEIGRLETRIDELYAKADPAGIVISTPGVGPVLAGGILGRLGDANRFTDLAAVRSFSGMIPKVNQTGHTETRPGITKQGDPGLRRDIWFAADVARQTDPQLAAKYHRLIVERRLHHYSAICHLATTLLTRIAACWRRDERYVIRDIDGRRITAAEGKAIVNARYRIPPEIRNRARIPQQTSGSAQ

SEQ ID NO: 481393 - protein, 348 aa, unidentified
MRFYTKQHKFSCGIDLHARTMYLCILDQEGKIILHRDIKTDPDIFLKSIAPYREDIVVAVECIFTWYWLADLCNKEDIPFVLGHALYMKAIHDGKAKNDKIDAYKIAALLRGGMMPMAYVYPSDMRSTRDLLRRRTHLARKRAELIAHIQNTNHQYNFADMGRISRKCDRIKAGVADRFTDPSVQKNIELDISLIEHYDKLLNHLEHELSLIAKVHDADSYFRLRSIPGVGRVLGLTILYEIHDISRFPSVQDFVSYCRLVKSAKESAGKIIGSSGKKIGNAHLKWAFSEAAVLFLRRNPEAMKYRAKLERKHGKAKSLTILAHKLARAVYHILKRKEVFHPKVFFAK

SEQ ID NO: 481394 - protein, 313 aa, unidentified
MKKTICGVDVSKAKLDAAIEPGGAFASFDNDTAGIAKLAAFCRQNGVSLVVMEASGGYERRAFVELWQAGLACALVNPRNVRRYAEAMGCLEKTDRIDAAVIARFAIAKDLAPTPLPSLAQQRLKALDARLKQVTGDLTVQKQRRASLLDNPEMLASIDEVIALLKRQSRSLEGEIASMIDDDPLWALLAQSWRSIKGVAGRTVARLHAQLPEIGTYSNKAIAKLVGVAPLADDSGKHKGKRRIQGGRAEVRSILFIVARTAALYDKSLADFRDRLAAAGKEKMVIRIALARKLLVRLNAKARDARAAYANAT

SEQ ID NO: 481395 - protein, 372 aa, unidentified
MDQHSRLFIGLDVSKLKISVAVADGERGGEVRFLGDIPSDPASVSSLVHKLAKRGAKLHFCYEAGPTGYELYRQLTEMGHDCVVVAPALIPKRPGDRVKTNRRDAVSLARLHRAGELTAVWVPDRGHEAMRDLVRAREAAQEAQKRARQQLQSFLLRHGRVYSGRSSWSLAHTRWISTLTFEHPAHFIVLKEYCQAIEDAEVRLKRLTDLISETVKSWTMAPVVEAYQALRGVSLMAAVVLVAEIGDIRRFDNPRQLMAFLGLVPSESSTGEHVKRGGITKAGNSRARRMLVEGAWAYRFPARVSRTKQAQLEGLPRSVREIAWKGQLRLCSRYRTMILSGKHKAIAITAIAREMSAFLWAIGQEVQPAHHA

SEQ ID NO: 481396 - protein, 382 aa, unidentified
MPAYADPAPKPISADTIFLAFELSGTSWLVALHAPDADKVERHRLSAGVAAEVLGLIARTKARVTRRLGTTPRVACCYEAGRDGFWLHRVLEAEGIASHVMDPTSLQVDRRARRAKTDRLDAQALLRALMAWSRGERQVCSMVRPPSPEHEDERRLSRERGTLLKERLRLSNRIKGLCAAQGIYDYEPLGADRRERLARLVTGDGRALPGRLAAEIGWQLDCLELVLRHLAEIEAVRDARAAQAREEGGSKLAALLRLKGIGPELATVLELEVFHRHFANRRDVAAYAGLAPSPYASGGTSREQGISKAGNRRARKALIELAWLWLRHQPESALARWYRDRVGTASGRVKRIAIVALARKLLVAIWRYVETGLVPAEATVRT

SEQ ID NO: 481397 - protein, 347 aa, unidentified
MKILALDLGKFKSVACVYETTSARHRFERTTTTAKALHDLLVEHEPERVVIEICSIAGWVSDLVRLLGIELQVTSTMHEAWRWRQVKRKNDRADALKLAQLSALNQLRLVHVPERETRQWRALINYRHRLIRQRTSSKNHIRDVLNREGLWLARGSAAWTSKGLEQLLDLARPLAEVGVGELWRGELAVELLNLQTLEQQLRQVETKLDELGGAAAGVRLLQTIPGVGPRLAEALVALIDKPQRFQRGKEVGAYLGLTPKQIQSGESNRLGRITHAGSRVVRALLVEVSWVGLRYNSWMRGVYERTRRNSKTRKKIAIVAVARRLLIRCWAMLRDGTAWQPEYRAIR

SEQ ID NO: 481398 - protein, 346 aa, unidentified
MMIIGCDIHPSWQQVSWLDTETGECGAQKLVHATGDAKVFYQQLTAPALIGMEATGNSQWFIELVQDLGHEIWIGDAAQIRASYVRKQKTDKRDAAHILKLVVEGRFPKLWTPDREQRDLRQLVLHRHKLVEIRSRVKNELQHLSLNKGMQRKRKLWSEAGQKLLRELPLKPWAACRREDLLGLLAMLNEQVGKLDQAVQQAAEEDPQARLLMTQPGVGPNTALAFVLTIGDVSRFGRGKQIASYLGLIPREESSGGRQKLGAITKQGNRLLRSLLVEAAQIAVRDDPDFRKQYVHRCHQKPKGVAKVAAARKLAVRLYWMLRTEKPYPEIVGIESSSRVPLVGAS

SEQ ID NO: 481399 - protein, 384 aa, unidentified
MPADSLPDQPAIRIDLGAIFVSLELSRATWLITSLSPGSQKMSKHRVHGGDVAGLLARFADFRGKAQARAGQLFPLIVIQEAGLDGFWIHRVLQSEGIESYVVDPASIATSRRRRRAKTDKIDGEALIRALLAYKRGEPRVCAMVTAPSCREEDERRICRERSVLIAERVAHVNRIKGLLFAQGISDYEPMHRRRRPRLDELKTGDGRPLPPQLKAQVSRELDRLELLLQQLEAVEAERDALLASTEHVDKPVPRALLLRLKGIGPDFANVLWSEGLYRSFANRRQVAAYAGLAPTPWQSGTIDREQGVSNAGNPRLRTTMIQLAWLWLRHQPGSALSRWFHERIERGRGRRKTIIVALARKLLVALWRYVTAGVVVEGATMKA

SEQ ID NO: 481400 - protein, 454 aa, unidentified
MSKSARQGNEIMSLDVVHPDAAGIDIGNAAHYVAVPPDRDAEPVRTFECFTADLHTMADWLDQCGIVTVAMQSTGVYWLPVYEILVQRGFEVFLVNARHTKNLPGRKSDVQECQWLMKLHTYGLLNNSFRPTEEICVLRTYWRQRDDHVKSASASIQRMQKVLTEMNVQIANVITDISGVTGMAILNAILGGERDRYKLAELADPRVKASQEEIAKSLEGNWRPELLFVLRQQMQTYGAYQKRIEECDEAIEAHLMTMDDKAEPGSQPQTPKAGKKAGGNAPQFNLRGELYRISGIDLTRIDGINVMIAQTILAEVGLDMSKWPTEGNFASWLGLSPNNKITGGKVYHRGSRHVENRAATALRMAVTSLWRSKTYLGAKFKRLRANLGAPKAITAMAHALARLVYRMLRYGQDYVDKGMEFYQQRYQQQQINWMQKKAKDLHLLITLAPAPAAN

SEQ ID NO: 481401 - protein, 366 aa, unidentified
MNPIYIGVDFHSRQQTICYLKTETGELVITELKHQDKERVRAFYQQFLGHVIVGLEASGYSPWFEAMLEELRCEVWLGDATEIRRRARWRYKDDRRDAELIRDLMVHHEFPRLHQPTPQSRDILRMLRYRQKLIKVRTMTKNSLQAIAMQAGLAKGRRLFTIAGQAEFKAVAMSPVLQYQRDHWLELLKPLNQELLETMKWFKAAAKGDAAIARLRTHPGIGLLTALCFLHTLQPVSRFRNQRKVVAYGGFDPMVRRSADLSIHLGISKAGSRMLRYLTVEAVHTAIRHDEDLKRFYKRVAARRGRPKAKVAAARKLLIRAYIMMRDEIDYAEFNRRAVAARLARNSQGTPCVPEVLIGQSASPGA

SEQ ID NO: 481402 - protein, 387 aa, unidentified
MPQPNDLSRSLVALDQNSTIIAVVELSHSSWLVGGVVPGIERQPRKKLEPSPERLLALLHRWRDEAVRTGRTITRIALAFEAGRDGFWLARWLAARGVEAHVIHASSLAVSREHRRAKTDRLDTELLKRGFLGWLRGERGHCSMARVPTIAEEDAKRPNRERDCLVGERTRIVNRIKSTLVRLGISNFKPTLRKAAERLATVHTPEGMPLPPNTLAELQRDTARLGLVVSQIREIEETRQKRLEQQPETGSHAMVRLLSRIVGVGVETADMLVHEVLSRPMRDRRAVARYAGLTGSPDESGARRREQGLARAGNARVRRGMIQLAWRFLMFQKESALALWYRARTADSRSGTRKTMIVALARKLVIALWRFVTTGEPLEGVVLRPAS

SEQ ID NO: 481403 - protein, 430 aa, unidentified
MKSNTQNAKIEAITEKTLVLGIDVGSETHYARAFDYRGIEYSKKPFKFSNTEAGFVTFKEWILDIKERHEKDKVVLGMEPTGHYWFNLGKFLQDNEMKPVLVNPHHVKKSKELDDNNPTKNDRKDPKVIAGLVREGRYMIPYLPDGVYADLRTASNIRFQLQAELTRIQNRISRWFNIYFPEYKTVYGKPDAKSGILILKAAPLPEDILTLGIDGVNQIWRDAKLRAVGKARAKTLIEAAEHSVGSKEGAVSARMEIRMLLEDYESRNIRLQEVMTLIEGLVKQIPMAEKLLEIKGVGIRTVSGFLAEVGDISRFNNPKELQKLAGLALVENSSGKHKGETTISRRGRKRLRYLLFEVAMSLVAKNPEFRELHNYYTTRRLNPLKKMQSLMAIAAKLIRVFYVMLTKGVNYDPKKMVNDIKRPAVYLQTA

SEQ ID NO: 481404 - protein, 455 aa, unidentified
MCVAIDYAKKDHVAMFCNGNGDILRKPFSVKNSPDGIKHLIEQVTRSCRHKKINPQHVFFGGEDVNSYAENFVNTLQSKGWLVVGVNAHDAKLQRANLQASTDRLDLMGIATMLINKRANCYLSPSGIYRNLRTLVRHRRKLVVMSTEVRNQMHAIVDRLFPGFLDRRKSGIVPFTQSSLYLMQDRFSAHQIRRRRQQKLIEILKRFGTQHPNATAVKLQQYAATVLKTPDDHISTLQLSLSQHVKHLKCLQDTIGQLEKEIALCLAQTQGAFLTSIGGIGIVLAAGVTAEIGNPVEQKPINNLISYAGIIPRVKQSGGPEGRTYTGSVAKRCNRILKDYVVRSAFHIGFYGPADLMADYKRRDASGQHADFGMGRRFLRMAMCLMRNSQIYTPVELRKAGVCIKDKAAYYLTLWPYVRGKWKKVNALLECFAKDRPLGQWRERVQRHYDIELKL

SEQ ID NO: 481405 - protein, 385 aa, unidentified
MAGALPQTWGTSPMNNTIFVGLDVHKERIAVAVAEGRRGGEVLHLGNFLNRPDHIKKLVERLARGNRILSFCYEAGPCGYGLYRQLVALGHDCLVAAPSLIPVKAGDRVKTDRRDAVMLAKLHRAGELTAVWVPDDAHEAMRDLIRARATAVRVLGKARQHLQGFLLRHGRIYAGKKGWTQAYRRWLTTVRFDHAAQQVVLQDYIHAVADAEARVERLLRQIEDLAQVWSQAPLVAALQAMRGVAFIVAVTLVAEVGDFARFANPRQLMAYLGLVPAEHSSGRAVRRAGITKAGNALARRALIEGAWTYRMQPRVSRKLHDRVEALPQVVRDIAWTAQVRLCSRYRRLAAAGKPKVVVTTAVAREMLGFVWAIARSVQVAPLRTL

SEQ ID NO: 481406 - protein, 305 aa, unidentified
MKQTSIQHFIGIDIAKQTLDVAVILSANKENIVQTTVDNTPRGFQRLVRWLSSLGGFTLDDAVFCMEHTGIYGRAIAEYLFQHHGHVWLEMPIAILRSLGVQRGKNDKVDAQRIALYAYKNRDDIHEWQPPRPCITTLRDLLALRNRLVAAQQALVVPIQEFQHTGHRDAARQMKASCKTTIRALAHDIKCVEHQMHDIISNDAALHELFTLLTSVPGVGKCTAWYFLCFTNEFQLCRTAKQLACYCGVAPFEHTSGTSIRGKTRVSSMANKILKCHLHLGALSAIQHNAELRQYYLRKVAEGPS

SEQ ID NO: 481407 - protein, 347 aa, unidentified
MKKIVKQVLGIDVARKELVVCLARMHDDWTSELISHRTFINSEKGFEAMILWVKKLTIESIPVRYVMEATGVYHESLAYFLEEKGHAVSVVLPNKINSYFKSLDVKTVTDKTASDAIAQFGLERNLDNWRRPKEIFRDLKQLTRERDQTVDERTVAKNQLHAEETQAYPNKKSVSRIKARIKLLNKQIMEIKEEISALVKGEKDVSKSVDRICSIPGVGLLTAATVLGETNGFELIRNKRQLTSYAGFDVQEKQSGTSVKGKPRISKKGNKHLRKAMHLPALSAIRHEERFKAVFVRLVSKHGVKMKAAVAVQRKLLEMIYTIYKTNTLFDKEYLTKHNDLKQKEAA

SEQ ID NO: 481408 - protein, 357 aa, unidentified
MKIVGCDLHARQQSIAMMDSETGEFVEKTLLHKGSAVRDFYAALEGPVVVGIEATGSMQWFLELLEELGIECRVGHPAKIRAAETRKQKHDRRDARLVLDLLVRDRFPEIWMPSTEQRDLRTLLRDRHQWVKMRSRLQHTLQAIALNHGLRQGSRLWSQAGQTALQALPLPAYSSQRRAELLSLYIQLQKRIQKLDQEVEAQVQQRAQARRLLTHPGVGPVTALASEVFLGDPTRFANGNKVGSYIGMIPCEHTSGKRQRLGKMTKQGNALLRYLWTEAAMHAVGKDPELKRFYRRKLIQKGMGKARIAAARKLGIRLWIMMRDQIDYQEFCRRGKLRQSGEAHAGMPDFNSGPALQ

SEQ ID NO: 481409 - protein, 355 aa, unidentified
MIVIGVDPHKQTHTAAVVDAAVGELLGERTVKARRVGHEQLLAWGRGYGEERLWALEDCRHVSVSLERFLLASGERVVRVPPKLMAGARRSARERGKSDAIDALAVARAALREPALPSARLEGPEREIRLLLDHRDDLVGERTRAQQRLRWHLHELQPELELPAGCLDRRCWLDRVGRRLARAEQTAQVRIARELVRRIAELTRRANELERELAALVRTQAPALLELPGCGVLTAAKLVGESAGADRFRGDAQLAMHAGAAPLPASSGNSNRHRLNRSGNRQLNCALHRIAVTQGQHHPPARAYLARKQAEGKSRKEALRCLKRHLARSVYRTLTAPTEEKMKPPNQAALTPALT

SEQ ID NO: 481410 - protein, 376 aa, unidentified
MKRVYIGLDVHKDSVSIAWALAGTEEPKSYGKAPADLDSFLRVLRRILKKHQWSKEDVALCYEAGPTGFVLARRLLHLKFDIIVVAPSKTPKRSGERVRTDRRDARKLARYLRAGELTPVHIPDVADEVIRDVCRARTDAVDDQTRSRFRLGSFLLRNGYHYTGKSRWGTVHMSYLRELVLPDPAQKIVLEEYLQRIDVCVEQVERLEHQMRQLLLTWERRLFVEALQGFRGFQLVASMTLTSELGDLTRFDHPRKLMAYLGLVPGEDSSGTRRRQGPITKCGNSHARWMLVEVARSYRLPPKVSMHLSKRQDGLSREIRALSWKAQERLHRRYMRLHRRGLHYNKIVVAIARELVGFIWELAQLMEQPARTEEAA

SEQ ID NO: 481411 - protein, 352 aa, unidentified
MILVGCDLHSRKQQVAALDTDTGEVLEQELAHTGDAVEQFYRALPRPVTVGIETTGYTLWFHALMQQLGHTLLIGEAAKIRAMVVRKTKTDRRDARHLLGLLKDDRFPSVWIPDPATRDLRALVTHRARLVRMRTMVKNSLPAIALNARVALGPSLWTQRGLAQLQALPLPLHAARRRAESLELLTWLTTRIDGLDARIAEAAAVDPGAQLLLTHPGVGPLTALSTVLVLGPVTRFPSSKHVVSYVGLAPAVDASADKYRLGKITKQGNALLRWVLGQAAPLAARADAELKRRYLAVLRRRGRPKAKVALARTLLVRLYIMLRDQIDYEEFRRRGHARRPGRDLATATGSTP

SEQ ID NO: 481412 - protein, 418 aa, unidentified
MKSNKTEKNKTINQKTLIVALDIGKKVHYGYFRTPKNKDIKPFPIYNTGQSFNKFWKKLYRFKEEHMLDEVVIGFESTGPYAEPITNYLRKKPVNLVQVNPMHTKRVKDLTGNSPNKTDKKDPRVIADVISLGHSLTVVMPEGAAAQLRRLTHARKRSIEHRTAMNNQLQHLVFVIFPELMSIIKPSTKTGMYLIKNLPYPESIVSIGIGTLCNIVRKISRGRFGIERAEKLYNAAKQSVGITEGKESVILETSHLVSNIESENRYIKNLEEQMVEQLEQIPYSHSILSVKGIGHVTVAGLIGEVGDFNKFNTISEITKLAGLDLYEISSGQFKGQRRISKRGRPMMRKLLFFAAINMVKSNGIMHEKYKQMLDRGMLKMKALIAIARKVLGLIFAIVRDNTTYIVNYTKQNHYKLAA

SEQ ID NO: 481413 - protein, 304 aa, unidentified
MNGIGIDVSKRQLDVGTTDGETLQVYNNRSGFSELDVWLKKRPVSQIVLEATGGYERPVLDFLHAVGHPVVRANALRARRLAQGMGQMAKTDRLDAYALAQMAALVKLPAYQPLEPWQQKMREFVRARRQAMHALTIARQQLEMVGDRELRRLLQANITRLQTLVERLGKQIAEQVTQQPQLAVLKSMKGVGPGLQAVLASYLPELGKISGKAIASLVGVAPMSHDSGTMRGKRSIHGGRAEIRQVLYMASMSAMRHEPQLRDFYQSLRARGKEGKVAIVAVMRKMLVILNARVRDAENGLVPA

SEQ ID NO: 481414 - protein, 344 aa, unidentified
MNITAVGFDLAKSVFQVHGVDQEGRASVKKQLKRAQVAVFFANLPPCLVGMEACSSAHYWARKFQALGHTVRLMAPQFVKPYVKTNKTDAADAEAICEAVNRPGMRFVPIKSIESQTLLALHRARQGFIKSRVAQTNQIRGLLAEFGIVVPQGARNIEARIPDVLEDAENGLPVNFRQLLLRLLEHSRQLRRQAEEVEAEIKRWHEHNDASRRVAEIPGIGALTASALVASIGDAKAFANGRQLAAWMGLVPRQYSSGGKPKLLGISKRGDKYLRGLMIHGARSVILRAKAKPGYAESWLGLLLARRHVNVAACALANHNARVAWALLAHKRHYRTAYTTAEAA

SEQ ID NO: 481415 - protein, 428 aa, unidentified
MDELDRNRLEEFRQLRQEVRHSEEYLIVGIDVAKDRHHAFFGTATGKTLLKRLAFSNDYEGFKKLLNHAEALRVRHDLKKVVYGMEPTSNYHKPLGEFLIHLGRTVVLVSGVTVKRNRESLDGRWDKHDAKDSANVADLISQGKCLYYEYPEARLSGLRGLVSLRRRLKKQEHGYKVRIRNHLIAQYYPEMDREWERLGGEGLSIMRWCFPPSEMTILDVEPFIERVTSGRVRMEKRRRLEAIWEKAGETIGCDGVPGVAHEARLMVEGLRQIREMIKETDDKIQELCHQFPEYPYLLTIPGFGPDVSSKVLGAIGDPDRFDNGKQVLKLAGLDLSADRSGKDSDKAIPQISKRGKADLRYALYQAGFIASTKNQGFMCYYTRKLRGREKERGIRTKMIVKLSAKMLLIAWTLMKKKEAFNPAYLNAE

SEQ ID NO: 481416 - protein, 404 aa, unidentified
MKGPIVSIDVSKGKSDYQAFKDLNVKYTGSRSIKHTKEGFDEIVNLVREMEKKLKTEVCVVYEATGVYHRVLKKVLEDNNIKQFIINPLLSAKTRKNDSLRCPKTDKLDPKSIAKTYYSHSLHNSHKQETIYHELRELSRYYEDVLVHIRKDKVAFRAQLDIVFPGYDALYDDLYGPVALAVIEKYPHPEMLQKKKINTVSKVIQSKTCHRQAVSDTMADKAIEYSKTIYSGCDKDDIEVLILQRLIKKLKEDMAEAERTIGEMIKLAQELPDFNIIRSVPGIGDNLAARIIAELGDMTRFKKKNELVAFAGLDPRISESGQNDGDHMHITKKGNKRLRCLLYLAVTCSIRLKRDDNSIKDFYIKKKQQSNPMCSKAAKTACASKLVRIIYSMCKTGELYQYNK

SEQ ID NO: 481417 - protein, 389 aa, unidentified
MQTTIMTTPRRIATAECGAIFVSLELSRSTWLVTALAAPVGTKMSRYQVQGGDMPGLLARFSDLQHNVRHRTGQPAPVIVIQEAGLDGFWIHRALIAEGIESHVVDPASIAVSRRHRRAKTDRIDGEALVRTLMAWKRGEPRVCSMVRAPTPEEEDRRRVCRELKTLIGERIRHVNRLKGLFFSQGIGGYEPRNKDRRERLEDLRTGDGHPLPKHLKALALRELDIIELLNRQIETVKTERDALLEEARTGGCAPEPVRMLLGLKGIGPGFAGALWSEGLFRQFANRRQVAAYAGLAPTPWNSGTINHEQGVSKAGNPRLRAIAVEMAWLWLRHQPDTALARWYHARVRRLGPRTRKVTIVALARKLLVALWKYVTAGVAIEGARMKAA

SEQ ID NO: 481418 - protein, 474 aa, unidentified
MEGEPHLPLQTSPIVSPDKGVVCGQGEHGIISLNDDHIVQGVFPMPPKKENTSTVSVVHHVCCGLDVHKDSISACLIWSDEKGREGFEIREYETFTDHLITLREWLFERTCPIVVMESTGPYWTPVHNILENHFTVVLVNPKYIKNVPGRKTDISDSRWLAGLLRHGLLKGSFIPPKFQRQWRDLTRMRRNYVKSLGDFKRRVHKLLQSANLKIDSVVSNLFGLTGRNLLKLLAESESDLTLAQVDACLNGSLREKAKELHRSVRGYFEEHHRDLLRLLLETIDALENQIRLLDHRIEHIMSEQREILDRLKEIPGVSDTSAHAILSEIGPTLDTFENSAALASWAGLCPGNNQSAGKRRTGRSRVTKNHLKETMIEVAWPAIKKRGSYFRAKYYALRARLGPKKAIVAVAHRLLKAIYHVIKDGAPFRDLGEGYLLNLNKQSKLKYLRKQAALLGFELTPVDAPMPNAPVFTQ

SEQ ID NO: 481419 - protein, 457 aa, unidentified
MTVNASPTRTTAGPGVVRVSVGIDAAITAKHHVSVRETNADGSVSMHRFVVPPTLTGLSQLSRRLARYPGVVAVAEPTSMTWLPLALSLSSGGGRLALVGTRHSARLRGAISGKNKSDVIDADVLARADEVFDLPRLVLPSPAELALRRAVTRRASAVIDANRCWRRLVSLARWAFPDVWTAFAGSLATAKAVLGRWPQLDQLACARRASLTAVVAEHTRSVADVPDRVEQIRSAARDWAQFWAGRLDLDALAWEVSEHLTDLAAGNDRVDRAAEQATMYWERLYGDDALLVSLPGMGPVTAPAVRAFLGDGSRFDTAKAVANYVGITPSNWSSGTVNQPSRAITKEGPAALRLAFYLAGNAARRTDPQLAALYHRLMTRAGHCHSQATIAVARKLAERTWTVLTRGTPYRLQDPDGAPITSRAAKVLIAQQFTVPNEVRERARAHTAATHRSKLTR

SEQ ID NO: 481420 - protein, 423 aa, unidentified
MEVIHERVAGLDVHKDSVVACVRIMSGGKAKRECRTFGTTTAELEALRDWITSWECTLVAMEATGVYWLPIWKILLGGAFEMNIANARHIKAVPGRKTDMNDAMWIADLAAYGLIRASFVPDEEFHELRTLTRTRKQLVRDQTSHVQRIQKTLTEANIRLDSVISDIMGVNGRRMIEAMIEGVRDPGKLAALGDRRLKATRKELHDALHGRLTEHHCFLLKLHLDQHDALEKTIRVIDAEVERRIARLDKQAKAVETPLSRLIELLVSIPGVSYLSAITIISEIGSNMSRFPTAGHLIAWAGLCPGQNESAGKRKRSRLRKGAPWLKTMLVQCAWAAKRQKNSYYRAQFYRLQARRGPQKAICAVAASILTAIYHILKDGVPHQDLGIDYFDKRKPEAKVKRLVAQIAKLGFEATLHPIAKAA

SEQ ID NO: 481421 - protein, 350 aa, unidentified
MKRILKQSVGIDVAQKELVVQLGRLYEDLSTEVYAHKCFPNTAKGINTLEQWVLRLTEPTVSIRYVMEATGVYHESLACYLTDHGYSVSIVFPNKISNYFRTLSVKTITDKLASEAITLFGLERNLEDWKRPKPVFKYLRQLTRERDQLVQERTMIKNQLHAEKAESDPNPSTLRRIKQRIDLLNKQEGIIKEEIETLLKREKELKAELALLRTIPGIGTLTAATILAETNGFELVRNKRQLASYAGFDVQEKQPGTSVKGKTRISKKGNKNLRKAMQLPALTAIRYDQRFKAIFARLVSKHGIKMKAAVAVQRKLLELSYTIFKSGVSYNKNYLQEEKLSAQKHHHQLA

SEQ ID NO: 481422 - protein, 343 aa, unidentified
MVSGVFGGVDTHADVHVAAAIDTNGGMLGIESFPTNEAGYRSLLSWLSGFGPVIRVGVEGTGSYGVGLARYLHGDGVVVVEVDRPNRQKRRRLGKSDPIDAEAAARAALSGEASVTPKRRDGAVEQIRVLMIARRSARMQRNQALNQLRQIVICAPDEIRVRFKDRYKTGLITEAAAMRPCKDSDPVTYTTYVVIRGLARRIRDLNDEMHTIDDALTELIAETAPSLLACYGVGTVTAATLLVTAGDNPDRLHTERSWAHLCGVAPVPAGSGKTSGRVRLSYGGNRHANAALYQIVLTRMSSDPETRNYVRRRRAEGLSTREIMRCLKRYVARQTFKHLPRAA

SEQ ID NO: 481423 - protein, 354 aa, unidentified
MKTPKRTSSFTGKDIYVGIDVHLRQWSVTIRTEHLTLRTFSMNPSPEELATHLQKNYPGAVYHSVYEAGFCGFWIHRALVRLGINNIVVNPADVPTTHKEKVQKRDKRDSRKLARGLAHGYLTPIYVLSEEAEALRALGRRLLQISKSQRRVKTRIKHLLHTQGIVLPSHSEISHWSANFIDWLRSQRFSSDNYHFYLDSLLEELAFLRQLRLKLYRQIRQQIKGNEVLKNLRTVPGIGFVIAFTFYTEIIDIYRFRILDELLSYLGLVPAVRASDEKEHILGLTSRGNKYLRHLLIEGAWVAIRFDPELTIAYEAQIKTKIHKKAIIRITKKLVSRMRYVWKNNQEYVIAVAE

SEQ ID NO: 481424 - protein, 336 aa, unidentified
MVYVGVDLHRKRSHVVALDTAGAPLLNRRIETDPGEFLRVFGELGHEPLEVAFEATYGWGWFADLLADAGITAHMSHPLATKAIASARVKNDAIDARTLAHLLRTNRLPEAWIAPPQAREARRVVRMRTSLVRIRSRLKCQVHALLAEHGVPVAMWDLFGKAGRQLLADLRLPPISQGRVEASLRLIDAISAEVEVADREIRSIFRADPRLARLTAIPRVGAVTAAVVIAEVWDVHRFPSADRLCSWAGLTPSERSSDAHTRRGHISKQGSRWLRWVMVEVAARPDIDPHFRALYDRIAARRGRKVARVALARRVLTLCYYALRDEGGCRAFPLAE

SEQ ID NO: 481425 - protein, 374 aa, unidentified
MKMSVGVDLHKSQFTVCFLAEDRNVLETGIYPTKEIGYEEFLNTCNEYTEKGYEVKAAVESTGNARYFRNRLLSAGIEVTVVNTLKFKVVNESVKKTDKHDARTFAEFLEKDMLPESRLCSQTSEDIRRVLKTRSITVKAIVGIKNQVHGLLLGYGIETKRGELQSKKERQRILVGLEDHRSLGGAAEAVKPLFDTLDKFSAQVKELEKVLEKMVAQDRDVEEDVALLRTIPGVGLITAATLRAFIDDIHRYESSKKFAAHMGLVPWVQNSNEMIHHGRITKRGPKEMRTAMVQCVLGMVRAKKTTGGYRIMTRYDRMKSQKGSGKSIIATARKLSTIIYMMLKNREPFDPLRMNHSQTYLNMQVAAFEATKTG

SEQ ID NO: 481426 - protein, 315 aa, unidentified
MSELVFVGIDVSKAQLDIAVRPQQRTWSVTYDEQGVTELVETLRQLGPQLIVLEPTGGYEGRVVAALALAGLPVVVVNARYIRHFAQAAGILAKTDRLDASVLAHYAAALRPMVRPLPDAQTREMAALLTRRRQLIDMRTAETNRQECTTARVRHEIDTHIAWLDKRLVALDKELTAAIKTSPLWREREDLLQSMPGVGPGLARTLILHLPELGQLDRWQVAALIGVAPLNRDSGTLRGRRGTWGGRASVRNVLFMAALSAIHYNPVIKSFYERLRKAGKRHKVAMVACMRRMLTILNTMVRNNTHWHAQPISMA

SEQ ID NO: 481427 - protein, 364 aa, unidentified
MLIIGCDYHPSVQQIAFVDTDTGELSERRLGHREQAEQFYRELKQRNLVVRVGMESSGHSRWFERLLRELQFELWIGDAAEIRTKRVRKQKTDRQDAQLLLQLMLENRFPRIWVPDAENRDLRQLLWHRHRLVQMRTRVMNQLQVVALNEGMRRKKALWRPAGRAELESIALAPWATRRRRDLLDLLDQLTPKIEELTRALEKEVEKRPVTRRLMTHPGVGPLTALAYELVIGTPERFHCGKQIASYLGLVPEERSSGERRRLGHISKQGNVLLRFLLVEAAQVTVRTHPQWRNKFFHLAMRRGRKIAKVAMARKLAVHLYWMWRQGCDYGSWQKLGSYVGEPGHPDGVQSITAVMIGHPAPGK

SEQ ID NO: 481428 - protein, 342 aa, unidentified
MLYVGIDVAKNKHDVTALNVPGKTVLKPLTFSNNKAGFELLDLSLRQLNQDCLIALEDTGHYAFNLLNFLHEQGYKVYTYTPLLIKEFAKSLSLRKTKTDKKDAHGIALKLLSDPNREQFQHDNRQVELKILARHIHRLKKKQSDWKVQYTRCLDIIFPELDKIVGKHSEYTYQLLTCYPNPQKRLEAGFDKLIEIKRLTASKIQDILSVAPRSIGTTSPAREFEIIENIKHYKRLIDKAETCVNDLMAEFNSVITTVTGIGNRLGAVILAEIRNIHAFDNPAQLQAFAGLDSSIYQSGQIDLAGRMVKRGSPHLRWALIQAAKACARFSPAFKAYLKTKLE

SEQ ID NO: 481429 - protein, 341 aa, unidentified
MEEVSIIGLDLAKNVFQVHGARPDGSVAFRRKLTRAKLLPFFASAPKCIVAMEACASAHHFGREIAALGHAVRLIPPIYVKPFVKRQKNDMADAEAIAEAASRPTMRFVAVKSAEQQAAAMIFKTRDLLVRQRTQTINALRGHLTEHGIIAPQGTAYLSRLAQVVEDAESSLPVPVVALCKLLIANIASLTEQIAALDRQIHAHARRSATASRLMTIPGVGAVCAMAMAALAPPPETFAKGRDFAAWLGLTPKQNSSGGKERLGRTSKMGQRDLRRLLILGATSVVRWAARKGAPKGSWLTRMLAKKPRLLTAVALANRMARVVWALMAKAEVYRTGAAAA

SEQ ID NO: 481430 - protein, 386 aa, unidentified
MQASTVDTPTAGHCGTIFIAIELSQKSWLVTLHSPDKDKISHHKLEGGDHAELLALIGRVRDRAARALGAVPAVVSCYEAGYDGFWLHRLLLAAGIANYVFDPASIAVDQRARRVKTDRIDGERMLRTLMAYLRGEPRVVRIVRVPSAEQEDARRASRERDRLVKEQTAHTTRIKALLRLLGMAVGNPRRRNWLSWLAAQRDWQGQAVPPRTMTELTHEHARLLLVRERLNALAKTPAQADPTPAVAQMTERSELLLRLKCLGPAFATTLTNEVFYKDFRNRREVGSYFGLTPSPWRSGGIDRDQGISKAGNPRARCAAIELAWLWLRHQPDSKLTLEYRKRTLDAGKRIKRVAIVALARKLVVALWRYLTTGLVPDGAVLKAVKV

SEQ ID NO: 481431 - protein, 352 aa, unidentified
MVYIAVDVGKRRCVTCVMGQDGSILDTDSYPNTFLDASHYAKQMLERYGECKAVVESTGNMCMKTYEAFESNGVEVKLANPVKTRAIAEARVKTDKLDSRILAHLLRADLIAECYVPSRDVRLSRALLSHRVNITREQTRIKNRIHSLLDKYDLECEYDDIFGAHGMRWLHTLRLNGHDHEILQSLIRQLIFLQGEEDEANSTIAKDASHNRYVPIIMSMTGFDYYSASVLAAYIADISRFPSPSHLVSWVGLCPSVYQTGESLYMGRMKGGSRKVKWIMIQAANTAIRSDPRMRAYYERKLRRHHHNVAVTHVANKMLRIIWHMLRENRLYNERKERLYESKLKRMTHAAQ

SEQ ID NO: 481432 - protein, 406 aa, unidentified
MEVIHERCCELDVHKKTVTACIITPKGKVIKTFGTMTGNILELLDWINVNRCTHVAMESTGVYWKPIYNLLELAGVDVMVVNAHHIKAVPGRKTDVKDAEWIADLLRHGLLKGSYIPSKPQRELRELVRYRKSLIEERTREVNRLQKVLEGCNIKLSSVVSNIMGVSGRSMIEAIINNIDDPQLIAKMAKGRLKSKTESLEKALHGLVGPHQRMILATQLRHIDFLDGEIQRLDREVEERLFPFEEELELLETIPGVGRRSAESILTEIGFDMDRFPSDGHISSWAGMAPGNNESAGKRKSGRAPKGNKYLRSTLVQCARAASHTKEAYLSAHFRRIAARRGSNRAAVAVGHSILVICYHILKKRQPYNDLGANYFDERKSASVLKNAVKRIEALGFKVIVEEKIA

SEQ ID NO: 481433 - protein, 318 aa, unidentified
MNSHYKTESTNPVRYVPLDVSKRRLDYGLEPGRSAAVANTEEGIAVLIGRLADYPQARVVCESTGGYERALLVALGQANIAVSRVHPGRVRAFARAEGLRAKTDKIDVELLRRYAVAMQPRVDVMPDREVEVLRDLLDHRRQLDEQRVLFGNRLETAGPTLRGLIEAQIAHLEQSLREMEIRIREHIRSHEVLRIKSERLQQLQGCGPVLAATLLAYLPELGLLEDKQISGLVGVAPHAHDSGETMRPRHAHGGRVAVRNVLYMAAVSATQHNPVLAAFYRRLIDQGKPAKVALGAVMRKMIVVLNRLLKDPNFTLGG

SEQ ID NO: 481434 - protein, 398 aa, unidentified
MTAAKYQSSKTVRTLYVAFELGWGKWKLAFGTGPADNPRLRAVDGRDRARVLGEIAAAKTKFGLPANAAVVCCYEAGRDGHWLHRFLSAQPGVTCHEVDSSSIEVNRRQRRAKSDRLDAAKLLSMLIRYESGDKNTWRVVHVPSPEAEAQRHLHRELEDWQDQRRQHSNRIKGLLATLGHDVQVDEDFPRQLEGLRDWCDSPAPEELKARLLRQYEGWQFADRMVRELETQRSQTIRAGSEPCQELVRQLLALKGIGAASAWLFVMEVFGWRKIKNRREVGSLAGLTPTPYASGSSSREQGISKAGNRRLRAMALEIAWCWVRYQPNSELTLWFLKRFGSGKRLRKIGIVAVARKLLVALWKYLEHGEIPKGAELVDWRKKQIPGRRQAPMAVARGAG

SEQ ID NO: 481435 - protein, 351 aa, unidentified
MLVIGCDYHPSAQYIAWIDTETGECGDRPLRHSDGEAEKFYRDRKAKGANVRVGIEATGHARWFERLLAELKFELWVGDPAQIKASRVRKQKNDRQDAEHILKLMMENRFPRVWVPGPENRDLRQLLWHRHRLVQMRTRIMNQLQAVAMNEGVRRKKALWSQSGREQLESFRLAPWATRRRQDLLQLLDQLTPSIAELTAAIEHQADESADAQRLMTHPGVGPITALAYVLIIGSTERFRCGKQIGSYLGLIPCEDSSAGRQRLGHISKQGNTLLRFLLVEAAQAAVRGDADWRRQFLHLAMRREPKIAKVAMARKLAVRLYWMWRKRWDYQQLLKFGSHVGQPVTGHGVK

SEQ ID NO: 481436 - protein, 424 aa, unidentified
MLERAQDDDVLVSHIAAFDIGKAELTCCVRVPDPQREGGRLQAVSTHSTMTRALLELLDELIGLGVTRVVMEATGDYWKGPFYLAEAVGLEVWVVNAKHVKHLPGRPKTDKLDAVWLCKVAERGMVRASFVPPPPIRVLRDLTRYRVDLAVQATAEKQRVEKLLEDAQIKLSVVASDIFGVSGRAMMAALVAGERDPARLAQMARSRLRAKIEQLEEAFHGGGRFDDHHAFLLSTMLARVDALQADIATLEQRIEQQIAPFAEAAARLQTTPGIGPVAAWTIIGEIGLDMTRFPTAAHLASWAGFAPLVKQSAGKNKGKNATGHGNPYLARTLGQVVLAVARTDTFLGDRYRRLVRRRGKRKAMVAVARSILTVIWNLLSDPHATFTDLGADFHDTRRGTQRAVRHHVERLQALGHTVTLGPAA

SEQ ID NO: 481437 - protein, 337 aa, unidentified
MNYSGIDLHSNNSVVSVIDETDRVVAEKRLPNDMARILAFLAPWRAELAGVVVESTYNWYWLVDGLQAAGFVVHLANTTAIKKYDGLKHSGDETDARYLAHLLRLGILPTGTILPAKHREVRDLARKRMQLVRSRTSHILAVANTTARQYGTRITSNQVKKLDQAAVDQLHLPDDVALAVRANVAVITTLSAQIAIVEKRLQEKVAPHADYALLTTVPGIGQTLATVILLETGTIERFASAGNFASYARCVDSQRMSNGKKKGEGNTRNGNPYLSWAFIEAANFAMHFSAEARQFYERKKARTNSVIARKALAHKLARACFHMLKERKPFDVTRCFA

SEQ ID NO: 481438 - protein, 497 aa, unidentified
MPTKANIYSDCNPQVLKLFEQAGHPARVLCVALDYAKAQHMALVCNGLGDLLKGAFAVDNTPAGATQLLQQVRQCAKQRRIPTQQVFFGGEDYPTFAENFLRHLRKEKFLVVRVNAWEAKQQRSNFQASSDELDLLGIARCCLNRRGQPVQDLPVAYANLRIATRDRNELVRLATATSNRIHTYVDRLFPGFLSADKSGLAPFCQASLDLMAERFSPAEVRRRPRGALGQWLARRAVEEPHAVAAQLKELARCALGPAPEQTALLQRTLAQLVGLYRGLEGSISGLDRELAYWLARTPGALLTSISGIGITLAAGWMAELGPPQQWRAVRRICSYAGVVTKTKQTGGPDKEPMPSYVQQRCNKRLKNVVLQAVEKVRQYGPEDLRRSAEELEANGSHTEFGMAKRLVRLAKYLVVTGTIYRPKTLLDPDTPKEKLVLYYQTAWDKLLLKWKGKSDLKDVFAPAHPLGQWRQMVKELYALELRLPQQRAASTPGASAP

SEQ ID NO: 481439 - protein, 361 aa, unidentified
MTRQQNSETGNHRIFLWFGLDVSKNSFTAAFHNGIDGKTIVKSGPEFTSNLAGVRQFLKWRDTILKKAQGEMALTDALVMEATGHYSTKLAKLLLKGNGNLRISICNACSVSHYLRSHKADKSDRQDAEFIARYGQDAQPKAWTPKASEVEVLRELLKQRQVYTNMRSELKNRADSLACPEVAAENRKMIKFLDERLKKLDEEIRKAAQAAAEMKEEISLMTTVPGVALLSAATIYAELGSLKQYTRNQLSAMSGGCPINRQSGVSLHSSRISRRGSAELRRILFLDSFQGIQQIPALAELHARLLTRPESSKMTARCACMRKQLMILRGIVVSGKPFDKTFKSISQAKHAEPAKKCEKSA

SEQ ID NO: 481440 - protein, 315 aa, unidentified
MNTLPEKTAAVHIGVDIAKATLQLHCQNQQTALANDAAGHADVVRRLQAVPGAHLVCEATGGYERALVAAVQAANLPVSVVNPAQVRHFALAQGRRAKNDPLDAAVLTAYGHAIQPAPTPVPEPVLAELRALVQWRDQLKEQLARLRLQTEHLTLRFARQQQAKLITHLKKQMASVEAELERILALAPKVQAQVQALIALDGVGRITALSVFAQMPELGRLNRGQTAALAGLAPWTRQSGPWEGQRHIGGGRAVVRRALYMSAVVLARKTETALGKFYARMRLAGKPAKVALTAIMRKLLIQMNQTLKDHALKTT

SEQ ID NO: 481441 - protein, 421 aa, unidentified
MKRADTRKVRGVKDDTLIVAIDVGMEMNRGYCTTPDGRSTKPFKFGNTREGLDTFWGMVIASKNRFKCNEVIVGYESTGPYGEPMVHSLMKKPVRVVQVNPMHTKRVKEINDNSPLKTDDKDPRVIADIIKLGRALSIVIPEGDAAYLRRLNNARERHVRERTALVNQLPQLVFLLFPEFKKVIKDIKCRTPLYLLKRYPTPEAIRVLETHVLGEEMRKQSRGKFREHHADMLINLARNTIGIREGAAGLSMDIRHVLVQLEMLRNLIAEIESEMEIALGRIPYSSKLLSIKGLGVVSVAGIIGEIGDFKKFGTQPEIMKLAGLDLYEISSGNMKGRRRISKRGRSLLRKILYYAAIQTIRKNGILHDYYTRLTERGMKRMMALVAVSRKLLGIIYAIVRDDREYTVNFESMKRQVIKKAA

SEQ ID NO: 481442 - protein, 389 aa, unidentified
MEARTVNNLPPAGTHDDAICCVLAIELSKKSWIVAVNTPLLDKISRHTLKPGDGKELLDLCERIRTRVARETKKRVEMVSCYEAGYDGFWLHRLLEAHDVRNHVIDPASLQVDRRARRAKTDRVDAERLLRSLMAYLRGEPKVWSVVRVPSVAEEDDRRLHRERGRLINERIQHVNRIKGLLAIHGIYDYQPLRRDRTQRLERLRTADGRTLPPRLEAEILRELQRLELVIGMIKTIEAERDAIASANTETERRGAKKVQHLAKIKSIGPEFATTLVGEVFYRSFDNRKQLASYVGLTPAHFQSGAMCRDQGISKAGNAKARTVMIELAWLWLRHQPDSPLSVWFRDRVGKLKGRIRRIAIVAVARKLLIALWRYLETGLVPEGAALKV

SEQ ID NO: 481443 - protein, 412 aa, unidentified
MFYVGIDIAKKFNVACIIDDKDNIIKKSFKFNNDEKGFNDFNTLLSSIKSDVSNFIIGMEATGLLFENLYLYLKDKGYNIILLNPYQTSKFREMNTMKKVKNDNIDAFMIASLIKSGRFSKAYVSEDVYASLRALHRHRASLKDELKKHKRQLSSLLSVVFPEMEQIIKDPFSVTALTLLEKYPTPKHYKYASPQRILKLFRNIKGNNFNLEKANKLLELAKSSIYSGNAYDERAYVIQSHIRAIRFLESEIALVENKMLELFNQFPTLTKEEEKEITDIIDNLRTIPGVSDKTLFTIMGECGNLDRFKNIDSFIGYLGLYPTLEQSGSITKYGKLAKRGSKLAKSALYKAAVAAIRHNDEMKKLYCDKVSQGRAKKEALIIVARKLAAIILAIYKHNTPYNPNRVFNQNVT
